United States Patent Application Publication US 2004/0123343 A1 - sequence listing, part 12

SEQ ID NO: 31711 - DNA, 315 bp, Oryza sativa
  Clone ID: PAT_MRT4530_35992C.1
atgcgggcccactggacagtgactcaagggagaggggagggggcgcctggcaaagcgggccccactggcagcggctcaaagggggagagaggggcgccggctggtggctcggcatggctcaagctggtcggccatggtgaggcggcggcgcacggtcggagcggcggtgcggccaaaggtggcggcgcacgtgggacggggagaaaaggagggggagggattcctcatcggcgaactcggaggccggagcggtggatgaaggcggcgatgacggcccgacgagcggaggggcggagggacggcggcgacacctag

SEQ ID NO: 31712 - DNA, 213 bp, Oryza sativa
  Clone ID: PAT_MRT4530_35993C.1
atgagagccgaggaggaactgagcgtgatcgcacaaggtgttggacgctggtcgtacatcgcgtgcaccgagcaggtggccagctacaggatggcagcggtgaagagggaaagggagcgccaccggtgcatcgtgccgtggacgcggcgatgctgggcctgcggcgtacccttggaaagtcgagaggagaggggacaagtatcatgggtttga

SEQ ID NO: 31713 - DNA, 181 bp, Oryza sativa
  Clone ID: PAT_MRT4530_35994C.1
gcccaccaatgaggcctctcaagtcagcaacgccaaccctaggcttctcactctcctcgaacgcgcgacgccgccgccagagtctccggctcgccgcacttcccgcctcgccgtcgccgtcgccgtcgccgtcgcccctcccgccgtcagctgcgaggacccgctccaccgagagagctaa

SEQ ID NO: 31714 - DNA, 153 bp, Oryza sativa
  Clone ID: PAT_MRT4530_35995C.1
atggcagcaggtggccgtggaagaggtgatgctgtttgtgatggtggtgaggcgcgggtcgttgggagtgaagtgatcctaggggtaaattttggagccacggatgactgccagcctgggccatatgattttgttgacattgcacgaggatag

SEQ ID NO: 31715 - DNA, 340 bp, Oryza sativa
  Clone ID: PAT_MRT4530_35996C.1
actttttggggggtaatttaaatgtgtaggggatatgtactttatttacatttgacaccttcaaaatcttattctatttcagtaaactgggtccagagatatactatatctgatacaagtatgttcatcaacatgcccactacacactgatcaactcttccttggatcttttgctctgtggcaaaacactcaaggcaaaagcttaccactgccgatatgcatctctctatactgaattatactaagctagagtggtaacttacacggctgctctatgctttatgccatactaaattctcttcaaatttaaaattctgtatctccaatcagaaaacaagaa

SEQ ID NO: 31716 - DNA, 269 bp, Oryza sativa
  unsure (1)..(269): unsure at all n locations
  Clone ID: PAT_MRT4530_35997C.1
gaaggctgcgggcaaggatgttaagacctgaagatacaacggggaggcttggtacagtactnagatatctctttcaggatacggacagtgtgaataactcaggaggcctgctgaatccaagtggcctcttgcgtagagtacggatgtttgtcccagagtctcaagtcacttctatgcatgacagccatgaagcgcttttccgtttgcgcactaatttgggatgaagagngaaaggttgatgaaggtatggtgcntctcaagtgtagagg

SEQ ID NO: 31717 - DNA, 1435 bp, Oryza sativa
  unsure (1)..(1435): unsure at all n locations
  Clone ID: PAT_MRT4530_35998C.1
tcatccttccgtcaccttgaacacataacaggtgctgaagggtttggtagcgacgatggggtcatgcagtgttgttgccactgcccactggtgaaggctttcaccatcgattgctgcggcatttgcttcaggagattcctcaacgtccatagaatcgacttctgtctcattagactccattggcacttcaaagaattctctcttttctgaatctgaagcagaccaattagataccgtggcaatttgtggtggtgtccaaggaactaaagccaagaagttgctgcacccaggagatttgtcctccagcccgtgaaagttcctttgcataaaagcctgattctttagactacgtatcaagtctggactgattatgattgaagggttcgaggtcccaggaccaatgcatgcagtgttatctactgacttgtataaaacaagtgccttgtcctcacttgatggatgagattccatggcacctcccagcatgtcttctataatgggcatgctaacaacactgtggatttcctctcctagcatctcatgtccaaatggcatggaaggacctggcgtctcttcttccataataggtggaagcccaatatccaatctgcggctcttggcggcggggccggagagggagaagtcggagaggccgtccaccacctggtccagctccttcctcttccccatgaaccccaccatcatccggcttcccccaagggaaatcaatcgtgctcgaatcccgcgggctcctcgcgagtcccgagctcgaatcgaggcgcggggatgctgggaatctgggactgggctgtggtgggattgccggccggcgggcggcggcgcggggagcggcgggtttcgcgggatcttggcagatggaagggacgggcgggcgatcaggtttttggggagcgcaaggcgcgactactcactgttcgtcaacatctacttcatcttcaccaacatgtcgaacactggagacaaggagaaggagactcccgtcaacaccaacggaggcaatactgcctcaaactccagcggaggaccattcttggggacaggggcggtcgtggtggaggaggtggatccggtggcgcggaggggcatggggatggatcgaggggtgcgcgcggtgacggtgactgtggatgggacggatccggtggtgggtctgagggtgggaggggcacgagcagagggcagcagctgtgacggtggagtggatggatccggcagcgggcaatgaaggagacgggcggacacggtggaggagatggatctggtggcagctgccatgacgacgacgacggccaggcctccagaaggttccggtggctcctacaaccccctcccctctcccagatctaataggaggcggtggtgcttgttcttcgttctctnaatgatgaggcgatccaatctaatccggtactct

SEQ ID NO: 31718 - DNA, 1180 bp, Oryza sativa
  Clone ID: PAT_MRT4530_35999C.1
tgccgaattcggcacccggcctgccggttcttccttccactcgcaaactctccaagaagaagttgcgagccaatccccgcttgcgatcccgacctggccacggatggtgggcggcggcggcggcggggaggcggcaatgtcgccgccttcgggcggcgggaagcgcgggagggatccggaggaggacgtgtacgtggacaacctccactcccacaagcgctacctcagcgagataatggcatccagtttgaatggattgtctgtcggagattcactggttgacaatatcatggagtcccctgcgaggtcggagaatacctcttatttcagggatgaaataatatcccaatactcaccaatgtctgaagattcagatgactaccggtgctacgacactcaattacccaatggaagtcaaaccgatgcaatggttagcccttcaactagtccaatgtcatccccacaccgattccagaaaccacaatctggtcttttatccgcaaacccgtaccctctgcccagctgctcactctcgtcggtcgtctgctctaatcctcgtcgtggctctgaaaatgaaggccggttcccatcttctccaaatgacatgtgccatggaggtgacctgaggaaaacagcactactgaggtcagtgcaaatgagggttcagggaccacatgcatatgaactgtcgttctgtggcagacaagaacaagaacatgcacacgaccatgaggatgaacatcagcatgaacatctagagggtttggaaggggcagaaagatcgtcatcacatagagaaacaatcagtgatggagtcagttaccagatgccggaaaacagctatgggcgaccagagcatgatatagattacattgaggattgcaccccgcatggttgtctgagtgacctcaagtttaagcaagaggacaaggactgtagtaaactaaccagcatggataagaataggtagcagagagatcacaccatatgccattttcctggaaattatttttgtgggagattatggctcatatgcttatgataattctgattgatgttcaatccactgtaacccctagtatgaacatgtgcttttcaagatcctgaaattgtaacctttgagtaaaattaacccctgaaactgcggtattttagcgcccaaaaaaaaaaaaaaaaaaaa

SEQ ID NO: 31719 - DNA, 939 bp, Oryza sativa
  Clone ID: PAT_MRT4530_3599C.1
atgccgttggctgccgtctcctccgctcctccgcatcctatggcaccctccccctccccatccctagcgcctccactcctgccacctcgtcgccagatccggccgcccccgtggtcaagggcgccagatgccgacgagctccgcagggaggaccggggggaggttatcaaggacctagagaatattgagaatgaagaagaagccaagaatgcgaagctggaggaaaaacggcatctcggctcattatctctagaatggtcagaggatgatggcaccaacagcagagaagattgttcaatcattcttgataaccttgagccaaattctattctgaagaacctaaagatttcaggttatgttggtgctaaaatcccatactggattgcaaaagcctcagtgaataatcttatcagcctagatttgggaggttgtaaaaattggaagaaactgccatctcttgcagaattcctactgctcaagcatcttcgattggacaaccttcagcttccttcagaattcctactgctcaaccaacttcgcgcgacggcggcggagacggcggcggcgggctcgatgcgcgacggcaaccttcagaattcctactgctcaagcatcttcgcgcgaccgcggcggcaggctcgatgcgcgacggccccggtggacggcggcggcgcgacaacctcgatgcgacggcggcgcgacggcctcgatgcgacggcggcacgatggcctcgatgggcggcggcgcgacaacctcgatgtgacggcagcgcgacgaccacgatgggcgacggcggcgcgacgatcttgatgggtgacggcggcgcgacggcctcgatgcgacgatggcacggcgcagacagccggcatggacgacctgatacagcagaaggaagagaggagagcttatttttgtttgcccgatcatacccctgttaa

SEQ ID NO: 31720 - DNA, 192 bp, Oryza sativa
  Clone ID: PAT_MRT4530_359C.1
atgcaggttcagagaagtgacacggagtggagctttcgccctgcacaagacgtcctctcaactgcagaagtgggcaacgagctgcagacgacatgtgcacagcaagagcaggctatgaacaccaagagaagctctccaactgaaggagctttcatggctagttccaattttggttctggttcatgtgtatag

SEQ ID NO: 31721 - DNA, 262 bp, Oryza sativa
  Clone ID: PAT_MRT4530_35C.1
gttgaagggcaagggagcttaagggacctttgtactacacaaaccacacaaatacacgattgatcaattttactgacactagcacgggttcataacattacacacactcattcttggatacactcatagtggccgcatcgaccagctgcttaattcatcgatatcacacaggaataattcaccaataatgaaggcacacacaaaccacactcatatggagtggcaatactggggactaataaaggttgagcactccccgagg

SEQ ID NO: 31722 - DNA, 483 bp, Oryza sativa
  Clone ID: PAT_MRT4530_36000C.1
atgacacggtgggagttggctcttgatgctcatcttggagcaggcggacaacgcaggcgcccctgcgggcgtgccagcattagaggaggtggcccctgctggtcttgtttgatttgctggtctgggattctagaccttgacaaatttgcaagagcactaaggcttcgatgcttcgatggctctgacttttgggattctaattggattgggcatcaaccgctcaactacctcacaccagcactctacaatcactccaaggggaagtacagatcagtccatgatgcactgcttggggagcaatggattcaggacatcagacatgacctcagcatggcactgctacatgacttcctcattgttttccgtctgttatgggaaaatgcaacggttctatcaaaggaaactgaagacaattatttagagatgaacgagcagcggcaaatattcagcgaaatcttcttatttggcgcaattcagcggtag

SEQ ID NO: 31723 - DNA, 387 bp, Oryza sativa
  Clone ID: PAT_MRT4530_36001C.1
atggcgcagctcccgttttcggtcgtcgagaatgccacgttgcgcaccttccttgccaaatgctccagggcagctagccgtagccgcgaagcaaaggatggcgctcctatccatggttttccaaagatctctgcggccgttatcaagacgaacgtggactgcgtaatctgcaggcaagggcggcgacggcaagcgggagccggagcggcggcggcggcgatggctgacgcggcagtccccatcgccatcgacctcgacctcggcgtatccgcatgcgtgatggcggcggtctccgaggatgcaatccacgaacccagcccggcaatccggccaacccccacaatgctccacgggcatcgctacatggccaaaggcgaggatcagtgg

SEQ ID NO: 31724 - DNA, 458 bp, Oryza sativa
  Clone ID: PAT_MRT4530_36002C.1
cgccaccaacgatctatcgatttttctacagctataggctatctatctttcttttttaggggcggcttagatgttgaccgtttgaagggcgcattggctttctaacccttacagattttttgcccaaaaaattcttttttttttacccgaaaacttgtcccccggggtcacaaccaacacttacccattttataaaccatactggccaatggttttttcccaaaactaattaaacttttgaggccttaacaaagacaaaactaacagttttcaaagttcaaaaagtttaaactgtttccagttaaccccccaacaaaaactttttaacaacttttttcacacttttaatttatcaaaccatcgatcgggttgatggtcccaattggattaaacccacttgtagtgggatgggcaaatttttccccaatttttaaggaataagccttagtccatgggga

SEQ ID NO: 31725 - DNA, 153 bp, Oryza sativa
  unsure (1)..(153): unsure at all n locations
  Clone ID: PAT_MRT4530_36003C.1
gcaggatggcatcagtgggagggacttgttcgttccaaccagaaagattcattcctanattcatccaggatatactttcgaaccataagtggtgttccaccgaagtagcaagagcacagggtcctgtaagcttcgggcttggcacgcaagatg

SEQ ID NO: 31726 - DNA, 468 bp, Oryza sativa
  unsure (1)..(468): unsure at all n locations
  Clone ID: PAT_MRT4530_36004C.1
ggctgggagctcccccccccgggggncggcccngctttntanaaattaagtggtttccccccgggcttccagnatttcggccnccaaacncgggtggttcccgnacggcgtgccgccgaagaacgtnagcatgaagaanctggtcgggctgtccacgcgccgaaaggtgccgctngtcgccgtcgccgagcccaggctgccggcgcatctntacgccggcaccgccgcatgagcgtcgccgtcggcgagcgagcgagcgaacgtaagctacgaataagtgggtccaatgcaagtgaaggaaatagtatcacacgtgtggtgcacgtgtgtgccacgtctgatatattgatcgatttttgccacctgacctgtggctgtgaacgcatgcatcagtgggtcagtgngtacgatatttgtacgtgatatgattaatttatcatcatttgtataaaaaaaaaaaaaaaaaaa

SEQ ID NO: 31727 - DNA, 190 bp, Oryza sativa
  unsure (1)..(190): unsure at all n locations
  Clone ID: PAT_MRT4530_36005C.1
agtttgtatactcgataaattaagatggngtctccgttcgacggtgaggattcggacccgattatnagcgcgatggcgggtgcgccggcgggtcgctggaggcacacacggatctnctggcagttgcgccggttgaggccgccgccgggtcacagcgcgctgcagggcaagccgctatcgtcccgcccgc

SEQ ID NO: 31728 - DNA, 960 bp, Oryza sativa
  Clone ID: PAT_MRT4530_36006C.1
atgaggaagaggaggagacttgaccgtagctgcattattgacgcggcggtttggcttgggcacggccgcacggcgcgcggccaaccggaacggaggaatcttctccgagactcctcagtcctcacgggtgggagctatggcggggaaggtaagcggcagagccggctggtggagggagggaccaccggcggcggcggcgggccatggagggaggggatccgcgccggcgccaactcgcggagggagggcggctgcgccggtgtggatcggcggcggcgccggctgatggagggggggagcaccggcggcggcagggggccgtggagggacgggatccacgccggcgtcaactcgcggcgagagggcggctacgccaagcacggatccacggcggtgccgctggtggagggagggagcaccggccgcggcggccggccgtggaggaaggggatccgcgccgccgtcaacttgtagagggagggcggctgcgccgagcgcagatctgcggcggtgccggtggagtttcgacccataggaagtccacccctgccgcttccagcccgccagcgagggggagctcgttgtccaggccaggcagagcgggccgatggcatggctgacgccggcacaggcgctcgtatggagggaggaggtggcagcggcagcgccggatccgccgactgcagctcgagatccaccgcccggactcgccgccgccactcctcctccttgtcgtcgtcaccagggccggcgccggctcgccgtctcgactttcgccgcctctccctgtggtggatccgtggaggagaggagaagaactcgcagccgccactcctcatcgtcatcactagggccggcgccggctcgtcgtccgtctctccctgtgatggatccttggaggagaggagaagagagaagaaaggattggagaagatagaactgacggcagggtcccagatg

SEQ ID NO: 31729 - DNA, 344 bp, Oryza sativa
  Clone ID: PAT_MRT4530_36007C.1
gacgacgccgctcaggtttttgatcaaaccaatccattgacacaaacgattgatgggcgaaaagtgagttgttccggtcctggaggattgacggggagaactgcaagttttcggagccgagatatccattcgagtcactatgggcgtatttgttcaattgacacgtccgaaggaatcatcgttggacttactggatctttagctattcatgtgagaattgatcacacctgggaaggtactgagtccacctcggctccagcctccggggaggcggcccatcgctgtcctcctccacccttgagaccgtagccgcttgcctccatgcccaagaaaccaccatcgtc

SEQ ID NO: 31730 - DNA, 432 bp, Oryza sativa
  Clone ID: PAT_MRT4530_36008C.1
atggcgaagctgctcatcaccgggctgagcacggcgatcacctgctcgtccgcggtggcgttcaagggcgccgccgtggccgtcgtgctcctgctcaggctggtccagctcccgggccagctcggctgcctcctcctctgcgccatcagggaagccgtcgagagggccgtggcggccgccttcgccgcggccggtgacgccgtcgctgcggcggcggacgccgcggcgggcgcgtggagggacgccgcggcgtcgaacggcaccgcggtggtggcgctcgtgcaggccgccatgggcaggcccgaggcgctgctcgccgccgccggcgaggtggcggcgttcgcgtgggaggtggccaagcagacggcgtccaactccacggccaccttcctcgacgccgccctgttcgtcgcccgccatgccagggcgtga

SEQ ID NO: 31731 - DNA, 144 bp, Oryza sativa
  Clone ID: PAT_MRT4530_36009C.1
atgatcaaaagcctcactatcatcgtctccgtctgcaacgtgttggtgcgcaccgacaaagaggagattgccggcaaggtacgtactttgttcgacggcaaggtcaacattcttactaccataccaagatttcttatgacctga

SEQ ID NO: 31732 - DNA, 147 bp, Oryza sativa
  Clone ID: PAT_MRT4530_3600C.1
atggttacaacaaccattggtgtccagaatcagccgcaatcttcaactattaatgatggtggcaagcggcggtttctagtggccacgatcgggacatcgagcggcaaaacaataggcgagcgacaagattgggggacaaggacctaa

SEQ ID NO: 31733 - DNA, 1068 bp, Oryza sativa
  Clone ID: PAT_MRT4530_36010C.1
atggcgtcaatgaagggagagaacgtcactgtatctgcagcagcagctcctcggatgaagaagctggcgagcatgctttgcatgaagggagggaacggcgatggcagctatctcaacaactcccaagctcaggctctgcacgcccggcgcatgcttcactttctggaggagacactggacgcgatgatggaacgttcgtccagcgacaagctcttcacggcggccgacctgggttgctcctgcggcagcaacagcctcttcatcgtcgacgtcatcgtccgccgcgtctccgaggcgtacgagtcccgcggccgcgacgcccccgagttccaggtcttcttctccgaactccccagcaacgacttcaacacgctgttccagctgctcccgccgctcctcgcgccggtggccggcagcctcgaggagtgcctcgccgcgggcgaaggcgcggcgacggcgacgcggccgtaccacgcggccggcgtccccgggacgttctacgggcgcctcttccccggcgagtccatcgacgtgttcacctccaccttctctttgcactggctctcgcaggtgccggaggagatgaagcgcggcggcgccatgttcctcgcctgcctcggccggagctccggcgacccggccgaccaaggcggcgccggcctcctcttcggcacgcacttccaggacgcgtgggacgatctcgtccaggagggcgtggtcgagggggagaagagggacagcttcaacatcccggtgtacgcgccgagcctgcaggagttccgcgacgtcgtgcgcgcggacggcgcgttcgcgatcgacaggctcgagctggtgaggggagggagtccgctggtggtggaccggccggacgacgcggcggaggtcggccgcgccatggcgaacagctgcaaggccgtggccggggtgctcgtggacgcgcacatcggcgagcgccgcggcgcgcagctgttcgagcggctggagcggcgcgcggcgaggcacgcgagggagctcgtggagaagatgcacttcttccacgtggtttgctcgctctctctcgcgccataa

SEQ ID NO: 31734 - DNA, 1203 bp, Oryza sativa
  Clone ID: PAT_MRT4530_36011C.1
atggcgtcaatgaagggagagaacgtcactgtatctgcagcagcagctcctcggatgaagaagctggcgagcatgctttgcatgaagggagggaacggcgatggcagctatctcaacaactcccaagctcaggctctgcacgcccggcgcatgcttcactttctggaggagacactggacgcgatgatggaacgttcgtccagcgacaagctcttcacggcggccgacctgggttgctcctgcggcagcaacagcctcttcatcgtcgacgtcatcgtccgccgcgtctccgaggcgtacgagtcccgcggccgcgacgcccccgagttccaggtcttcttctccgacctccccagcaacgacttcaacacgctgttccagctgctcccgccgctcctcgcgccggtggccggcagcctcgaggagtgcctcgccgcgggcgaaggcgcggcgacggcgacgcggccgtaccacgcggccggcgtccccgggacgttctacgggcgcctcttccccggcgagtccatcgacgtgttcacctccaccttctctttgcactggctctcgcaggtgccggaggaggtcggtgacagcgcgtcgccggcgtacaatggcgggcgggtgttcgtccaccgcgccacggaggccgtcgccgccgcgtacaagcgccagttccaggccgacctcgcccgcttcctgcgttcgcgggcgcgcgagatgaagcgcggcggcgccatgttcctcgcctgcctcggccggagctccggcgacccggccgaccaaggcggcgccggcctcctcttcggcacgcacttccaggacgcgtgggacgatctcgtccaggagggcgtggtcgagggggagaagagggacagcttcaacatcccggtgtacgcgccgagcctgcaggagttccgcgacgtcgtgcgcgcggacggcgcgttcgcgatcgacaggctcgagctggtgaggggagggagtccgctggtggtggaccggccggacgacgcggcggaggtcggccgcgccatggcgaacagctgcaaggccgtggccggggtgctcgtggacgcgcacatcggcgagcgccgcggcgcgcagctgttcgagcggctggagcggcgcgcggcgaggcacgcgagggagctcgtggagaagatgcacttcttccacgtggtttgctcgctctctctcgcgccataa

SEQ ID NO: 31735 - DNA, 1269 bp, Oryza sativa
  Clone ID: PAT_MRT4530_36012C.1
atgggtagcacgggagaagtaatgctggcatcgggaggaggagcggcgccggcgccggcgacgtcgcgcgacgggcggggcgccgccgcggggctggggcccgtcgcgttcaaggacgccgccgacgccgacgccatcccggtgcgccctcccacggagcacgacgccgccgtgtccgccatgccggcgcgcgtcttccacaacctgaagctgcgacagcaccaggggtactgggtgctcgacgcctgggcgcgcggcgcggtcgccatgcagcgcggcggcggcggcctcgtgccccgcgccgacggcgacgtcctcctcgccagcctccccaagtcggggacgacgtggctcaaggcgctcgcgttcgccgtcatggcgcgggcggcgcacccgccggcgagccccgaccacccgctccgccgcctcaacccgcacgactgcgtgcccctcgtcgacaggctcttcgcccccggccgcgacgcggttctcgacgagctgccgtcgccgaggctgatgtgcacgcacatgccgctgtcgctgctgccggcgacggtggccgacggtagctccggctgtaagatcatctacatttgcaggtgccgggttccagctggtcacgggcatcggggtccggtgcaggcccggcagggtgtgcagcggcacgggaccttgcgctgctcaagcccgtgctcaccgtccaccgccgctgccccagcctacaccaccgctaggacgggttactcgtggatggcgctgcgacggggcagaagccactcttctccggatcagaaggatgcattggtctccatgtggcacttcctgaagcgcaatgggctacaaaatctgtacgagtccttctgcgagggcacatgcttcgggggccctgtttggaatcacattctcgagtactggagggcaagcaaagcgaacccaagcagggtgctcttccttagatatgagcggctgcttcaagacccaacagacagcatcagggagctagccgagttcgtcgggcagccattcactagctccgaggaagaagctggtgttgtcacggagatcgtagagctctgtagcatggagaatctcatgagccagaaggccaacaaggaaggcgcccaaggtgtgttcatcaagttctctcacgactcgtatttccggaagggggtggcagggggttggacgagccacatgacccctgagatgggaagacgtctggatgcgattctccgggacaagtttgatgggtcaggactcactatctga

SEQ ID NO: 31736 - DNA, 292 bp, Oryza sativa
  Clone ID: PAT_MRT4530_36013C.1
acacgcgtacggatggcttctactccacatgtttaccttatactactacgttcggttccagaggactatctagggtttagtgggttgagatggcgaagccgtatgtcaagtacctctgcttcgtactcagcattaaagtggtgcgctacaattacgtcaatgaggacattatcaacaagagcgagctgctgcttacatacaacttggtgcacaacaaggtccacgagctgatccacggaggcaagcccatctactagtctctcgtcatcgtgcattacgttgactaggtttg

SEQ ID NO: 31737 - DNA, 717 bp, Oryza sativa
  Clone ID: PAT_MRT4530_36014C.1
atggcaactctggatgtttataattttccatatttgaagaaaatggaagtaagtgctgctattgttagagtttcaaattaccaagacgaagccactaaagctggtctcaatgatatacaggccggatgggtgattgatccaaccacctatggtgacagcaaaacccacttctttgtatcttggacggttttgatatggatgcatgacatacaggctgattattacaataaaaccggatgctttaacttggactgtgacggttttgtaccagtaaacggtgccccggtgactcctggagatacattagaacaagctaataaccaaactaaaatatcattcaagatatttaaggacaaaaatgatggagattggtggctttactttggatatgacatcaacaatctcaatcgagttggattttggccaaagaatatttttaatcgtatggtagatcatgctactcgtataaggtgggctggctatgctcaatcctacaaagggagctccagtcccccaatgggcaatgggcaatttccaggaaaaatgtcagcatcctttcagaatgttatgtatgttgataccgatggccagccctatcctcctcctgtttggcctgctggtctcgaagtttatgcaagcaatacgaaatgctaccaagctagcatttttgaggataacatgttttactatgtggggccaggtagttgtactagttaa

SEQ ID NO: 31738 - DNA, 331 bp, Oryza sativa
  Clone ID: PAT_MRT4530_36015C.1
atatttttttttttttttttttttttttttggtttttttttttttttttttgggtttttctttttttttttttttttttttttttttttttttttttaaacaaaaaaataaaacctgctttttaacttttagggaaaaaaaggaaaggggggaaaactttgcctattttccttttttacagcagaggccctcactccccccccgggaaacccatttggaccccaagggccaaaacaaaacattgggggaaaccttttcttttgcccaccaaaggtattgggagactttaagccccccctgaccccgcataacccttgtttaaaccaggggg

SEQ ID NO: 31739 - DNA, 417 bp, Oryza sativa
  Clone ID: PAT_MRT4530_36016C.1
tccttctcggcgtgttcggccgcatgtggtcgctctacaccgactacaccttcacgctcgcgacgacaacaagttcagcggcctctacctctaacgactggatctgacaattcgacacagagattgaacaggggatagagagactaaccctacactataacaagactgaaaccaattctgtttgaatcctccgatcgcgcatgactggacacgcggccagacgttattattttgcattatgagatggtgtcgataccaagtgaggacaccacttagatgagaccctgtactgatcctgcctgtagatatgttttttgtttggcgaatctgcaaatatgcctgaacctgcctatgcctctagtgtacatgtcacaattggtgtaagtaattgggagactgcatggatattttgaaact

SEQ ID NO: 31740 - DNA, 428 bp, Oryza sativa
  Clone ID: PAT_MRT4530_36017C.1
tttgtttaacaaaaatgccaggagactcttaaaccctacaaggagttccctgggatgtaaacattctactcaaaaatccaacaatacgcaatttcaacttaagagcgtcggggtaccgctgataacctggatactaaaagggaaccacacactgactacctgggtgcagggaattgctcacatatgtttagatatcctggaatatagcgggccaaaacatggcatttggcttgcatattgcggtgacagattaatcaccgatctaatgtagaccttaggacaccatgaacggccagatgtgacgacaccccgttagactgagaaactgtcagggtagcaggcggtgcacattaaccactctggggtgttggcatgacaatcggtgcttaacctgcagtatgctcagatgactgagcctatacaggctg

SEQ ID NO: 31741 - DNA, 370 bp, Oryza sativa
  Clone ID: PAT_MRT4530_36018C.1
gcgaaggaatttggagcttggagaaggagcttgggacaccggcccttcactggcccctggatgggataaacacaaccggacaatcttcaaaatccttccacctccctttcgacaatggaagaactccgccttcaccaatcacatttcctgcttcatcgccaatatctaagactcccatgttcctaagtcacccgtaaaacttctaccgatgcgtaaacatcattctttctttgggttgaaccacccatgggaagaactgacccgtcccgtattactatatggagtactacatttatgttcctaatgactgagcctctccccccctctttataccacctgaatcatatatatacctttatctcaaaaaaaa

SEQ ID NO: 31742 - DNA, 433 bp, Oryza sativa
  Clone ID: PAT_MRT4530_36019C.1
ttccgccggcgacgccactgcgaggggcccgtccggtgtccggtgccgctacgcctcctttgccaacaccgctgccatgaggggcctgtccgccgccgctgcctcctccgctagcgccgccgccgctaagcttcctcctccgctggtaatgtcgctacgcctcctcggccgtcgcgaggagcccgtccgccaccgctacctcctccgcgtcctccaccgacgtcgccgctccgccttcaccgcctccgcgaggagcccgtccgttgccgcgacgcctcctcctccgccagcgccgccgcatcctccaccaccggcgtcgccgtgtcctccaccgccgcaaggaaccccgtctgccactgctccgtcatgatggtgcaacgccggatcggagggagagaagaaggaggagaggctgactagtgggtcccacatc

SEQ ID NO: 31743 - DNA, 693 bp, Oryza sativa
  Clone ID: PAT_MRT4530_3601C.1
gagagaaatgacaaagactattgaagaagtaataattcacaaaaaaggacacagctaatcatccatgaatgatgaattgatgaatccatccatcaaattaggagaatacacgatttatttataattgatacagagtaggagtaccggacacatgtacagtgtacatctctcttgactttagattagcgggcaccaatccctaccaattcgttcacatttcaaaaggagacgaacaataaaagaagacaaaaataaacaaaatatgtatagagtagacgagacgaactttgaatcacaaatcccaatttcaacagttttggtggtggcagctggatggatggatcatcccctgcactgggtgatggcggagcagccgcgggagtaggggttggcctccgcgccgggctggcagttgtagtaggacgcgccgcgcacggagcacggcgtcgtgtcgcgccgcagcgcgccgtagctgatgtagctcccctgctgcagcacccgccgcaccaccgcggtggcgctgtccgccgcctcctcacccgggaagccgaacgcgtcgtcggcgccgacaaccccgagctcccagctcagcggcacctcgcccggcgccgcgtcggctcccccggtggccagcgcgatgagcagcgccagcagcagcagcgcgggcgccgccacgatggcgggtctcgccat

SEQ ID NO: 31744 - DNA, 234 bp, Oryza sativa
  Clone ID: PAT_MRT4530_36020C.1
ctacgtcttcaccgccggcatgcctccgttgccgccgagtggtgcctccgcaccaccgttcatgggcgtccatgtcttcaccgccggcatgcctccgttgccgccgagtggtgcctccgcaccaccgttcatgggcgtccatgtcttcaccgccggcatgcctccgttgccgccgagtggtgcctccgccactggcttggttccactggcgccgactggtgtttttgtcaccat

SEQ ID NO: 31745 - DNA, 195 bp, Oryza sativa
  Clone ID: PAT_MRT4530_36021C.1
atgtgcccccagcatagttcacgggggtcgtgctgggggattggtggcagggatgtcttaagagcagtcaggctaccggcgtgggcggccaggtgcagcggcgtgctcccaggccgggaaagcgtggggcacgagacgtcgtccttgtcgaacagcaggtgcacgcatccagacggccttgcctgggacccctga

SEQ ID NO: 31746 - DNA, 2492 bp, Oryza sativa
  Clone ID: PAT_MRT4530_36023C.1
ggaaggaagctcccgaaaatatctcttgctcgatataaacgggccgggtcaggcgcgaacctaaaactttcggaagagaatatctgcagcttgatcagttccaaaactgagatatatctgcagcttgatcagttccaaaactttagctgggcacgcactaccggcagcagttcaaggacaaaccaatttgaaggcggctagcgccagcacaggcatgccgatctcgcatgagctgggcgagcctgacgaaagcttctacaatctatggaaggaagagtgtgaagaactgtgggaggaagaggacgaactgtggggggacgaagatgttgaggaggagctgtcgctgcgtcaccctggattcaacaagtggaccgtccagcagggtgctgcaggcggggaccatattcgcgccaaggacaagaacttttactgctttgaggtccaagttcacttcactggagaactagttgacggtacgcagttcgtgtcaagccgagaaaatgacattccagagaggtttatactggggcaagaggatgtgatgcatggtttcaacttagctgtcagttcgatgcaaccaggggagaaagctatattcactatcccttcagcgttaaccatgacaaaagctggctcccctgctagcatcccgtcaaacatacctcccaaccaaacactacggtttgagattgagctcatcgccatgtttactataattgacattttcaaagatgaaggcatattgaaaaagattgtcaagaacgcagaacccgacagaaaacaatctcactcaagtgattttgtatttgtgaaatacgacgcatgcctgatggatggaacttcagtgtccaaatctgaaggtgttgaattcagccttaccgacggcttcttctgtcctgcatttgcacatgctgtgcatactatgaaagaaggagaggaagcagtactaattgtgaaaccaaaatatgctttcggtgaacaaggaagaccttctcaaggagaggaagctgctgtgcccccagatgcaactctttatgtgcacctcctatttgtgtgctggatacggcgaattggggaagaccaagcaattgccaagaaaactctaaggatagggaactcacagaggatacacacacaaagtcaagctgtggtgaaagtcgacaacaggatagtcttcctcctcgaatccatgcccggcgagatcagagacagcgctagatccctacagccggcctctgaagtgcggttgctcggcaaacttcaagatggaactgtttttgatcgtagaggttacggcgacgatgaaccgttcgagttcgtggtagatgaaggtcaagttattgatggcctggatgaatctgtaatgacaatggaggagggagaagttgccgagttcactattccaccccagcacgcatttgatgccgttgggtcagatcagcatcagtttgcctttgtgccgcgcaatgcaaccgtcgtctacaagatcgagctcttgtccgtcgttaatgagaaacatccgttgtacattccgagccgtgatgaaattgttgaatatgcaagtaggaaggaagaggaaggggacatatactttaacttgggtaaacatttgagagctcacaggagatatttcaaggccagacaaatcattgaatattcacgcttcggggtaaggagagggaaaattaatttaataaaactgctgtccatcccaacatcagaaattgatgcacagctggaagaaatgtggatttcctgcacttttaaagcggctaagtgcgcaatccagctagggtgctacatgcaagcatcgtgctattacagcgaggtgctggacgacgatgtggctaatgtgcaagcccagcagcagcaaacgttgttgcaggaatttcctgatggttcttcaagagacccggacgcaatgcagcgaggctttgagcaattcccaccagagtacgagtcagaattgcagctcaatgcaactttcactcctgcagctttttcaccgagacggaaaggtgagcatccgtatcgtggcgaaattattggcttccctgatgttcaggcaaacagcagccagcctgcttctactcctagtactgctcccagtactcccaaccctgctacaccacagacgaacgccctcgctactggcactagtggcaccccgagcggcagcgctgctcaaagctcaggaacaatcaacacgaaccgcgggtttctattcagatgcttcgggccatcgcccacgagctgaaggatccatcaagcttatatcgtctcaatcgttgtcgccgccgcagctaattactacttagtaatatcatatcatacttggaattgcagtatgctggtaatgtctacattttcaaatggatccacattaaataaaagttgtgattgattttgtactgccacaaaaaaaaaaaaaaaaaaaaaccaaaaaaaataaaaacaacaaatctacaagaatatatgccaactttggccgc

SEQ ID NO: 31747 - DNA, 354 bp, Oryza sativa
  Clone ID: PAT_MRT4530_36024C.1
ttcaagatggtagtccaaatcgtttgcacaaagtcaagttgggccatggaaaaaaagtctattagtggttgatgatgtcatgcatgcactcgacgtgctgcgcagcggaagaaggcgctaagaagtcgaaggaattctcacgaagtagcgtgcgtcgatgtagaagaagtagtcgatcgcaccagctcgaccttctcctcctcgtgcgttctcctcgctgtattcctacggtgatgcaatacctccgccggtcacacccctcacgaatatataggatccatcactcaggcctccaaggcccgtaggactcctattcggatccctatccgaattaagctcatattggatctccat

SEQ ID NO: 31748 - DNA, 1887 bp, Oryza sativa
  Clone ID: PAT_MRT4530_36025C.1
cacttcgctcaccacacttcccctctttcccgcctgcgtgaggcctcgtactctcaccgacacatgggccctaccacccgcgcccgcttcgtccacaaccgccgccgccgccgccgccgcgggccgtacgccgcccccgacgacgacgacgaggaggaggaccagcaggaagcctcctcgtcttcctcatcctccgacgagggagaggaggatgctgaggaggagggctccggagaagtcgatgacgatgatggcgaagcggcggaaccctcgggtaaggaggaggaggtgtcccccgtggctgcggcggcgaggagcgggaggaaggcctcgatcacaattagtctcaagaaagtgtgcaaggtttgcaagagtacagggcatgaggccgggtttaagggagcagtgtatatcgattgccccaggaagccttgtttcctatgcaagatgccaggttctgatacccttcactgccatacaaccttgacatgcccacatagagtagcaatggagcatggtgttatcccggcctctagaaggaacacaaacacttcactggattatgtgtttcagagccaagttaaaggcaagattcccatggttaagcctcagtttctgatacccaatcaactggagtgtgggaacataaaatttcaccagaggcgtgtgacctgcttggaattccatccaactaagaataatgtgcttttatcaggagacaagaaaggactattaggtgtttgggattacgtcaagttgcatgagaagattacttatgattctgtgcattcttgcattctcaacagcatgaagtttgacactaccaatgatggattactatatacagcctcttctgatggtactataagtagcacagacttggacactggaattggctcctctctgctgaatttaaatccaaatggctggaatggtccgagcacttggcgcatgatttacgggatggactttaactctgacaaaggtcttcttttggtggcggatagcttcggttttcttcacttgctggatagacggttgaaggcaagaattggagatccaattcttatacataaaaagggtagcaaggttaccagcctccactgtaaccctgctcagcctgaagttcttctaagcagtggaaatgatcactatgcccgtatttgggatacaaggaagctggagcccaactctgcctttgtgagccttgctcatggaagagttgttaattcaggatatttttccccacaaagtgggaataagatcttgacaacatgtcaggataatcgaatccgtgtatgggattatatttttggtaatctggaatccccaagtagagagattgttcacagccatgacttcaatcgtcacttgactcccttcaaagcagagtgggatccaaaggatcacacagaaacagttgcagttattggtcgttacataagtgaaaactacaatgggattgctctacatcccattgatttcatagacaccagtactgggaagcttctggctgaggtgatggaccctgacattacaactatcagcccggtgaacaagctacatccgcgagatgatatcctggcttcaggaagttcaaggtccattttcatttggaaaccaaagactgaaagtgatgctactgaagagaggaacagagagaaggcaaaggaatttgtatatggatcaggcagccggaaaaaatcaaatggcaagcatgagaatagcagtgatgatgactcagatggcagttgtgatggaaagaagaagaagaaagcgaagaagactcgcttcactcataccataaaggggaagggcaaatccaagacagtttgctcactacacttctgctatcagaagttttgggcttctatattgttcagttaa

SEQ ID NO: 31749 - DNA, 686 bp, Oryza sativa
  Clone ID: PAT_MRT4530_36026C.1
atggaccgtcgaaagcatccttggttggatccatcgtctcaggcgggtcctctgcacttacggttccaggaacgtgcaaataatagcctggagtccatccagatctgtctgcctattcccccatcggccaacccaacccttaacccgagcgtcggtgtgcgggcgagccagcggccggctgcggttgggcgacggagtggtagtggcgtagctgagcggcgcgggagaggagccaggcagcacgaggagcgcacgggcaagcgacggcagcggcgctggtgttgcggacatcgtcagcgtcgggccggaggagaagaaaacccgtcgaacctgcaagagctgctgctgccctggctgcaagcctgcaactcctgctgttcctaccaaaaccattgtgccatcggcagcttcggcgtcctagtcttcgaggaggaggccgaaggctacggctacttcattgtttgattttgttggttttcttttctggttaagctcgttaatttgggactgctcctacgcaggtgctccctccagtgctccttacgcattaacattctctggttcttcagagatgggaggatttaatggagtattattaagtttccaaatctgctctaaaatcgcgagcaaattgttttcacatcaaacactgatatgattcattcactatgttgtcttttttgatc

SEQ ID NO: 31750 - DNA, 155 bp, Oryza sativa
  Clone ID: PAT_MRT4530_36027C.1
actatcctctacgcacctctgcgcgcgcgccacctgcttgacggatagccccgacgctcagacaatgcaggcgccgccgacagcgacacaaccaggcgcactgatgatagtggcactgaacgataacggaaagcctacccggcgagccacgaaag

SEQ ID NO: 31751 - DNA, 238 bp, Oryza sativa
  Clone ID: PAT_MRT4530_36028C.1
tttgtttttttaatttttgggggtttatatttatataatttttttttatttgaaaatacaataatgggttacaaaaaaccaagctaccaaacaaaataaaaaaaaaaaaaaaaaaaaaagaaaaaaccttccaaggggaaaaagacaacataggagcaagacaatcctccaggtaatgtacgacagggagttgattcataaccttaagataaagaccgaacgaaaagacatagatcaa

SEQ ID NO: 31752 - DNA, 550 bp, Oryza sativa
  Clone ID: PAT_MRT4530_36029C.1
gcacgaggctattgaactattggatatcaagcatcactgcataataactaattgccattattatccatagtagatgggtacattattgtattaaccatgtcatatctatttactaatccaagttagatttcatacttcctaccaaaatgaatgccattatttcaaacacagagcaggctggaccgtatgctatatgtaggacttacagaagaacatgaagaatctgcgaggttgtttgctcatatggtaggagcacaggtgctttcacaatctggagcactgaacttagatatcaaggacaatcagcccactggaaatgactctcactcatccacgctggacccagaggacgaagaaacaaatgaacatctgaatagcacacatggttcgcaaaataaccgagctctgaacgctgcagacactgtcaaggacgatcatggaaaaggaaatttgactgttggtaagttgatggaagcttacgagggttgcatttcaaaactgcgaaaatctcaatctaatcgtcgtaaaatctctctcagaaaggtggaag

SEQ ID NO: 31753 - DNA, 237 bp, Oryza sativa
  Clone ID: PAT_MRT4530_3602C.1
atgggccccacctctcgccaccgcctttcaccagaggctaccagcaagtgggctcctaaggcgccctcctgcccgaggtggaaaccacacccgcacggccgcaccggctccccacctcgcctcgtcgtcccacctgacacccgccttccgccgccactgcgtccttgcatgatgacatcctcgctagatccaacagctttcagatatcatgggctgcagagctacgcctacgcttga

SEQ ID NO: 31754 - DNA, 246 bp, Oryza sativa
  Clone ID: PAT_MRT4530_36030C.1
atggcggccggctcggatggcaagctcgccggagattggatggtcggctgcgaatttggaggacacctacacgtagagggcgacgacgcgaacccaatgggcgtgacagctgcttcatcctctggtgcatctgatggtgctgctgctgcatctgctgcatcatggctgccatcatctgggtctgatgggccattacttgtgccagcgtcagctgcacgaccaccgttcctggtgttgaccatctga

SEQ ID NO: 31755 - DNA, 367 bp, Oryza sativa
  Clone ID: PAT_MRT4530_36031C.1
gttttgggttttttttttttttttttttttttttttgttttttttttttttttttttttttttttttttttaacaacaaagaggaacatccggcccccaatttatttctttttattaacattatcacaaacatagagaagcagcatccaaacggggggcgggtagctaggaccagcaaacatcgaaaattaaataagcaaaggcccaattaattaaataaacaccaaggaaaaaattaaactaaaccaggccccccccaaacatgagggaggcaaaggaaccggccgggggccgcagggtgcaccggccggagtccggcagggcgcccgccatcccggggaacggcgcggggttcccaccccgggga

SEQ ID NO: 31756 - DNA, 226 bp, Oryza sativa
  Clone ID: PAT_MRT4530_36032C.1
gcgacaacagcaagaacaagcacaagcacaagatcaatatcaacaagttcaatacagtgaacgacagcaaacatcttctcgatggaacgggattggggggagaacctttggccgaaccaaggggggggtaaccttggaaaatcctagccgggctgtttattccacccacctgcccggagggttaccaggggcaattggtaaaaagttcccattctttaccttattc

SEQ ID NO: 31757 - DNA, 308 bp, Oryza sativa
  Clone ID: PAT_MRT4530_36033C.1
gctgcaggaattcggcacgagcccagccgcagcgtcgtgctatacgccgccatgtggcgcgggtcacctgctccccattgtcgagctcgccaagctcttcctcacccgcggcctcgacgtcaccatcgccgtcccggccacccccggatcgggcaccacgggatcccccaccatcgccggcatcgccgcctccaacccctccatcaccttccaccacctcccgccgccgccgtcgtgcgccgaccccgatccgaacctcctcttgctcatgctcgacgtgctccgccggtcggtgccctccctcgcgt

SEQ ID NO: 31758 - DNA, 810 bp, Oryza sativa
  Clone ID: PAT_MRT4530_36034C.1
atgaatctgaacaggaagagaacacatgcacaacctgttcgtgcaatacccgctgtgtccccaagacccgttgtgcataggttcaagcactttgacaatgtagagtttgaagattgcatggtcaatagagcgtttagtgttattgtaatgggctcgaaaatggaagcagttgtaagcggtgagctggctacaaggtttcaaaatattttgattgtaggacggaactacaccatatatggtgtatatttccagcctaattattggaaattaaattttcgagctataaaaagacaatatgaatgcttcttcactagaaatactatagttgagtcctataaccaaccgctgcaatttcctatctaccctaaacaactcacggaatttggtgagttgtcagcatattacaataagatgtttgtgggtccacttcaatgcgtttctaatcgcctctacaaagaggtcaccctcgtggacacgaggtgtcagcttgtggttattggagtttacgctaaccatctgaccactcacgtgctgcaatgggcttcaacatttgctaataatcacgttgttgtgggaactatgctgcaattggaccgcacgtattggtgcttggagtcttcggatcatagccaatttcatttcaatccaagttttcatgctctgaatgaattacataactttcggtggtttgtggtcaacggagaagtcaacctcagttttgtcgaccgatatcatgtaacaagatgggttcacattgccgaagttctggattcaaagtcttcgttcaacaaaaatattaagcatgcttag

SEQ ID NO: 31759 - DNA, 412 bp, Oryza sativa
  Clone ID: PAT_MRT4530_36035C.1
cccggcggcccgtggacgaccaactccgccaggactgctcccgcagctccccgcggtcgacagacagctggtccaggtgctcggcagctcaaccacatgttggaggcatctacagggagctcggcaccaccgatgttggccaccccatgccgaggtgttccccggctgccggagaggggacttggagcgccgcgcgacctcccggcgtttgcaacgtggacatccccaatgggacagtggtgtctgtactggctaggttatcctaggaccccgataactggtcattaggctactaaagctactgtgtgtagactctgtgggtttgctaataattagtgcttccattgtcagaaccatatatacatatgtgaataaatgatgactccaatgttcttctgaaaaaaaaaaaaaa

SEQ ID NO: 31760 - DNA, 108 bp, Oryza sativa
  Clone ID: PAT_MRT4530_36036C.1
gcccggctcatgcagcccacgttaggaagcctggctgcactgggtggcccaacggtggggtgggccacctcgggccagccgcagcagaatgcatgggccggcccataa

SEQ ID NO: 31761 - DNA, 661 bp, Oryza sativa
  Clone ID: PAT_MRT4530_36037C.1
gatgcgccatactgcattggtgacgagtacatttgacctggatatgctcctggagctggagcatacccagagttcccgggattccaatttggcgcttgccctgttgtcccgtggtttggagcagcagctccaggtggtgcatatgcaccaccggcttgtggattaccttgccacccagcagatgttgttggtacaccaggcggttgtggtactgcttgcatcgcaccttgagggattgtgtaatccctgctcttgtcactgtgtgcagtagccaccatcgtagatgcaatgcccttccaatgcttccttcgcaactgaagctgtagttacatcagggtactgaatcaaagcttgtgttccaccgttcttctcaaaaatagctattttctggactgtaccaaatgcagagaacccagtatggagaacatccaccgtgactgcatattgcatattttcaattgatgcgagaagaacattgccttcagcttccactttccttccatcggcaccaacagcaggctgtaacgtatctatagcagatgaattaaccggaaggtaaggcctcggtgtaatccctgctgcgatgtgactggaacttgatattcagatccttatgcgcagagaacgaaatacgcaacctgcagcccgggggatccactag

SEQ ID NO: 31762 - DNA, 1779 bp, Oryza sativa
  Clone ID: PAT_MRT4530_36038C.1
atggccccaccgccagcgacctcgcgcttcctcctcctcccgccgcgactcgccgccgcgcgcggcatctccggccagccgccgccgtctccccacgccgccgcgcccacctctacaccgcaggccttccacgcgcacctcgcgtcgctcgcggcgccttcccgcgccgcccacccggccaccctccgctccatcctcgccgcgctctcccgcgcccgcgccgcggggctcccgctcctcccggcaacccgcgtcctcgctgcctccgcgctgctccgacatggccgccttcccgacgccctcgcgcacttcggcctcgtccccgactccgccgccctccccgcgccgctctgcaactcgctgctcgcggcgctcgcgtcctccgggtcactcgtttccgcgcgcaaggtgttcgacagaatgatcgggagggccgtcgagcttgacacggttggtttcggggtgttcgtcaaaaatgtggggaggaggcatggattggccgaggttctgcggttggtgcaggcagtgcgccatcaaggggaccgagttgataggtcagttgttgcagtaatggttgctgatggtttgtgtcgggaggggaggattgaggatgcttggcaagctttggaggatatgaggtttcaagggtggaagccagattttgtagcttatagagttgtatcagaggcgtttagggaagcagggaggacagaagaggaaggtaggatcttgaagcagaagaggaagctcggggttgcgcctaggaaggaggactacagggagtttatgtttgcattgttgtccagcaggcagattggcgaggcaaaggaaatagcagaggcaattgttttaggggatttccctatcaatgatgacgtgttgaatgcactgatttgttcagtgtctgagattgatgtcgatgctgctgttatgttctgcaagttcatgatagggaaggagagatttccaagcagcgatatgcttatacacctttgcgaaagcctctgcacgaatgggaagggcgatgatatgtgggaattttttagggtgctcttagataaggggtattgtacagatgtgagggattaccatttggtagtatcattcttaggcaaggctgggaaggtgcgagaggcatatgatgtactaaaggaggtgaaaagaaagagacttgagcctgacatttcatcatacaattctctcatggagtcactctgcagaaaaaacctccttaggccagccaagaagctgtgggatgaaatgtttaccagtggctgtagtccaaatctgcagacttacaatatactcataacaaaatttgcagaaatcaatgaaagtgaacaagcccaacaactgtttgatcgcatgttccagaaaggagtgtcccctgatgtcacaacatacacttcagtcatcaatatgctgtgccaagaaaagaaatatgaacaggctgtggagatctttaccaaatgtaatttcaaaggagcactgagtgttttatcttgtattccatctaatgttgagagtgtgaattcacacgtcattttgttgaagtgtctaatagatgttggggaagtagatttggccattgagcacataaaatcgatcaggagtaacttcagctcaagtttccagaatataatcaatgagctcatggcctctctttccacttctgctagtcttcaacctgtcacaaggttgatttcttatttgaattctcaggggattgttcacgatgttggcccatggatggggttgatggagcacaattatgcttga

SEQ ID NO: 31763 - DNA, 456 bp, Oryza sativa
  Clone ID: PAT_MRT4530_36039C.1
ttctgtctgcgggagtacctatgcctgtgtatttctacgtctagacggacacattctctagagacgtttttctggaaaacaggtgcgagtttcgttcttaagaacccatgtcccctgcttttttagagcacggcctgcgggtaacttttggggtggccgggttcccaacccccgttttccaggggcgtgttagggactttgttctggtaggtgaaccattcgacactgggggaggcctaaggcatttaacgcagatttgcctagccctttggcacggttcatccccttgatggccagagcataacccaaaaggggtgagttttttttgtgaggctccccaatcaggtggtttaagggttaccggaggggtcgttaaccctttggagaaagaaattcacccgttttcttaacggggttttcctaaccgagggttctttgagttccccttgcaaattt

SEQ ID NO: 31764 - DNA, 252 bp, Oryza sativa
  Clone ID: PAT_MRT4530_3603C.1
atgtcgtgggagaacgatgatgggtcacttggaggacaattaagcaggccggatgacagcggccttggacgtcagtgggcgccaaggcgtcacccaacagccttctcggtgatagcaaatgatgtgcgcacactcgcaggatgggtgggggaggtgggagtccggcggccggcgacaggcaacgaggcggcggcggcaacaacacgggagcaggagggcctcaccccacgccaccgctaccgccgccgctga

SEQ ID NO: 31765 - DNA, 525 bp, Oryza sativa
  Clone ID: PAT_MRT4530_36040C.1
aatattttaaagacaagctagatatatggagtttttaaaatataacctctattattagttattggttctcgctggtaaagcaagtatacagttaatcaatctgggcactgcaaccttaaagcaaaagttttccttacttagttttccttacttgttcttgcttttcttcaaattaagttgaaatctaaatattcatccagtgattttggaagatgaaaaacactcgtgtgtatgatggagtttataggagagtagcacagttacttgcaagacatttgtccccttttgaaacaaagtacttatttattttatatagtacaagatatttgttcagtgagtagataaaaatccagtttgttgtgaaggctttcaaatgggctaattttgcactatatgattagccctttgcttatatatgaactttttttttaacattctcttgctgttgctgctgcttagtgacatttctcattctgtgctttcagcagggcagctttgctcttatgcaagtgacatgttaacact

SEQ ID NO: 31766 - DNA, 625 bp, Oryza sativa
  unsure (1)..(625): unsure at all n locations
  Clone ID: PAT_MRT4530_36041C.1
tggatccccgggctgcaggaatcggcacgagggagagaactagtctcgagtttttttttttttttttttaaattggtttaacaantgggtttattccaagaaagcttgctgagaaagtaattaatatacatacatcgtatcagataactcttgaattcaccaaaatttcatcctaataccgcaaaactgagctaaagcagcaatcatgcatagagtaaaggagtatactaacaaaatcatgaaggcggtgccggaagaggcagagagtgtgtcaactgagagatttactacaccagttaggatgtttgccagaaggaatgaaccaagcatattttgattgaatgcatcttcaagaaccaggttcttttcatactgaaataaacccagactagtgtgagacatagatataaccgtgaaaattctgtccaaatacaagacataacataagcaaagttgcacattcgtacgagaaactctttcaacatagctgtcaagaatgattgccataatccaaaaagatgcagcaagaacccaaacttttaccacttgactgctcctactcttgccttttgaactattgtcgaagaatagatagtaacccaaggaaacaccaatcaggtacata

SEQ ID NO: 31767 - DNA, 2636 bp, Oryza sativa
  Clone ID: PAT_MRT4530_36042C.1
catagatcgtaatttagccaacatatctgtgatatatgtcttcttagagtacacggcacgataacctattggcttagctattgcagcttctcagaacgttgaaggtttcatatgggacggaactagagcaatcatctagatctaggtctaagatacagaaaacaggcagaatagatgacaggaaagactaattggtttaacaattggctttattccaagaaagcttgctgagaaagtaattaatatacatacatcgtattagataactcttgaattcaccaaaatttcatcctaataccgcaaaactgagctaaagcagcaatcatgcatagagtaaaggagtatactaacaaaatcatgaaggcggtgccggaagaggcagagagtgtgtcaactgagagatttactacaccagttaggatgtttgccagaaggaatgaaccaagcatattttgattgaatgcatcttcaagaaccaggttcttttcatatgaaataaacccagctagtgtgagaatagatataacctgaaaattctgtccaaatacaagcataacataagcaaagttgcatataaagttatcccccactaactccttaagcttaacatgcaaagatgccacatcatcatccacctctcctctcaaccaatcacaaccattcttttcacttattttctcttctccaccaatcacaacactccaatcatctctacctactttcttaatatcggtgcctaccattcgtcgagaaactctttcaacatagctgtcaagaatgattgccataatccaaaaagatgcagcaagaacccaaacttttaccacttgactgctcctactcttgccttttgaactattgtcgaagaatagattgtaacccaaggaaacaccaatcaggtacataccccagtaaccaaatatgctataaacaccttccttattctgactgatgataccaccgtttctttcattagaaatgagatactcattcaacccaaaagagagccacgtttggaatcctgtaagcacaagcagaccagctaatccacaatacttaggatggatcctgataacggacgtaaggatcgaaattgctgcaagggtgaaaaagaagttccagtgcacgccatattctcctacatgaacctgataatcaacacctgctggtccaggctgatttccatattgaggcggcggcatctgctgcgaagtatgcaactcttgtggtggggcagcaggagcagagaagccccctgatgcgccatactgcattggtgacgagtacatttgacctggatatgctcctggagctggagcatacccagagttcccgggattccaatttggcacttgccctgttgtgccgtggtttggagcagcagctccaggtggtgcatatgcaccaccggcttgtggattaccttgccacccagcagatgttgttggtacaccaggcggttgtggtactgcttgcatcgcaccttgagggattgtgtaatccctgctcttgtcactgtgtgcctttacattgagatcagtatgacgagaatatgacaggtggagcttacagtagccaccatcgtagatgcaatgcccttccaatgcttccttcgcaactgaagctgtagttacatcagggtactgaatcaaagcttgtgttccaccgttcttctcaaaaatagctattttctggactgtaccaaatgcagagaacacagtatggagaacatccaccgtgactgcatattgcatattttcaattgatgcgagaagaacattgccttcagcttccactttccttccatcggcaccaacagcaggctgtaacgtatctattgcagatgaattaaccggaaggtaagggttggtgtaatccctgctgcgatgtgactggaacttgatattcagatccttatgcgcagagaacgaaatacgcaaacaacaagatgttacatgctctggaagcaagtaccttgggatgcttcttccatctaaggcttctcttgctgcagaagctgtggctgcatctgtgtattgaatcagtgcctgaaaacctgcagccttctcaaaagtggctattttgtgaacaaatccaaaagctgagaaaaccagatggatcacatcgatggtgacatcgtttgcttgaacaccttctatagtaactagcaacacatttccagcagtctctccagggctcttgttgttaactatttcttgtctgtttgaatactgaatgtaaacagttttgcctcggatttgcgctggttccgaagatgatgcaaagtaagaaaccatcgaaatagcttgattaatgtcagtctgcaaagaaggaatggctttgcataagtaatgcgcagcatttattacaaataaaacataagtataaacaataatagaatttgtaggaagataaagtttctgaaagcctttcctagaagtgaactcgacgaaggcctggttgcggttggcgccgacgccgcacttggtgttgacgatgcggccgaaggggttgcagagctcgacgagctcctcctccgcgcactcccacggcaggttccgcaggtgcagcaccttggacggcgtctgcgtgtaccggaactgctgcccgccgccgccgccgaccgacgacgacat

SEQ ID NO: 31768 - DNA, 381 bp, Oryza sativa
  Clone ID: PAT_MRT4530_36043C.1
ccccgaacaaacaggaaaccgggcccaaaaaccttacaactgcacattttgctccaggacaaccggcgaaacacttacacagaagacacaaaaagcttgcaacaaaacgaccaaaccacaaaaaggaccaaaggaagagcaagaccttcaaggcacagcctaacaaagacagaagccgatgtcgacctccaaggagggcaacaaccacacaagccgtagccgaacgcccgcccataaactggaactgggtctccaccacaaagggggagggagcccacaagagcaacacctccaaggaggatccggcactcacaaaaaacacaggaataagatggcacccgatcccggaaaaccaaacaggactttgacccgagattccct

SEQ ID NO: 31769 - DNA, 1411 bp, Oryza sativa
  Clone ID: PAT_MRT4530_36044C.1
cccgggctgcaggaattcggcacgacgagctgcagcgctgtaggctagctagctgccaacccaccgacgcttccatggcttccacctcctcccctcctcgccacctcttcttccttttcgcgctcgcgttcctcgcagctggcgccgccgacgcgtggccggcgtggggcaatggccgcatgttcttcagcaaggcgacgcgccccgaagccgtcgagcttgacaaggtggcggtagcgacaccggcagcggcagcggcgccggatgccaccaactccaaccgcgcgtcggatgagttttctcggccgtccagcggcggaagccacaaccgcgggtacggcctctacggccgcccggaggagagctacccggaggcctacttccgccgcggcgtgcaccacgacgccgataagctgacgaccaccagcgcggcggcggccacggccgagcaagaaaaagaggaggaagcgacaccggcaggcgacgacgacgcctggcttgggtaccccgcagacggcagcggcagggggcggccgcggccgtacccgcgcggacagcagcagcaaacgaccaccaccaatgcggcggtggccacggccgagcaggaggacgcggcgccggcacgcgacggcaccgggcttgggtacagcgaagacagcagcggcagggggcggccgatgtcgtacgggcgcatgcgcggcggacagcagcagcagcaacagccgcagcagcaatacgggatgagcgacacgaggctgtaccagaacggccggtacggctacgacgtgaacaccggcaagtacggctacggccgcgagtccaacccggtgcggacgcggcccgaggagttcaacggcgggaggaagtttggcggcaatgcggccggcgggcaagagtacgcgaacggcaactatcaggaggagttcggcgtcggccaccgtgccggcgagcaggtgaggaggtatggcaatggcaatgtggccgggctagagtacgcaaacggcaacgatcacgaggagtttggcatcgggcagcgcgccggcgtgcagacggggaggaggtatgacaatgcggcggcagggtactacgacgcgaacgggcagtacattccatgagtaagatctcaatgatgttatactgcgaagcgtttgtagtacagtggtagtatactcgcgttcacctccttgtgtgctggaagtaagttatgttacgttacttcgaaggtagatcgagctggtcgctcgcccgctcgtacgtgcgcttgttatgcatggggtgtgattgaagggatgaatcacttttgtcggataactagtggaatgtactcgtctcactgtacaagaaataatgcatgctacagtactatatgtcactaaaaaaaaaaaaaaaaaaaaaaaaaaaaaagggagag

SEQ ID NO: 31770 - DNA, 3027 bp, Oryza sativa
  Clone ID: PAT_MRT4530_36045C.1
atgggtcaagtaatggaggttaatgtggatgaaaggttggctctagtgcccatagtagacaacaacactcaaatccaacagccagctcatgaaccacaggtagaaaattttttgaaggcattggaggtcttggccaggaatggaagccccaggcacccatacttctatccaatgaccggtctaaatgataggattgagaaactctgcaaagccaaggactttatggctctttcatgcaagctagcagggttccaactgcttttaaggtggcaaatccctcactactctggttctaccaaagaagagggctctcaggcccatgcagaaatggaaattgtagatgttgttcccctggacattcaacctccctcaagtctagtttgtgttgcccctcctgttttgaagctgccaaaagcccatgttaagaaaagagatggcaaaacatcattttttaatccttatagaaggcaaagctcaaggctttcaaatgagcaacgaagatctgaaggtggatcccaggatggggataggtttgaaaactattggtttgatattgtgggctcttatgagatagtcagtatggtttgggctttggatcatggatttgatgatcctacaaaatgtatttctttcaagattaaaatgctcaggaaaaagttgctcaattggagtaaaaatctatctaaattgaactcgcttcttacaaattgcaaccgggtcattgattttctttatcttattgaagaagctaggttgttatcagtggaggaatggaatttcaggaaaattgttaagggccaagtcattaagcttcttgaatttaggaaaatctattggaagaaaagatgtaccaacagatggatgtttcttggagaggaaaatacttccattgcaactaaaagatatagagtcaattttatctctcagattctggaccatgagggtcaggtggtctcttctcatgagcagagagctgctctcttttataaaagctttaaagacagaatgggtgtgtccaattatcccacaatggctcttggtctgagagacctttttcctattcagataaatcttgacagttttgtggaccctttttctacagaggaaattgacagcctcattaaaataatccctgctgataaagctcctggtccagatgggtttaatgggcctatttcactcatgcgagtcagcctaaaatttataacaaaactgctggttgatagattgcaggggtggctccaatgtgttcagatgatattttcctcagccagtactgcagtcctgcttaatggggttcctggaaacaattttagctgtaagagagggtccaagcccatcaatgaatctgatggtaaaggtttcccaataatccaaaatgctgatgatacactgattctgcttaaagcctcacagagagagatcttctgcctcaaagctcttttgaataatttggctcaatccactgggctcaaggtcaatttcaacaagtccagtttatatcctctgaacctcacaacagaaaatgtagagctgcttgctggtttacttggttgttccattggaactttaccttacacctatcttggtttgcccatgggaacaacaagacctaaagttgtagattttgcccgtttggttgatagagtggagagaaaactaacagcaagctctatgtttctttctcaagggggacgtctcactctgataaactcagtcttatgctccattccaactttctacatgtgttctttgcagctcccagtcacagtggttaaagcaattgatactgcaaggaagaactgtctttggagcggaaataaacccacctccacaagaaagtctttggcctcttgggaaatggttccccacatgaacttgaataagggatctttctggatgagagacattcttgcccttactgatattttcagagagaagcaaattgacaagattgcgaaggaatatgtggttcaggttgtcacagacaatggatccaactacaaggcagcgggaaaatttcttatggagaggatcccacacttgttttggacaccttgtgctgcacattgcttggatttgctattggaggatattgggaagataaaggccttcaatagttgcatcaattgtgcaaagaaggcgtgccggtttatctacaagcatgggagggttcttgatctaatgatgaagaagataggtgaagatcttgtgagaccagctgtgactcgctttgccactttatttctcacattggccagtatgtatgagcacaagcaagggctgagaagtttatttgttagtgaagaacaacatgctaacaatttgtctagtacccatgaaagccaacaaattaagagtattgtcctttcaatggcattttggggcagaatggaaaattgtttgaaagcttcacaaccacttcttgttgctctaaggatagtagatggagatgagacaccgatagctctagagatcatggcagccatggatcatgcaaggcgttccataaatgatgctttgaaagacaagcttacattacttaaagagatactagagtgctacgacaagaggtggaacaaccaaatggagcaaaagttgcaaggccgaggcaagccaatgattatgacatatcagaaggtgattgcttttcaaaaccgttggcaacaagagatagagataaaaaaattcctatttacaaatgcaacttttacgggaaataagtgcactgttgatggaggtgcactctataccaagcatgcagcctttgttgataagtgtgctttgagtctacgaggtcatgatttgcctagggcggcagctgctgctgctcatgatcgtgctgctgtcacttatggtaggaaaaggaagcgttcaaacaagacaactgttgttgtccaagatattgttgaggatgtcgcagcaagtcaaaagaaatatggagtggatatggagctatggacacctcatacatcaaaacttaaaggttctaaggttttggcaacatactgcaccgatcaagcttga

SEQ ID NO: 31771 - DNA, 403 bp, Oryza sativa
  Clone ID: PAT_MRT4530_36046C.1
acgctcaatctcgccacgaggaaataaagcctaccgcatattatgggttggttgcattagtatacgtacgtagggcagcttatcttaaagcacgtacgtacgcatcgatggcgcagccagccgagaacgcttacgttctgcaggacccggagatacgggcggatctggaccggcgcgcccgtgacgacggccagaccgtaattaagagcggcacctgcgtcaagagcctggacgcccaggagcgcctcgtccataggcgttagaaggcatggctgtgccgtacgacggagtccggaccagagcgcgccgaccacgacacctgacccgtgctcatcgagcccaacgacacgatgctcaaggaggccaaaatgaacctgggtcgcacgtgagacgtacgtgcact

SEQ ID NO: 31772 - DNA, 1191 bp, Oryza sativa
  Clone ID: PAT_MRT4530_36047C.1
atggcggcagccgaggagcgcgacgccgcggcggcgtcgtctctggccgagttccacgcgtcgcgcgccggcgtccgcggcctcgtcgagtctggcgccaccgccgtgccaccgctcttcctcccgccaggctgcggccgcgagcgctcgacgccgcctacgccgccgcgagcgacggccttcgccatcccgaccgttgacctctccctcccgcgctcggccaccgtcccgctcgtccgcgccgccgcgacctcgtgcggcttcttccacgtcaccagccacggcgtcccgcgcggcaccgtcgcctccgccgtcgccgccgtgcgggcgttccacgagcagcccgccgcgtcccgctcgccgtgctactcgctggcccccgtcggaggcgtcgcctactccaccatccccatccagcagccgccgccgcaagacggctcctccagcgaccaccgcgccgcaaccgctgcgtctcctctcctcccatggcgcgactcgctggtggtacgcttcggcccggggcccgaggctcccgacctagggcgccttcccgcgtcctgccgggacgcgctgccggagtaccagcggtcgctgacggtgttcgggaaggagatggccgggctgctgtcggaggcgctcggcggcggcggcggcggcggcggcgtcggggcggagcggctggagcgggagatgcaggtggaggggtggctgatggcgtgccactactacccgccgtgcccggagccggagcgggtggtcggcagcctggagcacaccgaccccagcctcttcaccgtcctggcgcaggacgccgtcggcgggctgcaggtccggcgggaggaagaagaaggcggcggcggcggaggcgagtgggtcgacgtggcgccggtcgccggcgcactggtggtcaacgtcggggacgtgctcaagatggtttcgaacgaggagtacaagagcgtggagcacagggtggtgatcaagtctagccaagacgccagggtctccattgctgtcttcttcaacccagccaagcgcgatgcctccgacctgttcgggcccctcccggagctcctcaccgcggagaggccggcacggttccggcgcttctccgtgccggagttcatgcgttctcgaagggaatccggccatggcaagtcatcgatcgattcattcaggattgctgcagattaa

SEQ ID NO: 31773 - DNA, 432 bp, Oryza sativa
  Clone ID: PAT_MRT4530_36048C.1
atggagaaaaacaggaattcacggggaaaatcttgggcttcctcggctgcggcgtgtactccaagagcaatagaggagcaacctaaggattccccggcggggtacggagtcctacggacgccatccgcgccgccgattaaaccgcccccctcccaaaacccatctacggggtcggagatctacacggactcgctcgtcgccgtcgctgtcgccggagagaagaggaggaggcgagggggggggggtctctcacctaaggtagaacagatcgccgacgtcggcgctatcccacgtgttgcacgtcctcttgcctccgcgttttcaatgatttcatcatcccggttcaaggaaaatactcctccgcgcctcgctggccaccctacccctatgagcatctttgaagactgggtcggcaaattctggagagattga

SEQ ID NO: 31774 - DNA, 1886 bp, Oryza sativa
  Clone ID: PAT_MRT4530_36049C.1
aaagtccgctgatcttggatgccacctagttcaaggatggcgccgccgccgctcgccggcgtggtggtggtcgccgccgcgctcctgctcctcctgccggaggccgccgagccccgcactctcctctcgctcgacgacttcggcgccgtcggcgacggcgtcgccaacgacacgcaggccttggtggacgcctggagcgccgcctgcgccaccggcgaccacacctttctccacgtccctcgacgccaagttctaccctcgtctggccggtcacccttgccggaacttatggcgattcttcgtgtgtccgtgatgcggctggttgttgcggccatggctgttgcagctggtgttctcttcttctccggcgccggcgaggcgcgcgtgctcctcaccctcgacgacttcggcgccgtcggcgacggcattaccaacgacacgcaggccttcttggacgcctggaacgccgcctgcgcctcgacggagccggccgtcctcgccgtgccggccgggaagacgtaccagatctggccggtgcggctcgccgggccctgcaagaagaagctcaagctcatgatttccgggacgatcgcggcgccggcgagccccgacgagtgggcggggcgcgacccgacgaagtggctctacgtcttccgcgtcgacgacctgtccgtctccggcggcggcaccatcgacggcatgggcgccgagtggtgggcgcgctcctgcaagcgcaagaagaccaagccttgcagcacggtgtctgctcccaaggcgctgcagttcgaggagtgcaggcgggtgagcgtgcaggggatcacgatgcagaacgggccgcagttccacctgatgttcacccggtgcacggacgtcaaggcaagcttcctccgcgtcgtggcgccggagagcagcccgaacaccgacgggatccacctcaacgacaccacccatgcccagatcatggacaacctcatctccacaggagatgattgcgtgtcaatggttggcaattgctctgacgtccgagtgaaggacatatcatgtgggcctggacatggcatcagtatcggaagcttaggcaagaaccggaccactgacagaatagagaacgtgagggtggacacctgcttgctgacaaacacaaccaacggtgtacggatcaagagttggcagggagggatggggtatgctcacaacctgaggttcgagggcatcgtgatgaagaacgtctccaatccaatcatcatcgatcagtactactgtgaccaaccaacaccctgtgcaaaccagagcactagttcatcatctctgaaacttgggaatttttcgtctctgtggatgcagacgcaggcggtggaggtgcgcaagatcgagttcgcgggcatccggggcacgtcggcgacggagcaggcgatcaagctggcgtgcagcgacgccgtgccgtgccgggatctggagctgaggaacgtcaacctgaccatggtgggcggcggcgcggcgtcggcgttctgccacagggcgtccgggaaggcggccggcgccgtcgtgccggcgtcctgcctcgccaaggcgccccacaggatgctcggcgacgccacgccggcggccagagtcggttcttgatcgccgccggcaatgcccgatcctggcaacgatcaccggaaaaaagctgaagtataaataccgtacacgtaggtgtagaaactgttgccgtatttgggagagtgtatgagtacagagagttgtaagctgtatacgacgtttgtgtcaagaattttttagagggcattatgtgaagttaaaatggatacaaaaaaacataattttaccggagtttctgctactagcagtgatggccgatggcccaattaaaaaaaaaaaaaaaa

SEQ ID NO: 31775 - DNA, 691 bp, Oryza sativa
  Clone ID: PAT_MRT4530_3604C.1
cacttcgatgttagatagggcctaccattgtgtgacggtgacggagaatttagggttcgattccggagagggacctgagaaacggctaccacatccaaggaagcagcaggcgcgcaaattacccaatcctgacacggggaggtagtgacaataaatatacataccgggcgctttagtgtctggtaattggaatgagtacaatctaaatcccttaacgaggatccattggagggcaagtctggtgccagcagccgcggtaattcccagctccaatagcgtatatttaagttgttgcagtttaaaagctcgttaggttggaccttgggcccgggcccggccggtcccgcctcacggcgaagcaccagacctgctcgaccctttcttgcccggcgtaatgcgcttcttggcccttaactggcaccgggttcggtgccttcccggccgcccggttacctttggagaaataaaatggcttccaaagccaacccatccgcttctggaaaccataaccaatggatataccattattaagaatctcacgtcctatgtgtgtgcctccggatccggagtaaggatattaggaccattccggggccattctaatttaataatccagagggaaattctggggatttagaaggccgaccaccgccgaaaccattgcccaagaatttttcattaaaaaaaaaaa

SEQ ID NO: 31776 - DNA, 1006 bp, Oryza sativa
  unsure (1)..(1006): unsure at all n locations
  Clone ID: PAT_MRT4530_36050C.1
tatagctgctgatcttggatgccacctagttcaaggatggcgccgccgccgctcgccggcgtggtggtggtcgccgccgcgctcctgctcctcctgccggaggccgccgagccccgcactctcctctcgctcgacgacttcggcgccgtcggcgacggcgtcgccaacgacacgcaggccttggtggacgcctggagcgccgcctgcgccaccggcgaccacaccttcctccacgtccccgccgccaagtcctacctcgtctggccggtcaccctcgccggaccttgcagggaggagatcaagctcttcatctccggcaacatcgtcgcggcggagagccccgacgagtggccggagggcggcggcggcggcggcgaatggctccacttcgtcggcgtcagcgacctgacgctgagcggcgggggcgtcatcgacggccgtggccaccggtggtgggcccggtcgtgcaaggcaaagcacaacgcgaccgagaattgcactacccaggctgctccaaaggcgctgcacttcgaggattgtcagggtatcagcgtgatggggatcacgctgcagaacagccaggagagccacctgacgttcacccggtgctcgcacgtcaaggccaactacctgaggataacctcgccggaggacagcccggacaccaccggagttcacgtcgtcagctcgcgcaatgttcacatcatggacgactcgatctccacaggtcatgattgtgtctcgattgtgggcaattctacggatgttcgtctaagagccatctcatgtgggcctggacatggcatcagtatcggaagcttaggcaagaaccggaccactgacagaatagagaacgtgagggtggacacctgcttgctgacaacacaaccaacggtgtacggatcaagagttggcaggggagggatggggtatgctcacaacctgaggttcgagggcatcgtgatgaagaacgtctccnatccaatcatcatcgatcagtactact

SEQ ID NO: 31777 - DNA, 482 bp, Oryza sativa
  Clone ID: PAT_MRT4530_36051C.1
catgaatgaggcacgctcatacagggtggaaggagaaaaggatcaatacataatggaaaagaaaggatcaggatcagcccatcgacgcgcagaggagactgccctcatcctcacggcattggacatcgatagaagcatgcaaatatatattgcagctggagaaatatatggtggaaagcgcagaatgtctgctctcacttcagcgtatcctaatgtggtgaggaaagagacacttttggaacctgtgatctaatgttcttccagaaccactcatcacaaatggcagcactagattacttggtttctttggaaagtgacatctttgttcctacatatgatggcaatatggctaaagttgtcgagggtcatcggagatacatggtgctcaagaagacaatcttgttagaccgataacttattgttgagctggcacatcaacacaacaacaaggcttatgcgatgggatgagatatgtttaatgc

SEQ ID NO: 31778 - DNA, 231 bp, Oryza sativa
  Clone ID: PAT_MRT4530_36052C.1
atggccagagaagcgcggcgcaccggcggtgtacttaggggtgtactggcgtgtggtgctggagctcctgacgaggaagagagcgtgttgagggtggagacagtggcaactattgtggtgagggagcaaggcagcgacggttgctgtggtgagggagcgacagtgttgacggtggaggcaccggcagctgctgtggttgtgcttggaggaatccgacatggagagaaggtg

SEQ ID NO: 31779 - DNA, 284 bp, Oryza sativa
  Clone ID: PAT_MRT4530_36053C.1
ttcgtttttgtccctgacttacccacatatggggtggtgtttatatctaactggggggagacaacgactgtaggataaataacgctacagcgagctcgatgaacgacgtaatcactagagggtgcgcacagaaatacttcacccacctgaagcgctactgaaacatggacatacctgtatacgtcaacatatgcacctctgcctggatcatcgagctcactacttataagccatcctgacactacggaacagctctcacgccatgattgaaaacatacctgttg

SEQ ID NO: 31780 - DNA, 543 bp, Oryza sativa
  Clone ID: PAT_MRT4530_36054C.1
atgtcagcgtgccacgtcaacccccctctccccctcttttcttcctttctcccatctctctctctcactcttctctcgcaggccggccggcgaagcagagacgcggagcggcggtggcggcaggcgggcacgcgcgcggcggctggcggaggtggtggccccctagcagcgggcatggttgtcgtcggcgccctttcccgacgccggccgtactgcgcagcgctcgcccacgccgcgccgccgcggtggggcatggtggtgaggcgggcgacgcgacgcccaatccgacgcgggccgcggtcgcgcagctcgcagtactgcggcgtcaagttctaccgccgcaccgggcgatgggaatcgcacatatggacgtacgatctagcggcgatcaagttccgcggcgtggagggctggaggccgacatcaatttcagcttggaggattatgggggatgatctgaagcaggtgagaacaagtttaacgagatcattgtggatgagcaatctgaccaaggaggagttcgtccacgtgctccggcggtag

SEQ ID NO: 31781 - DNA, 140 bp, Oryza sativa
  Clone ID: PAT_MRT4530_36055C.1
atgtactatagaccatacttgtctcataaacgggcgttccgcgaacagatgattggtgtcttcgaaggcggagactatgtcattgacattttgagtgagttgaacctattggagcaggcctcccaattgcaccagctcat

SEQ ID NO: 31782 - DNA, 222 bp, Oryza sativa
  Clone ID: PAT_MRT4530_36056C.1
tggctttctctctctgtttgaagccacggagagggaagcttgggtgatctctcggaagcgaagagtgaggggagacgaagaagacgaagaagaagaagaggggggaggaggaggagcagcatcccttagctcaaggaggagcaccctgcgattgataagcctctcctagatgcctgcctgcgactcctcgtcttcttcctcggactctgacgactacaagaa

SEQ ID NO: 31783 - DNA, 1269 bp, Oryza sativa
  Clone ID: PAT_MRT4530_36057C.1
atggctgatcgcttcttccccaacaatatgccgggctatgccgacgaaggcgcgccgccgccaccggcggcagcggcggcggcggcgatcccctccacctactcctcctctctccaccacctcctctccctcccctaccccgacctcgccgatcgcttcctccacgcggcgcttcacctgaagcagaaggtggtgcacgagacgtgggataagaggcggcgcgccgccgcggcagcgggggaggcagtgggcgacttcaccctctacaccggcgcgctcggcacggcgctcctgctcttcagggcctacctggtcaccggcgaccgcgcggacctcgccacgtgcgcggagatcgtggccgcctgcgacgccgcatccatgggggccgagatcgccacgttcatctgtgggcgagctggagtctgcgccctcggtgcggtggtggccaaacacgccggagatgaagctggcgttgctcattacctgagcgcgtttaaggagatcaaaattcatagtaaatcacctgatgagcttctatatggaagagctggatacctatgggcatgcaccttcctaaacaagcaccttggagataatactataccgccaaccactacagacactgtcatgagagatattatcagagatggtagaacactgtccacgataggctgcccattgatgtatgaatggtatggtgagaagtattggggtgctgctcatggactttctgggatcatgcatgttttgctggacatggacttgactaaagatgacacggaatgcgtaaagggaaccttgcgctacatgattcagaaccggttccctagtggtaattaccctgttactgaggaggataagcatgatcgatttgtgcactggtgccatggggctcctggcatttccctcaccttagcaaaggcttcacaggtgttcccagaagaacgattccttgaggcaattgcagaggcggcagaggttgtttggaatagagggctgctcaaaagagttggaatatgccatggagtaagtgggaacgcctatacatttctagcacttttccgcctaacgaaaaagaaggaacacctctaccgtgctaaagctttcgcttgctttctccttgaccgagctaaacaactgattgcggatggcatcatgcacagtggtgatgagccgtattccttgtttgaaggacaagttggaatggcttacctgtttctggacatgattaacccccttgattctaggtttccaggttatgaactttga

SEQ ID NO: 31784 - DNA, 2038 bp, Oryza sativa
  Clone ID: PAT_MRT4530_36058C.1
ggttgctgcgtggaaggaagccctcctcctcctcatccccttctccgccgcgcccagccggcaccccgaagcgaagccgcttggaggtggaggcgtcgtgcagatcggggctgtgccgctcgccgtgggatgccgttccagccccggaggtgaggtagctcgacgtctgcttgtgttttttttttctttccccggcgcggattactgaggcgatggcggaggacggggaggagaagctgctcgcgacggtgcagcacatcgtgcagacgctggggagcagcgacaccatgacggaggacatcctcagggtcttctccaactacgacggccgcctctcgctcgacaagctctacgccgcgcgggccgcggcggcctcgggccgttggcggcggcggcggcggcggcttagggggatgtgcaccagatcgcgcggaggatggtggatgccggcttcggccgcgagtgcgccgaggtctatgccgccgcgcgtcgcggcttcgtcgacgagagcgttgctcgcctcggcgtccgcccacgaactgctgaagaggtccatgcctcctcctgggaggagctcgaattcgacatcgcccgctggatcccggccttcaacatggtgttccgtattctgattcccagtgagcgccggctatgtgaccgcgtcttcgacggcctcgccccctttggggaccttgcctttgtcgccgccgtgcgcacacaagccttgcagctcatatcattcggcgatgctatctcttcctccagccgcgctccggagcgcctcttccgagtggtggacatgtacgaggctgtgcgggaccttctccctgaccttgatcctgtgttcgccgacccgtactctgctgcgctccgtgcagaggtcacggcggtgtgcaacaccctcggctcatcgatcaaaggcatattcatggagttagaaaatctcatccgccgtgatcctgctcgagttgcagcccaaggtggaggcatacatcccatcactcggtatgtcatgaactatctccgtgctgcttgtgggtcgcggcagacattggaagaggtgatggaaggtgacttcggcgctgttggtggagcggctgctgcagttgaccctgatcgtcccacctcgtcgcttgctgtgcacatagcatggatcatggatgtcttgcacaagaatttagatataaagtcgaagatataccgagatccatcactcgcttgcgtcttcttgatgaacaatggcaagtacatcattcagaaggtgaatgatagtgaacttggtgttttgcttggtgacgagtggatcaagcaaatgacaaacagagtgcggcgttggagcatggattaccagcgggtaacatggggcaaggtcacaacagtattgcagactggcggtcctggagtaggtggactccctgccacggcaatgaagcagaaactccggatgtttaatacctactttcaggagatctatgaagtacaatcagaatgggtgatagcagatgaacagctgcgggtggatgttagggcagcagtggcggaagctgtaatgccagtatatacagccttgatttctagattgaaatcatcccccgaagccaggcatgacttgtacatcaaatacaccccagaagatgttgaggcatgcatccagcacttgtttgaaggagcagctaagtgatcagttgatcagtacgttatggtactggcgtgctgcagcctgcagcttctactacagggtttgtggagttctatcatggatcctggtgaatatctgcgtcccattattggtgattttcatagcttaacctttcatcctcattgtttgtattttgtcctccatgaagaaatcatgaggtaagacaaatggtgtacaactgtacatgactactgtaggtgtatctgtaccaattagtaaggtgattattttgtaacaatcaggactatttttccatttgtttcaactatttcagattaacagctaagtgtttatgtgtgaatttctgttatttactttaggaagtaacaccaaatgctt

SEQ ID NO: 31785 - DNA, 1029 bp, Oryza sativa
  Clone ID: PAT_MRT4530_36059C.1
gcgcgacgccgatgagaagccgtggcgaggaggaagcgggcgcgcgacaggggaactttttttttggcaataagacaatcaggatccggcacctaaacaccttgtggtaatatggagttgacaaccacctcgatctagccaaaaaccaaatcaagatgggttttgtaaaactagcaattggtttgatgaggctaatggagagctttaattttgtattcatcatgaagatgttttttttcatattactaatgagttatctttgatgttgcaaaggaaggatcaaaacattgtgcaagctatgtcatagcttattgatgtaaaaaaaacatgtagagttggtcaatgtgagcaatgatggttaggagccgttacttgaagaaattaaaacattttgtgaataatacaagattccaataccaaatatgagtaaaacaagaccaagatagggcagatcaaggctaagtggaatcatagtcactcaagaccatcactatcatattgatgttttctgtgctgcgcttgatgttatcaacacggagatgaatcaccgcttcaatgagacttattctctatgtctgatatgagcaagattgctcgacttactcagagatttatgagaaagatttctcaaattgtgattgtgccgctataaaggatcaaattgaaaccttcattctgcatgtgcgaagaatataggattttattgattgccaagaatttgcaagtctagctaagaagatggttcaaaccgggagacatattgtatatccattggtctaacgtattattgagttagccttgcttctactagttgcaacaacaattgttgaaatagtgttctcggctatgaatatcaagactggtttgcgcaataggctatccaatgagtggcttaacaacttgatgttgtggtatattgagcatgatttgtttaatgccatcaagaagtagttccaaaacatgaaagctaggagaatgcagctacttaagtctcccagcaaaacaaccaaaattagtgctttagtaagt

SEQ ID NO: 31786 - DNA, 4480 bp, Oryza sativa
  Clone ID: PAT_MRT4530_3605C.1
ttagtcttggcgtggcctgagatcacgcacacccaacaggtgccgtgcagtcgccagcttcgccgccggcagtccctttgtcattgcatctgctcgctgctcctcagaacgaacgaactcaatcagaatctgcccactctcaacacattcacgaatgaaatggtagcgggtatcaatatgcttgctcctcccgtggaacacaggattcttcatcaaggcgatcgccgacttgttgtcaacaaaaagtttcacccgctttgcttcagtacccatcatctcgctcagcaacgccctaagccagagcgcgtgacatgctgctgcagtggccgccatgaactctgcctcgcaagacgagagcgccactgtcttctgcttttgagaacaccaagacaccaagctgctgttcacatagaacgccatgccgccggtgctccgacggtcatccatgtcacctgccaagtcactgtcagtgaaacccgtgatgtccaacgagccactgccgcttgcaaacaccagaccagagtccagcgtcccctttagatatctgagtatcatcttgaccgccttgagatgcatcgttgtcggccgctccatgaacctgctcgccacgccaacggcgtaggacagatccggcctggtgtgtaacaagtatcgcaggcacccgatgacacgccggtactcggtcgcatcaattggatttccatcagcatccttgtgcagcagcgaccgtggctccatggggattgaggtgggattacatccctgcataccaaactgagacagaatcttcttcgcatacgcagcttgcttgatagcaatcccattctccccctgaattacttctatccccagatagtaagagagaagaccgagatcactcatctcaaattcccccatcatctgctgcttgaacatggctatctcatgtggattttctcctgtgacaatcaagtcatcaacatacacaccaacgattacaccagcttgcccctttcctctagtatacacggcctgctcctgcgtgcaccgtgcaaaaccgagttctttcaagcacttgtcgagacgcgtgttccacgcccgcggggcctggcgcaatccatagagcgccttgctcagcctgagcaccaagtgttcttctcctcgtttcacaaaaccctctggctgggctacgtacacttcttcttcaagatcgccattcaagaacgccgatttgacgtcgaggtggtgcacttcccaccgccgatcagctgcgatagccaggatgacacgaactgtgtcaagccgcgccactggcgcgaacacctcttcaaaatccaccccttgacgctgaacatagccctttgcaaccaaacgagccttgtgcttgattacttcgccggcagtgttctttttcagcttgtacacccacttgaggccaatgggtttgtgtcctgccggcaatgcagtgagagcccatgttgaattcttctcaatcgcctgcagctcctgtgccatggcgttctcccatgccggctggccagctgcctcgcggtagctcgatggctcctccatctctgcaagcagcgcgtccccatcgtgttcatcctccaccaggtccacgcggggtgcctcccgcatgatatcttcaagactcctgaaccggacgggaccctcatcgcttctaaggtcgccgccggaacctggtgacgccaccggcccggcagagccggtagcaggtgttgaaggcggtgtagagctcggtgatgactggggcgaagtcggcaatgacgatgacgcccctaccgggcttgccggaggcgattgcgggactgccggggatggcgcccggtaccgcggtactgggtaggccggcgctcctgccggcggtgcatcaactccatcctcctccaccgtgaactcggtagagttttgctcccctgcgactacactccattgccaaggtacattttcttcaaaaatgacatcacgacttacatggatacgcccacaacgcgggtcgaacaggcggtgcgccttgctgcctttttccacgccgagatacacatacggcgcgctccggtcatcaagtttcttctggttgggcgtcgtgatcttggcgtgtgctatgcacccaaacacccgcaggtgtcccagctgcggcttgcgccccgtccatgcctcgaacggggtccgatcgcccatcgccttcgtcggtagccggttgaggagatacaccgcatggcgcaccgcctccccccaaaacctgcccggcactgacatccctttcatcagagatcgtgccatcgccattaccgaacgatttcggcgttccaccaccccgttttgctggggtgagtatggcgccgtcagatgccgctggatgcccgcctgctcgcacaactgcgcgaattcgcccgacaggaattcgccaccgcgatccgatctcagcgtcttgatgcgccgcccggccgtgttctcggccagcggcttgaacttggtgaaagcctctagtgcctggtccttcgttttgatcacgaacatccacatccaccgtgagaaatcatcaacaattagcataaagtaacgattaccggccatagttgtcggggtgatcggtccacataaatcaatgtggagcaactcgagcggctcctccgccctgaagttcgccgttgcgggaaacggctgccttatctgctttgcaaccagacatgcctgacagagctggtttggatgtgtgatcgccgggatgccaccagccatgcccttgtcagccaacagcttcatcgcctggaaattgacatgcccaagccgtgcatgccagagccatgctggctcatccatccttgtcagcaggcacaccggagtggctagcttcagctcgatccggtacagccgattaggggtgcgcctcacccgcataaccagccgcaggggacttttgtcgaacacctcgagcacatcttcatccatcaccactctgtgccccgtttctgtgagctggcccaagctcaccatgttgcaacacagactagggatataaaaaacatcctgcagcagccattgatccccattcttgcaggagaacaggatagaccctttcccctgaattttcacagttgaggcgtccccgaacttgacgctcccggtgattgatacgtctagatctctgaacttagcacgatcacccgtcatgtggttgcttgccccattgtccaggaaccagatgtccccggtggctgctccgctgtcagccaacagcagctgcggccacacacgctcctcgtgtacgaccagcccgctcgccggctcgtcttcggtcaccgccagtaacaatgcagggtttgcgtcgtcggtttgcgcgagatgggcctccaccttcttcttcttgggatgagggcactgggtggagtagtggccgaattcttcgcagttgtagcacttgatgtggctcttgtcacggccaccgccgccagagccaccagcgccactgttccgcggcgcgctgccgcgtccaccacctccaccgtgccctctgccgcgaccgcgtccgccctgggcacggtttcccctgtcgctgggaggtttgtttttctgcggcgaagacgactcgctgccgtccttcctgaaacgcgcctcccactccgcctgagtgagaagtacttgaccgtcggcggtgacaccaccagcggccgccttcttcttgcgaactcgttcttcgtaggccttgagacgacccaccgcctcctcaaatggcatattatcaatctcataaaactgctcaatacctgcgacgaggctgatgaatttctctggcaccgtgtcgaacagcttcttcactatcgcggaatcactcagtgtcgagcccaacaccgagtgacgcacgctcatcgcggtgatgcggcccgcgtactgatccagagtttcccccggctccatcaccatggcaccaaattcacccttcaacgtctgcaggcgcgcttcgcgaacgcggtccgcgcccacgaaccttgtcttcaagcaatcccacacttcctttgccgatctcttctttgccacctgcatcagcaagtcctccgggagggactgcagcagatgggacttcgacttcttgtcccttcttgggtcgacggccaccccggccgccggctcgatggcgtcccacacgccctggtcctccatcattgcctgaacgcgaatgcaccagctggtgtaattcgtcgccgtgagttgtgggtaggagaacgcactccctgagctccccctcgccggatccgctgcggctcccgccggaaccaacgccatggtgtcagatcagccctcaacctgagtgctctgatacccacttgttggcgaagaacaccaatcgaacaccttgtgggcgtcctgtagctatccggcacagcagactgaagaaactttcagggagacagagaattcagagaatgcagagaacaagaacaaaataacttgggagagtatttgggcaactttcggtgtt

SEQ ID NO: 31787 - DNA, 2129 bp, Oryza sativa
  Clone ID: PAT_MRT4530_36060C.1
tcatgccgtccaccaacgcgacctccttcttctgcgtcgcctgcgagcgcacccaccaggggccctgcctgccggacaacgcccgcggcgcgcgcttctgcggcgcccaccttgaaggttgggtcgccgccgccgagattccgcatgatgaccgctctgtcccggggaatcgtgcccccgctctgctcaacctctgcaccggcgagtgcgtcctcctcccgagatccctccgcaacaacaaccctgataccaccttcatcaaccacatccaagccgtcatcctcaagcagctatccaaggacccaatcgaggacgccaactacatcttcttcggcccgctcggcgggggattctatgtcctcaacaacaaggaggacctcctggtgtacgcccccaaggccaacgacaggcacggcgagctcacgatgtcatccgtgaacaagtaccagctccgcacctataaatatgagctgctctctttgtaaccgcagcaatccatctcctcaacgaatcttcccacttgccctcttcttcttcttcccaccattcccaatcccatccaaaagtttccagaaactcatcctcctcctccccctccccctcccatggccgacgcaaacatggcgtgggcggagctccccgaagagtgcgtcgccggcatcctccaccacctcctttgcctccctgaccactccatgttctccggtgtctgcacaaggtggcgcaccatcgccatgcggcatctgccgcctatgcaaccgtggttgttcatgccgtccaccaacgcgacctccttcttctgcgtcgcctgcgagcgcacccaccaggggccctgcctgccggacaacgcccgcggcgcgcgcttctgcggcgcccacctcgagggaagcatcctactcaggagatgcctccacacctactactcgtagcaaagccaacatataatcaattacagattcttggaaaatgaggccagaaaagaacactgaatataaacaccagcagatctgctgtagctaagtgataaacattgccgctgatatgaagacctaattccatattctcaacacacagaagcaccaaactgttctagctctcgattttcacatgcacagtgtaattctcatcagatatcaaattcatcgtacatgccaccatctgagcccccatcatcataatcatccatatcatcaaagtcagcatcatcatcatcagtgaccacatccagcagatcatcatacatatcaagctctaaatcagaaccagaaaaggcactgctgctgaaaatgtaagcccggtacttgaaatcagagatcgagtcatgaggaagcttaagatcacttattctagaacactttgatttcagagcatcatccatttgaatgctgtagcactggcgtatgtccagggattcaaggtgctggcagtggtcaaggattgacatcagcccatcattagttagcttgttgccaatcagctgaagctctctgagcttgggcatattgcttgcaatccctaatgcttcagtgtcatcatccatgatatcaggggctgcataatccatttgtaaagtataacgttcgttcagcctgaagcatttgagctctgggcaagctttgccaacggatgcacacacatcaccatacaaagaacagaatgtaatatccagctcctcaagccgaggaaagcccttcattgcctctgccatcccttcattactgacattaaggcacatgctgagttgaaggctcttcaatgaggaggctctctcggagatgtagaggaggaggccatcggtgacgaaggagtcggcccagaaagcttccatggtgccggcggctcggtccaccgcggcgcgcgccatggccaccgcctcgtcgacctccatgatgtctccctggtggctcatatccacgcggcgccacagcgtggggtcgatcgccgcgagccggcgccacgcgcggcacaccaccccggccccgaccaggaggtcggtcacgtccagcttcccgaacaccgccgcgagcgcgtccgacggcatctccgcccagtcgcggctctcgacctcgccctccgccatttccgtcggcggcggcggcggcggcgatgacatgggggctagggtttgt

SEQ ID NO: 31788 - DNA, 1243 bp, Oryza sativa
  unsure (1)..(1243): unsure at all n locations
  Clone ID: PAT_MRT4530_36061C.1
gcctctcctcctctgctttgcatcgattcgctcaatctcgtctcctttatatgtctgcatttgcaccgtctcttcctctccacgttgcagcagcagcaacagcagtagcttcacaagggaggagaggaaggattaagacgacgagcacttgttggaggaggagagcagctgtcccggtgaacatggcagccgccaccagcagcagtgcgctgtcaaagcttgctccactggaggcgatcttgtttgacatcgatggcaccctctgcgactctgatcctatccatttctgcgccttccgcgaactgctgcagcaggttggtttcaacaatggcgtgcccatctccgaggagttctacagcgccaatatcagcggggggcacaacgatgacctcgcaagggccttgttcccggatttggatcatgacaaggcaatgaagttcatggacgacaaggaagcattgtacagaaggttggctccagaacagttggtggcagtagaaggcctgcatgatctgtgcagatggataaaagatcacaagctgaaacgcgccgccgtaacaaatgctccaaggtcaaatgcagagctcatgctgtcactccttgggctcactgaattcttcccggtgctcgtaatcgggagcgagtgtgaccgagccaagccattccctgatccttacctcaaggctcttgagcttattggtgcatcacctgatcacacattcatttttgaggactccgcgtcagggattcgagccggtgtagctgcaaatgttcctgtagttggtctgacaactaggaatccagagaaagttctgcaagatgcaggagcaagcttgctgataaaagatttccaggacccaaagctactgtccatacttgaagagatagaacctacggttgccgccgtcgagcaagtctgatttttgcagatggagcaatggaattctggagtactagatggagcattttttgcagatggaacatgaatactggaataattatacatctgtctatcctaacaaaatanagctgatttctagatggggccggggtcagcacacgtcttaggacttttgagtttgtcaattgaccatcatctgtgcatgtgacttgctgtaaaaactcctgtaaaaaactcccagtatgcatattgccgaaaataactgtaatgtatgtttacatggtttgatagaactaaacagctgcaggaaaattggctatatagtttatcagttgaatttgc

SEQ ID NO: 31789 - DNA, 383 bp, Oryza sativa
  Clone ID: PAT_MRT4530_36062C.1
aacataaaccaccagtacgtatgttattattatgtgtacttttcaagggaaattcagcgcattaaaaattgaaaaaacaggaccatttatttatttaaatagttaaccttgcaaaccctactcgatcattattccttaattattccaacttgttgtaactaacggggaggaaaaaaaaaaaaaactgtttgaggattaccgccggaattctgtttgtttcgaacgatatatttttatggccctctaaactggggggtataatggtaagacggttaggccccactttcctcgtcggttaaaaactttttttttcaaaaagattgaaccctttttcccccacgtttttccccaaaagttttttgggaaaccaatatttttttcct

SEQ ID NO: 31790 - DNA, 2220 bp, Oryza sativa
  Clone ID: PAT_MRT4530_36063C.1
atgtacctttatgatagttcttccgatctggagcacatggatactggtgccaaggaagttgagctccttcatatggaccatagagagaaccaagcttttcatggtggggctcatgatgtccatggaaaagggcatgtcattggggttgatcaacgagagcagctcaatctcagggcagctgacgagcaaccggtcaaagtcattagcttgagtgtatccctcgcacaggatgagctcccgcaggcttggcaggaagacggctttgctggccctcagggtcaacttttacggtggttggccaaagagcgcgacagtgtggcacaccatggaggtgcaggtgaggatcttgggcgggagggtggcggcacagcgcatgccgctgaggtgcacgatgacaagatcctagacgttgtcattgcgttccaaggcacggatccaatacctgaggctgtcgtggcggttgaagctggtgatggcgggacacaaggtcgcgaggagctcgggtgggagctggctgatgccggttctatcagatgggggagtggtgttggtggaggctggcggcagcggaagcctatcgaagatcctcagtctacccagcttgatgactttgagttctgggaggagatcaattcagttgaatgtgtcagatccagcatcaagaaggtagtgttccatgggttctcctggaagaattctgagatagcgttcatcaattccatcgccgaaggaggattggtgctcgggaagatctgtatcttccagagtcgacatggtactgccccagatgatgatgaactgaatgctaagctgagcatggtagcttctctgaacatcggccttggccgtacagagatcatattttcaggtgaagatccaacctggtgctctagggcggcagctgatctttctcgtgctgatcctagtaatggtaatgatctttcatattttcatagcgagatgatttggcactcggtgccgctcagcctcgatcactcccagatccgacgtgccggggagaacatcctcgatgatctctccaacagcgccatggtcgctagggtctccagcatcctgtcctcccaccctggccccttcaacagtatccatctgacctgcagcagtatggggtctcacaatgacgccctcaagagctggttcaaggcatttgctgacaagcacctcaaggagcttgccttcctcaacctgaactacccaaatgacatcatggtacctactgatctcttctgttgcaagtccctgaagcggctctaccttggtggtgtccagctgcctgcaaacactggcatcatcccttgttcccacacattccatgaactctgggagatctgtttgtatcgatgcatcctgcacgagtgggacattgagaacctgctgacctgcagcccaaaggtggagaagctctcgctggtcaacagtgcttgtggttggccactgcggctgcacatccgcagccacagcctccgatgcatgctgcattgggcctcctcgttggaggagctcgctatggtatccactccatgcctcgagcgcctcatcctttggagggatgatgctttgcactggagtgactgtaagaagatcaagatctgctctatgcctaagctccaggtcatcggatatctcaaccctgcggaccatgttcttcagattcgtgatactgtgatcaaggaatggagctctagatctcctaatgacatgaaggctagcgctgctacggttgttcctagtgtcgaggtcttggcaatgactatccgttttggtgttcacgaggaagagcggatgactaccaatgaggttaacttggagttctggaaagatgttggatccatccaatgtgttcggtcaatcatcaagagggtgatatttgatgactttagtggagaggagtgtgaacttgcattcctctctttcattgcacaaaatgcaaatcagctggaagagatttacatcatcccttccaagaaggatctttctgcagggagttctctggggaatgtcataaatcacttcatgtcttcaatattatgggcttctgcatattgcagggatcagtacagagagccttccaagacttcacagcagaagtgcctaattttgaaatataaggactatgctgctggcacagcagaacaagccagagagggaaaaatcaagattcagcgtttggagagctgccaagccctcctgtctcgctaa

SEQ ID NO: 31791 - DNA, 181 bp, Oryza sativa
  Clone ID: PAT_MRT4530_36064C.1
gcgcactatctctcactgcatcggtgcggtcaccattgggctgaccgacgtcctactagtgtacaacctttgacagacgctgacgaacgctgtacatccttcaccaaccctaattactatctcacatcactttgtacatttcaactatgcccaggcttcacaatgagctttcatagctttg

SEQ ID NO: 31792 - DNA, 370 bp, Oryza sativa
  Clone ID: PAT_MRT4530_36065C.1
actggcacaaacttgtaccctgcaatatgcagaagcccataatattgaagacatgaagtgatttacttctccacctttgggctgcaggtcagcaggttctcaatgtcccactcgtgcaggatgcatcgatacaaacagatctcccagagttcatggaatgtgtgggaacaagggatgatgccagtgtttgcaggcagctggacaccaccaaggtagagccgcttcagggacttgcaacagaagagatcagtagggtcagatggatactgttgaaggggccagggtgggaggacaggatgctggagaccctagcgaccatggcgctgttggagagatcatcgaggatgttctccccggcacgtcggatctg

SEQ ID NO: 31793 - DNA, 435 bp, Oryza sativa
  Clone ID: PAT_MRT4530_36066C.1
cccacgcgtccgaccacgcgtacggccactcgtctgcccacgcgtacgcacttccagaagagaaaaaaaaaactcgttaacttttcttgtcttctcttctgttgtgcaggcgaagggggagaggaaggtcgaggtccagagatgggcggtggccatgggcagaagtcgacgatggcgcgggagaggaacatggagaagaacaagggcgccaaggggcgccagcttgcggccaacaagaggggcatgaacatccagtgcaggatatgcatgcagactatgatctgcaccacctctgagaccaagtgcaatgagcatgctgaggcgaagcatgcgaagagcgacctgaccgcgtgcttacctcagcttaagaaataagggcggaggcatctctctgctgaatcagaagaggaaaagagaagctgccataatgcacta

SEQ ID NO: 31794 - DNA, 1296 bp, Oryza sativa
  Clone ID: PAT_MRT4530_36067C.1
atggagcacaacgagtgcatgcatgaaatccttgcctaccttccgctgccgccagcctccaccaacaccactcccccatctgatagaaccggcatcagccagctcccacccgagctcctcgcgaccttgtgtcccgcctgcctgccgccaatggtgctgtcccatccctaggcctggatctagggatttgtgcccctccgtcctcgatgatgccctgttttgtcccatagtgggccccgttgccaggggcttccaaaaacacactctgcggtggtgaagacggtgtcgcgcaccactgactcccacccgggccccttccactccgtccgactcaccatcaccagcttcaaccgccacgacagcctcaggtattggatccgtgccttggaacgcaatgacaacgtctaggatcttgtcatcgtgcacctcagcggcatgcgctgtgccgccaccctcccgcccaagatcctcacctgcacctccatggtgtgccacactgtcgcgctctttggccaaccaccgtaaaagttgaccctgagggccagcaaagccgtcttcctgccaagcctgcgggagctcatcctgtgcgagggatacactcaagctaatgactttgaccggttgctcgtcagctgccctgagattgagctgctctcgttgatcaaccccaatgacatgcccttttccatggacatcatgagccccaccatgaaaagcttggttctctctatggtccatatgaaggagctcaacttcctgaaagctccatcccttgagcgtgccatcatctgaggcccatcatagtcatgagtccttacatgtctgtgaacaagatcgccaacatgcgcccgtcctttgagcaggtaccttggcaccagtatccatgtgctccagatcggaagaactatcataaaggtaagcaacctaatcaacctgtccaaaacaattcctagtgtcaagacccaagctataaaactaacgtttggatcaaaagagcaagagaataagcttcagtcctttctgaagctattttcaaatgtcaagactctatatgtagtctatgatcctccttgtccattgtcatcttgtgttttccctgataagcatgttgtagatttttggatgaagaaccttaaatccattttatgcgtctgttcacaacttacaaagttcatgttctataatctacatggagtggttctcagtgatcttgcattcattaaagccgtcatgggaacaactagattgctaaaggagatgtgtcttttcccatccaatgaaatcttcttttatcgg

SEQ ID NO: 31795 - DNA, 517 bp, Oryza sativa
  Clone ID: PAT_MRT4530_36068C.1
tttttgtaataatatatatatatatatattgcacgtatcacttcaacatataaaacaaataaaatattccaggctccatatttgatcggtacggagttcaagggatacagacttaatatttagttgttcagtgcagtctaaagcacaattaggggaacacaaactagcccacctcatggttcctggaagttcctactttcatctttggacttatcaccatggcagcgctgacgatcatatagtaaatgttggaacaccatatagcggcattaacagcaatgacaaaccttatattcctcatgcctcttctgaaagcatcttccgacctgcaccacataaaacatagtactccctctatctatttttgatagtcatatttttaaatctgaaaaatttatttttgataggcatatttcaatccaacaactgatcatcttaatggttttctcagatttatgtgtgactttctatcttctacacaaattggctacaatgagtttgagaaatgaaatattaa

SEQ ID NO: 31796 - DNA, 665 bp, Oryza sativa
  Clone ID: PAT_MRT4530_36069C.1
agcttgacgtcatcaatggcggcttggctcggatggcgacctcgccggcgctaggagggtcggctggggttttggaggacacctacacgtagagggcaacgacacgaacccaatggtgctcaccaaaacgacgaacggcgaccgacgacggccggcgacgagaggcgcggcggcggcggcggctctacggcggtcggtgacaacggcgaaggggcggccgggctttccctcaatcacgcgcacccgacggcggtgagaggaggcagcggcgaaggctagggcgacggcgcggcgcggctggtggttggccgccggcggcggcggctctacggcgcactagagagctcgggaaagggggcaaacgaaagaggacaactagggggtcctatttatagccttggattgaagagatcggactcccaccgcaagaaatcgatccaagaaaatcgaaattcggttttggggataaattcgaaaaggaattcgatttggttagaaaactcaacggtttgctccgatttttgggagtgaagatagaggaggatgacgggatcaaaacccctcaatcaatcggactcgagggggccggatttgaggcggatttgaagggagaagggggcggctcgggctagggtggccggccggccggaggtaggagaagggcc

SEQ ID NO: 31797 - DNA, 150 bp, Oryza sativa
  Clone ID: PAT_MRT4530_3606C.1
atggcggacggcgaggaggaggaggaggcgcacgattggaggcgatcgcgggcggcctcgccaagcgcccgcggcagccggaggtgctgtgcttacatgtataagatgcaaacaaaatgtttcactctttgttcattcacagagctgtga

SEQ ID NO: 31798 - DNA, 330 bp, Oryza sativa
  Clone ID: PAT_MRT4530_36070C.1
atggctgcttggtgctggggtgctgctctgctgcgttgcgggctgcggccttcgggcttctctgctgtgcttacgctgccgccgccgcgagaccgcgacacttgtatgcgtctacgctcgcccaccgccgctcgctcgcctggcctccgcggctctggctccacctgcctcctatgcgctgcgcgccgcctcaaccctctaggctccgaagagggttgcagcagccgaggagtcgttgccatgccgcagctctacgcccgggaacctggcctccgcggctccacctgcctggctgcctcccgcgtgccgcccgctacctccgcccactag

SEQ ID NO: 31799 - DNA, 274 bp, Oryza sativa
  Clone ID: PAT_MRT4530_36071C.1
acagctggggagccgctcagggcggtggcgacggtgattgctagatccgcgctgctcctgcctgatctggcgaggagtcagctggcgacggggacggcgatggtggtggggatggcgacggcgacggtaagggcgagctgcgccgggctgcggaggccgatgacggcggggatggcgaccgcagagaggcggcggtggtggagaccgtggatcgggcgacggcggccggtgggaggagccgtggcgcatgggcgacgccagcagtgggaggccg

SEQ ID NO: 31800 - DNA, 248 bp, Oryza sativa
  Clone ID: PAT_MRT4530_36072C.1
atgggcgattgtcgacgaggcggcacgaaccccagatttatagagaaggatgaccggtacgagcccgagtcggtttccacttccagcattccgcgtgaacgccagaagcccagaagtcggtgcccccctcggggttgcgaacaggagtcgtactccgactcgctggcccatgttccccgttgccccgctcgtcaagtcgtcattgggcagtacaaatatcaaggcaaaagccctgctaatcagctaat

SEQ ID NO: 31801 - DNA, 312 bp, Oryza sativa
  Clone ID: PAT_MRT4530_36073C.1
gcacgaggagccatggctgtcgctgatcccggggggtgatccggactgacgtgtatcggatatgcacgcccccacccacgtcgctgcttatccactcgcttagttggtgtcgtaaagctttcggttgtcgtggactacgtgttagcacggtgcggcagcaccctgttcatgtgtaatcatgccttcatgttgtccatgggattattgttcgcagagaagaaagatgtctgcaccgctagttaagtcacggcttatctgattatgcaccgtactactctctcgtatcaaaataaataaaactaacatttcata

SEQ ID NO: 31802 - DNA, 424 bp, Oryza sativa
  Clone ID: PAT_MRT4530_36074C.1
gagtaaagcaaagcatatgcatggacgcacacacacgagtacacgacacagcacaagacaccagcaacgcacagttcaccacgcatgcctgcctctgcccctgcctctctctaagctttcacccatcgatctatcacagcatgtacccctgcctctgtctctctctctctctccctctatctctcctctaattaacctctctcttcttgctgtgcccagtagctactagctagctagaagaatttcgcatgcagaaagcatatacttctttctcagcgaagctagcatccatggcgacgcgccggcggcgtccggcgacggcgacggcgagaggacgatgatgatcagaggaagaggagctcggccttcttgaccttggagatgctctcgaggacgcccgccggcgacacgtgacccatcactg

SEQ ID NO: 31803 - DNA, 471 bp, Oryza sativa
  unsure (1)..(471): unsure at all n locations
  Clone ID: PAT_MRT4530_36075C.1
cagtggcaaatcacgattatttaccatttcggtttaggttgtacaaaatctagaagagaagtgcttggtgcanatcactgcacatgtgcatacgagagcactgccaaaaaagaaaaaaaaactacaatgagttatttaggatgatcttttacaccacaaagactaactactacaattgcccattttatggcttccaaattttcctttttttccccgtcttgttccactgcttttgccaataaagcagtagctgatgcttccttgctcttaccccagaggagaagatagaggcctccaatcacaagagcagcacctatcgcatttccaaggaaattctgctcatgaaggaagaagagatcaatgagtgcagccatgatctgaatgagaggcatgaagcctgcagtgaaaactgggcccttcttctcgatgcaccaggtcatcagcacataccctatccctgatacccccact

SEQ ID NO: 31804 - DNA, 3954 bp, Oryza sativa
  Clone ID: PAT_MRT4530_36076C.1
caattcatgcatatagaagaatttaggcgatatatgttttgtgagactcgtcttcacataacccgtttgtatttgtgcaacacaagctgaattatcttcataaataatggttggagttggtgtgatattcagcccacatctattcagtacatgttgtatcaccctcctcaaccacatgcattccttgctcgcttcaaataatgctataatctccgagtgatttgttgatgtcgcgaccatcgtctgcttcgtcgacttccatgagatggctgtaccaccacagagaaacacatacccagtctgtgacaatgctttatgggggtctgacaaatatccagcattagcatatcccgccatggtcaaatcgatatcttgtgtgccacgtaaataacggaagatttgcttaatgccattccaatgccgtttggtaggaaccgaactgaaccttgcaagtaggttaacagcaaatgcaatatcaggcctggtaccattcgcgagatacattaaagctccaatggcgcttaaatatggacattcaggtcccaataattcgtcgttattttcctgtggtctaaatgggtcactctctactgctagagatcttactaccatgggggttctcgtcggatatgaatccttcatattaaatttctccaatatcttctggatatatgcagactggtgtaacaataccccttcatgagtgtgctcaagctgcagacctaagcaatatttagtcttacagggacagtcatcattcttgatgaatccttttccttctaggaattcactgagccggttgtaccacatcctaccggattgttttaacccatacaatgatgtttgcaatttaacactgtatatgttgcattttgtttcttcaggaacttgaatcccatcgggaactttcatatagatttcagaatccaatgacccatataaatatgcggtcactacatccatcaactgcatttctaagttcaaattgactgccatagatattaagaaccggaatgtaattccatccattaaaggtgaataggtttcatcgaaatcgatgccaggtctctgcgtaaacccttgtgctactaatctcgctttataccgaactacctggttgttctcatcccgttttcggacgaacacccatttatatcctacaggggatatccctacgggggtacgatcaacaggaccgaatacttttcttttattgagcgagattaactctgcctttattgcttctttccatttgacccagtctgaacgctttttgcattctgccatggactttggttctggatccagatcaatgatcttagcgatcttttcggcaaagtatatgtcgacaatagtagtctctctattgtatgtttcacctgtatccacataactggtggatatttcctctattctttcacattcctgatcttcattgtttcccgcaatgtttaagtcaggaatttccggtctcccagtgctagtagtaattgcgcgcgcattctcactgggttcattgccatccgggcatatcactgcaggtggctcatctacctggtgagctccttcactattctctggtgctgtggtattctatccaatctgttgtttcataggacgtctcctagaaactttagtttggttgtgtgcaaccggtggtctccccctcttcctagaagttggggtagatgtagaaattaatttgaaaaccggttcctctgcgtcatgaggtatttctactctttccggtgcattcacaacaggtatatgagatttcatgatcccctttgggttagtgaaggcttctggcagattattttcaattctttgcaaatcaattatggtctgaacttcctggtcagattccttagtacgtggatctaaatgtaggagatttttagtttcccactcaatttcgcggcattcgaccttctgtaggtactttcctccccctaatgccgggaaatgatcttccttaaatatacaatcagcgtatcgacccatatgtaggtctcctgtcaatggttctaaaaatttaatgatagacggagattcaaatcctacatagattcccaattttctatgaggacccattgacgtacgcttaggtggcggtataggggcgtatacagcgcatccaaatttgcgcagatgggaaatatttggtgcatatccacgtgtaagctgcataggggatacagcattgtatgcagtaggtctgatttgaagtaacgccgctgcatgcaaaacagcgtgtccccaacatgtagttggtaggttgctatgcagtagcaatggcctagcgataagcttaatcctcttaattaatgattcggcgagaccattctgagtgtggacgtgtggtacagaatgttccactttaattcccaaagccatgcaatattcattaaataccttagaggtaaactccccggcattgtccattctaatggattgtatccggttatccgggaaacggaatgatccggacatgggattaattggtccacatatgtctccctgtattcgttgcaagaatactggtgattctgcgttcacctttagattagagggtctaacgattaatttccctgttgcacaatcagtgcaaacaaaatcttcttggtttgggaaatcgttagttcgtaaattatggccatttgaagttgagatgattcttctcatcatccctagacctggatgtcctaacctgtcatgccatattctgtatgactcaggatttttaaatattgttttcagtgcaacattttcgggttttatatgagtgtagtataggccagatttcaaggaagggagtttttcaacaacagtcttacgatttccgtctaatttcgttatgagaagaaattcgagtttattctcatctttggtttctacatgataaccattagcacggatatctttaaagcttagtagagtacgactggactctggatataacagagcattatttataatgatcttggtaccatgtgggagaactactgttgctcgtcccactccaacgatgtgtgcattgcttccggcaatagtagcgatttgaccagtatgcttgtcgatatgcatggcagccatcttctcctctgagtgctggatctcaacagtgaagtgtgactcatgctctgacttcttcttcccgtgcttctcttgataaagctcaatgagatgcttaggggtgcggcaaatgcgagaccagtgtcccctagtgccacacttgaagcatacctgatcttgctttccatattcaccactagtagagcctttcttagacttactgtgatttcctttcttcttgaaagacatcttgttaactttaccaccatttttccagaaattcttccctttgttctggttattttggttttcccccttcttaaaggagctagcatttgcttcgggtgttgctgaactttcattggggcgagacgtatgattttcaacaagtgtctcatcttctccttgcacttccatgagcacggagaccagttcagaatacttctcgtatttagcctggcggtattgcctctgaatattcacatgattggcatggaaggtggacaaagttttgtctatcatgtcagcatcagtgattttctctccacatagcttaagaaaagtgacaatgcggtgaagaactgagttatattgctccatatatttgtaatcctggaaacgtaagtgaagccactcacgttttgcttttgggagcaaagcctttacttgatggccatagcgatccttcagtgagtcccaaaggaccttcggatcttcctcagtcatatactcattcttgagagtagtattcaaatggtgcctcaggaaatgcagtgcctgatttttctcggctgaagttggtaaattattaactcctccagctgatgttgcaatagttgggtcctgaatgcagttcaggagtttcttagcaccaagcat

SEQ ID NO: 31805 - DNA, 2166 bp, Oryza sativa
  Clone ID: PAT_MRT4530_36077C.1
atggacaatgccggggagtttacctctaaggtatttaatgaatattgcatggctttgggaattaaagtggaacattctgtaccacacgtccacactcagaatggtctcgccgaatcattaattaagaggattaagcttatcgctaggccattgctactgcatagcaacctaccaactacatgttggggacacgctgtttggcatgcagcggcgttacttcaaatcagacctactgcatacaatgttgtatcccctatgcagcttacacgtggatatgcaccaaatatttcccatctgcacaaatttggatgtgctgtatacgtccctataccgccacctaagtgtacgtcaatgggtcctcatagaaaattgggaatctatgtaggatttgaatctccgtctatcgttaaatttttagaaccattgataggagacctacatacgggtcaatacgctgattgtatatttaatgaagatcatttcccggcattagggggaggaaagtacctacagaaggtcgaatgccgcgaaattgagtgggaaactaaaaatctcctacatttagatccacgtactaaggaatctgaccaggaagttcagaccataattgatttgcaaagaattgcaaataatctgccagaagccttcactaacccaaaggggatcatgaaatctcatatacctgctgtgaatgcaccggaaagagtagaaatacctcatgacgcaaaggaaccggttttcaaattaatttctacatctaccccaacttctaggaagagggggagaccaccggttgcacacaaccaaactaaagtttctaggagacgtcctacgaaacaacagattggacagaataccacagcaccagagaatagtgaaggagctcaccaggtagatgagccacctgcagtgatatgcccggatggcaatgaacccagtgagaatgcgcgcgcaattactactagcactgggagaccggaaattcctgacttaaacattgcgggaaacaatgaagatcaggaatgtgaaagaatagaggaaatatccaccagttatgtggatacaggtgaaacatacaatagagagactactattgtcgacatatactttgccgaaaagatcgctaagatcattgatctggatccagaaccaaagtccatggcagaatgcaaaaagcgttcagactgggtcaaatggaaagaagcaataaaggcagagttaatctcgctcaataaaagaaaagtattcggtcctgttgatcgtacccccgtagggatatcccctgtaggatataaatgggtgttcgtccgaaaacgggacgagaacaaccaggtggttcggtataaagcgagattagtagcacaagggtttaagcagagacctggcatcgatttcgatgaaacctattcacctgtaatggatggaattacattccggttcttaatatctatggcagtcaatttgaacttagaaatgcaattgatggatgtagtgaccgcatatttatatgggtcattggattctgaaatctatatgaaagttcccgatgggattcaagttcctgaagaaacaaaacgcaacatatacagtgttaaattgcaaagatcattgtatgggttaaaacaatccagtaggatgtggtacaaccggctcagtgaattcctagaaggaaaaggattcatcaagaatgatgattcctttcggctcctaccaaacggcattggaatggcgttaagaaaatcttccgttatttacgtggcacacaagatctcggtttattctttagaaaattatcaagatttgaccatgacgggatatgctgatgctggatatttgtcagaccctcataaagcattgtcacagattgggtatgtgtttctctgtggtggtacagccatctcatggaagtcaacgaagcagacgatggtcgcgacatcaacaaatcactcggagattatagaattatttgaagcgagcaaggaatgcatgtggttgaggagggtgatacaacatgtacagaatacatgtgggctgaatatcacaccaactccaaccattatttatgaagataattcagcttgtgttgcacaaatacaaacgggttatgtgaagacgagtctcacaaaacatatatcacctaaattcttctatatgcatgaattgtaa

SEQ ID NO: 31806 - DNA, 2205 bp, Oryza sativa
  Clone ID: PAT_MRT4530_36078C.1
atggagtttacctctaaggtatttaatgaatattgcatggctttgggaattaaagtggaacattctgtaccacacgtccacactcagaatggtctcgccgaatcattaattaagaggattaagcttatcgctaggccattgctactacatagcaacctaccaactacatgttggggacacgctgttttgcatgcagctgcgttacttcaaattagacctactgcatacaatgttgtatcccctatgcagcttacacgtggatatgcaccaaatatttcccatctgcgcaaatttggatgtgctgtatacgtccctataccgccacctaagcgtacgtcaatgggtcctcatagaaaattgggaatctatgtaggatttgaatctccgtctatcattaaatttttagaaccattgacaggagacctacatacgggtcgatacgctgattgtatatttaatgaagatcatttcccggcattagggggaggaaagtacctacagaaggtcgaatgccgcgaaattgagtgggaaactaaaaatctcctacatttagatccacgtactaaggaatctgaccaggaagttcagaccataattgatttgcaaagaattgcaaataatctgccagaagccttcattaacccaaaggggatcatgaaatctcatatacctgctgtgaatgcaccggaaagagtagaaatacctcatgacgcagaggaaccggaatgtgaaagaatagaggaaatatccaccagttatgtggatacaggtgaaacatacaatagagagactactattgtcgacatatactttgccgaaaagatcgctaagatcattgatctggatccagaaccaaagtccatggcagaatgcaaaaagcgtttcagactggtcaatttgaacttagaaatgcagttgatggatgtggtgaccgcatatttatatgggtcattggattctgaaatctatatgaaagttcccgacgggattcaagttcctgaagaaacaaaacgcaacatatacagtgttaaattgcaacgatcattgtatgggttaaaacaatctggtaggatgtggtacaaccggctcagtgaattcctagaaggaaaaggattcatcaagaatgatgattgtccctgtttgtttatgaaaagatcagaacatggattttgtattatttctgtatatgtggatgatctgaatatcatcgggaccacacaggtgattaaggaagctagttcttacctaaagacggagttcgagatgaaagaattaggtaagactacatattgcttaggtctgcagcttgagcacactcctgaaggggtattgttacaccagtatgcatatatccagaagatattggagaaatttaatatgaaggattcatatccgacgagaacccccatggtagtaagatctctagcagtagagagtgacccatttagaccacaggaaaataacgaagaattattgggacctgaatgtccatatttaagcgccattggagctttaatgtatctcgcgaatggtaccaggcctgatattgcatttgctgttaacctacttgcaaggttcagttcagctcctaccaaacggcattggaatggtgttaagcaaatcttccgttatttacgtggcacacaagatctcggtttattctttagaaaaaatcaagatttaaccatggcgggatatgctgatgctggatatttgtcagacccccataaagcattgtcacagactaggtatgtgtttctctgtggtggtacagccatatcatggaagtcaacgaagcagacgatggtcgcgacatcaacaaatcactcggagattatagcattatttgaagcgagcaaggaatgcatgtggttgaggagggtgatacaacatgtacagaatacatgtgggctaaatatcacaccaactccaatcattatttatgaagataattcagcttgtgttgcacaaatacaaatggtttatgtgaagatgagtctcacaaaacatatatcgcctaaattcttttatatgcatgaattgcaaaagaaagaagaaatcaaggtgactctcaccaagactagtgaaaatctcgcagatttatttactaagtctttgccaactagtgtttttgagaagcttgtgcatggcatcggtatgaggaggatgagagatgtgcacaaatcagggggagcacttccctaa

SEQ ID NO: 31807 - DNA, 1353 bp, Oryza sativa
  Clone ID: PAT_MRT4530_36079C.1
cgggctgcaggatcggcacgaggcatcgccacctctgctcctctcctgggccaacacccaccgccgccactgcctcggcgccgcccttcggagcagctcgtcgtgcttcacctcctcgccccgtctcggccgccaccacgcacggccagatcggccccgcgcgagtgccatcctcgcgcccggccaagccgaacgcacgagtgccaccttcgagcgcgggcgccacctccaaccccgttgccgaagttgtcgccgtcgccgtcttcaccggcacggggacgccgccgcgccgtgtggagcgccgcctcctcgcgtggccacctccacgcgcgccgcctctgcgaccatccagcggctagcacctccacctccgcctcctctggtcggcgccgccccgatctcctcctcgccgcgccgaccatcttccccgtccaaccggcgccgcccgacgacctccgtcgtcgccgcacaggccattccccatccgccgtcacctcaggccgcgccatcgcgatcggtcaccggccaggccgcggcgccaagcgccgagcgccgccgtgtcgcctcctgccgcgccgctggtgccccggccctcgttccttccccgacgccgccgggccatctccaggctgccgtcgcacgggccggcacccagtcaccgcgccgtcgccgaccctcgccccggcctccctttccccaccggcgccgctccctttcccggccgggcttcccccaccgccgcccagcaccaggcccccgtcgccggcactcctcttctctcgggcacgcgtgaggaaaccgaggcagagaaggaatcgagagagagatgcgaggagaagaaagcgagaaacagatcaggttaagagagagaggaaataaaaggaaaggaaaagaaagggacagtgggacccactagagctccaccatcttgactcctctctctgacctcctttgacctggaaactaccaaaaagtctagcttgcatacctctgtcttcctcgggacagagcccactttcagcccctttatccaccaaagtccatattacatctctccagaacccaagttcctctctgaaagtctgtattttctccctcctccaaacttcgggcagtagcccatcagtagtcttcatctccacccaagtccaatatatctcctccaatctagaggatcaccttgggtttatttcttccgaaaataaaaggaatcctattttgggtatccttttcctcgatttataaatcatctaatcttcgagaattcatatcttgcaaaccgtgactccgattgattccattcaacttccgaaactcttctaaaatcgagatctatccaatgacactgctggt

SEQ ID NO: 31808 - DNA, 1500 bp, Oryza sativa
  Clone ID: PAT_MRT4530_3607C.1
atggccttctttgccaagaaatgggttaccattcaacgccgctcgcactatttagcttgtgggttgcgagattatattgccatgacgacaaagacgtttgtgctgttcccgtcgctgggcgtcggccacctgaaccccatggtggagctagccaagcacctgcgccgccgcggcctcggcgtcgtcgtcgcggtgatcgatccgcccaacaacgacgccgtgtcggccgacgcgatggcgcgcctcgccgcggccaacccttccgtcacgttccgcctcctgccggcaccggccagcccggacctcggcgcgcaccctgtcaagcgcagcctcgacacgctccggctcgccaaccccgtgctccgcgagttcctccgctcgctgcccgccgtcgacgcactcctgctcgacatgttctgcgtcgacgcgctcgacgtcgcggccgagctcgccatccccgcctacttcttcttcccctccccggccagcgccctcgccgtctttctccacctcccgtattactaccccaacccgccgtcatttatggagatgggcaaggcggcgctcctccgctttcccggcatgccgccgatccgcaccgtcgacatgctggcgacggtgcaggacaaggagagcgaggcgaccaaggtcaggttgtaccagttcaagcggatgacggaagcgaagggcgtgctggtgaacagcttcgactggctggagcccaaggccctgaaagcgctcgccgccggcgtctgcgttcccgacaagcccacgccgagggtctactgcatcgggccactggtcgacgccggcaagaaggcagggagcggcggcgagaggcacgcgtgcctcgcgtggctggacgcccagccgcggcggagcgtcgtgttcctctgcttcggcagccagggcgcgttcccggcggcgcagctgttggagttagctcgtgggctggagagctccggccaccgattcctgtggaccgtgaggagcccaccggaggagcagtccacatcaccggagccggacctggagcggctgcttccggcggggttcttggagaggacgaagggcagaggcatggtggtcaagaactgggtgccacaggcggaggtggtgcagcacgaggcggtcggcgcgttcgtgacgcactgcgggtggaactcgacgctggaggcgatcatgtcggcgctgccgatgatatgctggccgctgtacgcggagcaggcgatgaacaaggtgatcatggtggaggagatgaagatcgccgtgtcgcttgacgggtacgaggaaggagggttggtgaaggccgaggaagtggaggcgaaggtgaggctggtgatggaggccgaggaagggaggaagctcagggagaggctggtggagacgagggacatggcgttggatgccatcacggaggctgggtcttctgaagtggcatttgatgagttcatgagagatttggaggagagcagcttggagaatggagttcgcagctga

SEQ ID NO: 31809 - DNA, 363 bp, Oryza sativa
  Clone ID: PAT_MRT4530_36080C.1
tccattagaatggacaatgccggggagtttacctctaagcttacacgtggatatgcaccaaatatttcccatctgcgcaaatttggatgtgctgcatacgtccctataccgccacctaagcggggaggaaagtacctacagaaggtcgaatgccgcgaaattgagtgggaaactaaaaatctcctacatttagatccacgtactaaggaatctgaccaggaagttcagaccataattgatttgcaaagaattgcaaataatctgccagaagccttcactaacccaaaggggatcatgaaatctcatatacctgctgtgaatgcaccggaaagagtagaaatacctcatgacgcagaggaaccg

SEQ ID NO: 31810 - DNA, 183 bp, Oryza sativa
  Clone ID: PAT_MRT4530_36081C.1
gatgtgtttaaatttctctttcttgactatggaactgttgatgaagttgttagatgttttttcagaatgtatctcatctgtgacctcagtatggaggcaatcactgttgctggcacgaagaaaaatgagtccatcttctctgaaatccagagccaggtgaagaacaacaatgtgtccgtggat

SEQ ID NO: 31811 - DNA, 1872 bp, Oryza sativa
  Clone ID: PAT_MRT4530_36082C.1
atgccggggagtttacctctaagcggcgttatttcaaatcagacctactgcataaatgctgtatcccctatgcagcttacacgtggatatgcaccaaatatttcccatctgcgcaaatttggatgtgctgcatacgtccctataccgccacctaagcgtacgtcaatgggtcctcatagaaaattgggaatctatgtaggatttgaatctccgtctatcattaaatttttagaaccattgacaggagacctacatatgggtcgatacgctgattgtatatttaatgaagatcatttcccggcattagggggaggaaagtacctacagaaggtcgaatgccgcgaaattgagtgggaaactaaaaatctcctacatttagatccacgtactaaggaatctgaccaggaagttcagaccataattgatttgcaaagaattgcaaataatctgccagaagccttcactaacccaaaggggatcatgaaatctcatatacctgctgtgaatgcaccggaaagagtagaaatacctcatgacgcagaggaaccggttttcaaattaatttctacatctaccccaacttttaggaagagggggagaccaccagttgcacacaaccaaactaaagtttctaggagacgtccttcgaaacaaaagattggacagaataccacagcactagagaatagtgaaggagctcaccaggtagatgagccacctacagtgatatgcccggatggcaatgaacccaatgagaatgcgcgcacaattgcgggaaacaatgaagatcaggaatgtgaaagaatagaggaaatatccaccaattatgtggatacaagtgaaacatacaatagagagactactattgttgacatatactttgccggaaagatcgctaagatcattgatctggatccagaaccaaagtccatggcagaatgcaaaaagcgttcagactgggtcaaatggaaagaagcaataaaggcagagttaatctcgcttaataaaagaaaagtattcggtcctgttgatcgtacccccatagggatatcccctgtaggatataaatgggtgttcgtccgaaaacgggatgagaacaaccaggtggttcggtataaagcgagaatagtagcacaagggtttactcagagacctggcatcgatttcgatgaaacctattcacctgtaatggatggaattacattccggtttttaatatctatggcagtcaatttgaacttagaaatgcagttgatggatgtagtgaccgcatatttatatgggtcattggattctgaaatctatatgaaagttcccgacgggattcaagttcctgaagaaacaaaacgcaacatatatagtgttaaattgcaacgatcattgtatgggttaaaacaatccggtaggatgtggtacaaccggctcagtgaattcctagaaggaaaaggattcatcaagaatgatgactgtccctgtctgcagcttgagcacactcctgaaggggtattgttacaccagtctgcatatatccagaagatattggagaaatttaatatgaaggattcatatccgacgagaacccccatggtaaatacatgtgggctgaatatcacaccaactccaaccattatttatgaagataattcagcttgtgttgcacaaatacaaacgggttatgtgaagacgagtctcactaaacatatatcacctaaattcttctatatgcatgaattgcaaaagaaagaagaaatcaaggtgactctcaccaagactagtgaaaatcttgcagatttatttactaagtctttgccaactagtgtttttgagaagcttgtgcatggcatcgatcagtacatcattcttgaagaatga

SEQ ID NO: 31812 - DNA, 1260 bp, Oryza sativa
  Clone ID: PAT_MRT4530_36083C.1
atgccggggagtttacctctaagatcatttcccggcattaggggaggaaagtacctacagaaggtcgaatgccacgaaattgagtgggaaactaaaaatctcctacatttagatccacgtactaaggaatctgaccaggaagttcagatcataattgatttgcaaagaattgcaaataatctgccagaagccttcactaacccaaaggggatcatgaaatctcatatacttgttgtgaatgcaccagaaagagtagaaatatctcatgacgcagaggaaccggttttcaaattaatttctacatctaccccaacttctaggaagagggggagaccaccggttgcacacaaccaaactaaagtttataggagacgtcctacgaaacaacagattggacagaataccacagcaccagacaatagtgaaggagctcaccaggtagatgagccacctgcagtgatatgcccggatggcaatgaacccagtgagaatgcgcgtgcaattactactagcactgggagaccggaaattcctgacttaaacattgcgggaaacaatgaagatcaggaatgtgaaagaatagaggaaatatccaccagttatgtggatacaggtgaaagatacaatagagggactactattgtcgacatatactttgccgaaaagattgctaagatcattgatctggatccagaaccaaagtccatggcagaatgcaaaaagcgttcagactgggtcaaatggaaagaagcaataaaggcagagttaatctcgctcaataaaagaaaagtattcggtcctgttgatcgtacccccgtagggatatcccctgtgattaaggaagctagttcttacctaaagacggagttcgagatgaaagaattaggtaagactaaatattgcttaggtctgcagcttgagcacactcctgaaggggtattgttacaccagtctgcatatatccagaagatattggagaaatttaatatgaaggattcatatccgacgagaacccccatggtagtaagatctctagcagtagagagtgatccatttagaccacagaaaaataacgaggaattattgggacctgaatgtccatatttaagcgctattggagctttaatgtatctcgcgaatggtaccaggcctgatattgcatttgctgttaacctacttgcaagccatctcatggaagtcgacgaagcagacaatggtcgcgacatcaacaaatcactcagagattatagcattatttga

SEQ ID NO: 31813 - DNA, 4066 bp, Oryza sativa
  Clone ID: PAT_MRT4530_36084C.1
atgactgatattgctaagagagattttgctgaactagcagtcagcggcaagaattacctgacatgggcactggatgccaaaatcatgcttggtgctaagaaactcctgaactgcattcaggacccaactattgcaacatcagctggaggagttaataatttaccaacttcagctgagaaaaatcaggcactgcatttcctgaggcaccatttgaatactactctcaagaatgagtatatgactgaggaagatccgaaggtcctttgggactcactgaaggatcgctatggccatcaagtaaaggccttgctcctaaaaacaaaacgtgagtggcttcacttacgtttccaagattacaaatctgtggagcaatataactcagttcttcaccgcaatgtcacttgtcttaagctatgtggagagaaaatcactgatgctgacatgatagacaaaactttgtccaccttccatgccaatcatgtgaatattcagaggcaataccgccaggctaaatacgagaagtattctgaactggtctccatgctcatcgaagcacaaggagaagatgagacacttgttgaaaatcatacgtctcgccccactggaagttcagcagcacctgaagcaaatgctagctcctttaagaaggggaaaaaccagaataaccagaacaaagggaagaatttctggaaaaatggtggcaaagttaacaagacgtctttcaagaagaaaggaaatcagaacagtaagtctaagaagggctctactagtggtgaatatggaaagcaagatcaggtatgcttcaagtgtggcactaggggacactggtctcgcatttgccgcacccctaagcatctcattgagctttatcaagagaagcacaggaagaagaagtcagagcatgagtcacacttcactgttgagatccagcactcagaagagaagatggctgccatgcatatcgacaagcagactggtcaaatcgctactattgccggaagcaatgcacccatcgtcggagtgggacgagcaacagtagttctcccacatggtaccaagatcattataaatgatgctctattatatctaaagtccagtcgtactctactaatctttaaagatatccgtgcttatggttatcacgtagaaaccaaagatgagaataaactcgaatttcttctcataacgaaattagacggaaatcataagactgttgttgaaaaactcccttccttgaaatctggactgtactacactcatataaaacccgaaaatgttgcactgaaaacaatatttaaaaatcctgagtcatacagaatatggcatgataggttaggacatccaggtctagggatgatgagaagaatcatctcaacttcaaatggctataatttacgacctaacgatttcccaaaccaagaagattttgtttgcactgattgtgcaacatggaaattaatcgttagaccctctaatctaaaggtgaacgcagaatcaccagtattcttgcaacaaatacagggagacatatgtggaccaattaatcccatgtccggatcattccgtttcccgggtaaccggatacaatccattagaatggacaatgccggggagtttacctctaaggtatttaatgaatattgcatggctttgggaattaaagtggaacattctgtaccacacgtccacactcagaatggtctcgccgaatcattaattaagaggattaagcttatcgctaggccattgctactgcatagcaacctaccaactacatgttggggacacactgttttgcatgcagcggcgttacttcaaatcagacctactgcatacaatgttgtatcccctatgtagcttacacgtggatatgcaccaaatatttcccatctacgcaaatttggatgtgctgtatacgtccctataccgccacctaagcgtacgtcaatgggtcctcatagaaaattgggaatctatgtaagatttgaatctccgtctatcattaaatttttagaaccattgacaggagacctacatatgggtcgatacgctgattgtatatttaatgaagatcatttcccggcattagggggaggaaagtacctacagaaggtcgaatgccgcgaaattgagtgggaaactaaaaatctcctacatttagatccacgtactaaggaatctgaccaggaagtttagaccataattgattcgcaaagaattacaaataatctgccagaagccttcactaacctaaaggggatcatgaaatctcatatacctgctgtgaatgcaccggaaagagtagaaatacctcctgacgcagaggaactggttttcaaattaatttctacatctaccccaacttctaggaagaaggggagaccaccggttgcacacaaccaaactaaagtttctaggagacgtcctacgaaacaacagattggacagaataccacagcaccagagaatagtgaaggagctcaccaggtagatgagccacctgcagtgacatgcccggatggcaatgaacccagtgagaatgcgcgcgcaattactactagcactaggagaccggaaattcctgacttaaacattgcgggaaacaatgaagatcaggaatgtgaaagaatagaggaaatatccaccagttatgtggatacaggtgaaacatacaatagagagactactattgtcgacatatactttgccgaaaagatcgctaagatcattgatctggatccagaaccaaagtccatggcagaatgcaaaaaagcgttcagactgggtcaaatggaaagaagcaataaaggcagagttaatctcgctcaataaaagaaaattattcggtcctattgatcgtacccccgtagggatatcctctgtaggatataaatgggtgttcgtccgaaaacgggatgagaacaaccaggtggttcggtataaagcaagattagtagcataagggtttacgcagagacctggcatcgatttcgatgaaaccaattcacctgtaatggatggaattacattccggttcttaatatctatggcagtcaatttgaacttagaaatacagttgatggatgtagtgaccgcatatttatatgggtcattggattttgaaatctatatgaaagttcctgatgggattcaagttcctgaagaaacaaaacgcaacatatacagtgttaaattgcaacgatcattgtatgggttaaaacaatccggtaggatgtggtacaaccggctcagtgaattcctagaaggaaaaggattcatcaagaatgatgactgtccctgtaagactaaatattgcttaggtctgcagcttgagcacactcatgaaggggtattgttacaccagtctgcatatatccagaagataatggagaaatttaatatgaaggatttatatccgacgagaacccccatggtagtaagatctctagcagtagagagtgacccatttagaccataggaaaataacgaggaattattgggacctgaatgtccatatttaagcgctattggagctttaatgtatctcgcgaatggtaccaggcctgatattgcatttgctgttaacctacttgcaaggttcagtttggctcctaccaaacggcatttgaatggcgttaagcaaatcttccgttatttacgtggcacacaagatctcggtttattctttagaaaaaatcaagatttgaccatggtgggatatgctgatgctggatatttgtcagacccccataaagcattgtcacagactgggtatgtgtttctctgtggtggtacagccatctcatggaagtcgacgaagcagacgatggtcgcgacatcaacaaatcacttggagattatagcattatttgaagcgagcaaggaatgcatgtggttgaggagggtgatacaacatgtacagaatacatgtgggctgaatatcacaccaactccaaccattatttttgaagataattcagcttgtgttgcacaaatacaaacgggttatgtgaagacgagtctcacaaaacatatatcgcctaaattcttctatatgcatgaattg

SEQ ID NO: 31814 - DNA, 300 bp, Oryza sativa
  Clone ID: PAT_MRT4530_36085C.1
tcctccttagctagattagatcttccccgactgatttgaatcaaagtcaaagagcgaggcttgttgaagttgtcgatggcgaggaagtcaaagctcctgaggcaaaggcgaagctggcgactcataaaattgattccatcgcactcctcaataggaaactcggcgtacaactacctggcgcgccaactgttgaaacataaattcggcaataataaaaggggtagcgcacgagacctaaaagtggatggatgccgagacaaaggatttagacagattcaggccctctcaatgagaggtaat

SEQ ID NO: 31815 - DNA, 1029 bp, Oryza sativa
  Clone ID: PAT_MRT4530_36086C.1
atggccgccatggccgtcctgtctctgctgttcgtcgcggccgtggcgtacgtgctgccccgcggcggcgacgaagagaasttcgccgccgccgtgaggaggctgtcgccgctggtctgcgcctacctcttcctcgtgacggccgccgtgtggagggacacggcgacgccctccctcctcgtccgcgtctccgccttcttcctcctcgccgacgccgactccctggtcgggccactcgccggcgaggcgcccatgctggccgccacggcctactccgccgcggcggtcggctacgccgtcgccgagcgccggcaccaccaggcatccgaggcatcggacgccgccgccgccgccgaggcgacgccggcgtacgagtcgcaggcggagcggcgccaccgcgagacctgcaagaagttcatcgccctcatcgtcttcttcgtggaggccatgcccgccgcgatcacctacctcgcgtggtcgctacagccgaacgagaacgacgcgccgccgccgcagccgacggggcacgacgacgacgacgagccgtcgccggcgtcgatcgtggtgtgcgtgacggcgacgttgtcggggccctacctcggcgtctgggccctgttcgtgaggagcattctgctgcgcgggtgtttcgtcgccggagacgccatgtgcgtcgccgccgtgtgcgtgggcatgtcgtggctgttcgtcccggtcgtcgccggcatcgttctccggcaaatcaacgccgttctctacggccactggctctacggcatcgccatggccggcttcctcggctacagccttgccgtcaacgagcgctaccaggagctcatgctcatcatacggagccagcctcggacggcagccgacgcttccggcttgctggtggggcgggaaacttgtgctgcttgccctgctcagatcgacgaaaatgccagcgtcagactctcccatcaagaaggttgcttcagcgtttcaggccattgcccatcttgtcactgtcctagacaagtgtcggagccatga

SEQ ID NO: 31816 - DNA, 859 bp, Oryza sativa
  Clone ID: PAT_MRT4530_36087C.1
ctctccatctccacctgaaaggctcaaacccaaaaagcccaccaacctctgcgtccccgtcgccggcgaccaccaccatgtgcgccgccgccgccgcagccgccaccgcggggatcatctcaccgcctacacctagtctcctctgggcgaacaccagggccaccttcgtctccttcccgcggcgatcgcctcccacgacctccctcctctcggcctcctccgccccggcccccgccccgccgtcggccaaccccaagtaccacaacgcgaaggtgaacgcgggcgacgaggaggtggacggggaggagctgcttcagcggttcaggcgggaggtggcgcgccgccggcgtcatggaggagatcaggtggcggcggaggcacgaggacgcccgggacaagcgcaagcgcaaggcccgctccgccggccggaggtttcgccggaggcatttcaagggtccgtacccatttggtgacgagcaggaaccaaaggaggggatcatggaggatgataagcatgacaattgggagcttcctggaggagagctcccttcttacagatgaaccgataaatgacattgatgttcttttggagctcgcttcttacagatgaacttaaaaatggcactgatgttttctgtctgacagaaggatttcgatgcttcaactctcagttcctctttcttcttcagcagtagagtgaacattacccaacacaaccctagttgatctgtgaccaatatttagtgaacttgcatttctatgtgtaaggtatagttgttatgtggcaaaatacactagtctgaaccgattcctctgttgtgtgttaattgccaatttgctttcaaaaaaaaaaaaaaaa

SEQ ID NO: 31817 - DNA, 942 bp, Oryza sativa
  Clone ID: PAT_MRT4530_36088C.1
cgtctataactagtggatccccgggccggcccgcaaacccaatcacatcgccgccatcgtcgagcttgttctaaccttctaagctattagcaatggcgtcttcgtcgtcatcgtcgccgtcgaggccgttgctcaggcgggtgctctcgttcagggagccgctgctgctgatcccttacatcgtcggattcctcgccgccgcctcgtcgggattcttctacagctactcctccttcctccactcgttcgcccggtcgctcgtcccggcggccgcggccggcgccgtggtcaagtgcgcgtacttgtcggcggcggcggattccgacgagccatgctcctcctgcggcggcgaggatgaagacgtcgttgccgccgtcgaggaggaggaggctcacctgagcaaggtggaggtggaggagatcatggagcggatagggctgggcgtgggcggccatggcgaggggctgaaggcgaggatggggcgcgacgaggtgtcgaggctgttcgacgccgacgagcccagcttcgccgaggtgcgccgcgccttcgccgtgttcgacggcaacgccgacgggttcatcgacgccgacgacctgcgggccgcgctcgccaggctggggttccgggaggacgccgccgcgtgccgcgccatgatcgcggcgagctgcggcagcgtcgacgccaggatgaacttgttccagttcgtcaagttcctcgagaccggcctctgctaatcaaggctgattaattaattttttttcaatttttttttccgttttgggttcgttgcacggtgcacggctcagctcgtggcagaagatgagagagctagtggtgtgtgttgcaaattttcctctttttttttctttttccttctgcgaggcatgagttggtgctttgtgcaacaattaacggcctaatctgtcaattaattgatcatac

SEQ ID NO: 31818 - DNA, 258 bp, Oryza sativa
  Clone ID: PAT_MRT4530_36089C.1
gccatctgcaccatcacccccatcatcgaccgctgccgttggccgatcgccggtcaccggccgccgccgtgtggcatgcccgggccggccttggcgccgcccgtccccagcctgccgctcggccctcggccgatcgtggccgtccatcccatggcccgcatggccagccacgtggtgccacgtcagcgccacgtggtacaccaccaccccggccccgtggacccggtccacggtggaccaccccctttgagccgctga

SEQ ID NO: 31819 - DNA, 381 bp, Oryza sativa
  Clone ID: PAT_MRT4530_3608C.1
atgtcgtatgtcgacatctgcgcgacgacgaggatgacctggagccatcagcggcgcggattggggctgcggtggtgcggagcgtcggcgatgtatggagcaggcaggatgagacgacggcagggggcggcggtcgaggggggcgcggaggagttcgtcgctctcaacgtgtcgattgggagcggctccccacagccacggaggcgcacggcggcgccgcatagaagatctggtgcaagagggatcgggcaggcacagtcgcttggcatcccgctctccaccctcgacgaccacctgcgcatcgacctcgccatcgacagcgctgaggaggtcacgttccagattatgaaggagagaacagtcttagttgtcagttcttga

SEQ ID NO: 31820 - DNA, 135 bp, Oryza sativa
  Clone ID: PAT_MRT4530_36090C.1
tcgtttctcgtgtgattctggaactgtatccgccgtgagtgttcgtagcattcaacgcgcgaggcttggcctagatgataccgcctctatttccacccattggactcttgacagaagattttgtctctgcttctg

SEQ ID NO: 31821 - DNA, 346 bp, Oryza sativa
  Clone ID: PAT_MRT4530_36091C.1
ccaacatcaaaatggcagcaacctacacaacacactacagatgtttctgaagcttcacgtatgcttcctcccaaacaacacactacaacacagcacactctggtcgccatatgatccaacagattacacacgattccaaatattggaactcagggctgaagaaaataggctaatcaattcgtccgacagattgaacccccgaaacattttgaggaacaaacgaactaactgttattagtactaaggttaaggcaaagatagaaagcttccagatctagaagtgaaactagggtttaagcaaatccgagaatggtgtggtttagggacggatgacagagaagagggc

SEQ ID NO: 31822 - DNA, 337 bp, Oryza sativa
  Clone ID: PAT_MRT4530_36092C.1
acccgaccgttttttttgtcagctctcacagctcactgcatgggtggctctttacaccatgggggggtgctccccagtgatggcccgcacggcgccatggatctccttcgtgcttttccgagaagcgcggatcaccatacccaagaccggcgaaaaccctaccccagggtgacctatcaaaagcctgccaccttactttctatcgatggctacaaccgctggaatgacacacattgtgcgtgagggctaccatacctggctacaagctccacaagaacgaaaggtacaccgctgggatcatcaatcgacaccgatacgtttgtcattaaccgactcg

SEQ ID NO: 31823 - DNA, 1462 bp, Oryza sativa
  Clone ID: PAT_MRT4530_36093C.1
gcacgagggtcctctactatcttaattctagaagtgtatgatcagtttgatccaagaagtggtagagagtagttggtgttgtattctcttccattgatcattgagctaagctatagctgtagcagcagcagcagcgacaacctcccatagctttgatcttgcaatgctgcaaaggaacctgccgaatctctccctccggataagccctccggccgtctcgtcggcggcggcgccggtatcctccggaacaccgacgacggcggcgaggacgactctgccgaccggagtgattacagacgcagaaggaggaggcgaagtagcagcgttctttggaaaccctagctccggcagcgagccccccggtctgagcctggggctcgggccgacgacgccggcgcacgcggacgccggcggcggccgccatggcgaccaccacctgcagccgcaggggtgcgcgccgttcaagcgcgcggcggccagggcgtcccagctgccggcgggctcgaagcggagcgtccgcgcgccgcggatgcgatggaccaccgcgctccacgcccgcttcgtgcacgccgccgccccccccggcggccgcgggggagcgacgccgaagtcggtgctggagctgatgaacgtgaaggatctgacactggcgcatgtcaagagtcacctccagatgtataggacagtgaagagcacagacagatcatcccacattgcctcaggagaggcgcagctgcagcagcaggcaggaatggaggtggccatggaggcggcagctggaggaggaggaaatggtggtggtggtggtggtggggtggtgctaccgatgatgccggcatgtgacgacatggttgggatctgtagctcccctgcgccgcctgccgcagcgactagttccgctgctgcctacttcctctgcgcgacgacgacgtcaacagcaactgctccactggcagtagtgccatcgcctcctgctccaaccattcccacaaggtttcatgaatgcatatatggagatgttgatgtagtaatacagtcaatttcaatgttaataaatgttttgctacatggaattgataagagctgcctcgctttaacttttcttgagcacaggaggactgaccaaacgccagcgctggaaaagggtgtcgcgattgttgactcgttgcaccggtgtcagaagcataactactcaccagtgcttcaagatgctcttcatcagggagctgaagaagatcatcttattaccgggaacctaccaatgggaggagcatcagcacaagcgagcattgaggccatggcgactaccaactcttcaagccctgcaagctcatctccatcacttgcaagcctggagcagctgctacctgaagactcgtttgcgcccaacctggagatctccctcgggagacataactggaacatggaccatcctgaagaactcagcctgaaatacctgtga

SEQ ID NO: 31824 - DNA, 2559 bp, Oryza sativa
  unsure (1)..(2559): unsure at all n locations
  Clone ID: PAT_MRT4530_36094C.1
gtctatttttttttttttttttttaagagggaaatctaatctcagcattcccctttattgtgtaccgtaaaaaacgtccagagataatttagtagataaagagttttgatatgatttatattgcatataacatcctaggaaatacagacaagcggacatgtaaaacaatacaagatgaaagtaaccaagaaaattgctggaaaaactgctggttcgatcagctaccgtcttcaaacccaaaaaggaacaggatgaacatatccagaaatatgttctaggacctcgcttcaccagagcaaattcatttgatttggccaacgggccaaattattctttcatctgttgaggttgtctagaggacttgtgaagatgcgaagtaccaccataatttgcctgaagttcctgtataagctcatgtctcacttcaatcacagggtgacacgtacagaatgctgaaattgcatctcctgttaagatccaacagccgcttaaatccaacatacgcagcgtggcagggggaacaaactttctaagcccagtggtggacaatatattcccacagaacccaagatgtatcaaatttgaggcagaagacagtgcatgcaaggcaggatcagacaagaaatcactttttaggaacaaatatttcagtgctctaagggatgctaagggaggtataacatcatccatcagctgtgtaccaacttcatacaaaggtggcaggatgatcaaacatcaaacagcaccacagatcccaaagcatcaatagtttagatccatgttttcagccctcaaccagatggaaaatgcctcaggaatggatggaagaatgtataataaagcagaatcatcaatttttgtatgagctaaagacagtgttgtcagacttggaactgttcctgccagaacacacagtgcttgagaagttacttcagaattactcaggctcaaaaacttaaggttcattccaatatttgcaatatattcaattgcatcgctaattattctgctgtagctaaggtccaagtgctctagattcctcatatttcccaagaaatacaagttgcttgaagagcaacttgacatatccaagtatgtcagtgaacttggtaggatgcttgaaaaaacttcatcaatgttgccaaatgatgctgcggagataatcaacttttccagatgaataagaacttggaattccccattgcaaatagaatgaattgtgcagttgctcatatttagacacctcaaggtcggaagaattggtaagcatgtcacacgtgtccaagaaatattcaagaagctcaaagatgtaaatgcaataaggacagaagctccctcattggtaatttcactgccccatatatcaaggtgctcgagctgtgtcaatacctgtaaagaccgtagtgctttgtctgtgaaacgaactccccccaaatctaataaacgtaagtttatcagcgacgaaatggccataactccattgtcagtcaacccggtttgcgaaacatgtagcttctccaagctttcaatggaagcgatatgtttgatgccagcatcagagatcttggagcaccttgacaaatccaactctttcaacgtacgcataccggagagcgcccagaccgcagaactgttgacgttcttgcaatccgcaagcttcagaaccctcagataccggaatgctcctaggtaagccagccactccgcgtcgacggcgatgtgaccgctcagatcgatctcctccaccgagtgctggaaaacctcgaggagggaagggaagaggaggcggcgggcggcgaggcggcggaggagcgcgtcggcgagctgcgcggggaggcgctccagggagcggcgctggcggcgccacgcctccacggtggcggccccgcccgccgccgcgtcgatgcagcggtcgaccagcggcgtctcgccgccgccgccgccgccaccggcggaggcggaggcggacgccattgctcatatttagacacctcaaggtcggaagaattggtaagcatgtcacacgtgtccaagaaatattcaagaagctncaaagatgtaaatgcaatanaggacagaagctccctcattggtaatttcactgccccatatatcaaggtgctcgagctgtgtcaatacctgtaaagaccgtagtgctttgtctgtgaaacgaactccccccaaatctaataaacgtaagtttatcagcgacgaaatggccataactccattgtcagtcaacccggtttgcgacacatgtagcttctccaagctttcaatggaagcgatatgtttgatgccagcatcagagatcttggagcaccttgacaaatccaactctttcaacgtactcatacctacattatcatcacaagagtatcgcgaaagatagttcgatcgaggtctctccatgatagatacaatcgtgagtgagaaaagcttcaagtgttgtaccggagagagcccagaccgcagagctgttgacgttcttgcaatccgcaagcttcagaaccctcagataccggaatgctcctaggtaagccagccactccgcgtcga

SEQ ID NO: 31825 - DNA, 417 bp, Oryza sativa
  Clone ID: PAT_MRT4530_36095C.1
atggcgctccgtccctgtcacgcccagaaattcccgaatagaattccaagcagaatgtgcattaaaatccccgtccaggaccggccgggggggggtggcgccgacaggcggggcccgcatgtcagcggctcaaggggagagaggggcgccggcaagtggggcccccgggtcagcggctcaaggctgccggtccaccagaccgacggcccagatcgcccccggggccgatcggacgggcggcggcgacccggctcggctcggctcaaggccgaccgaccggccacgtcgatggccacggcgcgcgcgcacgcgttgccggcgatggcaaccggcggcggaggcggcggcgcaaaggcggcggcgcacgaccggggcggcggcgcaaaggcggcggcgcacgaccggggcggcggctag

SEQ ID NO: 31826 - DNA, 886 bp, Oryza sativa
  Clone ID: PAT_MRT4530_36096C.1
ttttttttttttttttttttttttttttttttttttaaaaaagatgacagacttggggattgcatagtagtgattgttacatagaacatcatgctaaacattttaatgtaaccagagaagcacactaactctcaaaaaagcatcactggcgatactacacaaaatggtgagaatgtgcacatactacttttggcaaagctcaaaatggtcggcctgatttcttctttccaaagatcacctcccaaatgaccggcgagaatggacctttcttgtccaagtgctccctgatggacttctcatcaatggcaaagttcctgtcctggaaactcctcacgagcttctcagcctcctctacccccttagccttgcatacctcatcaaccaagcccacaaaggtcatggcattcggcgaatgcccagcctcaaacatctccacgcagaaggcaactgcatcatccagcctcccacccttgcacagcccctgtattagcaaccagtagctgaaggcgttcggaataaccccattcccctgcatcttcttgaaaatcctcacagcatcgtcaagcttgcgtgccttgcagaaagcctcgacaaccgcggtgtagacgacaacctcagggatggaacccttctctcgcataagaccgaacagcttcatggcctcctgcaccagcccgctcttgcacaggccgtcgagcatggcgacggcgttcggaatcagcccagtctccttcatcttcctgaagatctcgtccacgtcctccggctgcgccgcctcgtgctcaggcggcggcggcttcgtcggctcgcgctcaggctgcggccgctcgccgctgtttcccgcggcggaggtggcggctgcgtcgcccagcttaagcttctccat

SEQ ID NO: 31827 - DNA, 887 bp, Oryza sativa
  Clone ID: PAT_MRT4530_36097C.1
atggtagcggaggaggaggtggtggtggtgtgggagggggagaaggagggggagatcgactacgtgttcaaggtggtggtggtgggggactcggcggtggggaagacgcagctgctggggaggttcaccaaggacgagttcttcctcgactccaagtccaccatcggcgtcgagttccagacccgcaccctctccctccaccgcaagcgcgtcaaggcccagatctgggacaccgccggccaagaacggtacagggcggtgacgagcgcgtactaccgcggcgcgctgggcgccatggtggtgtacgacatcacgcggcggcggacgttcgagaacgtggcgcggtgggtggaggagctccgggcgcacgccgatggctccaccgtggtggcgctgatcgggaacaaggccgacatgccggcgggccggcgcgaggtcgccgccgacgaggccgcgcggttcgcggaggagcaggggctcttcttctccgaggcgtccgcgctgtcgggcgacaacgtggaccgcgccttcctcacgctgctcgaggagatcttcgccgtcgtgtcgcgcagggcgctggagctcgacgaggcacggcggatgcgcgacggcggcgccggcggcggcgaggtgctgtcgctgaaggggaccacgctggacgtcggctccatcatggagaccagcgccatgaagaagagctcgcagtgctcctgctcgtgagcgacacacagagactggatgttcgctcgtgtaatgtttttgtttcgacatatcgattattacacattcacatcatttcacctcgcgttcttgtcaattatagagaaggattaggcatgtaaaacattgtaaatttggtgattgccaagaaatggtttagattcttc

SEQ ID NO: 31828 - DNA, 415 bp, Oryza sativa
  Clone ID: PAT_MRT4530_36098C.1
agaaaaaactgaacgaactaaagatcttttgttatgtgaagaacaggcgattttttcatacggatgaagagggtaagaagccttcactcttttccactaaattttatgtatacatcatttgagaccgtctatgttcctagatgtggggttactggcattgactaccaactggaggcgttcctttaaatctttactcttgcacaatcatgtgaaacccattcttctcgcacgccaaaaaggtgtctttccgaatgaccaacatttccacgacgcattgtttttcctacccattgaggtgcttgacaacatgctccaacgaaccccgcttgcgaacttcagccagctttaatagttgcatgctccgtggcacctgcttgcagccccttaaaatacaggttggacggccttccctagc

SEQ ID NO: 31829 - DNA, 230 bp, Oryza sativa
  Clone ID: PAT_MRT4530_36099C.1
gaaaggcgtcttcgcactcgcctctctccgggccttcgcgcttttcctcctcctctcccctctctcccttctccgtcgccgtcgcagtatcaacccaacccgccgccatgagggagcgcatctcgatccacatcggccaggccggtatccaggtcgggaacgcgtgctgggagctctactgcctcgagcttggtcttcaggctgatggtcagatgcccagtgaccggact

SEQ ID NO: 31830 - DNA, 1706 bp, Oryza sativa
  Clone ID: PAT_MRT4530_3609C.1
ctcagaagtcagtactactctttttacaggtttaagaattgtgtaactatttattactcatcacttaggtacttcctccattttatattataagactttctagcattgtctacattcatatgtatattaatgaatctagacatatatgtatgcgtagattcattaacatatatatatatgctagaaagtcttataacctgaaacggatggagtaattacctcaggttggtacacatatgtacatgcacgaatttcgatgcacaaacacaagcagagctgggtggttgaccgttgacacagccgaagctaactctctacgtgttacaccatttctctcttcttgaacaggttgatcgatctcacttgccggcggccatggcgtcgtagaagcggctcctcctgacctcctcgggcgggatgaaggcgtcggggccgagcccgggcacgttgaacgccacgtcgtcgatggtccacgactcctccatccgcgtcacgacgcgggcggcgcgaacgccgacgccgaagcgggcgaggtgcgccgtggagcggccggagtgcgcgacgtggacgccgccgccgccgtcgacggcgcggtagtcggcgaggctggaggagatggtggtctcccagtacatggcggcggcgccgggggactggatccgcgtgagctgcgagtcctcgaggcggacgaggaggccgctccgctggctgaagaaccccgtcaggccgtgccggatcacctccgccgtgccgtcgctccagctcgacagcaccgacggccccacgtccagccgcagcacgaagcagtcctcgccgtccaccagcttctcgccggcgtgctccgccgtcgagaagatcgccgcgatcgtcaccggatccaacccctggagggcgcggcggagcgggcgtgagccgccgcgggcggcgtgggcgccgacccacggcgtgcggcgccaggcgacgcgtccgtcgctccccgcggcgacgtgctgcccggccaccgccatctccacgatccacatgctgggcgccagctgccacatcacgaagctcccctcgtgccccctcccgccgccgccgccaccgccggcgccgccgccggccggatcctgcagcatcgccagccgcaccctccccgccgcgtacatgctcttcaccgcgccctctatcttgccgcaccccgtcgtcgccctgaactgctctatgatgtactgcgccgacgacgccaccgccaatgacgggtgggctcccgacggtgcggggcccgggcggcagtgagacgggggtgcggccgtgcgggtgtggagtgcgggcgaagggaaggggcagcgttgaagggaggcaagaggaaaacgggttggaggcgggtcaaaatcaaaatcttcgctcgcgtcgcgttttgctttgctttgcttcgtgttggtgtggtagctacgaggagctacgagactgcttcccagtgaagtgaaacctccaaagtaatactccttcgggaaagcagaaattttagagaatttccatggaaaccgagaattatttttatagaatttctgataatctgattttatgcatgcgtgctgtgtttgcttgcaggagaggatcccgttaggcaatagccatcgacggcaagcagctttcagagcctcaaatgcgtgatggcggaagggagtgaaggcgactcggcaacccttgcaagcaccggccat

SEQ ID NO: 31831 - DNA, 2631 bp, Oryza sativa
  Clone ID: PAT_MRT4530_360C.1
caaggtatcaaggaataaagtaatcaatgcaaacaggccataacaaaggaatagattcacaccacccagtgacactcgaaaataaatgcacagttgaaataaatagagaatttaaatataggatcaacatgctcaaaggattgtgtttaggatctgtgtgacttgccttgcaataatcggtcttcaattaatcttcttgaacactttcgacgcactcacgaaccttcgcaacgacggaaacgacaagcaacacttacgcgacgacggacagcgacggaagatggccggcgacgcgcttcaaagggcggcgaggtactgtccacggcggcgacgactttccggcgatgtgcggcgacaacagaggggtggccgggcttcacttcgcagctgcgaatccaatggagtcgatggcgacagagggcgatgacgggaggagcagcagggcttcgccggagatcaaaacatggcaacggttcggccttcacgatgacgacgggcttcccggggtcttcgacgacggggaagtggaggccggtcttcttctcctcctcgcgaacccaacggcggcagcggcgaccgaaggcgacgaccacagcgacggcgcggggctgctggagcggcgccggcgaaccacgatacgacctcgccggagatagagcggccggctgcggatttggagggcatgcacacgtagaggacgacgaggcgaacccaacggtactcaccacaacgacaatcgacgtccgacgacggccggcgacgagaggaggcggcggcggcttggacctcaccgacgacggcgagctacggcggccggcggtgaagaaggacgggcggccgggcttctccaccccttggcgcacctcttggcgacggcggcaagcggcggcgacggcagaagcggcgcggcggcgcggctgcactcggccggtggcggcgacgaacttaacgcgcgcggcgacgaggctacggggcactagagagctcgggagagggggcaaacgaaagaggaggactagggggtcctatttaaagccttggaagctcgggtccgggcccaaaacgacgggaaaaactcgggaaagtttatcttcgccggaaaaaggaaaggatttgatccgcgaaattggaaaggatttccataaaaaattttggggatttcttggggaaaaggaagaggagaataagaggaatatttcccctcaactaatcggaagagaagaggccggattgggtgcgggatcggcgcggcaagttggcgcggcggccgactcgggctcggctagggcagccggccggagggtgaggcattatctattgtccaatgaatgcactgtcatatgcaaggctgatgttgtcaagtacatgttatcggctccaattttgaaaggaagggttggaaagtggatattttccttaactgagtttgatcttcggtatgaatcaccaaaggcggtcaaaggacaggctatagccgatttcattgttgatcatcgtgatgattcaatcagctcagttgagatcgggccatcgattttattcttcgacggatcagtatgtactcatggttgtggtatcggcttaatgataacttcccctcgggaggcatgttttgagttggcttataccattaaaccttatgcgactaataatcaagctgaatatgaggcagttctcaaagggttgcagttactcaaagaagttgaagccgatgctatcgaaattattggagattctttactagtgatcaatcaattggtaggagaatatgagtgcaagaatgatacgataatagtttataatgagaaatgccaggagctgatgaaggaatttcagctagtaactttgaagcatgtatctcgagagcagaatattgaagctaatgatttagctcaaggggcatcggggtataagcagatgatcaaagatgttaagattgaagttgctgccctgacagccgacgattggagatatgatgtacatcagtatttacaaaatccgtctcaatcggcttctcggaaattaaggtataaagcgttgaagtatactttattggatgatgagctctattatcgcacgattgatggggtcttgcttaaatgtttgagtgccgatcaggctaagtttgcaatcggagaagttcatgagggaatttgtggcactcatcaatcggctcataagatgaagtggctgcttcgacgtgcaggatatttttggccgacgatgctagaggattgtttcaaatattacaagggatgtcaggattgtcagaaatttggggcgaaccagagagcaccggcatcggctatgaatcctatcataaaaccatggccatttagaggttggggaattgatatgatcggcatgattaatccaccatcaaccgaagcattatggtcttatcggatggcttgtcatgggtcgatccaagtccctccttataagcttgtttatggacatgaggctgttttgccatggaaagttagaatcggctcaaggagaacggaattacaagatgatttgacagccgatgagtattataatctcatggtcgatgaaagggaggatttggttcaatcacggatgcgagcccttgcaaaagttactaaggataaggaacgagtcgcttga

SEQ ID NO: 31832 - DNA, 288 bp, Oryza sativa
  Clone ID: PAT_MRT4530_36100C.1
catccataccaccagggcagggaaatacttggagcacaaatttaactgttaaacccataccttaaaccaattcataataatacatcctctttacctacttacatacataccgttttccatcacactcaccatcgatcgtacaaactaacatacatacatacctacacacatatacgcatacgcacttacatacatacataattaaaaactcttaattaattaaatacatagttgatggcatatttaatagaactttaggctcctcacgattttctttttaaccgtatc

SEQ ID NO: 31833 - DNA, 1015 bp, Oryza sativa
  unsure (1)..(1015): unsure at all n locations
  Clone ID: PAT_MRT4530_36101C.1
atgatccaggaagcgacgtggaaggtcaaagggcgacacagtaggatgctggtgctatcggaggatagccaccactgcatggccaccggctgcggcgtggagtcaggatggggaagctacggagtcttttgcagtgantaatgtgggatcaagcatgaatactacaagttcttcacagaggatcctgagcagcaggccgccagcaacaacagcggccaagcaatgtgctatggtgtccacccggagcatggcggcgagggcgaaggcgaagcagttgaagaggccatcggcagcgtcggcaacaatgaaagagttggcgctttgccacgacaatgtcgtccacatagcctgcctcgtcgctgccacctcgccggagcctattgccgacctactcagcctacgtgccacgtgtaaggccatgcacgcggcggccaaggaacgtgatgtcgggaagtgtgtgccgctggagaggctggacaacatgaagtggatggagaatgagcgctacctcgccatcgtcaaccaccttgttggcgccggcaacccagacgcctgcttcatcaccggtgtcacgctcgtcttcgcgcatcaggacatggagcaaggactcctcttcctcaataaggcagccaccgcgggccacaaggcggcggcatacgtgctcggcctcctcctctacaagttcgatgatgctcgcgctaccgggaagaagtacattagccaagtcgaggatgatggcaatgaggcagcgaccggcgttggggtcaagaggaccaaccgggagtgccaacagtaccgaaagatcgtcggggacgtgatccaggaagcgacatggaaggtcggagggcgacgcggtaggatgctggtgctaccggaggatagccaccactgcacagccaccggctgcggcgtggagtcgggatgggaaggctatggagtcttttgcagtgatgattgtaggatcaagcatgaatattccaagttcttcacagaggtgatgaactacttgccatag

SEQ ID NO: 31834 - DNA, 1198 bp, Oryza sativa
  Clone ID: PAT_MRT4530_36102C.1
atggcgctgatcacactcaatactgtggatattgttcataggcctaagattgtgagcgatgccaccaccaggcgagagcgagcgagaactctcgagatcttcgtcaccaccaccgtccccggcgatggaggagatcatcggccgctcctccccgcgcggccacggcggctccggttccctcctcaggaagcggtgccggtcggagatggaggcggtgcgaggcctcctcaagaaggcggaggcgctggtgcgcaaggcggcggcgggggcggcggcgcgccgcccgctccctcgccgcgtcaaggacaaggaggccatgaccatggcccagaaggagcagctggtcggcctcctgtcgtcgctgccggcggggatcctcccgtcgcacgtcgccgacttcatgcggcgccggtgcagctggcgcgcggttcccggcgttgacggcgacgacgacgagctggagatcgatctcggctccacggaagacgccgcgctgttcgagctgaggaagatgctcgacgacgaggccgccgttcgccgcacgtcgccccgcggactcgaggacggcgaggtcgccgatgagtacatggacatctgcggcggcgtctctcccctgccggcggcggcgcgcaagcctcctcctctcgccttatcatcaccacctgcagccgcagagcaagaagacgatctcatcgacatctttggcggcgactctcctctaccggcgcacgaggatctcctcgacgcgtcgccgctcgtcaagccagaagccgacgagttcgtcgacatcgacggcgacacaatcgacaagtcgccaggaaatcctagctcaaccaccaccggttcgagcagcggcaacgcctccggatcatcaagcacatccgcctcctcttcaggcagcgactccgactccgacggcggcggcgtcggcgacaccgcgagcagcaacccaaacacagcaaaccatctccccgtcgtcgtcgtcgaagctgtggccaccaaaccattggagccgcagccgccgcaggtcgccgaacaagcttacaagatgggggagaagctgacccggagccggagagaagcagctccagctccggctccggccggtcggatgagcgagctcatcgccagagcgcaagcggagaggctccgccgcgacgccgagaggaagagggcgcgcgaggaacaaccacgttga

SEQ ID NO: 31835 - DNA, 840 bp, Oryza sativa
  Clone ID: PAT_MRT4530_36103C.1
atggttgttcagaatggttgggcctatgcaacaggccggctggcccccttcgattttctgtccagctccgccactgaggccggcggcggagttgccggccggcgtcatcctccactcctcgccaccgacccgctcctcaccagcggcaacaacccgcaccacggctccaccaggaacccccacaaccccggccgtgtctccggcggctcatccagcggctccgccgctgccgtctgcgccggcctctgccccgtcgcgctcggcgtcgacggcggagggtctgtgcgtatgccggcggcgctgtgcggcgtggtcgggttcaagccgacggcggggcggctgtcgaacgccggagttctgccgctgaaactggacggtcgatattcagcaattgttgatcagtctcggtctcagccctcacggcggcacggagttaggaaactaacgggaaaggatggaaaacgcgacggagtgaaacagcctcaagtcaacgcttgtgttgagtatgagagaagtgctcgtcttgagatcaccaagcgtgacagcgagaacgttcgatgtattgatgtagtttatccgcacaatcttcgattcaccgttggcaaggtcgccagcgacgaccttgtaggacgtgaggaagaatgccagcccgccctgtccgccgttcatgaggaaggagaaggtggtggtgaagctcgttacctcgccggtggtgttgctccagagatggcacggttgcttgtacagtattcgtccggcctttgggttgacttcgccggtgcccttcttggccaggacgaccgaggtgtcgccgaggtatgcatcaccttcaaaatgtag

SEQ ID NO: 31836 - DNA, 1254 bp, Oryza sativa
  Clone ID: PAT_MRT4530_36104C.1
atggcccgaagtgtcgactgtgccatgttggcccgatggcctcgggccgtgcctagcccgtgcctgggtcaggccgtgccgagcggccgcgcgccgccaccgttccagccgtcgtcgtcgctcgggaagtccaccgtcgggatcaccaagtcgtcgccgtcctcgtccgccgcttcgccgtcaccgaagatcgccggagcaccgtcgccgccgtcgacccgatctcctccgccgtttcctcctcgccgccggtgccgtccgttcctcctccgccgctcctttggtcaccgctccgccactgaggccggcggcggagttgccggccggcgtcatcctccactcctcgccaccgacccgctcctcaccagcggcaacaacccgcaccacggctccaccaggaacccccacaaccccggccgtgtctccggcggctcatccagcggctccgccgctgccgtctgcgccggcctctgccccgtcgcgctcggcgtcgacggcggagggtctgtgcgtatgccggcggcgctgtgcggcgtggtcgggttcaagccgacggcggggcggctgtcgaacgccggagttctgccgctgaaactggacgatattcagcaattgttgatcagtctcggtctcagccctcacggcggcacggatggtagccgagaaacccatggtaacttcttgcggcagaaacagcctcaagtcaacgcttgtgttgagtatgagagaagtgctcgtcttgagatcaccaagcgtgacagcgagaacgttcgatgtattgatgtagtttatccgcacaatcttcgattcaccgttggcaaggtcgccagcgacgaccttgattccatgggtgtcgaactccacggcgaccgtttgctgatcgccgccgcctgctggcgcgttctggccggcgccggcgaccatcggcaggtaggacgtgaggaagaatgccagcccgccctgtccgccgttcatgaggaaggagaaggtggtggtgaagctcgttacctcgccggtggtgttgctccagagatggcacggttgcttgtacagtattcgtccggcctttgggttgacttcgccggtgcccttcttggccaggacgaccgaggtgtcgccgaggtgctcgacgtagttgacggcgtggtcgcacagtatgccgagaacgagcgtaacaggaagccgtgcggcactcaccatatcggtgctgacgccgtcgtggatgatgctgctgttgctctgagagggaaatga

SEQ ID NO: 31837 - DNA, 1371 bp, Oryza sativa
  Clone ID: PAT_MRT4530_36105C.1
cgaggcctctcgaagcggcattttgcacctaaccccctagagttatcgggaatcgcaaagagggggccatctcgagtggctcgccggcggcggcggaggcggggagagatgctgccctacgcgacggcggcggaggcggaggcggcgctggggagggcgatgacggcggcggagtcgctgtggttcaggtactcggcggggatcccggactacgtcctcttctggcacaacatcctcttcctcttcgtcgtcttcacgctcgcgccgctccccgtcgcgctcctcgagctccgcgcgccggccgccgtggggccgttcaagctgcagcccaaggtgcggctctcccgggaggagttcttccgctgctacagggacgtcatgcgcctcttcttcctcgtcatcggcccgctccagctcgtgtcctaccctaccgtcaagatggtgggaatccacacagggctgccactgccgtcgctgggggagatggcggcgcagctgctggtgtacttcctggttgaggactacctcaactactggatccatcggttgctacatggggagtggggctatgagaagatccaccgtgtccaccatgagttcacggcacccattggattcgccgcgccatatgcacactgggctgaggtgctcatcctcggcatcccctcctttgtcgggccagcgcttgcacctggtcacatgatcaccttctggctctggattgtactccgccagatggaggccatagagacacacagcggctttgatttcccgttcaacctgacaaagtatattccattctatggaggcgcagaataccatgattatcatcactatgttggacgccagagtcagagcaatttcgcttctgttttcacgtattgtgattatctatatggaaccgacaaaggttacagataccataaggcgtaccaagcaaagatgaaggctctggggcaaacggaaggcgagaaagcagatagcaatggattgagctacgcgaagttggattaaactgtcctatatatagccaaaatctggaatgcctccctggtcattttgttcgttacggcttgtgtagtgttttgattttgtttcgatttctgtagtagtgtcgtgctgctgtgccttttgttttgtggctgtgacttgtgagcatccatggaacttgttacgctgaccaataacattgtgactcgggtagtctctatgtggtttgcgctcaacttgaaagagtcagaaccaattgctgtatatgtttttttttttaggaaaaaaaagccccggaaaaacaaaaaaaaaaaaaaaaaaaaaaaaactcgaggcgggggccccctccctctctctcctcgtgccgattcctgcagcccg

SEQ ID NO: 31838 - DNA, 2897 bp, Oryza sativa
  Clone ID: PAT_MRT4530_36106C.1
atggaaacacaggttgcaggtcctatattctgttatcaaccaatcttggagcagcaagacggcaatttattgatgattgccatgggcatagaaaggaacttggacatgcttgaataccatcaggttaagaaggatgagaacacttcgataagaatattcaaccacttgaaacacttgctgcaatccattttaccagttttatcaacaacatttgaggaataccttgtgagcatgaatctgaaaagggcaacctctgttcttcagaggccaggtggcttgacagcacccattatgcctaatctggataacatcagaagccaacttgccactgccagtccatctgtggagatgcaaaaccagtcaggaatggaagaaacaatagagatgcagcttgtggagaaaggacaagatggtatatatttagtgccgtttcttctttctaatgaggctgaagattttgttgtcccaatacagaatatatataataatgcaagggtgaaacaacattttgacgcgagaatgctggttaacctttctggcggatccacaatgatttcctctaaagtttcagttacgagctgtataaatgaactaatgaatgcccatgtaatcaactcagacaatcatttgcctcctgtgcacagccatgaatttataaactggatagaaaatctattttctgtttgtggtggtagtcgaaaggcacatgaccaaaagatgaaggatcttgaggaggttattcagtgtggtttggctggaaagaagtttctgttaattttgcatggtatctctgaagatcaaatggcccaatgggagtatttgttcagagcaatcaagtctggcagcaaaggcagcaaaattattgtttcaacaagaaagagtcctgatcatcgaagacaggcgaagaactgaactcacctcgatgtagtgcttggaatccgaccatttgccggatacacctggagcagctgcagttgatcaactgtaacagcatcaaatcactgccacagaatatggatcgagtccttgttcttgagagcctccacttgaatcaactgtccctaacatggaatccttgacttgcctgccgaacaatctgcactgaactgcgcatcagtggttgccccattctgaaggagaagtatggcgactatggtcctgaatgggacaacatatcccatgtgccttatgtttcttttgattaagaatgaattgttttctgaacgatgtgttcttattagagattgtgtgttctttgacttgtacaagattttcatttggtaatactgactagagtattactaggaacactggaaaattttgacaaattttaccatctcctggtttttaacatccgaggttgtcaactaagaagtttgccagatcatacttcacaaaaattattgagagtaaggcatatcattggacctgcttccctggtttcatcaatacatcatatcgggaatctcaagaatcttcaagagctacaagagttcagagttggtaagcgacctgggcatggtatagaggagctacaagatatgaatctgagaaagtcactctctattacaaacctcgagaacgtaataagtgcaacaaaagcaggcgaggttaacttaagcttgaagacttgtcttgtttctctgagactagaatggcattccgcagaggaaacctcgcaatcgatgagcacagtagttcttgaacagctccaaccaccgaactctctcaatgaactggaaatcaatgggtacccaggcttcgtatttcccacctggtttaccgaagatcatctgataaatgtgaagaaagtcacactgaggaattgttcgtttgtcagtgtgattgcccctctggccaagtttcctagtttggaagagctgattttagagagattttctatgttggagagaatatcagaatctgaagaatctgatcggacaagttacttcaaatatcctttcagatttttagggtttccagcagagacatcctgtcgcttcccaagattggttaaacttcgcattgaggatatgacagtactagaagaatggacagagcaacaaccatgcttcccctgccttgaggaacttacagtaaggaactgcccgaaactcgctgttttgcctcctcttcaccatgctagagttaacaggatgcatatagaggggttgccattgatatcctttaattcttctaggatgggatcagttgttccttttggtgcatttctggatgttcctaatcgatgtcccaatagagttgaagctagagcattgcagccatctagggtgttcatcctgcgacattgccccaacctatcaactttcacaattacagcagacaattctagttctagccacggctttgggcctctacttcagctagaaataactgactgcaagaaactgaagtccattcaaggtgcattcgcctttgttgagaagctgtacattgagaaatgccacagttctctgaaactgcataatggcaatgcgatgaaatcactccacactctgcatatcgacagcgtcgcaacgcatatggatccatttctgcttggcctccgggctctcagaatcctgatcatcaaagacagcgaagaactgaactcactcgatgtattgctggaatctgaccatttgccggatacactggagcagctgcagttgatcaactgcaacagcatcaaatcgctgccatggaatatggaccgggtcctagttcttgagagcctccaattgatcaactgtcctaacatgcaattcttgccttgcctgcctaataatctgactgaactgcgcatcagtggttgccccattctgaaggagaagtatggcgaatatggtcctgaatgggacaacatatcccatgtgccttatgtttcttttgattaa

SEQ ID NO: 31839 - DNA, 135 bp, Oryza sativa
  Clone ID: PAT_MRT4530_36107C.1
atgcatactctgctactgccatcatcgaaaaccttcgacgcacattcgacgcacaggcacctcgtcggtgccacaccgctggccgactgtcaagggggagctcgaccctcgacacgtgcccgctccatccacgca

SEQ ID NO: 31840 - DNA, 173 bp, Oryza sativa
  Clone ID: PAT_MRT4530_36108C.1
gcacgaggagtaccctggccttgcgacaccgctggtgcccaggcagtctgcaccacctcctgtactgtggcgtccttcaaccatctagcttcaaaaaacctcggccggttactgtgaaccagttgcaccccctggcgattcagtggtaacacagataggccggtgatcagatt

SEQ ID NO: 31841 - DNA, 723 bp, Oryza sativa
  Clone ID: PAT_MRT4530_36109C.1
atggtttctccaccggtgggagagctctacaagcggagggtgaggccgctcgacttcctgcacgccacgctcagggtgttcgtcttcctcgccctcgcgttcagcgacgccgggatccagacctgcctcttcccccaggagagcgcgacgtggagggaggctctggtcaacatgccgctcggcgtcggcttcgtcgccagcttcgtgttcatgatcttcccctccaccaggaagggcgttggctaccccagggaggctcaaactggcaccgagggcggcgccgacgccgacaaagatggcaaggccgagcctcccaagaccaccaccaacggcggctccggcggcgtcgacgcggaaggtagcaagcagaagaacaacgacgactgtcccaagaccaccaccaccaatgacggcagcggcggcggcgacggcgcgggcagcagcgtgcagaagaactctgccaaccagagcactgccgacggcggagggagcggcggcagctcggcgacgaggcggccctccgtcggcggtggaggagcggcggcggcggctgcgaaggagcacggctcggcggcgcgatgcggaggaccgccactggcggcagatgcggagggctgcgtacgagcggcgctcggcgacgaggcggccctccgctggcggtggctgcgaaggagcgacagctcggcgacgaggaatacgaccggcgacaaggagcgccgctag

SEQ ID NO: 31842 - DNA, 327 bp, Oryza sativa
  Clone ID: PAT_MRT4530_3610C.1
atggaggtgttcatccacgaggagtacgtgcacaagcggagggagcagcggcggcggcggggacggcggccggcggcggtagcgctgcagctgctgcaggtacagtcgtcgtcgacgacgacgaagccggagaagaaggcggcggcggcggcggcggcaggaggaaggcggccgctggctccacttgcaacggagcttcaggatagcccgtgggacctaccggccggcagcggcggcggcgcgtcaccgtccgacgccgctgggtctccggcggcggcggcggcggctaccgtctccttcgcggaccatctcctcggctacctctag

SEQ ID NO: 31843 - DNA, 786 bp, Oryza sativa
  Clone ID: PAT_MRT4530_36110C.1
atggcggcttccacttccgccgcggttaagatggccgccgccgtcctctgcctgatggtcgccctctccgtcgccgccgggcagctcacgacgacggccgccgccgccacctccacgcgcgtggatgatcacgtcgtcgaggacgacgacgacgcgacgccgacgacgctgcagcagctggagacgcgcctcgccgacgatcaggacctcgccgacctcctcgacggcggcgacggcgccgccaccatctgccccagcaactgccagaagtgcctggtcaagtgcgcgggcacctgcgtcgccgacatcgtcagcccgcccaccttcgtcgcctgcttcctcaagtgcgccgtcgtcaagctctgcttcgccaagcctcggcacctcgcctccttcgtcggcagccgcatcctcgcgcttccgccctccctccttcctagccttcactccgtcgttgcaccatcttgtgctcccaggtgtgcctttgtagtttcagacttccagcacttctcaataaatctcacccgatttattttgctacttctggtggtgtgtgtgcaccatgcagctgttggtcatccaaaccgtttcaccgttgcgctcgccatggaggaggaaagcgaccttcgtcagcatgtgccagcttgcgagctaaacgagctgagtcgagcttacagccgagctgagttgagctggctcgagcttacagccgagctgagtcgagcttacagccgagctgagttgagctggctcgagcttacagccgagctgagctggggtttttag

SEQ ID NO: 31844 - DNA, 1062 bp, Oryza sativa
  Clone ID: PAT_MRT4530_36111C.1
gaaaaaaagacagcaaatctgctcgttgtgaaaagtcaaaattctgccttttgtttgtgagagcaaaacttctacacgaggatttttatcaaggacagcatgtcctacaacagctggtctgacagctagatatcttggcaacaatctgcggttcagcacccacaacagataactatttgttgttgcttacataaatagtgaaaaaagaagcaaaacagcaatcaaggttaagacatgttttatcttgtgtcaaacgccttatatacaacagccctccattgtgagcgcattcataaacttccattttgcctttctaattttattgcttcataggaatccatgacctctttgaattttgcctcagcaaactctttgttatgttggttttgatctggatgatactccatcgcttttctcctaaatgcattcttaatttcagcatctgagaatggctccaatcttgacctgtcaagacccaagatagagtagtgctgtgacatagtgtaacccatggcttccctgggcatcgatctgaaatttgttctttggttagcataaaatgactctgcatcccagtaccactcctctcttcgactattctgatagtagcttggattatggccatcccgagttcggtaatcccgacatttacttctctccttcttgaacatatcttgcatgtgccttatgcgttccactctctccctctgatcctcactcttctcgcgcatcctctggtaatactggccccaggcttcaccacggtgctgcgtcctccaatgactacgattcaacgacggcaacccccaaaaaaaataggagaaaagaaaaagaacacgtcgcatgcattcatgcataccaaacgcggcggtggtgtcggtggcgccgatgagggcgaagaggaggatggaggcgggggaggaggaggcgttgtccctctcctccacccccgcgcccggcggccaccgggtcggctggtgctcgcccggcccccgcccgtccatggcggcggagggggaggtcgccggctcgccgccgccgccgtgcgcgcgcgcctcgtgc

SEQ ID NO: 31845 - DNA, 200 bp, Oryza sativa
  unsure (1)..(200): unsure at all n locations
  Clone ID: PAT_MRT4530_36112C.1
acgtccctcgttcgggtatagtatctccccgtccccttcccggcaacttcgactcctcatcgtgaaggttggcggcttgntcgtcgncgatcccaatcttcccgttgnagggatccccnggcgggcgtaggttgtcccnctgaatgntttcnncggaaaacccaattttgggggggggttaaaaaggggtncccccccaa

SEQ ID NO: 31846 - DNA, 601 bp, Oryza sativa
  unsure (1)..(601): unsure at all n locations
  Clone ID: PAT_MRT4530_36113C.1
tgaatattgaagggttgttattgggttgggaagagaatacccatgtgttgtgatgggtgaagacggtacggacgaagctcaaagctgacaggtggtagaagcactcgatcaggatttgcactcgggcaaattcgtgctccgcctatgtagagctggatcgtgctcagacacgacttcgagctagccgtgaggaataggtggcagcacatttggatgaagagcagtggtcgacgtggtacacgaccatgctaaggtatggttggaccatcggaggatctgaggtaatgcgtggagattgtcacgttgctcttgctgctcgacaacatggccatgtcgtgctccctttggacgaacaattcaacgaaggaatgcagaaagatcaaacagagatgtttcttatctcgttttcattaaactttcataccaggttccttttctagcaatttagatttggaaaccctctatgaactgcgggagaggctctccctccccaggctactgtttttctctgattactattcaactangtactcgtctctcttcgtggctccccaaaattttaaaaatgaagaatgtatttcgtgttaaaaaaaaaaaaaaa

SEQ ID NO: 31847 - DNA, 444 bp, Oryza sativa
  unsure (1)..(444): unsure at all n locations
  Clone ID: PAT_MRT4530_36114C.1
cccacgcgtccggttcattaaaaaaaaaataaaaaaaaaaataaaaaaaaaaaaaaaaaggggagggagaaaattaaaaaaaaaaaaaaaaaaaaaaaaaaaaaaaaaaaaaataaaaaaaaaaaaaaaaaaaaaaaataaaaaaaaaaataaaaaaaaaaaaaaaggggggggccgtttaaagggtccaaggtttcttacccggttattgtaatttaatattnttcaaaaggggccccaaaaaaaaaattactggcccgggttttaaaaccctgggatcggaaaaacccgtggttttaccaaatttaatcccttgaaagaaaatccccttttgccaggttgggttaataaaaaaagggccccaccaatgtcctttctcaaaatgttgcccccccttatggagaattggaccccccctttattcgtctttttaaccgcgggggt

SEQ ID NO: 31848 - DNA, 573 bp, Oryza sativa
  Clone ID: PAT_MRT4530_36115C.1
atggccaaaaagggtggccaagcccaatacggcatgggcccggttagggttttgcttgccgccacctcccgtatcctccgccaccgccaccgactctcacatagtccgctaccactgccaccaactctcacatcgtccgctaccactgccaactcctatatccttcgctgccgcctccaacgcccacatcctctgtcactgacgccaccagccgcatcctctactgccaacaccgccctgcaaggcagcttgaagcaagctctgtggactgggtggaacattgggcatcttggttgtgtcgcccagccgccacttcctgttagctccatgcccccgtggcctcttactcctcgtcgacgatctccactctcgccggtcaccaccaaaaagcttcctgccctccattcctacactaacagccaaggctatgtcgtctcctcttctctattcttggtgcctgccaccaccgctcgctaccatgccacgcgacccagtgcgccatgtcagcttgttacaacgatatcttgccaacacgtggtccatggtggcggcccaagtgttgatggtcgttag

SEQ ID NO: 31849 - DNA, 685 bp, Oryza sativa
  Clone ID: PAT_MRT4530_36116C.1
aaagaaaaacaaactttaaaagagatcccgaccttgtctttccaacccaaaatcctccaccaaaaaaactgaaagcaaaattagctaagaacaagaaagagtagagccgctcgtcgcgcgctgtgcgcgcctcctcgcgcagcatggcgatgtcggcggcctcgacgtagtagagctgctcgacgaagctcgcctccgcggctcgccgtgagcgggttcaactcgtgctcgtggtcccacggcacgaacatcccgtcgacggcggcgctgtacctcggtggggagtggggacggctcagcaccgaccggtcaaggttcaggcctccggcgaacgtccccgtgcgcgcgaattccgaccacgaccggaggagcaccaccgtgatgtggccgtcgccgaggaggtggttgctagcccacaccacggcgaagctgccggcaacccactccgcctccgtctcagccgcccgccgccctccgctgccgtcagtgccgcatgcagagagataagtgactgcattgctcgcccgcgtggccgccgccgtgcaggggggaagaggactgcagagggggagagcatgtgagcaagtagcgcgattattacaacgtcaatcatccgggtgctgagttcgattgcgttaggcctttgagtgcatatattgcttcttttggaggtcaaatttggtcc

SEQ ID NO: 31850 - DNA, 326 bp, Oryza sativa
  Clone ID: PAT_MRT4530_36117C.1
taggggtttgtttaatccaccccttgggatgaattcatagctggcttctgagatgaccccacacacaacttgagtcctcgggctccctggtgtgatgaagaggaacttgagaaggatgtgtaagagcctcggaccaagaaggtgtacctgggagcgtgccctagcaccattgtgtaccacccatattggacagcccagaatttccccagcataggtatacaccaccatagctttgcttcttgggaaagacctgcgtaagaaaataggtccattttggggccccagctattgatctgtaacggatctccggttgtggatcatatcat

SEQ ID NO: 31851 - DNA, 1425 bp, Oryza sativa
  Clone ID: PAT_MRT4530_36118C.1
ctggttgatccattctttcaattggattggattgagctgtggatcggaagaggaactgtatagtgtgggagagatcgattgattgatcgatcgagatggagcaggtggtgaacgcggtgctggacctggtggtgccgccggcgagcatggtgatgctggcgttcgcgtggccgacgctctccttcctgcgcggcgtggagtgggtcgtcaagacgctcaccgtggagaacatgcacaacaaggtcgtcctcatcaccggcgcctcctccgccatcggagagcaaatcgcgtacgagtacgcgcggaggaacgcgaacctggtgctggtggcgaggcgggagcaccggctgttcgcggtgcgggagaacgcgcgggccctcggcgccggccaggtcctcgtcatcgccgccgacgtcgtcaaggaggacgactgccggaggctcgtcggcgacaccatcagcttcttcggccagttaaaccatctggtgaacacggtgagcttgggccacgatttctgcttcgaggaggccggcgacacggtcgcgttccctcacctcatggacgtcaacttctgggggaacgtgtacccgacgtacgccgcgctcccctacctgcggcggagccatggccgtgtcgtcgtcaacgccgccgtcgagatctggctgcccatgcccaggatgaccctctactctgcggccaaggcggcggtgatcgatttctacgagtcgctccggtacgaggtgggcgatgaggtgggcatcagcgtggcgacccacggctggatcggcggcgaggccagcggcggcaagttcatgctcgaggaaggcgcagagatgcaatggaaaggggaggagcgagaggtgccgctcgccggcgggcaagtggaggcgtacgcgaggatggtggtcgccggcgcgtgccgcggcgacgcccacgtgaagcaccccaactggtacgacgtcttccttgtcttccgcgccttcgcgcccgacgtcctcgcctggacgttccgcctcctgctgtccacgccatcgccgtcgccgccggcgagcgcccgtcgccaccagctcgccgcgctgccggctccgccgctccacccgctgctcgagtacccgtcggctcggagccccgggcgcgccgcccagcagcacaagctggagtgacgacaagtttgggcgacagtgctagctgcgtgcgttatgtgcagctgtgcgcagatgacacgatgcagtgatatatgtatgaacatgagttcgcgccatcgcatgatattgctgtgtgaaaaaagatggtgactgtgatatctatgaactgatttggtcggtgtttgaataaaagatacgatatctgtagcgaatatgaatcaaattgcagtgttgttgtatgaaacaattagtaaaaaaaaaaaaaaaaaaaaacccacac

SEQ ID NO: 31852 - DNA, 286 bp, Oryza sativa
  Clone ID: PAT_MRT4530_36119C.1
ggtgaagatcgtatctattggtctcgttcgtcgtaactggcaaattgtttttgccttgccgaccatcctgatatatcaccacccatattccgagtcctctgtaaccaaatcaattttcgattcctcatgagatcagatcttctttggtgattttctttcgtttggctcttcttttggattcattgtgcagttatattggccgatgattagattaaaatatagacaagcatatgtctgaattttcatgtggaaaagcctaatcttctctatgaggtcagatttttga

SEQ ID NO: 31853 - DNA, 102 bp, Oryza sativa
  unsure (1)..(102): unsure at all n locations
  Clone ID: PAT_MRT4530_3611C.1
tngccggcgtccgcagaggtgtgtgctcggacaggcacagagatcgcaatactctaacatgatatagcatatgtcgtgctgctctacccaacgatcgataat

SEQ ID NO: 31854 - DNA, 398 bp, Oryza sativa
  Clone ID: PAT_MRT4530_36120C.1
ctgaacaagggtcctggctatgacttcaacacaaattcaggagcccactgccaaatatacagcacagcagagggactcacagtacatagacccagcattccagaagtccagcaaaacctttggcttcaaggcttcaccatgtctgtattggtaaacactaaccacttggtttacaaacaaccccagttactcatgaccgaaaatttggctggaaatttcagccgggaaaactaatatataatctaacattgggcctacttttctttcctcccaagattttgccacttttaggggaggttctgaaggttataaaaggattgggaggaatgccctatgggttaagacttggacgtggctcaatctttttcctctcagggaacctttgttccaggccaaac

SEQ ID NO: 31855 - DNA, 198 bp, Oryza sativa
  Clone ID: PAT_MRT4530_36121C.1
atggccctgctccagagccggccgtccggcggggtgccagggacggtgcaattcagcctgccgccgcagtcgccggacttggagctggcctgggcaaagaccgtgttgccactgccgctgagggagcatccggccaatggctggaggatgagcggcatcgagaaggtaaccggtgaagttggagactccatgctgtga

SEQ ID NO: 31856 - DNA, 982 bp, Oryza sativa
  unsure (1)..(982): unsure at all n locations
  Clone ID: PAT_MRT4530_36122C.1
ttttaatgtaatcctggcttccttgtatttttctggagtatgtgcatcacattcacaatctaacactctcacaagcatttgaaagcagtcaaattactccattttattcactctcacaacctgccatgaaaggaattcacaagccgtgtcatataaaaatcactcatgacatgcatcaaggcgagcggcaacagaatggttaaacctagatcgctcgtgcctatgatatccccaatcttcttgcaacaccttctaccctgtggaaaatatggcaatccggtggagatagaagcctcatcgttttcctaaaaactgtcaacattggaacgcaaggtccgttccgtctaatgctgccattttttaatcagtccaggaatctcaacaccattaggacctattttgttgcgagctatgaaatttagtatgtgcgatgcaaattcttcaggcacatctgtatggcatgtccagtgtgtcgaaccaccaccatttgaaactttccttgcatttgaccaattgttaaagctctgtccaacctatcagttccagctaataataggaccttttgcactggacaagacaagaacttttcagaaagaccttcataccatcctttccagtatttttctgtttcctcgagaggagttcgatatgtatagcattcccttgattcatcatatttcaaggtagatggaatcgaaacacgagcagaatcaatgttcctgagtggcccacctttgacactccattcaatagctttttcaatgctagggaaatgttgcgctcgatttgctaagatcttctgcatatgaatcaatgaagccattgctgttccctcaactacatcaataacaacaagaccgtgaagattgcgaataactttctttgcggccacatgtatagccacagaaccgcccatgctatgcccaacaagtataatggctggtggagaatctccatacaatgtgcgtaanacagctatgac

SEQ ID NO: 31857 - DNA, 397 bp, Oryza sativa
  Clone ID: PAT_MRT4530_36123C.1
cggtcgccctgttttttttttttttttggtaccaaacattatccattcttattattgcacatgatttttacttgtttgacaaatgtttatacgaagaaactcagtttcaggggaaaaaaattacatgtttcggcacagaacattggtaactggggcttgaatcattccgaaccacctaaaatttttgcttgagtaccccagggtatgttttactcaaaatgaaaggaccaaaccggattcatgctttataatttgttcccgcccttaacttttatactacgctggctaagatctttattaaagaaccaggcccaaatgaagccggaaaacccatttttttaccataccacaactatgaggattttgtagggctgtcaactgcaaaccccattggatt

SEQ ID NO: 31858 - DNA, 401 bp, Oryza sativa
  Clone ID: PAT_MRT4530_36124C.1
gttggcgactacgatggcgtaggtgtccatggaggacggtgaggggagtagcagggcgatggccagaggaggcgccagagatggccttcttctacgggcagaccttcatgccatggggtctctaggccgaggcgcacgctgctcgagaacgggtccatcgtcctataggcgcggatggtagaggtcggggagcccttcgtgacactcgtgcgcccttccaacctggtggtggtcacggaggcgctggaacgtaagggcatcacgcgtgggaccactcgacacgccctgcccttgtgggacgttgctgataccatacacaacgttctgcacggagaggggagggggtacttgtcagttagactattagacatgcattcttacttgactgtcaggaatgagga

SEQ ID NO: 31859 - DNA, 202 bp, Oryza sativa
  Clone ID: PAT_MRT4530_36125C.1
ctcaatcccactgacacccgagagcttaccaacgctctcactgatgaaaaatatgatcttgtctagttctttggctataagccgcaagaggttgaatgtcagagtttgctctcattgcttcttatattggaagtagaaaaattgctcaagtgctgaaattctctgattattacttaaaatgacaacatgggatttgctagtg

SEQ ID NO: 31860 - DNA, 322 bp, Oryza sativa
  Clone ID: PAT_MRT4530_36126C.1
gtgaaacttgacatatggctccacactgggtttttattatttttttcaaatctaattccacgtcagcccacgtcaatccacgtcagtatgaaaaccaagtcaaaattacccacgtaggccccatgtcatctaaaccccccatctaaccgctgaaggatctaatctccacccggttttgatacttgaggaacccgttgtatctgtttttcggttacaaggacgaaatcggattcgttgacaagtttaagggacctcagatgaacttactcccacatataatgatgggcccctttctggactataaaaaaaaaaaaaaaaaaaa

SEQ ID NO: 31861 - DNA, 2041 bp, Oryza sativa
  Clone ID: PAT_MRT4530_36127C.1
aattaagaataaaatttattttagaacaaaaatagtaataatccattacacctcccgaaatttcgcttgctcggctggatcctctgactctcccagtctccatgcccacagccgcaacaactggttaaaaagatccccgcgacgcgcacgcgacgcgacgaccacccagccacgcgcgacgcgccgcagcagccgggcccgccatggcgaaccccatcatcccgagcagcagcggcagcgacggggaggaggcgaggacgaagctcgggcggctgaacgcggcggtggagcgttcgtgggtcgggcggcggttcaagctggcggcgcgcgggtcgacgttcaccacggagctccgcgccgggacgaccacgttcctcaccatggcctacatcctcgccgtcaacgcctccatcctctccgactccggcgccacctgcaccgccgacgactgcgacgcgccgtccccggcgtgcaggttcccgcccgtggaccccgggtacgccgcctgcgtggcccgcgcgcgccgcgacctgatcgtcgccacggcggcgtcgtcggttatcggctccttcatcatgggcaccttcgccaacctgcccatcgcgctcgcccccgggatgggcaccaatgcctacttcgcctacacggtcgtcgggttccatggctccggcacgctcccctaccgcaccgcgctcgccgccgtcttcctcgagggactcatcttcctcttcatctccctcgtcgggctgcgctccaagctcgccaagttcatccccaagcccgtccggatatcgtcgtcggcggggatcgggctcttcttggcgttcatcgggctgcagagcagcgaaggcgtgggcctcgtcgggttcagctcgtcgacgctcgtcacgctcggcgcgtgcccggcgtcgcagcgcgcgtccgtggcgccggtcgtgacgttccccaatggcacggtggcgctcatgccgggcggcaccgtctccggcgggatactctgcctgtccggccggatgacctccccgaccttctggctcgccgtcgtcggcttcctcatcatcgccttctgcctcatcaagaacgtcaagggcgccatgatctacggcatcctcttcgtcaccttcatctcctggccgcgcaacaccgccgtcacggtgttcccggacacgcccgccggcgacgagagcttcggctacttcaagaaggtgttcgacgtgcaccgcatccagtccaccgccggcgcgctcgacttccggggagcccgccacggctacttctgggaggcgctcttcacgttcctgtacgtggacatcctcgacaccacgggggggctctactccatggcgaggttcgccggcttcgtggacgacgcgacgggggacttcgaggggcagtacttcgccttcatgtccgacgcgacggccatcgtgttcgggtcgctgctggggacgtcgccggtgacggcgttcatcgagtcgtcgacggggatcagggagggcgggaggacggggctgacggcgctcaccgcggcggcctacttcgcggcggcgctgttcgtcacgccgctgctggcgtcgatcccgtcgtgggcagttggcccgccgctggtgctcgtcggcgtgatgatgatgcgcgcggtggcggaggtggactgggccgacatgaggcaggccgtgccggcgttcctcaccctggcgctcatgccgctcacctactccatcgcctacggcctcatcggcggcatcgcctcctacatgctgctcaactcatgggactgggcctgccacgccgtcgcggtgctccgctcccggcgccggagaggggcgcgcgccgagacgaggagcgccgccgccggagacaatggagaacagaggaagaacttggaaatggcttaattagcattttttttttgcataatttcctttttagaagatttagaaggtgattaggatttgctatatatactgtatgaagatggttcaacaggcatagtaggatgttcaagtaaagtgattaatcaagtttcaaaaaaaaaaaaaaa

SEQ ID NO: 31862 - DNA, 631 bp, Oryza sativa
  unsure (1)..(631): unsure at all n locations
  Clone ID: PAT_MRT4530_36128C.1
gctgntggtatgtntgaataccccccctgggcccctcgtaattctncacccgctntgtgccccggccgtgtgcgcggtgncggtntngtccagtggtgngcatgcagaccgggtgttccccgtcgtggataacgcgggcccacgtggggcccaancnccatcttaattgttgagttagctcaactcatttaggcaccccaggcgttaacacttanggtcttccggctcgtatnttgtgtggaattgtgagcggataacacatttcacaccaggaaacaagctatgaccatgattgacgccacagctctaatacgactcactatagggataagctggtacagcctgcaggtaccgggccggaattcccgggtgcgacccacgcgtgccgatgcgactagccctgtttggtgcccataaagtnagtgcatggagatgaagccaggttgaattgattgttgttctgttttgtgtgattgagagaacccttgtgttggtgcatctctgatgtgccggaattgctggttggaaattcgtcatgtttgtttgaacaatgtaagaccacattattgcatttgtggtgtactatcttgtngagcatttaccacttgccacaaaaaaaaaaaaaaaaaaa

SEQ ID NO: 31863 - DNA, 344 bp, Oryza sativa
  Clone ID: PAT_MRT4530_36129C.1
ccgggcgggagtagaaaatgaaaagtcccttccattcatgagctgattctggtagcaaacaggagtactttttttttattctacacattatccaaatccagttttgcaggaagggtttttaaccccccgaacacagtttttcttgcgaaataggactggccccattcaggaagggcgttttccttaggggggttcagggggggcctcccattaggaaaaagggggagcccatttccaataagggagaattgcaaacttcccccctgttgaagccttggaaacccttcaggttcattacgtgggggtgatccccgaacagattcacccggggcccgttttttttg

SEQ ID NO: 31864 - DNA, 219 bp, Oryza sativa
  Clone ID: PAT_MRT4530_3612C.1
atggtcatgtgggccacccggcacggcacggcccaagcccggccgtgctgggccgaggcttgtcgggccggcacggcccgaccgatgcaccaggctgtactgtgccagctcacgggcggcatacacggcccaggcacggcccaatactactcgagccgtgccaggccggcccgaaggcacgatgggctatcgtgcttcctcacagaaaatgtctaattt

SEQ ID NO: 31865 - DNA, 530 bp, Oryza sativa
  Clone ID: PAT_MRT4530_36130C.1
gatagtttcttcccgtgctcttctgcgcgcccgcttgtctctgtcaccgtctctgttgtccgctagcctccgcataccggcaacgtcgcgcgttcgcgcgcgcgcgcgcgccaaacagcagcagcctcccctcgcaagccgccgtggacggtggaccgcgaccgggagggcgacgaccggctcctcctcctcctcctccgctgcgcgggcggcctcgtgcctttttagcgcggcatctgcatcggctgcgtggttggagtggttgggagacgacgcgcgcgagggccgccgatggcgacgaccccgcggatgggcggcgtggcgtggcgtggcacaggtgcaggtgctggtgctgggagctcgtagtggtttttctatgcgctccgtgcagctgagaggcttgacaacccaaccagatattaggtggttagctctgtcgcttgccgcgactctcccttcgtcttgaatcctcttttggccttgggtgattattatcatatatttgccgctctggtctcttgcgcttgtat

SEQ ID NO: 31866 - DNA, 1235 bp, Oryza sativa
  Clone ID: PAT_MRT4530_36131C.1
accaaacacacaagacaaggtagcaacaacaatggcgagacatggccctcaaagccatgaccaaccactccaagaagaggactacatagacatggacctgagctcacctgcagcggcagaggcggtgactgccagtgccagagcaagcttgctctgctacagcacagccatggcagcctccccacaaaactcaagggagttcgagttccacatgtcggctccggttgacaagtgggagcccgcggcatcaccagccgatgagctcttctacaagggcaagctactgccgctccaccttccaccacgcatccagatggtcgagaagctcctcgagagtgcagctgagaagggcctcctctccgcgagcactgccccagcaacgccataccagtcgtgcaatgcatcaccggcaaattcatgttatgtcagtggagagctcaatgctgagcattacttccacgagtgcacatcagctggtattggtgctgctgaggaggccgccgcctgcgaaaagaagccatggtccaagaagctcaagttcatcaggcatctcaaccttggcctcaagctcaaggcatcaaaagcttatatcaagacaatatttgccactaaagcaggcaatccagatggcaagactggtacacctagtgcaaatgagctctccaatgcgcagttcaagtcttggaggaagaacccatttggccagatcagaagcaacaggtacatagcctcgcctatcagcaacagtgtcacacttggagggaggcttaaagaagatgagtgcggccacaggaggtccttctccagcgtcattattcgatactcatcatcaaacaagacatcctcagcgtcatcatcgtcatgctcttcatcaaattcatcctcctccatactaagctccactgactctggtgtggggccagtgctcaggaggagcagcagtgcaagctcagagatggacaatccaatccagggagcaatagcatactgcaaaaggtcacagcaactggcctcggtgagaaagagtgcaagcgatgcaggtttccgtttcatgtcatcatcagcgtcaaggatagctgcagagtctgaagatccagatgatataattgagatttgcggacgatgaagtcgtttatgtacaaatttaaacacttttgctaattctgtacacttttgatcttcagatacctgcagacatgatcttataatgtccttcagaaaaaaaaaaaaaaaaa

SEQ ID NO: 31867 - DNA, 2247 bp, Oryza sativa
  Clone ID: PAT_MRT4530_36132C.1
atgggttcttgcacgactctatgcttcaaagacccggtggacatgatgcaagcaaatgggacctgtgacggcataggttgctgcacgatcgagacgatgagggaagtgcagggctttcggctaaggattgtccgtcaagatggcatcggccaggtggtgccgcaagaacaatccagtgtcaaggcttgcttgacccaaactgtcacagcgcatccaagaacaaagcaacctatgcttgcagtagaaactctcaatgcttcaatgcggacaggggtggctattactgctattgccccgatggtaatcccaatgggattccttacactcaagaaggctgtactgagattttctcagtccaacaaaaagtacctcgaggtaccggtacctcacggacctcgaggttacaatccctttccgaaaggaatatgtaacagattttgtggaaatacaaatgtgcccttcccatttgggcttgaagaaggttgctacgcgctagaaaagtttcgacttaactgcagagcaggaaaactatttctggatcgaggagatgtagactatctcgtgaggaacatttcagtggacaatggatatatgagcgtaaccaacgagcagaacaattcaacttctaacggcacagagatcatggtagttgctcgtactatgcatggctcctcggaagatgaccctcagttagatctttttgatttaactcaagaaaatgatatgaagatgtggtgggctgtcgtgagttttacttgccaggaagctacgcaagacatcaataacaattcctatgcatgccgtagtgtccatagcgaatgcatcgatgtcaatgtaacacatgggacacagcttggctaccgttatgtcaatgagtgcttgctaccgaactactgcaatgggagatgtcaaaattttattggaggctataattgcacaagttgccctcgcgggaaagagttcgacccaacaagaagggaatgtgtgacatcagctaagctcattagtatggcacttggaattagttgtggtcttggctttgtaatgcttgcacttggtgcaactatacttatcaccaagtggaagagaggtatacagaggagaattcgaagggcatatttcaagaaaaaccaaggcctactcttggaacaactaattatagatgaaaatactaaagacaaaacaaggatattctcattggaggaactagagaaggcaacatataactttgatgctactcgagttcttggtcatggaggacatggcacagtttataaaggaattttatccgatcaacgtgtggtggctgttaagatgtctaaaatagtggagcaagctgagatagatcaatttgttaatgaggttgccatcttgtcgcaaatcattcatcgtaatgtggtgaagctttttggttgttgtcttgaaacagaggtacctttattggtttacgagttcatatctaatgggacactatgtgaacttcttcacaatgatgtaagtgctaaatgccttctatcatgggatgatcgtattaggattgcaatcgaaactgcaggagctcttgcttatctccactcggctgctgcaataccaatttttcatagagatgttaaatcttccaacatactcctagatgacaactttactgcaaaggtttctgactttggtgcttcgagatccataccactcgatcaaactcatgtggtaacaatggtacaaggcacatttggttacttagatccagagtactacaacactagccaactaacggggaaaagtgacgtgtatagttttggagtgatacttgttgagcttctgacaagaaagaagccaattttaataaatgatgtaggtacaaaacaaaacttatcacaatgcttcctagaaggacttcagcagggagttctgatggaaatcttggattcccaagttttggaagaggctggacaggaagaaattgatgatatcgcttcaattgcacaagcatgcttgaaagctaaaggaggagagagacctactatgaaagaagtagaaatgagattgcagtttcttagaactaccagactaaaaaagtgccaacccatttctgtaatggatgaagagattgagccttttatttgtccaaagaccattagctctgatgctcaaagcagtttcatccatactgctggttttacatcagaatatagcacaagaagttacaggttggagcaggaactctcgtcctcagttggtttgccacgataa

SEQ ID NO: 31868 - DNA, 219 bp, Oryza sativa
  Clone ID: PAT_MRT4530_36133C.1
atggcgacgatccgcgccgccggccaaggaggttgctggaacagcttccaacaggggcgcggaggaggtcaacgcgggatcggtggtggcacggaggagatcgatgagaggcgatccgtggaggtggcaatgggcgattggcgcgcggcgtggtcgtgggcgacggagatcggcctggcgggcggcgatggcgtggccgcggaagaagggcggcgatag

SEQ ID NO: 31869 - DNA, 363 bp, Oryza sativa
  Clone ID: PAT_MRT4530_36134C.1
atgtcggggccaatagaccacgaacgtctccatagaaggcgtaaagttccaatcggcggctttttactggctaacgggtccaagtttgactggaatcggatctacgagagaagggagaggaggggcatcgatactccggtggttgagaggctgcgacgttggcggaaaaacatgttcccgagcgacgcgcacccggggagggtgacagtcggcagaggaagtgagagaggaggctggaacggcgcaggcaagagcttgctccggcaacaagaggaggtggctgtgatggcgtcggacgtcggttgtgaagaggctgacgtcggcggcgtgaggtggcagatgacgtcggcggcgatgccttag

SEQ ID NO: 31870 - DNA, 654 bp, Oryza sativa
  Clone ID: PAT_MRT4530_36135C.1
atgggcgaagtggccaccaccaccctgctgctgacgagccatgaagcaaaaccggccaaggcaccgtctatccacgacgccatcgaggtgtacatcggcgccaccggcgcccgccaacttctcaaggccatgctgctggccttcgcttgggctttcgacgcgcagcaggtgttcatgtccgtgttcacggacgcggagccgccatggcactgcaccggcgtcgtcgatgcggttgaggcggcggcgggcgactccggctcgtcctgctcttcgccggccacttcggcttcgccgtgcgcgctcccgctcggcacgtgggagtgggaccgcctggccaagacgtcggtggtgtcggactgggcgctcaactgcagcggcggcggcccagcgctcgtctccctcccggcgtcgtcgttcttcacaggaaacctcgtcgtcgttcttccatacagtctcatatgtgcaccaatgtgtgaccgcgggtgtgagtcccgtatgtgctcgtgtgtggggccggtcagtgctgaggagcaccaatgtgctctagtgcttgtgcacactcagcactcaggatggtgtaagcccaaatcccagtggaccgcgggtgtgaggtccgtatgtgcccatatgtgtgtgcacaagccgcgggtgtga

SEQ ID NO: 31871 - DNA, 1644 bp, Oryza sativa
  Clone ID: PAT_MRT4530_36136C.1
atggccgacgcggccaccaccccgctgctgacgagccatgaagcaaagccggccaaggcactgtccatcgacgacgccatcgagacgtacatcggcgccaccggcgcccgccagctgctcacggccatgttgctggccttcgcttgggctttcgaggcgcagcaggtgttcatgtccgtgttcacggacgcggagcccacatggcactgcaccggcgtcgcggccggcgaccccggctcgttctgctcgctggcggccgcttcggcttcggcttcggcgtgcgcgctcccgcccggcacgtgggagtgggaccgcccggccgagacgtcggtggtgtcggagtgggcgctcaagtgcggcggcggcggcccggcgctcgtctccctcccggcgtcgtcgttcttcgccggcaacctcgccgggggcttcctgctcacgacgctcgccgacactctcctgggacgaaggaagatgctcgtcctgtcactggtgaccatgtccgtcgccggcgtgctcacggtcttctcgccgaacgtgtgggtgtacgccgccctgcggttcgtgtgcgggttctgcagatccacggcgggcacgtccgcgatggtcctgtccacggagctcgtcgggaagtggtggcgcaacacggtgagcgtcgccgcgttcgtcttcttctccgtcgggttcatgtcactcccggcgctcgcgtacacgctccgcgaggcgtcgtggcggaacatgtacgtgtggacgtcgctcccgtccctctgctacgccgtcctcctctacttcctcgtccaggagtcgccgcggtggctgctggtgcgcggacggaagcaggaggccatcgcggcgttgcggcagatcgcgtcgctcaacggcggcgaaggcattacaacgtcgagcttcaccaagctggaaacgtgcgccggggaggtcggggacggcgtggccggcggcgagggcatgttctccacgctgcggtcgatatgtgagcggcggtgggcgctccggaggctggcggcgatcacgacggccaccttcggcgtcggcgtggtctactacgggatgccgctcagcgtgggcagcctgagctccgacctctacctgagcgtggcgtacaacgcggcggccgagctcccgtcgtccgtcctctcgtggctcctcatgggcaggttcaaccggcgcagctcgctggtcgcgctcaccgcggcgtccgggctgtgcagcctcgcgtgcgtcgtcatcccggacccggaggccggcgccggcggctcgcacttgcgcctcgccgccgagctggcctccttcttcgcgtcgtgcgcggcgtacgacgtgctgctcatgtactcgatcgagctgttcccgacgtcggtgcgcaactcggcggtggggctggtgcggcaggcgggggtgctgggcggcgtggtggcgcccatgctcgtcgcgctcggccgcgagaggagctactggtcgttcggcgtgttcgggctcaccgtcggctgcctcgggctgttcgtcaccttcctgccggagacgaaggggaggaggttgtcggacaccatggaggatgaggaggaggccgccgccgccatcttgtcctgcgctggcgcgagcgacatgaataacaacggggagctcgtgtag

SEQ ID NO: 31872 - DNA, 510 bp, Oryza sativa
  Clone ID: PAT_MRT4530_36137C.1
atggcggtggcgggtgggcggggaagcggaggaggcggtggcggtggtcacttgtggctgtgcctgcggtggggagagatggatcttgggtggaagctgctgggacggagatggcggcgtcatggactcatcgtcgtacgtcagcgtggggttggtgaatggctgaatgcgagcgccgacatgggcttctcgtgtttggtggtgtccgtccggctcatcggcggacgagcacgaggctacgggcagaacggcggctctggcttcggctccacgcggccgccggcgtcgatgggcttcgacgacgccacaggagacatcttgttagcaccatctcctctccaccaccagcggtggatgatatcagcacatatatactctgagatctgctgggccttgcactggcatattggttgcaaattacggtataacagcacaggaggagctcctgtttctttcaaacagaatttgttgatttcggcaagtctgctgctcatcgtcttttgtgcctaa

SEQ ID NO: 31873 - DNA, 323 bp, Oryza sativa
  Clone ID: PAT_MRT4530_36138C.1
atgggctcccgcggccgccacctctcggaccttcgccatggtggcccatctctacttctggcgacggcttccctcgggcgaggccaacacaagacctcgccgagacgccggatacggagggaaaaggaagaagacaccggatcaggaggaagaggaaggagtgagaagggaagaatgcaacctcgccgccacccttctcttctccaccatcaccgagctggcgagatggttgtcgtggtgctgccgagcttgccgtccttggaggtgccgtcgccggccatcccgccggtggccgactcctccgcctccccctccctcccata

SEQ ID NO: 31874 - DNA, 3280 bp, Oryza sativa
  unsure (1)..(3280): unsure at all n locations
  Clone ID: PAT_MRT4530_36139C.1
tcctctattttggcccccttttttaacccccccnctgaaaattttgaaagtttaagtattatgcgatggacggagcatcttttttatattcgcagccagggcctcgtagccctaatatttgacgtaagaatgctccaaacattccattcaggaaagcccttgtctgcagctaagtaggagacccatgtcgcaaaaccctcgctcggccagaggtctggtccccacttttttgtttttttattttccttcccttcctccctttttttttttgtgtacgaaagatgctcattaatttcccagattctggcaatgttgaactgccagggcaacatttgcatgcaattcatgtccggatgtccctatcaaatactccatgcaaattgcaattgcatctatcaaactgacataacctggagaaactggtccatagatgcaagtatcaggggcatgcaacaggtcgtctaacccaccaagttcttattactaacttgttgctggagagtacgcatcttacacgctaagacaacggcgcaggaaaagatcggtcgtctcagtggtcgtgagaaatttccttgaggacattgcccaggttagcctcggccctggtgctctccacccatttggcattgatcctcactctctcgatgctctgcttcaccgtcctcgcgatgttggccttcgtcctgctcttgaagaactcctccgcgtcgtcgcccatttcatcggtgcgcagcggtgagacggtggtggaaacgaaataggtgagaagagttccagagaaggtgtctgaaatgtagtcccacttttccttcaaccatgtccatgccacctcatgtcccgctgcaccgactcctctaagcaaaaatatagagtcctgattcctcacctcaggtgacagcatgaagtccagtgtatcacgaacaacatcaggatcagggcaagatgctagagaacctaaaattctgactttttcctggctcagatcagtttctttatagatcttcaatagtgattcatagccggctctgtttgatttgttcactgtctgcatcaaagcaacatatgccgcctttcgaacatctggagggagtagtggtgtttctctatcttccacaaagatgttaaatcggcgtacagcttcatttattgtagcttcatggccaagttctgccagagcagttaaaagtgtacctctcaataatgcatccaagtgaccctcaccgcttttagcatcccaaccaattctctgtgcaaatggctcaagaaagtcaatcaggaactttttcagcttgcccaacccctcaggagcagcaacagccaccatctcgacaatgctcagacttgtatctatgacacgggcgagcacagtatactcggtttcatccttgtacgcagcaatcaaatgcaataaggagactagcttctgtttgccagccatacagagggcatatgtgtcatcaagtacaccatatctgtctgctgcactcagtttgttggcttcaattgcatatctaagtcgagatgcaagttcctcatcatagctcactctatagaagccagtctgattgacattaagtttaatccagaagtcttctttcttttgacattctacaagccctgacaaattaaaatcctcttgctttccattaaaaaggaacttctcttgacgtgagtacgaacagcaacacagtgtgatgggaaccacccattgcccaactccttcagccccgcttgataggaactgtgtctgctccatctctagctttccatccttgagcttcacattaacaacagggtacccttgctgctttgtccatgaatgcattaatgttttcactggttcaccagacccctcttcaagggcagcccacaagtcctcagtcttggcatttgaatatgcgaacttttcgatgtatgcggccagagatttctgaaaagtttcagccccaagatagctttgcagcatccgaataacagcagctcctttcctgtagcttatagcatcaaatatttcatctatttcatcaacgtgatttacgtcgacctcaattggatgtgaccctgcaagggcatctaacttgaaacctgttgtagattcctcaagaaattgggtccaaacattccattcaggaaagaaattgtctgcagctaagtaggagacccatgtcgcaaaaccctcgttaagccataggtgtgtccaccactccatcgtcacaagatttccaaaccactggtgagctaattcatgggctaccacaactgcaaccctttgcttattcgcagctgcagagtgtttctcatcaaataacaaagctgtttcacgatatgtaaccaagccatagttctccattgctccagaggcaaaatcaggaatggcaatcatgtccatttttgggagtgggtatggcacagcaaaatactccttgaagaggaccagtgtcttcacagcaacctctagtgcaaactttccctgggcactcttgccaacttgagtgtaaacacgaaccctagtgccatcagtggtgaaagcttccacatagtcgaacatgccaacaataacagccactaggtatgttgacattattggtgtttcttgaaaatagacagctttgataaggccattgaccttctcttcaaccactggcatgtttgacaatgcaacggtctcagacggaacttctagagtaattttgaatatagccttaaaagagggctcatcccaacaaggaaaacaacgccttgcgtcagcaggttcaaactgggttaccgccatgttcttcttctccccattgagttcatacacacttctgtagaagccatgcatcttgtcgttcagagttcccttgaatgcaattactaaagttccctcccctacaggaagaacctcattgaagcggataatcaggatctcatcctctggcacattggtaacctccgctgggtgcagctcctgctcggcgccatggggcttgaactggacgcccccgggggagacctcgagctcggcggcgttgagcacgaggaacctggtgggcgccgtgacgtcgacggagacgtccacagatcccgtgaaggcgcacccgtcgaggtcggggacgagccgcaggtcgtaccgccggggcgccgcgaaccccgggagcctcgcctggcccctgaactgctccgcgctctgctccgccgccgccatggccgccgccgccgccgtcgccgcccgcggcggaagatgaggaagaagagttgtgcaagcctcggagacggcgaaagattcggtgagattttg

SEQ ID NO: 31875 - DNA, 986 bp, Oryza sativa
  Clone ID: PAT_MRT4530_3613C.1
gaccgaccgtacttctggttccccgtccacctcctccccaccgcgcgatccatggcgttcgccggcatccgctccggcgtcctcagatcggtggcgggtgtggacggtctcgccgccgccgccgcggcgcgccccactcctctcctcccgcgcgtccacctcgccggcgacggcacggggcggatggcgaccaccatcgggttctgcccccgtctcagagccgcgccgccgtcctgcaagaaggcggaggcggacccggcgccgtctctccaggatgcggtggtggcggtggatgctgtgctgcgtgcccctccacctccccaagagcatggcggcaagatggcggcgattctggagtttctgaagaaacactcgctcaatctactgatccttgccctgtgcctcttcgtgggtgcgctcgctttcaagggagaggagaaggtgatcgttgcggtgactgacgaggagaaggcgattatcgcggtgaaagtgtgcgacaaggctaacaagatatacaacatcctctccaagatcgcgccgattgtggtggacttcatccgtatttttggacggtagctaactgccatcgaagatgtgaagagtactttggcccaggagtcgacattatgcagataataggaggttgaggttgatactatgcaggcaataggaagtttacctagataggttcagtggatttattagctagatatattcaggatttgatttgctgccctatgtcacacatataatccagtttgtttggatttattagctagatatattcaggatttgatttgctgccctatgtcacacatatatccagtttgtttttgatgggtagcaccgtgatgctcgaagggatatcgtcatatcgacacatgttggcacattttaagctggcccattttatatctgaaatatatgtgctttggttttttctgcgaaaaaaaaaaaaaaaaaaaaaaaaaaaaaaaaaaaaaaaa

SEQ ID NO: 31876 - DNA, 1497 bp, Oryza sativa
  Clone ID: PAT_MRT4530_36140C.1
atggagacgttcaccgccgacgaccagcgggacgccgacgcgccgcggccgccgcgcgtcgtgctgcttgccagccccggcgccggccacctcatcccgctggccgagctggcgcggtggctcgccgaccaccacggcgtcgcgcccacgctcgtcaccttcgccgacctcgaacaccccgacgcgcgctccgccgtgctgtcctcgctcccggccaccgtcgccaccgccacgctgccggcggtgcccctcgacgacctccccgccgacgccggactggagaggacgctgttcgaggtcgtccaccgctccctcccgaacctccgtgcgctgctccggtccgcggcgtcgctggccgcgcttgtcccggacatcttctgcgccgcggcgctgcccgtcgccgccgagctcggggtcccgggctacgtcttcgtacccactagcctcgccgcgctatctttgatgcgccggaccgtggagctgcacgacggtgctgccgccggcgagcaacgcgccctcccggaccctctcgagcttcccggcggcgtgtcgctgcggaacgcggaggtgccccgcggtttcagggacagcaccacgccggtgtacgggcagctcctcgcgacaggccggctgtaccgccgcgccgccggcttcttggcgaacagtttctacgagctggagccggccgccgtggaggagttcaagaaggcggcggagagagggacgttcccgccggcttacccggtgggcccgttcgtccggtcgagctccgacgaggccggcgagtcggcgtgcttggagtggctggatctccagccggcagggtcggtggtgttcgtctccttcgggagcgccggcacgctgtccgtcgagcagacgcgcgagctcgccgccgggctggagatgagcggccacaggttcctctgggttgtgcgcatgccaagcttcaacggcgagtctttcgccttcgggaaaggcgccggcgacgaagacgaccaccgtgtccacgacgatccactggcgtggctccccgacgggttcttggagaggacgagcggccggggcctcgccgtcgcggcgtgggcgccgcaggtgcgcgtgctgtcgcaccccgcgacggcggcgttcgtgtcgcactgcgggtggaactcgacgctggagagcgtggccgccggcgtgccgatgatcgcgtggccgctgcatgcggagcagacggtgaacgccgtcgtcctagaagagtccgtgggggtggccgttcggccgcgctcgtgggaggaggatgacgtcatcggcggcgcggttgtaacgcgtgaggagatcgcggcggcggtgaaggaggtgatggagggggagaaggggcgtggcatgcggcggcgggcgagggagctgcagcaggcgggtggtcgggtgtggtcgccggaggggtcgtcgcggcgggcgctggaggaggtcgccggcaagtggaaggcggcggcgacggcgacggcgcacaagtaa

SEQ ID NO: 31877 - DNA, 854 bp, Oryza sativa
  Clone ID: PAT_MRT4530_36141C.1
tctgtattataacttaatgtcaatcagactggcttctatagagtgagctatgatgaggaacttgcatctcgacttagatatgcaattgaagccaacaaactgagtgcagcagacagatatggtgtacttgatgacacatatgccctctgtatggctggcaaacagaagctagtctccttattgcatttgattgctgcgtacaaggatgaaaccgagtatactgtgctcgcccgtgtcatagatgtatagatctttctacccgacaaatgtttttgttagattgattctgttctaagcatttcaattcttggcttgatagacaagtctgagcattgtcgagatggtggctgttgctgctcctgaggggttgggcaagctgaaaaagttcctgattgactttcttgagccatttgcacagagaattggttgggatgctaaaagcggtgagggtcacttggatgcattattgagaggtacacttttaactgctctggcagaacttggccatgaagctacaataaatgaagctgtacgccgatttaacatctttgtggaagatagagaaacaccactactccctccagatgttcgaaaggcggcatatgttgctttgatgcagacagtgaacaaatcaaacagagccggctatgaatcactattgaagatctataaagaaactgatctgagccaggaaaaagtcagaattttaggttctctagcatcttgccctgatcctgatgttgttcgtgatacactggacttcatgctgtcacctgaggtgaggaatcaggactctatatttttgcttagaggagtcggtgcagcgggacatgaggtggcatggacatggttga

SEQ ID NO: 31878 - DNA, 1988 bp, Oryza sativa
  Clone ID: PAT_MRT4530_36142C.1
ttttttttttttttttttttttttttttttttttggtaaatttcagcactttccaccccaaaatcgagtttaaagacagtcaaccacttgtttccgacgacaaagggcagcatcggattactatataactaatccagaccacgagaataaacatattccaaaagtaaactggttgggcatacacacggcaaaaagagtagaaaaagtaaactaagagcttaaggtagtcgcagctgaggaatccaggattgtcattattcggcagcaaaaatgtactactgttcatcaaccgacacaaagctaagctgagcgttgctgatacttagtatccatagcttgggtaggtggtgccaccgtagctgcctccattgtgaggtgcaggccctgctcctgaagcagccgatccgtaggatgcgccatatggtggtgggtatgaaccgtagctcagatcaactgctggagccggagggttagaagctggcggaggagggccctgaggagcttctgccatgaaattctggactagttgctgggcagtttggacttgggatgcactaccaattatctcaactgtcatctccccaggtgcacctctgctttcctgaatagttactgttgcaccactgtgcctacgaatatagctaatactagcaccagctgctccaatcacagcatcagcataggagagaggaatttgcatgttgtgtgtaacctgagaagccacatgtgatggtggttgattcccagaagcagaaacaccagttggtgcttctcgtccataggcagaaataccgtagtgtggctgcttttccatagaggggacatcagggggaggataataattgtcttgcggccttgggggcatgaactgtggatgtccaccataacctggaccaccaggagggaggtggcttggaggagggccccaaggttgaggtgggccccaaggctgaggagctgccattgcttgttccctctgtgcattgtgcattttcatttgcccttcaaaaagaggaagaacactgcggtcaacaagaaattttcttaagtgactggctatcgattccagtgctttctggacaccaacaggctcaccttgtatctccacaactctatcatcatttagtgcaacaagaggcaaagtctcaacaatacgaacaatggactttgaagaatcttgaatggatttaatggttgctccctgtttcccaataaggctgccagcttgggaagctggtactagcagtcgtgttggtcctacattactaatatttctttcaggttgaccagaatcaccatctgaaccatcagttattcgtttatagactctaaataacccgtccatagctggagatataggtgcatctggctcatcctttgctgaaatcattactgttctttctggtacaccaggcgggccatcaagtatttttatgcgagctttagactcctcacacatctttttgataaactcccctttgcggccaatgatagcacctaccttctgggctgggatcagtatacgaaaaacactctctcctggccaaccaggccatttcttatcagcctctaccggcaagctatcctgttgcttcacttccccattgtatgcattatccgactcttcctgataagggtttgatggctcctcattgtactgattctctggttcttcactgtacaaactcacttgctgaatgtatgggttcccctcttctacgttgtccatgttatcgggttcttcgttgtaaggatgtgacacatcgctgtaggggatcagttgttcttcattataatgattctgaggcatttcgccgagatcatctgcgtcaaaattctctaccagtccatccatatttgctcaccaggatcccctcccctcccctcccctgctgagatcggcggcgcgactcgtgttggggaggcggaaggagcggaggagacgacgagacgggagatctctctgcctccagtaccggacgcgtggg

SEQ ID NO: 31879 - DNA, 405 bp, Oryza sativa
  Clone ID: PAT_MRT4530_36143C.1
ggctgcaggatcggcacgagggggacgtggtacatcctgtattagatgtgtttattttagaatggagagagtatatgatcaagtacagtatgctttctactgttgtgtactttctgtttccaaaaccacatctaattaattaattgcagtcgtagatgcctgaactgatgaagaaactactactgtcaagttaattgacacgagaggagagaacatttgcaaagcccatgatgggctggaatgttcaaacggttggaaacagttggctgtactgaaataggctactattaggctgtggactgtcctttcggcccaaaagctacaatgggctcttagcaggctaggtaggtgttcatgtcctagtagctaaataattagatcatccttatctcaaagaaagaaaga

SEQ ID NO: 31880 - DNA, 1159 bp, Oryza sativa
  Clone ID: PAT_MRT4530_36144C.1
ataaccctctgactggtggaccctctcatatcctttttcccactcccctctatccactgtttccgccgccgccgccgccgccgccgcccgccgcgccggcgttctccccccgccgacgaagcacggcgtggagtgtagacgcagcctcctcgctctctctcacgccggcgagcagggtctggagccaggagcgacgcggcggccggggccggggcctccatctcggttcgaaccgcactgaaggtccctccctgcattagggcgcacaatggcactgacccttctcagagggatgcgaacgccggttgtagctagaaggaatgctggcttgttcttcaccacattgcagtctccgttgttgtcccgcttcacgatgagagcggagagcgcgcgggccgcagcgcccaagtcgattcagctggcgaccaaggaggcggcggagcagaaggcgcagggcttcgaggcggtcatcgggatcgagacccatgtccagctctcgacggtcacaaaggcgttctgctcgtgcccgtacagctatgggtcgcaaccgaacagcaccgtctgccccacctgcatggggcaccccggaacgctgcccgttcttaacgcacaggttgtcgaatgcgcccgggggttgggcctcgctctcaattgcgagatcgcgacgacgtccaagtttgatcggaagcagtacttctacccggacctgcccaaggggtatcagatttcgcagtttgacattcccattgccaaggagggttaccttgatttggatcttccggtggagttcggcggtgggcataggagatttggggtcacaagggtgcatatggaagaagatgctggcaagctgcttcactctgaatccgggagttactctcaggttgacttaaatagggctggcgttcctttacttgaaattgtctcagagccagatatgagaacagggatagaggctgccgagtatggtgctgaactacagaggcttgttaggtacctgggcgtgagtaacggtaacatgcaggaaggttcccttcgctgtgatgtgaatgtttctgttcggccaattggacaatcaaattttggtacaaaggttgaaataaagaatatgaattcattttctgcaataagtagggcaatagattatgagatctcccgg

SEQ ID NO: 31881 - DNA, 192 bp, Oryza sativa
  Clone ID: PAT_MRT4530_36145C.1
atgggcatcaagggtttgacgaagctgctggcggagcacgcgccgggggcggcggtgaggaggcgggtggaggattaccgcggccgcgtcgtcgccatagacaccagcctcagcatctaccagttcctcattgtggtaggaaggaaaggaacagaagttctgaccaatgaggctggtgaagtcacaaggtga

SEQ ID NO: 31882 - DNA, 3200 bp, Oryza sativa
  Clone ID: PAT_MRT4530_36146C.1
atggagagggtcaggactatcctgactcatagatacccatacccacatgagcactcaagacatctcatgattgctgtatttgccatctggcttttcttcgtttcatcggataacttgcaaactcttataatgaagttggacaagaatttcaaatggtggtcgatactatcaaaccgagctattcaaattttagtcgttggtaagcaacctcttgagtctgtgagaaggtatattgcttggatattcttggcagcattataccatctccccagttttcagtcaatggggttggatttacggatgaacctttctcttttcctcaccatttatatctcctctctaattttcttgatcgtatttcatgtcatctttcttggcctgtggtatttgggcctcgtttctcgtatggccgagaaaaaaccagagatgcttactataatccaaaattgtgcagttataagtatagcttgctgcgtactttacagccactgtggtaacaaaactattacgagagataaatccattgaccgtagaactgctagctgggttgcgttctctctgtggaaaaaacatgatgacaattcactgatttcaaagctattgcgcatgcataagtttaaagagcagatttgctcatcctggtttgctccggttggctctgctagcgattaccctctcctatctaaatgggcaatttatgaagaattagcttctaatggatccgggcattccaatgacatttcacctgtctactctttatgggctacattcattggtctttacatagccaattatgtcgtggagcggtcaaccggatgggctctaactcatcctttgacaatgtcggagtacgaaaaattgaagaaacaactgaaaccagattttgaggacatggttccttggtactctgggacatcaactgatttatttaaaaccgtttttgacctcatggtatctgtgactcttttcgttggtcggtttgacatgcggatgatgcaggctgctatgaacaaaactccagatgaatctaagagtagtgacctgttttatgatcatcttgatggaaaagacgaactctggtttgatttcattgcagatactggtgatggtggcaactcgacttatgctgtagcacggttacttgctcaaccttctttagccataaaatcggatggctctaggcagacatttccccgtggacagctactccttattggtggagacctagcatatccaaatccgtcttcattttcatatgaacggcgttttttctgccctttcgagtatgccctccagcctcctgcttggtataaacctgaacatatagcattggagaaacctgaacttccccttggagtttctgagctcaggaaatatcgtggaccacagtgttttatgattcctggaaaccatgattggtttgatggactgcacacattcatgaggtatatctgtcataaaagttggctgggtgggtggttcctacctcagaagaggagttattttgccttaaagcttcctaatgggtggtgggtttttggccttgaccaagctcttcatggtgacattgatgtctatcagttcaagttttttgcagagctatgtcaacaaaaggttggagaaagtgattctgtaattcttataactcatgagccaaattggcttcttgattggtactggggtgataaaactggaacaaacgttgagtatttaatacgtgaatacctcaagggaagatgcaaactgcggatggctggggatctgcaccattatatgcgccattctttcattgaatctaaagaaccagttcatgtgcaacacttacttgtaaatggttgtggtggggcctttctgcatccaacacatgtctttgagaatttcagagaattttatgggaacaaatatgaaacaaagattgcatatccttcttatgacgattctagcaagattgcacttggtaatattttgaagttccgaaggaagaattggcagtttgatgtgattggtggttttgtgtactttgttttggttttctcgatgtttccgcagtgtgattcctttcgtatcttacgtgaagactcttgggctgaccgtgtcaatagtttcttcactgcaatgtggaatgttgtttttgagattctggagcattcctatgtatccctggctggtgttgttactctattgatggtatcttttttctttgtacccacaaaactatcgcgtagaagacgtgccttgcttggttttcttcatgctgtggcccatctaacttcagcagtgatactgatgctgcttatggaattggctattgagatatgcatccgcaacaatctattggcaacatcaggctaccataccctctacgagtggtatcgcaaggtcgaaagtgagcattttcctgatcccacaggacttcgcactcgtctggaacaatggactttaggtctttaccctgcatgcattaagtacctgatgtctgcatttgacatccctgaggttatggcagttacgaggagcacaatctgcagaaaaggaatagagtcccttcctcgaggaggagcgatcatctactatgtttgcgtcttcctgtacttttgggtcttgtcaacaccagttgtatcactggtgtttgggagctacttatacatatgcataaactggtttcatattcatttcgatgaggccttctcctcactgcgcatagccaattacaaggcatttacacggttccatatcaagaagaatggagaccttgaagttttcacctttgctgtcgacaaggtgccaaaagactggatgctggatccagactgggacatggagccaaaggagccattccagatgagctacaccaggaagttccccagcaaatggagggccgcctccggctcggacccaaccaatgcggtgcggatcgtcgaccatttcgtcatccctcggacacccccagattccccaacctcaggatctgctagttgatcaattgtagcctagcttaagatcatagtgttgtaatgtacagtgtagtagctatcttgttctatctccctgtataaattgtacagcaacacaagaagccttctgacatactctagcatagaagaaatagggaaagaaaaagaaaatgagaaaagggtaggatggggcactgcttgtaatgctacagatgtttttgttaaacgaaacattattggttcagt

SEQ ID NO: 31883 - DNA, 140 bp, Oryza sativa
  Clone ID: PAT_MRT4530_36147C.1
gctcaaaaaatatattttagacaatacgatatgacaaaattacatagtgggggtaaaaatgactgcccgctaggagcaacatgaaacacaccaatgtacgtcaaaaccgcacagttggatagaaatgaacgggtaaggat

SEQ ID NO: 31884 - DNA, 296 bp, Oryza sativa
  Clone ID: PAT_MRT4530_36148C.1
tctctggtgatctctgactgttgatcggaatcatggctcaagctcaagctctattggcttttaacgtgccatctagatatggtatcataccactaggtactatggtgcacccagtaccattacacacaccttggacaggctgtctgtgtaatgacttttacagtatagtggttcgcgaagtttaaaataagctccagatatcatcatatgtgacatgtgaaactttgggtgatataaatagaataaagttgtctttcatatttaaaaaaaaaaaaaaaacaaaaaaaaaaaaaaaa

SEQ ID NO: 31885 - DNA, 231 bp, Oryza sativa
  Clone ID: PAT_MRT4530_36149C.1
atggggcaccagtgccaaagtgtgaccacctccaccacacaagctaactacccagctcattccagtgggttcagtctcagctacgggccttaccgacgttggatcctgctgtggtggcctggatgtggcttccaccaccgccttggctaccacgatgcttacccatgtgagtcactcaggaggcagcaaggcagaggatgtgaaggagggggcagcgccgacgcttgttga

SEQ ID NO: 31886 - DNA, 3650 bp, Oryza sativa
  Clone ID: PAT_MRT4530_3614C.1
ccgcgaggcgccgccgctgctgctccaccacctccattgctgcgtcgcctctctcacctcgtcctcctcctcttgtgtggagctcgtcggcgtcgaggtgtagctagctggctcagcttgttttgccattgttgtgttcttggtgttcggagagggagcttgcctttgccttgaggggagaggcaaaggcattagcaatggcgccagcggtggccggcggcggagggaggaggaacaatgagggggtgaacgggaacgcggcggcgccggcgtgcgtgtgcgggttcccggtgtgcgcgtgcgcgggggcggcggcggtggcgtcggcggcgtcgtcggcggacatggacatcgtggcggcggggcagatcggcgccgtcaacgacgagagctgggtcgccgtcgacctcagcgacagcgacgacgcccccgccgccggcgacgtccagggcgccctcgacgaccgccccgtcttccgtaccgagaagatcaagggcgtcctcctccacccctaccgggtgctgatctttgtgaggctgatcgcgttcacactgttcgtgatatggcgtatcgagcacaagaacccggacgcgatgtggctgtgggtgacgtcgatcgccggcgagttctggttcgggttctcgtggctgctcgaccagctccccaagctgaacccgatcaaccgcgtccccgacctcgccgtcctccgccgccgcttcgaccacgccgacgggacctcctccctcccggggctggacatcttcgtcaccaccgccgacccgatcaaggagcccatcctgtcgacggcgaactccatcctctccatcctcgccgccgactaccccgtcgaccgcaacacctgctacctctccgacgactctgggatgctcctcacctacgaggccatggcggaggcggccaagttcgcgacgctgtgggtgcccttctgccggaagcacgccatcgagccgcgcgggcctgagagctacttcgagctcaagtcccacccctacatggggagggcgcaggaggagttcgtcaacgaccgccgccgcgtccgcaaggagtacgacgacttcaaggccaggatcaacggcctcgagcacgacatcaagcagaggtccgactcctacaacgccgccgccggcgtcaaggacggcgagccccgcgccacctggatggccgacgggtcgcagtgggagggcacctggatcgagcagtcggagaaccaccgcaagggcgaccacgccggcatcgtcctggtgttgctgaaccacccgagccacgcacggcagctggggccgccggcgagcgccgacaacccgctggacttcagcggcgtggacgtgcggctgccgatgctggtgtacgtcgcacgtgagaagcgccccgggtgcaaccaccagaagaaggccggcgccatgaacgcgctgacccgcgcctccgccgtgctctccaactcccccttcatcctcaacctcgactgcgaccactacatcaacaactcccaggcgctccgcgccggcatctgcttcatgctcggccgcgacagcgacaccgtcgcgttcgtccagttcccgcagcgcttcgagggcgtcgaccccaccgacctctatgctaaccacaaccgtatcttcttcgacggcacgctccgtgccctcgacgggctgcaggggcctatctacgtcggcaccgggtgtctcttccgccgcatcacgctgtacgggttcgagccgccgaggatcaacgtcggcggaccgtgcttcccgaggctcggtgggatgttcgccaagaacaggtaccagaagcctgggttcgagatgaccaagcctggtgccaagccggtggcgccgccgccggcggcgacggtggcgaaggggaagcacgggttcctgccgatgcccaagaaggcgtacggcaagtcggacgcgttcgccgacaccatcccgcgcgcgtcgcacccgtcgccgtacgcggcggaggcggcggtggcggccgacgaggcggcgatcgcggaggccgtgatggtgacggcggcggcgtacgagaagaagaccgggtgggggagcgacatcgggtgggtgtacggcacggtgacggaggacgtggtgaccggctaccggatgcacatcaaggggtggaggtcgcgctactgctccatctacccgcacgcgttcatcgggacggcgccgatcaacctgacggagaggctgttccaggtgctccggtggtcgacgggttcgctggagatcttcttctcgaggaacaacccgctgttcgggagcacgttcctgcacccgctgcagcgcgtggcgtacatcaacatcaccacctacccgttcacggcgctgttcctcatcttctacaccaccgtgccggcgctgtcgttcgtgacggggcacttcatcgtgcagaggccgaccaccatgttctacgtctacctcgccatcgtgctcgggacgctgctcatcctcgccgtgctggaggtgaagtgggcgggggtcaccgtgttcgagtggttcaggaacgggcagttctggatgacggccagctgctccgcctacctcgccgccgtgctgcaggtggtcaccaaggtggtgttccggcgggacatctcgttcaagctcacctccaagctccccgccggcgacgagaagaaggacccctacgccgacctgtacgtggtgcggtggacgtggctcatgatcacccccatcatcatcatcctcgtcaacatcatcggctccgccgtcgccttcgccaaggtgctcgacggcgagtggacgcactggctcaaggtcgccggcggcgtgttcttcaacttctgggtcctcttccacctctaccccttcgccaagggcatcctcgggaagcacggcaagacgccggtggtggtgctcgtctggtgggccttcaccttcgtcatcaccgccgtgctctacatcaacatcccccacatccatggccccggccgccacggcgccgcctcaccatcccacggccaccacagcgcccatggcaccaagaagtacgacttcacctacgcctggccatgaggacgccgtcgccggagacgaagaagaaaacacaaacaagaacaagacgacaccaacaacaccaacaacaacaaacacgagatgagtacgttctactacacgctgctgcaacaacacatactactgaacactgtgcatgcatttgatcgagcgacccgccaaaatttgaaagttttttttcttcttttcttttaacctttttttttcctctttttgccccctcctctctctccttttctttctttttagttttgtccagaaaaaagatggtgtttatttgatttagttttttaattacctgtggtaattaattatgtattatacattactgcaaggaagagaggggggcttacaggtggggcccggggggtggggtgtggtgtatgattgtactgtacatgctgggagatgtatgtatacggagacaaaaagacaagagtcacagagagtgagagaaagagaggctggaagtgggcccggccaggtggtggtggtattcttttagtatatggaaacaataaatttaatttcattattcgtgcaattgtgtccttttttttgtccaaaaaaaaaaaaaaaacctctccctcgtgc

SEQ ID NO: 31887 - DNA, 993 bp, Oryza sativa
  Clone ID: PAT_MRT4530_36150C.1
ctgtcgctactaatgaaacttgcaagcaagctgctatctggctccccggagccatgcttccactggctcagagcacagcacctgcagaacgagattcctatcctagcaagaccaactgatacaccggtttggaagatgatctgtggagcattggagccaacaatagcatcaaccaaagtttcgctgggaagcggcctttcggtgcaattctggaaaggccattggacggacgacggctgcttcttcatcaccgacccatcactggcatcattcgcaaccaacatcaactgtacagtcgcctcacaattcacacaaaacacctgggcgattaatctccacccagtgttatcgaaccaggcacagacagaactcaacctcctcatgaacactttggcaactcttcaaccacatgcagatgcaccagatacaagatcacgccttcaatccctcaacggaataacaaccgcagcattttacagactcctcaccttccgcggcatatcagggaagccggctgacttcatatggctcaaagccatcccaaatacttgcagaatcttcctctggctagccttcaaagacaggtttaactccaacaacaacagaacgcacaaaaggtggtcgtctgacccacactgcaacatctgcccagcaattgaatcagcagaccacattgtgttgcgttgcaaactggctgaggccctctggacaaaactcggcctaaattccatagcaatccaatgcactgacatcctccaattcgttgatgaagtcctaggttcttctcagggccacctcaagctgggatggttgatatgcttcgctgcctgtgctcacaacctatggaaggcaaggaatgatgcggtattcaactgagctaacacaagcgtttccaacctcctgcagacaacaagaaactgtctgaacttatgggagaaccgtgtcaaaacagcaaatcgatcgcaaattcaaggccggataacaaaactgaac

SEQ ID NO: 31888 - DNA, 1925 bp, Oryza sativa
  Clone ID: PAT_MRT4530_36151C.1
cggccgcctttttttttttttttgcaggttaagatcaccaagatccattctatatttcatttgttgccagtaaaactgtgcccaggctttgcaattaacagttagaacccaaggatgaaacaaatgtattggtacaaactaaaagaatgggttgctggttgcaaaatcatgtcgacaaaatttgcggatggctgtacctgtgctaccgcaatttcagctaggtttctttcagtcttctaccgaaacagaaacggaaaaacccgcatttactttgctcctcaccacaagccgagcatcttccaccagaagcctccagcaccaagccagatgatgatgttaacgatggaaatgacaaatccatacccccaccactgagccagtggaacatagccagcaccgtagaagacaggagcagacccaattccatagtgcgtgagtccacccatgatgtttgagaggaatgaaagaaccatggcagcaattagaggaggagtgcccaaggcgctggacactgacaaaaatgcagtgaacattgctccaatgtgcgctgcgccactggcaaagaaatagtgggagtagaagtacagcagcaccaagacaccaaacgatagttgccatgagagaccaaggccaccaacaaacttcacaacagtctcactgaaccaagagatcaacccgtatttgttgaggtatccagccattgcaataagagcagcaaaccatgtaagggtatcccacgctacagcctcccccaaacactctttccatgtaacaactccagaaatcaggaggacggataggccaagaattgcagcagacactgcatccacattcagcattccaccaaagatccaaagacctaccgtgaggaacagcgttccagccatgatcttctcctccttgctcataggccccatcttctccaaccgctccttcgccagccgcggcgcgtcggggctggtcttcacctccggcgggtagatcaggtacagaatcaacggcacaaacaccagcgacagcaagcccggcacaatggcggccttcgcccacagcgtccacccgatcccctgcccgatcgtccccgccgtcaggttcgccgccagcgggttcgctgccatggcggtgaggaacatcgccgacgagatcaccgacgtctggaagcacgtgagcatcagccacgacccgagcctcctctccgtgccgtcgccggcgcgcgagccgcacgcctcgcacagcgacttgacgagcggcaggaagatgccccccgcgcgcgccgacaccgacgggatggccggcgccagcagcgcctcggcgaacacgagcgcgtagccgagcccgagcgacgagccgccgaaggcggagacgaaggcgtaggcgacgcggcttccgaggccggtcttgatgaagccgcgggcgaagaagaaggcgagcgcgatgagccacgggatcgggtcgccgaacgcggagaacgcggcggcgaacgtgagcgtccgcgtgagcacggcggcgccgaggccgagcagcgcgacggcgccgagcgggagaggctgggtgatgatcccgacgatggtggcgaggaagatggacagcagctgccacgcgttgcgcgccacgcccgcgggcggcgggaccagccatatcagcaccccggtcccgatggttgccaccagcggcttgattgccgccccctgaagcaccggcttcggcggctgcgacggcggcgccgctggagcagcggaggcggaggcatgaagggcgcggtggcgaggaggaggagaaggggtgagtggggtggggcgggagagggagagggagggggagggggagagggggcggagggggagggaggggaggcgagggcggaggcggaggccgaggtggtggcaggtgaggggggcggtggcggcggaggtggaggtggccat

SEQ ID NO: 31889 - DNA, 1399 bp, Oryza sativa
  Clone ID: PAT_MRT4530_36152C.1
gccgcagatcccgggtcgacccacgcgtccgctggatctctctctcgctgcagatccaaaccaacctcaccgtcgacgaggaagaaggcggcggcggcggcggaggcgaaggcggcgaagatgcagtacaagaacctggggaggtcggggctgcgggtgagccagctgtcgtacggggcgtgggtgacgttcggcaaccagctggacgtgaaggaggcgaaggcgctgctccaggcgtgccgcgacgccggcgtgaacttcttcgacaacgccgaggtgtacgcgaacgggcgcgccgaggagatcatggggcaggcgatgcgggacctcgggtggcgccgctccgacgtcgtcgtctccaccaagctcttctggggagggcagggccccaacgacaagggcctctcccggaagcacatcgtcgagggcctccgcggctcgctcaagcgcctcgacatggactacgtcgacgtcgtctactgccaccgccccgacgccaccacccccgtcgaggagaccgtgcgcgccatgaactgggtcatcgaccacggcatggccttctactggggcacctccgagtggtccgcccagcagatcaccgaggcgtggagcgtcgccaaccgcctcgacctcgtcggacccatcgtcgaacagcctgagtacaacctcttctcgcgccacaaggtggaatctgagttcttacctctttacagcacgtatggcctgggtttgactacatggagccctctagcttcgggagttctcactggaaagtatgccaaaggaaatatacctgctgatagtaggtttgccctagaaaattacaagaacctggccaacagatctctggttgacgacacactgagaaaggtgaatgggctaaaaccaattgcttctgagcttggtgtttcgttagcccaacttgctatcgcgtggtgcgcatcgaacccaaacgtctcatctgtgatcactggagccacaaaagaaaaccagattgttgaaaacatgaaggccctcgatgtcattccgctgctaaccccagaagtcgtcgacaagatcgaagcggtggtccaaagcaagccgaagcgcaccgagtcatacagatgaagcggtacagggggtgtgcagagtgtgctccagggatttcaggatttacccggtgggattcttttagacgatattattatcttccattgtcttatgtttggaagctgctttatgtgcctgggtttgtgtagttgggaaatggtgtccagtggtactctgctctatatacattttgtcatgtggaccactcacttgttgctgtcggtgatatatataccttggtcttttccgtgtgcaaaaaaaaaaaaaaaaaaaaaaaaaaaaacgggcctcgtgccgataaaaaaaaaaa

SEQ ID NO: 31890 - DNA, 969 bp, Oryza sativa
  Clone ID: PAT_MRT4530_36153C.1
atggaggactacgcccaaaccaacctgatctcgagaggccatggccatcatcatcaacccgagctcatgaaggaattccctttcctcagcctcatttcatctacctcttcttgcatcagcagcagtggtcagcagcagcagcagcagcaagatgatgatggccatggcggccatgatcgtcatcagctgctccggtacggttgctgcagctgcaacaaacagcaggaggaagaggaggaggaggtcacggttgccttgcgcataggcctaccggccgtctcgtcggcgtcggcgtcgccgtcgccggcgatggcgaaccatggggctagtgcttctagtacaggagttgctggagatgatggcggcggcggcgccatggccggcgtgggtgtggaggtggagagcgtgcggaggagcggcggcggtggcggcggcgggcagtactggatcccgacggcggcgcagatcctcgccggcgccacccagttctcctgccccgtctgccgcaagaccttcaacagatacaacaacctccagatgcacatgtgggggcacgggtcgcagtaccggcgaggcgggacggcggcgctgcgcggggcgcagccgacggcgatgctccggctgccgtgctactgctgcgcggcggggtgccgcaaccacatcgaccacccgcgggcgcggccgctcaaggacttccgcaccctgcagacgcactaccgccgccgccacggcgcccgcgacttcgcctgccgccgctgcgccaagcgcttcgccgtccgcggcgactggcgcacccacgagaagaactgcggccgcctctggcgctgcgcctgcggcgcccacttccgacacaagcgctccctcaacgaccacgcacgggccttcggcgccgcccacgcccacgccggcgccggcgccggcgccgaagacgacggccgcgccgccgccgccgccgccgtttgggtgtga

SEQ ID NO: 31891 - DNA, 861 bp, Oryza sativa
  Clone ID: PAT_MRT4530_36154C.1
atggcggcgagcgggccgggcggcctcctgccgcagcgggattcggcagaggcggatgaggaacttgcgccagcgacgtggatatggagggggcgagtgggcgcggtggaggaggagggtggaagtggaggtggaggaggcgacggcaatggggaggcggcgatggaagcgaggagatgggcaggcggcggaggcagcgagacagcaatggtgagagttggtgccgccgcggcggtgctcgtgctggcggcggcggcggcggccatggccgccgagccgcccaccgatgacggcgcggtccgggtggcggcggggctgacgaagtgcgtgtccgggtgcggtagcaaggtgacctcctgcttgctcggctgctacggcggcggcggcggcgccgccgccgccgcgacggcgatgccgttctgcgtcatcggctgcaccagcgacgtcttgtcctgcgccaccggctgctccacctcgctctgattaagtactaatgaagtaattaaccgcgctaattaataataaatcgcacctacgtatgccacatgtggactcgcttgactaattaaatactgccatgcgaatgcgattagtggattatgaaaagaggaaatgtaagaactcatggctctctctgtgccatgcctgtactgcattgaaatgaatctgcatgcagccatgaactgatatacaaatacgaccatgttacctgtaatctctccatcatgtggggctttcatgctttaataacgtgtgatattgatattatgtgattaattgtatgcatcgttggagtttcaactagtctactcttgccctttccctctatttttaaatatataatgttgttggttttcgtat

SEQ ID NO: 31892 - DNA, 201 bp, Oryza sativa
  Clone ID: PAT_MRT4530_36155C.1
atgccggtcgtattgcggccggcccggcaaagcggcgagagcgagccgcagccgcagccagctgcttgcatggcatgggccaccgcacgccgtcatcctcccaccccgacgcgcgcccgcgtgcgtgtgagcggcacggcgaatggctccgggaacacggcgtcggcagccgcgatcagcgagcccacctccagcatttaa

SEQ ID NO: 31893 - DNA, 320 bp, Oryza sativa
  Clone ID: PAT_MRT4530_36156C.1
agtcacttgttcacaataagtacgctccgcgacacatttcaccgaagcgcaacccccacagccgcgcactttcgaccgacaagccgctcgcaccccccgcaacacattactcgggctcacgccggacatcaacaactatcacgaaccagcggacgcgaccgccccacccgcggacgatccccgcaacctatacccccagaacgcccccccacccccccgacgcgcaagaccgcgacaacacccgggtaacatcatacaccgaaacgaaaatgacgagaacaacaagccacccacccgcacccccgcacaaccgtaattaa

SEQ ID NO: 31894 - DNA, 189 bp, Oryza sativa
  Clone ID: PAT_MRT4530_36157C.1
aaacagataggaatgctttgtttgggcaatccaacaaactttgaacctggaattgccctggtcaaacttcagagggatcttcccaaaaggaaatttgttggcttcacattacatagtaaggagacttgttttacattacacaaccaccaaagggtttcaagggaccaaatccgattatagtttttacag

SEQ ID NO: 31895 - DNA, 356 bp, Oryza sativa
  Clone ID: PAT_MRT4530_36158C.1
tctcttcctcgtcgtgccctagtgggaactgggaacccccgccgcgcccagctggtaagcgtcgcgctcctaatctgttcatcaaattggtcgagaatttggtcgcaatcacggagtcctcttggagctggagagagatcgtggtgctcgggggagttgtgaggctttcctctcctcgcctgctcgatccgccgccgcaaccgccgccgccttcctcctcacgccacatcctcccgccgttctcgggcagggggcctttccttgtcgccccttcctctttgctgctcttccgcctcgcctcccatctccgcctcgccttcttctccatgacttggtcggcctggaggtgttcgtga

SEQ ID NO: 31896 - DNA, 521 bp, Oryza sativa
  Clone ID: PAT_MRT4530_36159C.1
caaagtacaacaatcattcactcactactactcccacaagcaaattaaccgtcaacaaaccgaattgaagctggaaagctcatagaaacacaggcgatcgatataatgcagtacgaacgaagcaccttctactggtacttccgacgacagagttcgtgaacaattagcagcacaaataattaaaacccattaccatgcacatgcatgcatacgcgaacttatagtgcacataaaatatatgtgctcgatctggcataccgaccaaataggagagcgtagcgtaggtagatcggccggccggctcggtcgcccgctctcagcaggcggcgccggcaggcggtggaggcggcgggtgatgctggtggccgtgaaggccactgctgtcgccgccctgcagctgctgctgctgcggcttcttgcgcttcttcttctcgtagctgacgccgcgggcgcgcgcctggtgctcgcggacctcgcggaggtagaggcggacggcgcgcgcggcgaaggggttggactcc

SEQ ID NO: 31897 - DNA, 667 bp, Oryza sativa
  Clone ID: PAT_MRT4530_3615C.1
tctaggtgcctgtgctgtgccggaatttctctggacggaaagaaccacgtctagagcgaaacagtggttattacgctgctagtaggtgtggtactcacctctattgcaatccttggcaccccggcgttctacccgtgtcgcttggttgcgctctctccacttccgcatgctttctcctttgataagtacaccagcttgactcagcaggtctctcccctttagacatttttcgagacctctctccatcaccatggaacaagcaaggtttggtgtagctatcgggttcctgttcagcgataatcctgaatttggcaatccagcacatccgatttcttagagcatagcaatcagatgggttcaatctgatggtttttccccattctccagctgatggatgtacacaagaaacttctcctggcctccctcagctgtgtacttctgatccaagtagcatcgagtgatggcactgcagagggagttggaacaacaagctggacatgtgtatgcacagctcatccactaggtgaaccaaactcaaatagcagcttgtcgtcgaattgttcttcttcctgccattgtctacaagatgatgatggtggcacaggatcatggaactgcacatgtgcttctgacaaagcccttataatagacacactgcagtacatga

SEQ ID NO: 31898 - DNA, 213 bp, Oryza sativa
  unsure (1)..(213): unsure at all n locations
  Clone ID: PAT_MRT4530_36160C.1
attaacaaaagagctaaaggaagatagaaacaagaagagacgtgattccaaaaggcggaagaatgatgaatcaatagatcatggatctcaagattccacgaccaaaatggctactcctctctcctcatctgtttcaggttgatgtgtaatatggtcacatgcagaaatttgttaggtgtttcgattccannnncgttctaatctgtttctata

SEQ ID NO: 31899 - DNA, 768 bp, Oryza sativa
  Clone ID: PAT_MRT4530_36161C.1
atggccgcgcgcgcgccgctccccgtaccgcacgcggccgccaccagcccgcgaccggctgcggcgtcgagcctcctccgcgcgaggggcccgtgcgcctccctcctctacccgcgccgcctccgcttctccgttgcgccggtggccgccgccaagcccgaggccgtcgggagggccggggaggcagctgcggcgccggtggaagggctcgcgaaatccctgcagggggtggaggtgttcgatctgagcggaaaggcggtgcccgttgttgatctgtggaaggacaggaaggccatcgttgcgttcgcccgccattttggatgcgtgctgtgccgtaagagggccgatcttctcgcggctaagcaggatgcaatggaggctgcaggggttgctcttgttttaatcggaccaggtactgttgaacaggcaaaggcattttatgaccaaaccaaattcaaaggagaagtatacgctgatccaagtcactcatcatataatgcccttgaatttgcatttgggctgttctcaacgtttactccatcgctgtatccacaggccggtttgaagattatacagttgtacatggaaggatacaggcaggattgggaactgtcgttcgagaagaccaccagaacgaaaggtggatggtatcaagggggcctacttgttgcaggaccaggcatcgacaatattttgtatatccacaaggacaaagaagcaggagatgaccctgacatggatgatgtcttgaaagcttgctgttcctag

SEQ ID NO: 31900 - DNA, 628 bp, Oryza sativa
  unsure (1)..(628): unsure at all n locations
  Clone ID: PAT_MRT4530_36162C.1
tttttttttcgaatgactagagctttgttttattaatttcgtccctgagcagtccaataaagaattcatcaatgcaaatggtaaatgaagattatagcaagcacggtaacagcgactccgatcgatcttttcattttctgagctagctaatgtcaccccagcggacgttgtggttggcggcgaggtagtgcgctccgacgggtccccggctgccgtacgggtagagctcgggtgccaccttgttggcctcgaggtcggcgaggacgggggtgaagatggcccaggcggcgtcgagctcgtcgctgcggatgaagaggcggcgctcgccctcgatggcgtcgagcagcnaggcgctcgtaggcgtcggggatctcgagcggggtagcgctcggagtagagcaggttgaggtcgctgctgtccagcctcatccccaagcccgggcaccttgctgttgatcttgaggtannatcgccatcgtcgggctgcaacccgcagcaccagatcgtacgtcgccattctccagttccactcgtcgctgtcgtccctgcgccggccacgctcacgcctccgcgccgtacaggttccccggcaccgcggaactggacccttggatctcagccgtagccg

SEQ ID NO: 31901 - DNA, 372 bp, Oryza sativa
  Clone ID: PAT_MRT4530_36163C.1
atggctactacagatacaaccattgctcacatcatggaagaacaagatgatatcaagatcaagtcctccaagtgctggaatcagatttggcaacctgctacactgcggacttcaaacggctgccaaatctgcatacgacctccgtttttggcccgtgagtacttgatggaacgctctcagagtcctctttccaacggatctggcatcatcactaaattccatccaggtcatctgcagatgaagaaacaaggaataaggttgatctgcaccggcaagatcaacaccccacggagaggtgtatcgatcgctaagacgcaacgcaacgtcttatacggttgtaatcggatcgtcaacgtttcttccaaatcgtag

SEQ ID NO: 31902 - DNA, 1935 bp, Oryza sativa
  unsure (1)..(1935): unsure at all n locations
  Clone ID: PAT_MRT4530_36164C.1
gccgcccccgtccagctcccgcccgcccccgcccccccccccctcgagccccgcctccggccccgcccatggagagctcgccgccgccgccgccgccgaccatcaccgtccaggttttggatacttatcgttctcttgatgtggttgcagggaaagttctggcggatgccgccagcctgagctcgatgcaggtggtgaacggatccaaggtcatgctcatggcctcgcaggggctccatcagggggacggtcccatcactaagaatagtagtgttccagcaccaagcacgagaagagcctcaaatgtgaaggaagctcaaatacaaaagtcggatacaaatgtcagtaaaatccgacctgaacgttggaaagcaactggtattattgcattgtctgattccagcttgaagcaatcggtcgccgtcgtctccatcagtttccctcctcttcaacggcttgagcccgggcagatccaggaggaagaaggctcgacgagggtatccagccgtctggtgagctcgagctcggccatatccaaggaagaagagggccagatccaggaggaagaagagggcaagaggaaggagggctcaacgaggatacccggatctggtcgcttggagggcaacgtcgccaccgccggcatcatcttcctcctcttctcctcgttctcgccggcgctgtcttcttcgttggctcccaactccctccttcaggacctgcgatgttccggatccagtgggcagggcgtccggaagcaacagatccggagccacaaactccgacgacagcgacagacggggcgcaagggggaggagcgacgagcggcggcagtgcctgaagaagtatggggctgtggttcttctattagagtactggatgtcagtaacaactgtattgaagcaattccacaagaaattgctgctctgagatctttacagaaattgatcctgactgctaatgatatagctgatgggaacatttcctgggaaggcctaacatgtgttcaaacattaacagttttatctctaagccaaaatcgcacccgtgtcatgctgggccagcaatatcaaaggtgccagggcaacctgtccacggtagcagattatgggcatgctggcaaggcacagctggtcactttaccttcaagtttgggctcaataactcatttacgtgaacttcgtattgcaaataacaggcttgagaacttacctgttgaaatagggttactgaagcatcttgagattctgatagcaaataataataggataacttcattgccttcatctataggtggttgtgaatctctcaatgaggttgatttgtcatcaaatcttttggctgaactgccagaggcttttggaaaccttcaacatctcaaggctttgagtgtacggaacaatggtcttacatccctaccttcagctttcttcataaaatgctcgcagctcattacacttgatctccatggcactgaaatcacaaacgacgttcttcggcaggtggacggttgggaggagtttgacgaacgtcgaaggaagaagcatcaaaagcagctcgatttccgggtgggatcatcagttgtgttcgatgaaggtgcggatgacgattacaggcgtttataaataaaatctctctttggataagattgtgtattttatgtctccagcttaatccgttgtcgcaagaataacttgtatacttaagaacaaattaggagctgatgttgctactcacatcaatcctagatatgtacttgtacttcatcctttttcaaaancccttctttttagggattctttaaactgtttagggcatcaagagtggaaaaacattactccgtccatttctatttactcgtgactgttgaccaatcctgttgtaactttgaccactaataaattttgaatggtttgaattaaaaaaaaaaaaaaa

SEQ ID NO: 31903 - DNA, 357 bp, Oryza sativa
  Clone ID: PAT_MRT4530_36165C.1
atgaggtggggtggcagattggaagaagggggcgacaacctcgacgacggctgcacacatcagcggtggagcggatctagagtggccacggcaattggcaatgtcgtgctgcattgtgaaccttcttcttatcaccctttgatgggttggaggtatagaatcgagatgattgccaaaaatattccggagcaggaaaaggtgtgggcgaaccaacctgactcaggagatagatatcggcaggagcttgccgttgggcgaaatattaagctgggcagcaatattgaacggcccaagcgcccgcctgtggctgagatttggggatcctctagagtcgacctgcaggcatgcaagcttgag

SEQ ID NO: 31904 - DNA, 3043 bp, Oryza sativa
  Clone ID: PAT_MRT4530_36166C.1
ctttctaccccccacacgcgattcctcccctccaagtctccaactaacagagaggggtggtggtggactcattcgcgcgaccaagtatccgctagtacgcgccgcggagtggaggagacggagagagcccgcgcgcgcgcgcgcgatggtggcccgccggttcgtcgtgcggcaggggggcggcggcggcggaggcggcgaggcggaggagcacgaggtggagtacgacacggagcacggcctcgacatcctccgcctccagatcttctccctcacctccgtcccgcccgagctccagaagatcgtggtggaggcggacgggtccgtggtggacgacgggaccgacctggaggccatctccgagggcctccgcctcgtggccatcaccggggaggaggaggaggctgaggctgcggctgcggcggaggcggcaagggcgcaagagaagtcggatgaggagctcgcgcggatgattcagatcgtggtggaggcggatggatcaagggtggacggtggaaccgacatggagtccatctgtgagggtctccgcgttgtggccatcagtgagggggatggggaggacatcgctgcggcagaggcagccagggtgcaggagaagtctgacgaggagtttgcaaggatgcttcagttattaatggtattcagagtcgcttcacatgatttatacatcaaagttccctttggttccagtttagttcatcagctgaggtttgaagcaggtgtgaaatatctgaattcaattaagttggctgatcagattgatttcagttcttcagctagacatgtatactatgcaacatattctgtgtctgaatctaggactcaagctcattgtagatcatattcagtttttttgatggccttgttagctgaggcggaagaagaggcacttcttctacaacagtacagcatacgcaatgatggaggggaggaattcagagaaagagttgagccatacatgcaccaggttctgatgtacgaggatccaatgcgtcaagaggcagcacggaagactgttccaatggatgaacttcaggagaaggcactggtttcactagctaagctatttctagagttcaaatatgctcctacaccatcatggtgggattgcaccatgttcattgatttggaacaaagatgggtcaatgcaccaccctgcgacagctgtggccgtgaaacattcaatgttggaatgggcaccgcacttccctcagaaattaaatttggtgccaatcgcgtcgagatctataggtgcaactattgttctagtaccacccgttttccaagatataatgatccatataagattctggatttcactgatcatgtgtggacagagtgtttttcaaacttgtatgggaggtggatgcatctagatccatgtgaaggagtctatgataatcccctattgtatgagaaagggtggaacaagaaactagattatgtaattgctatttcaaaagatggagtacgtgatgtaacaaaacgctacaccagaaagtggcatgaggttctttccaggcgaataattacctcggaagataccgtttcagctatcttgtcatcgataacagggaaatatcgcagtggattgtcaattgatggactcacagccttagaaaatcgtgacaagaaagagtccgaggaacttagtaaagctgcttatcttgaagttgacaccagcatatctttacctggaaggcaaagtggttctgtggagtggagaaaagcaaggttagaactgagccaagttgaatcactcgcatgctcatcttgccctgctcgaaaatgtgtggatgctcatgtttcaaaaatatatgatgctctttctgctcttctttcacatttttgtgatggagacatccctaaagaaagagttattgaagtttttgactcgctgaagtgcttgatgcaaaatcttaaagatgcaaagtttaaaagcaggagagctacattggacaaaaaaacacaactggtttttgaggagatttttccttctgtcgaaagattgctttgtgctatgtccttgaaagcagagttgggtactgatggaaaatgctctgtgacaacagtcagaaatgcagtacatacatccttagcattaccagtggcaatggatgtggttgatgagatactgagtaattacaagagtaatgcggtttgcacaaaaggtcaccaattcccaagaggcaatagactctgttcaggttctgtccttgcaagtggtgaacaactcccaattggaattgcaacggcggcatttgatggcattcgctcatccaaatgggaagagcctgatggagccaaaggatgttggataatttacaagatgcttgatggccaaacttgcgagttggattcatatgatttgatgtcagctaatgatgttccagagagggatccaatggactgggttcttgaagggagcactgatggaggctccacctggaatacaatagacgcccggagttctgtaattttcgacagtcgtttctataggaaaacatttactgtggacaagagatataaagcaaatgcttttcggtttcggtttctgcgagtgagagaatctaatggcaatccaaggtttcagataggttcaattgacctctacgggaaaagcacatgagctttcttgaaagtgtgttacctcgaatagaaagccttttaaaccttctcgaagctaaactatacgtggctgtgaccatggctattatttgcaaccaacgcagttgcattatttattggaagattgtaaaatgtgaaattcaactatggaaggagtgattatcccttcaattcttgagaagactctttatatgcccccattgccttaagtctctagttgtttcctacaactcaagagtactgcagaataaggaagcacagaggagctatctaagtgttgtgtgatatatagacatgtatatgtcagtttgtaccagtatctaattgtttaattaaaagccttaccaaatgttcatttggtagtgtttttgagagtggaaaaaaaaaaaccaaa

SEQ ID NO: 31905 - DNA, 428 bp, Oryza sativa
  Clone ID: PAT_MRT4530_36167C.1
cggacgcgtgggcggacgcgtgggcggacgcgtgggttcggtttctgcgagtgagagaatctaatggcaatccaaggtttcagataggttcaattgacctctacgggaaaagcacatgagctttcttgaaagtgtgttacctcgaatagaaagccttttaaaccttctcgaagctaaactatacgtggctgtgaccatggctattatttgcaaccaacgcagttgcattatttattggaagattgtaaaatgtgaaattcaactatggaaggagtgattatcccttcaattcttgagaagactctttatatgcccccattgccttaagtctctagttgtttcctacaactcaagagtactgcagaataaggaagcacagaggagctatctaagtgttgtgtgatatatagacatgtatatgtcagttt

SEQ ID NO: 31906 - DNA, 180 bp, Oryza sativa
  Clone ID: PAT_MRT4530_36168C.1
atgcccctggactcacctcatcagttcatcggaccacaagagctagcaaagctcgcgctggcgtgccttggtgccagcctcccgcagtccagcgcgaaccgcgaagctgagcgcgttaaaaaatggtggcactgggccatcgtcccgttgctttcagctacgcggccggggcaagcgtaa

SEQ ID NO: 31907 - DNA, 501 bp, Oryza sativa
  Clone ID: PAT_MRT4530_36169C.1
atcatgcctttctcttgcaattgcttttctggtttaagcaatcattcagatgggtcaatgcaccaccctgcgacagctgtggccgtgaaacattcaatgttggaatgggcaccgcacttccctcagaaattaaatttggtgccaatcgcgtcgagatctataggtgcaactattgttctagtaccacccgttttccaagatataatgatccatataagcttctagaaactaggaaaggacgctgtggagaatgggccaattgctttacattctactgtcgaagttttggatatgaagctcgtctgattctggatttcactgatcatgtgtggacagagtgtttttcaaacttgtatgggaggtggatgcatctagatccatgtgaaggagtctatgataatcccctattgtatgagaaagggtggaacaagaaactagattatgtaattgctatttcaaaagatggagtacgtgatgtaacaaaacgctacaccagaaagt

SEQ ID NO: 31908 - DNA, 453 bp, Oryza sativa
  unsure (1)..(453): unsure at all n locations
  Clone ID: PAT_MRT4530_3616C.1
ttggatacctaccccccaccgcgcgatccatggcgnacgccggcatccgctccggcgtcctcagatcggcggcgggtgtggacggtctcgccgccgccgccgcggcgcgccccactcctctcctcccgcgcgtccacctcgccggcgacggcacgggtaagtagatccttcctcagttcctctcctccctcgcgtccaccgccgacgagggtagtgggtaggcgaaatgctaaatcaatcgagggttcccacagggcggatggcgaccaccatcgggttctgcccccgtctcagagccgcgccgccgtcctgcaagaaggcggaggcggacccggcgccgtctctccaggatgcggtggtggcggcggatgctgcgctgcgtgccccttcacctccccagagcatggcggcaagatggcggcgattctggagtttctgaagaaacactcgctc

SEQ ID NO: 31909 - DNA, 146 bp, Oryza sativa
  Clone ID: PAT_MRT4530_36170C.1
cggacgcgtgggcggacgcgtgggctagctagctgcctatccaagaacaatccggtcgatcgatcatggtgtctcccgctgtcatcaggcaaaggccatcggtcggtaagcatgctggagacggagagagcgctgctaccggcgac

SEQ ID NO: 31910 - DNA, 542 bp, Oryza sativa
  Clone ID: PAT_MRT4530_36171C.1
ttagcatttagtgagggcaaggggaaccgtggcaacgtcattagcgttgtcacgttggaccatgacgcaccgcccctcgccaggaatgtcaccgccaccgacaaggacgaggcaccgcgggaggatctccggcccgaatctcgccgtgcgccccaactctaggccagcggcagatctggtcccgctggatccggcctccgtagtccacagcctcgccgcggacggcatctcctcgccggagtcgctctcgctgctccctcaccagccgccaccctgcagcgcttccccccaacatcgacagcaacaaagctccctgaagttcaacatctgtgttttcccttttctgctaaggtcagtgaacttatcccaaaaccacagccgaagacaagattgaatcataaggtcgcttggatatatggggacatttcaaactagatgtgtttaacgtatatgaattatagttgcatgtagcatgctgaatagaacttgaatagatcggtgaatgaaaaatgtggatgggatatatataatttggattatgt

SEQ ID NO: 31911 - DNA, 1644 bp, Oryza sativa
  Clone ID: PAT_MRT4530_36172C.1
atggatctcgacaagtcaacccccaccagtgcgtcactaaaggaactgcaggaggatggcgcccttcccggtcacgggaccgcggagagagaagtaggaggtactgaaccccagcctgtcctgggtcgcatagttgcgatcgaggactttattctctgtggttttcttcctccgccttctgaatttcttctcttggtctttaatttctatggtctttccttgctccatttgaaccccaattccatcgccttcctgagtatcttttcgcatctttgtgaggcctacattagggtagagccgtttcttgaccttttccgcttttactatgagttgcgctggatggaacccaaaaaggtgtccggcaaatggcgggggaggtggttctatcttcagatagaggattcggatccagtctttgttgttcctgaggagcaacaagacaagattccatcctggaccaccaaacccgccttgaccccatccctccaatctttcattgatatcattgatgacctccgagaacgggggttgtcggggtatgaagtcgctgctgacttcattggcttggacatcgcaaccgtggagcgccgcgttggccaactgataatcagtggctcgacaacagcgagcaacgtccccgtccccctttgcgagaaaggggcagccgagcgcgatgctgccatcaatgtggtggcgtcgctgaaggagaaagtcgcccaggaggcatctgacgctgctgctgccgctgccacaacgagcggcggcaacgttgcgaaaaaggggagaaattctcctctgtgtcggaaaacttgcacctcacatcgcatcggttgtactccaggcctcggacgcgtctcccccgcctccacgacggcagcggctagtgaagcttggcgagaacctgtctcagttgcaacttttcgcagggcggcgcgggcgaaggcggagcaagacgggtctggagggacctccagcgcgtctcctgccgtggcctcgacggatgtcgtggtcgcgcccagaagctgcgaggcgacacctagcggcctagccagcgatcttgcagctggtcggggtccgccagctgccgttctcacctgggaggagctccaggtcgagatggggcgcctccccaaggctgacctcgagagcgcgctcgctgaccaggatcgtcgcatccattattggaggacgaagtttgaggtcgcggaactcgagaggactatgctggaagtgaagaaggaccaggctgtagagacactccggggtcgtgaggtgtggttcaactcgtatctgaagagttgctgcacgtccatgtccagagtatgtagagagctccgagtacctcgtggggatcccgaggaatcggcggccggatatatctcgtggctgaacggcgcctgcacccagctcgaaggcatcggtcaacgcatcgacgaagccttgaagcagcagtgtcgtcggtcgagccgatatgccggggggcatgtgttggcttgtatacgagatcatcgtccacagctgcacctcgagttcctccacgaaaggttttctcgttctcggagaactcctgtggagatagatggcctagcgaagtcgatggcgccactagcggagaaggtcttacagtcgatcccttcctggtag

SEQ ID NO: 31912 - DNA, 1737 bp, Oryza sativa
  Clone ID: PAT_MRT4530_36173C.1
atggacctcgacaagtctacctccaccagcgcgtcgctaaagaaactacaggaggacgacgcccttcccggtcgcgggaccatggagagagaagcaggaggtactgaaccccagcctgtcctgggtcgcatggttgcgatcgaggactatattctctgtggttttcttcctccgccttctgaatttcttcttttggtcttgaatttctacggcctttctttgctccatttgaaccccaattccatcgccttcctcagtattttttcgcatctttgtgaggcctacattggggtagagccgtttcttgacctctttcgtttctactacgagttgcgttggatggaatccaacaggtccttcatcgatgccatcgatgacctccgagtacgaggtttgtcggggtatgaagtcgctgccgacttcattggtttgaacagcgaaaccatggagcgccgcgtcggccaattgatgatcagcggcccgacaacggcgagcaaagtccccgtccctctttgcgagaagggggcagccgaacgcgaggctgccatcaatgctctccctctgactgatatcatcgggccgctcgtggatcatcaggcggcggcgtcgctgaaggaggacatcgccaaggaggtgtccgatgttgctgccgctgctgccacaacgagtggcggcaatattccgaaaagggggaggaaattctcctccgtgatcggaaatcgtcggaagacacccaccccctcgcctgtctcaatcgcagcctttcacagggcagcgtgggcgaaggcagcgcaagacggatctggagggacttccagcgtgtctcctgccgtggcctcgacggatgtcatggtcgtgcccaggagccgagaggcgacgcctagcggcccagccagcgatctcgcggctggtcggggtccggcggctgccgtcctcacctgggaggagctccaggtcgagatggggtgcctccttgaggctggtgctcgcgaggttcacgaggacctccagaagatgagggagctggtggccggcaatgagcgacaacggcaagggcttgagcgtcgtatgtcggagcttgagaacaacttgtcagaaatccgtggctcgctgcgggtcacctacactggtctacaccagctcgccggggagtgtggcgtcaggaccaccataccggcgaatcccgacgagttctcactgacgtcttcgcctgcagaactgtcgacggcgatggaggcgatcccctccaagcacgcggccaggatcggagaggagacgtctaacaggatctataccggggcgtgcatgtccttgcgtgtagatgttgatgtcgaggatgtccagcagcgcgggcagcctgagttgccaatgatcgttccggcacttgcgttcgagccatatgtgccgcagggcgatgtagatcagaattcgcctgtggaaacaggcatggcgacgacttccttagacctcgagagtgagcttcctgaccaagatcggcgcatccagtattgcaggacaaaatttgaggtcgcggaactcgagaggactatgctggaagtgaagaaggaccaggccgtggaaacactccgaggtcgcgagctgcaactcgagttcctccacaaagggttttctcgttctcggagaactcctacggagatagatggcctggcgaagtcgatggcaccgctggcggagaaggtcttccagtccatggactggcgttggccttcctggtag

SEQ ID NO: 31913 - DNA, 190 bp, Oryza sativa
  Clone ID: PAT_MRT4530_36174C.1
atgccgcgccgggacgacgacgccatggccggggcatccacctctgggaccgcgcgacgcgacgagtcttctcgcgtctgcagcggaaactccgtggctatccggaatcgggagggtttcccaataggaaagcaactcaggactcaggagcggcgtctgagaggtttcagagatggagaaccagttccag

SEQ ID NO: 31914 - DNA, 6279 bp, Oryza sativa
  Clone ID: PAT_MRT4530_36175C.1
tggtatctacatatggaaggagttctactcggaaaagattgggtcttagccatatcgtgaggggtccaatgtcttcgagtcctacttggagatcaactgacccgcggtatataagggaccccctgggcaggacctaaggcattgaatcttactgccaacacaaccaccacagcctacggaatcctcgtatcaacggaccccaataccctctatatccggtctgcgggtatcccccgtcgacagtggcgcgccaggtaggggaacttggtgctcaaggttctactactatgacttcaagccttcccgactacaacgtcaacaccggcatcaaccaaggagcttcaacttcgacgacgctggtgtggactcaagttggtgaaatcgtcttcccggtctacaccacaatgccgatctcgactggcccagcaattatcgggagcgagaacggtgtggttacgaccccggtcgacaaccccatgtcgaaagatcctcccgcggaagcggagaacagaacatcgacaatacccgagcctgagaaggatcctaatgcggccagatcttgtcctccccacaagaaatgcgagctgacgaggacagcttcctgggcgacaagagcttggtgtcccgtccataggactagcaagcacaccttgcaagcttgtttcgttttcctcaatgtacgagctgaaatccgtgcctgcgaagagtgcggaattcagcgtacttccccaactcgtgacatctattgtcctatccaccaggcaaagactcacgacctctcaagctgcaaggtccttctcaacgccatgaagatatcaccccataaggtccagcagtttcaaatctcttctcgagatgctgacaaggaacaaggtgcggcgactacatcagattgattcgttagggtaatcgatattgatccccacaagccatctatcctacatctgctcaaagaccaggcctcatcatcgacaagtacaccgcgcgacgtgtatgctatcgatggaaccggcacatctggaggcggccacacgggaacggcggatcaattggttacaccgacgctggcccaacatatcaaaactctcaatgcgatattgaacaaaagcccttttgatcccgtcctgtacgctgatctcgatcactgggcagaatgactacgggaatcagtggctaatctcaataacgcgttcgcagaggccgccgccagggcaccactagaacaaccgcggatcgatggcgctaatagggatgatccaactcagcggtcgccacctcgtcaacctactcctccaccccgcggcactagtgatctccgcgagcacctaaatggccgccgagaagcacgactcgctcgagataatgaaaaccgttgccgacatcgtgcctcttcacgacattgcaagaacgaagaacaaggaggacgtccgagccagaaccgagaccgtgatgatcgtgaacagcggatgccgagtgataccagtcgaggtcgacgccgtgacgacagtgacaacagagatcgacaccgggacaacaacgatggacgacgacgaggttcacgagaacccgagcatcgtccttgaagccgtgcctcggaaccaagtgacccatcgtcgtcatcatcatcttcatcatcggacagacatccacgatgagcgcgtgatcgccaacaacctactacccctggcggtgggtgcagggctttcactcgtaccctgcgagatgttcgatggcttgagaagttccgaccgggagcaatagagaaatacgatggaagcaccgaccctgaagaatttctccaggtctactccacggtcctctaggctgctggagcagacgacaacgcactggcaaactatttgtcggctgcgttgaagggatctgcacgttcatggctggttcacctcccgccctactcaatttcttcatgaacagatttgtggcaacagttcatcgccaacttccaaggaacatacaagcgccacgtgatcgaggacgacttgcacgcgttgacgcagaaaccgggcgaatcattgagggaatatattcggcgctttaatgagtgtagaaatacgatccccgagatcaccgatgcttctgtaatccgtgccttcaagtccggtgtccgagatcgctacacaacccaggagttagcgacaagacggatcacaactactcgcaaggtgttcgaaattgtcgactgatgcgctcacgcgaacgacgccctgagacgcaaggaaggcaagtcgaagataggagaggagtggaaaccagccaaggacgcacctgagtcaagcaagaaaaagagccgcaggagtgggaaacggaaagctcaagcggaggtcctcgcaacagaacatgttgacccgcccaagaacccagacccacaaggcgacgatacgaataaaatatggtgccttatacacaagacggacaagcactctctggagacttgtttcatcttcgaaaaggcactcacaaagaaactagcgttggagaggggcaagcgagtacatgtagtcgagaaggccgcagaagcgactacttaggtctcagattcagcttacccggactccgacctccatgtttcgcacatcttcgtaggttccacggcggcgatatccgatcgtggtcgagcccactattcggaatatcaacgtagcacgggttctcatcgacggcggcaactccatcaacttactcttcgccagcaccttggacgcgatggggattccacgaagcgagttgatgcccactgatcaacccttccatggaattactcctgagtcatcgtccaagccattgggcaagatcacgctactcatgactttcggccaagcaaacaacttccgaacggagcaaatcacctttgatgtcgctgagttcgacacggcatataacaccatcatcaggaggactgctctcgcgaagttcatggccgcatctcactacgcgtatcaagtgcttaagatgcctggaccgaagagaacaatcactattcagggaaacgcgaagctggcggtgcagtgcaacaagcgaagcctcgacatggtcgagcacactcccaacccacccgccgcagctgagccgcccaggaaagtgaacaaaaccaacaagacgccgaagtcagacggcgcaatcaagattgttccgctctccagtgccaaccccgataagaccgaactcgtgctcatcatcttcctccgcgataatgcagacgtgttcgcttggcagccgtctgacatgccgggggtccccagggaggtgattgagcacaaactcatggtgcgacccgatgccaagccagtaaaccaaaaactgcagagatttgcaccggatcgaaaacaagccatacgggaagagctcgatgagcttctcaaagctggcttcatcagagaggttctacatcgagagtggctagccaacctagtcatggtgcgcaaggccaacgggaagtagaggatgtgtgtcgacttcactgatctcaacaaggcgtgtcccaagggtcacttccctcttcctcgaatagaccaattagtggactcaacggccggttgtgagttgttaagttttcttgatgcctactccggctaccaccagatcagcatggcaaaagaggacgaggagaaaacatcattcatcatgccattcggtgtattctgctacgtcaagatgccgtttggactgataaccgtaggaaatactttccagcgcacggttcaaggggcactcaacgaccaacttgggcaaaatgtcgaggcttacgtcgatgacatcgttgtcaaaacgaagacaagcgactcattgatcgacgacctccgggaaacgttcgacaacctccgacgataccgcctcatgctcaacccagagaagtgcacgttcggagtaccgtcgggcaagctcctcggattcctcgtctccggaagagggatcgaagcaaaatcccgagaagatcaaggcgatcgagaacatgaagtagccgacaagactaaaggaggtccagaagttaactggatgcatggcagcactgagcagattcgtcgctaagatgggagagcgatgacaactcttcttcgccctcctgaagaaacaagacaaatatgtgtggacacaggaagccaaagacgcatttatcgcgctcaaacgctacctgtcaaatccccctatacttgttgctccccaacctaatgaagaattgttcctttatatcgttgccacgccatattctgtgagtactgtcattgttgtcgagagagagaaggtgcaaagaccggtttactacatcagcaaagctctccacgacgcaaagacaagataccaacagatctaaaagctgctttacgcagtagttatgacatcaagaaagctacgccactactttcaagcccacagagtcacagttgtttcctccttcccccttggagaagtcgtgagaaacaaagacgttgtcggccgcattgcgaaatgggtagtcgagctaagccagtttgatgtccactttgtgccacgaatagctatcaattcccaggttctcgctgattttatagctgactggactatgtctgagaacaggccaaacagtcaaacagacagcgaaacgtggacaatggcgttcgacggcgcacccaatagccaaggagcaagggcatggttcatcttgacatcaccttcgggagatcagttcagcaagcacgcaattcacctcaacttcagggcaaccaacaacacagccgagtacgaaggactactcgccagcataagagcagctgccacactcggagtcaagcgactaattgtgaagggggattcagaactagtcacgaaccaggtgcacaaagactacaagtgctccagccccgagttatccaagtacctcgcagaagtcaggaagctggagaagaggtttgatgggatcgaggtccgacacgtataccgtaaggacaatatcgaaccagacgacctcgcacggcgtgtgtcccgacgagagccactcgaacctggcacttttctagacgtcctgacaaagccatcggtgaagaaggtacacgacgaaggtagcacggtagtccccgacattagctagggggctacagaggcggtacacgtcgttgccgatatcgagactacagacgactggtgaaccccgctgatcaagttcctgagtagcgacgagttgcccgaggatgatgcagaagctgagaagattactcgacaagccaagatctattgtatgatcgataatgatctgtacaaaaaaagagccaaattgagtacttctcaaatgcatctcgtccgatgacggcaaacatctcctcctggacatacacgaagggatctgcaggtcacacgccagcggacggacgttggtgggaaaagctttccgacaagggtttttctggccgaacgccctcaaagacgcctgcgacatgcaaacacacaaaattgccagcgcaagcgctccagaccatccctcttacttggccattcacgtgctgggggctcgatatactcggaccattcccacgaggacagggcggctacaggttcctgttcgtggccatcgacaaattcaccaagtggattgaagcgacgcccacgggggaaatcaaggccgataaagctatcaagttcatcaaaggaatattctgcagatatggattgtctcaccgcatcataacagacaacggctcccagttcatcagtgccgacttctaggattacagcattggattgggagtcaagatttgcttcgcctcggtttctcaccctcagagcaatggacaagtcgaaagggcaaacggcatagtgctacaagggatcaagaccctcctatgggccgtgtgtaccacaccgataacatccaataaggagacacctttcttcctcgtgtatggctcggaggctatgctccccacagagctacgacatcagagcacatgagtacagaagtactccaacgaggagcaggaggagcggtgaagcgatgatgtgaatctactcgaggaacatcgagaaagagttgccgtcagagcagccagctaccagcaggccctttgccaatatcacgagaagcgcaccagagcacgtacactttcgatcggcgattacgtcctccgacgggttcaaagccaaacagggcgcaacaagctctcacccaaatgggaaggaccatacacgatcacgcaagtcttgcggccgggcgcattcaagattgcagacggcgatggccgcaagttagcaaattcttggaacattgatcaattacgtaaattttatgta

SEQ ID NO: 31915 - DNA, 359 bp, Oryza sativa
  unsure (1)..(359): unsure at all n locations
  Clone ID: PAT_MRT4530_36176C.1
tagaggaatgcaagggtgtgagttggatntgaagatcaaccagcagagaagatagagagttgtttcacaaacctaacagttttggaaagttgaccgttcgctattagtttattctttttccatgtgccagtgttgagcatgcttgtgttcacaagtttgttttttctgtctgctaatgttaaatttcctgaaaggaacttntgaataaatatggtattatttagttatttgaagcttcaattgtatatacgagtgaagtgtgcaaaatgagggaacatccaacacagatgtgtatattctatccaagtatcctataaattgatgttttacttttgttcttattaaaaaaaaaaaaaaaa

SEQ ID NO: 31916 - DNA, 753 bp, Oryza sativa
  Clone ID: PAT_MRT4530_36177C.1
atggatctcgacaagtctacctccacaagcgcgtcgctgaagaagttgcaggaggatggcgcccttcccggtcacgggaccgcggagagagaagtaggaggtactgaaccccagcctgtcctaggtcgcatggttgcgaacgaggactttattctctgtggttttcttcctccgccttctgaatttcttctcttggtcctgaatttctacggtctttccttgctccatttgaaccccgattgcatcgccttcctgagtatcttttcgcatctttgtgaggcctacattgggtgcccctcatctcgcaacaaatggcgggggaggtggttctatcttcagatagaagattcggatccggtctttattgttcccgaggagcaaccggacaagatttcatcctggaccgccaaacccgccttgaccccatccctccaatctttcaacgatatcattgatgacctccgagtatggggcttgtcagggtatgaagtcgctgctgacttcattggtaggcggatccagccgttccaggctcaagcccacccagcctttgactattctgggctggaggacgtgacccgggtttctcctcgaggcttgaacagcgcaactgtggagcctcgcgtcggcaagttgatgatcaacgccccgacaacggcaagcaacgtccccgtccccctttgtgataagggggttgccgaacgtgaagctgccatcaatgcacaaatggattgctatgactttgttttctag

SEQ ID NO: 31917 - DNA, 115 bp, Oryza sativa
  Clone ID: PAT_MRT4530_36178C.1
cccggtccgctcagtctcacctaaatcttacaatgacaggtgggggggcatctacgcattttgagctgctctctatgcatgaccatttcaatgatggatggatgtgaagagatct

SEQ ID NO: 31918 - DNA, 1155 bp, Oryza sativa
  Clone ID: PAT_MRT4530_36179C.1
atggatcacgacaagtctacctccaccagtgcgtcactaaagaaacagcaggaggataacgcccttcccggtcgcgggaccgcggagaaggaagtaggagcctttcgcagggcggcgcgggcgaaggcggcgcaagatgggtctggagggacctccaacgcgtctcctgccgtggcctcgacggatgttgtggtcgtgcccaggagccgcgaggcgacacctagcggcccagccagcgatcccgtggctggtcgtggttcgtcggctgttgtcctcacctgggaggagctccaggttgagatggggcgcctcctcgaggctggtgctcacggcattggtcgcgagatcgtggaggcgagggcggcggcggcgtcgttggcgaataagcgcgccgaccggctggcgcacgatttggcggaggttcgtgaggacctccagaagatgagggaactggtagccgacaatgagcgacaatggcagggagtcgagcaccgtatgtcggagcttgagaacaacttgtcggaaatccgtggctcgttgcgggtcacctatactggtctgcaccagctcgccggggagtgcggtatcaagtctaccatcccggcgaatcccgatgagttctcgctgacgtcttctcttgcggagctggcggcggcaatggaggagatcccctccaagcatgtggccaggatcgaggaggagacgtccaacgggatctacaccggggcgtgccacgtccttgcgtgtgtgaggctggcgcaccctgaactcgatctgcagaagatcttggatcagggggcggctagcgacgcgcgcaaggatgtgatggaagaagtcggcgatctgggggagtctgttctcccactttttgaagaagatgttgatgtcgaggatgtccagcagcgcgggcagcctgagttgccaatggtcgttccgttacttgcgtctgagccacatgtgccggagggcaatgtagatcgaagttcgcccgtggaaacgagcatggcgacgactcccttagatctcgagagtgcgcttgctgaccaggatcgtcgtgtccagtattggaggacgaagtttgaggtcgcggaactcgagaggactatgctggaagtgagaaaggaccaggccgtagagacactctgggggtcgtga

SEQ ID NO: 31919 - DNA, 1283 bp, Oryza sativa
  Clone ID: PAT_MRT4530_3617C.1
tcatccgtttgctcttttctgtgcagttggaaagcattcagtgctcttctctctctccttctccttcactttctctctcctcttcttcatgctcggatttccctctctcgcgcatcgatccgtcgcctcggcgcacaattcgggctcggaatcgggtccctgatccgcgacaccgcccggctcgatcgtttcccgggctgattcggtggccattgcggcgagatcggagcagggagagatcagggcagagaatcagcatgatgatggagactgagctatgctcctcccgggttctgtctccgcctcggtacgagagtggcgatgaggagctctcggtgcttcctcggcacacgaaggtcatcgtcactgggaacaaccgaacaaagtccgtcttggttggcctacaaggtgttgtcaagaaggctgttggtcttggaggttggcactggctggttctaaagaatggtgtagaggtgaagctgcaaaggaatgctttgagtgtattggaacctccaactggtaacgaagacgatgatgatattgatggcaacaattcgttctgtagcagttccgacatgggagacaaagacatggactattcgagcatagagtaccacaaaccaacaaagccaagagttcggcatacaaggccctggtcttcctgtataaaatccagcaaccgaggcaattttcaccccagtacaaagctgcgaacgagagtaaacctgacaaaacttggaactcctacgctgtggagatactggaagcatttcaatcttgtaagcatgaaccccaatccatcaaaggaacagctcttccatggggtccagcagcattttcagtctcagcaattggatgagttgcaggtgattctgggcttcatccaggcagcaaagaggctcaagaccctgtaccgctcctagcctgcttcacaaaaccctcagtgtgtagatctcaagaaattagatgttgttcctatgtggttaaaattaatctagtcttgagagagatgaacagaaaagaagataattagaggtgcatttgatgagtaattctttttactttttacctgtaattgagtttatgtaaccccaagttcacacagtgtcagcaactgaccaatctcaattattggatggagataaaatactagtgctagtacagtgtgaagctatgatgaattattggtcaacttgatgccaatgactttctatccaaaaaaaaaaaaaaaaaaaaaaaaaaaaaaaagggggggggcctcgtgccgattcctgcagcccggg

SEQ ID NO: 31920 - DNA, 1107 bp, Oryza sativa
  Clone ID: PAT_MRT4530_36180C.1
atggaccttgacaagtctacctccaccagcgcatcgctgaagaagctacaggaggatggcgcccttcccggtcgtgggaccatggagagagaagcaggaggcttgaacagcacaaccgtggagcaccgcgtcggccaattgatggtcagcggcccgacaacggcgagcgacgtccccgtcccccgttgcgagagaggggcagccgaacgtgaagctgccatcaatgtggcggcgtcgctgaaggagaaaatcgccaaggaggcgtctgacactgctgccgctgctgccacaacgagtggcggcaacgctccgaaaaaggggaggaaattctcctctgtgatcggacatcgtcgaaagacacccaccctctcggcctcggatgcgtcccccccacctccacgacggcagcggcttgtgacgcttggtgagaagagccgcgaggtgacgccgagtggcccagccagcgatctcgcggctggtcggggtccgccgactgccgtcctcacatgggaggagctccaggtcgagatggggcacctcctcgaggctggtgctcgcggtgttagccgcgagatcgtggaggcgagggcgacgacggcatcgtcggcgaatgagcgcaccgaccggctggcgcgtgatctggcggaggttcacgaggacctccagaagatgagggaactggtggccggcaacgagcgacaacggcaggggctcgagcaccgcatgtcggagctcgagaacaacttgtcggaaatacgtggctcgttgcgggtcacctacactagtctgcaccaactcaccggggagtgtggtatcaagtccatcattccggtgaatcccgatgagttctcgctgacgacttcgcttgcggagctggcgatggcgatggaggcgatcccctccaagcacgcggccatgatcagagaggagacgcccaacgagatctataccggggcgtgccatgtccttgcgtgtgtgaggctggtgcaccctgaactcgatctgcggaagatcttggatcagggggcggctagcgacgcgcgcaaggatgtgatgaaagaagtcggcgatctgggggagtctgtcctcccgctttttgaagagtag

SEQ ID NO: 31921 - DNA, 476 bp, Oryza sativa
  Clone ID: PAT_MRT4530_36181C.1
gcccaaaaaggaaaagagattggttgcatgtcatttgatatgcatgtgaaagagagaggaagtgaggatttgtttctcgacaagctaaacagaaggccttcaaatcatccagaaaggtgtgagagtagaggtggctttagtatgtcatgccagacagcaaacttggatctgaacatgaacgacacttatgacgggcctaaacagggcaagaaatttgatttaaacgggttcagctgggcctaggaaatgagcactaacaattgccatgtcctttagcactatcagtgagaacaagtgaaaacagattttttcttccgatgatcaatggtattgccatgccttcgattgaaagatcaacgccacttcacaatttgaccatctctgctgttataaaatggtaattcactgaaataagtgatggaattagcgataagatgcttcttgtgcaccacacaagttaccaatttggccatgta

SEQ ID NO: 31922 - DNA, 2184 bp, Oryza sativa
  Clone ID: PAT_MRT4530_36182C.1
atggatgtagattggagtgcaggaaaccggccagatccatgcatgcctccagttaagaggatcgtgacagtgatatatgtcgacggggatatccgtagaccggatatagagggtattggtgtacgctgcctccaagcgttcctcgtcttctctgctcccgcaatggacctcgacaagtctacctccaccagcgcgtcgctgaagaaactacaggaggatggcgcccttcccggtcgcgggaccatggagagagaagcaggaggtattgaaccccagcctgtcctgggtcgcatggttgcgatcgaggactatattctctgtggttttcttcctccgccttctgaatttcttctcttggtcttgaatttctacggcctttctttgctccatttgaaccccaattccatggccttctcagtattttttcgcatctttgtgagacctacattgggggtatccggatgcgtcggtttccgactccgggatggcctgaagtcgtgctatatccctttccagtgcccttcctctcgtagcaaatggcgggcgaggtggttctatcttcagatagaaaattcggatccagtcttcgttgttcctgaggaacaaccagacaagatttcgtcttggaccgcaaaacccgccttaaccccttctcttcagcccttcatcgatgccatcgatgacctccgaatacgaggtttgtcagggtatgaagtcgctgccgacttcattggtttgaacagcgaaaccatggagcgccgtgtcggccaattgatgatcagcggcgcgacaacggcgagcaaagtccccgtccccctttgtgagaagggggcagctgaacgcgaagctgccatcaatgcggcggcgtcgctgaaggaggacgtcgccaaggaggcgtccgatgttgctgccgctgctgccacaacaagtggcggcaacgtttcgaaaagggggaggaaattctcctccgtgatcagaaatcgtcggaaggcgcccactccctcggtaagctttcctggtcctttatcgcgtagtcggaaaacttccacctcacatcatacccgttatactccaggcctcggatgcgtctcctccgcctccgtgacggcagtggcttgtgacgcttggcgagaagaggagctccaggtcgagatggggctcctccttgaggctggtgctcgcggcattagccgcgagatcgcggaggcgagggcggcggcggcgtcgtcggtgaatgagcgtgccgaccggctgacgcgtgattttgcggaggttcgcgaggacctccagaagatgacggagctggtggccggcaatgagcgacaacgacaagaactcgagcatcgtatgtcggagcttgagaacaacttgtcggaaacccgtggctcgttgcgggtcacctatactggtctgcaccagctcgccggggagtgtggcgtcaaaactaccatcccggcgaatcccgacgagttctcgctgacgtcttcgcttgcagaactggcgacagcgatggaggcgatccccctccaagcacgcggccaggatcggagaggagacgtccaacttgatctataccggggcatgccatgtcctcgcgtagatgttgatgtcgaggatgtccagcagcgtgggcagcctgagttgccagtgatcgttccggcacttgcgttcaagccatatgtgccgcagggcgatgtagatcaaaatatgcctgtggaaacgggcatggcgacgacttccttagacctcaagagtgcgcttgctgaccaagatcgccgcatccagtattggaggacgaaatttgaggtcgcggaactcgagaggattatgctggaagtgaagaaggatcaggccgtggaaacactccgaggtcgcgaggtgtggttcagctcgtatctgaagagttgttgcacatccatgacaagggtctgtagagagctccgagtaccccgtggggatcctgaggaatcggcggccggatacatctcgtggctaaatggggtttgcgcccagctcgaaggcatcggccagcgtatcgacgaggccctgaagcaggagtgccgtcgatcgagccgatatgccgggggcatgtattggcttgcatacgatatcattgtccgcagctgcacctcgagttcctccatgaagggttttctcgttctcggagaactcctacggagatag

SEQ ID NO: 31923 - DNA, 1098 bp, Oryza sativa
  Clone ID: PAT_MRT4530_36183C.1
atggatctcgacaagtctacctccaccagtgcatcactgaagaaactgcaggaggatggcgcccttcccggtcgcggggccgcggagagggaagtaggaggcttgaatagcgcaaccgtggagcgccgcgtcggccaactgatgatcagcggcccgacaacggcgagcaacgtccccgtccccctttgcgagaaaggggcaaccgagcacgacgctgccatcaatgctctccctctgactgatatcatcgggccgctcgtggaccatcaggtggcggcgtcgctgaaggagaaggtcgccaaggaggcgtctgacgctgctgttgccgctgccacgacgagtggcggcgacgttccgaaaaaggggaggaagttctcctctgtagtcggacatcgtcggaagacacccactccctcggcctcggacgcgtctctcccgcctccgcgacagcagcggcttgtgacgctcagcgagaaggcggtgcgagcaaaggcggcgcaagatgggtctggagggacctccagcgcatctcctgccgtggcctcgacggatgtcgtggtcgtgcccaggagccgtgaggcgacacctagtggcccagccagcgatctcgtggctggtcgtggttcgccggctgccgtcctcacctgggaggagctccaggttgagatggggcgcctcctcgaggctggtgttcgcggtgttagcctcgagatcgcggaggcgagggcggcggctgcgttgtcggcgaacgagcgcgccaatcgactggcgcgcgatctggcggagctcgccggggagtgcggtatcaagtccaccatcccggcgaatcccgatgagttctcgctgacgtcttctcttgcggagctggtgatggcgacggaggaggtcccctccaagcatgcggccaggatcggagaggagacgtctaacgggatctacaccggggcgtgccacgtccttgcgtgtgtaaggcttgcgcaccctgaactcgatctgcggaagatcttggatcagggggcggctagcgacgcgcgcaaggatgtgatggaggaggtcgacgatctgggggagtccgtcctcccgctttttgaagagtag

SEQ ID NO: 31924 - DNA, 1707 bp, Oryza sativa
  Clone ID: PAT_MRT4530_36184C.1
atgatcagtggcccgacaacggcgagcaacgtccccgtccccccttgcgagaaaggggcagccgagcgcgacgctaccatcaatgtggcggcgtcgctgagggagaaagtcgccaaggaggcgtctgacgctgccgctgccgctgccacaacgagtggcggcaatgttccgaaaaagaggaggagattctcctctgtggtcggacaccgtcggaagacgcccaccccctcggcctcggacgcgtctcccccgcctccacgacggcagcggctaatgacgcttggcgagaaggcggcgcgggcgaaggcggcgcaagacgggtctggagggacctccagcgcgtcacacgccatggcctcgacggatgtcgtggtcgcgcccaggagccgcgaggcgacacctagcggcccagctattgatcttgcggctggtcggggtctgctggctgccgttctcacctgggaggagctccaggtcgagatggggcgcctcctcgaggctggtgctcacggtattggccgcgagatcgcggaggcgaaggcggcatcgtcggcgaatgagcgcgccgatcggctggcgcgcgatttagcggaggttcgcgaggacctccagaagatgcgggagctggtggctggcaatgagcgacaacggcaagggctcgagcaccgtatgtcggagcttgagaaccacttgtcggagatctgtggctcactgtgggtcacctacaccggcctgcaccagctcgccggggagtgtggcgtcaaggccaccatcccggcgaatcccgacgagttctcgttgacgtcttcgcttgcggaactggcaacggcgatggaggcgatcccctccaagcacgcggccagggtcggagaggagacgttcaacgggatctataccggggtgtgccatgtccttgcgtgtgtgaggctggcacatcctgaactcgatctgcggaagatcttggatcagggggcggctagcgatgcgagcaaggatgtgatggaggaggtcggcgacctgggggagtccgtcctcccgctatttgaagcagatgttgatgtcgaggatgtccagcagcacgggcagcctgagttgccagtggtcgttccgttacttgcgttcgagccgcatgcgccggagggcgatgtagctcaaaattcacctgtggaaacgagcatggcagcgactcccttagaccaggatcgttgcatccagtattggaggatgaagtttgaggtcgcggaactcgagaggactatgctggaagtgaagaaggatcaggccgtagagacactccggggtcgtgaggtgtggttcaactcatatctaaagagttgctgcacgtccatgtccagagtctgtagagacctccgagtaccccgtggggatcctgaggaatcggcggccggatatatctcgtggctgaatggcgcctgcacccagctcgaaggcatcggtcaacgtatcgacgaagccttgaagcaggagtgtcgtcggtcaagccgatatgccggggggcatgtgttggcttgcatacgagatcatcgtccgcagctgcacctcgagttcctccgcgaagggttttctcgttctcggagaactcctacggagatagatggtctagcgaagtcgatggcgctgctggcggagaaggtcttccagtcaatcactggcgttggccttcctggtagtctccgtgtcctgtga

SEQ ID NO: 31925 - DNA, 333 bp, Oryza sativa
  Clone ID: PAT_MRT4530_36185C.1
acttgattactcaaacaaccgattctcatctatgcctatgcctcttaatttctctacttaccttatgaatacagtaattttcaaggtctccagaaatagcctctctggatacattccaccaacgatttgtgatgcaattaagagtttacaaattattgatctctcttataacaacttgactggatcaataccatcatgtctgatggaggatgtaggtgcactacaagtcttaaatctaaaaggaaataagcttgatggcgagttgcctgataatatcaaagaaggttgtgcattaagtgcattggattttagcgacaccctgattcaaggaca

SEQ ID NO: 31926 - DNA, 2154 bp, Oryza sativa
  Clone ID: PAT_MRT4530_36186C.1
atggatctcgacaagtctacctccaccagtgcgtcactgaagaaactgcagcaggatggcgcccttcttggtcgcgggaccgcggagagggaagtaggaggtactgaaccacagcctgtcctgggtcgcatggttgcgatcgaggactttattctctatggttttcttcctccaccttctgagtttctcctcttggtcttgaatttctatggtctttccttgctccatttgaaccccaacttcatcgccttcctgagtatttttacacatctttatgaggcctacattggggtagagccgtttcttgaactcttccgcttttactatgagttacgctggatggaacccaaaaaggtgtccgggtgtgttggtttccgacttcgggatggcctaaagtcgcgatacatccccttccagtgtccttcatctcgcagtaaatggcgggggaggtggttctatcttcagatagaggattcggatccggtcttcgttattcctgaggagcaaccagacaagattccatcttggaccaccaaacccgccttaaccccatccctccaatctttcatcgatatcattgatgacctccgagaatgggggttgtcggggtatgaagtcgctgccgacttcattggcttggacagcgccactgtggagcgccgcgtcggccaaccgatgatcagtggcccgacaatggcgagcaatgtccccgtccccctttgcgagaaaggggcagccgagcgcgacgctgccatcaatgtggcggcgtcactgaaggagaaagtcgccaaggaggcgtctgacgctgttgctgccgctgccacaacgagtggcggcaacgttccgaaaaaggggaggaaattctcctatatggtcggacatcgtcggaagatgcccaccccctcgatctgtcatgcttcaggcctcggatgcgtctcccctgcctccgtgattgcagcggctagtgacgctcagcgagaatctgtctcaattgcaaactttcatagggcagcgcgggcaaaggcggcacaagacaggtctggagggccctccagcgcgtctcctgctgtggcctcgacggatgttgtggccgtgcccaggagccgcgaggcgacacctagtaggccagccagcgatctcatggctggtcgtgctccgtcggctgtcgtcctcacctgggaggagctccaggtcgagatggggcgcctcctcgaggctggcgcttgcggcattagccgcgagattgcggaggcgagggcggcagcggcgtcgtcagcaaatgagcgcgctgaccggctggcgcgcgatttggcggagctcgccggggagtgcggcgtcaaggccaccatctcggtgaatcccgacgagttctcactgacgtcttcgcttgcggaactggcaacggcgatggaggcgatcccctccaagcacgcggccaggatcggagaggagacgtccaacgggatctataccggggcgtgccatgtccttgcgtgtgtgaggctggcgcacccggaactcgatctgtggaagatcttggatcagggggcggctagcgatgcgcgcaaggatgtgatggaggaggtcgacgatctgggggagtccatcctcccgctttttgaagaagatgttgatgtcgaggatgtccagcagcgcgggcagcctgagttgccagtgatcgttccggcacttgcgttcgagccacatgtgccggggggcgatgtagatcaaagttcgcctatggaaacgagcgtggcaatgactcccttagacctcgagagtgcgctcgctgaccaggatcgtcgcatccaatattggaggatgaagtttgaggttgcggaactcgagaggactatgctggaagtgaagaaggaccaggccgtagagacactccggggtcgtgagctcgaaggcatcggtcaacgtatcgacgaagccttgaagcaggagtgtcatcgatcaagccgatatgccgaggggcatgtgttggcttgcatacgagatcatcgtccgcagctgcacctcgagttcctccgcgaagggttttcttgttctcagagaactcctacggagatagatggcctggcgaagtcgatggcgccgctggcggagaaggtcttccagtcgatggactggcgttggccttcctggtag

SEQ ID NO: 31927 - DNA, 182 bp, Oryza sativa
  Clone ID: PAT_MRT4530_36187C.1
atggggaagacgtttgccatgacccggtcgccaccccccgccgcctctatgatcgtcgtgcagatctggagggactcggaggggtcggcgccatcgtcgtacttctcgggcgcccttgtcattcgccatttaatggatgaagactttcgggttcttgttcacactagaaaacaggaacccgg

SEQ ID NO: 31928 - DNA, 216 bp, Oryza sativa
  Clone ID: PAT_MRT4530_36188C.1
atggcttgtccacggcgacctccatgtgcggagcttcggagatacttggggactataagaagtcacaggagtgaggaattaccgagagacggcgggacggcgaagatcggctgcagtggtggagcggagaagaaggtgcaacacgcgcccaaggtgttcgacgaaatgcatttcacgaagaaggcagagacggatggggtttatatgagggcttag

SEQ ID NO: 31929 - DNA, 1428 bp, Oryza sativa
  Clone ID: PAT_MRT4530_36189C.1
tgctctccaccgaaaccacctcaccactgtcgcgtcccctcctcctcgagccatcttcatcaacctcctacaccatgtcccgacgcagacagaggcggcggcaccacggacgacgtcgacctcgacctcggcatcctcgtgcgagacctcacccgtcgccgccctcgctccgctctccgtcgctccacatgcctgttccagccgctccctaccgcccactgccgcgctcgccagccgtcgctcccccctctgccgccggtgacctctcggtgctcgctcgccgccacccccgcttcgcgcgacagccactgctccgcctgcatgctccagccgcttgccaccaccgacccgctcaagcttcaaatgttccactgacatctgggccccatacccaactaactagtataaaaactactctgtgcctcgttcgccttcgtcttcatccccaccgcgcgctcgcctccacccaaacggccaaaacccaacacgacgccgaggccgagcacgagcagcgcgagcgccatgaatccgccgccgccgcagcagacggagagccgcccgcctccggaactgagagacgacgtgctcgccgagatcttctcccgcatcccgccggacgaccccgcaatcctcgtccgcgtctccgccgtctgcaagccgtggcgccgcctcctcagcggccgcatcttcctcagccgctaccacgccctccacctagcgcctccgatcctgggcttcttctgcgaggagaaggcgttgactggccccttctccagcttcgtccgcaccacctccttccgcccgatcatccccgaccgcggcggcggcggcggcgacggctggctgatcccgtgcgactcccgccacggacgcgccctcttcatcacccagccacccctgcagctcctcgtgttggaccccatcaccggcatggagcgcccgctgtgcgcgccgcagctctgagcgaacatcaagtggagcgccgcggtgctgtgcgccgtggacggctgcggccaccacgactgccacggccgcgcctaccgcgtcgcgctggtgggcaccgacgtcgccgggggagccacgcacgccgccgtctactcgtcggagacctacgcgtggagcgacccgacctccatcgatcaccaccccaacgcccgcgtccaggcgaggaggcccagcgtcctcgtcgggaacgcgcgcctctacttcctctgcgacaacaacaccagcatcgtcgagttcggcggcgctctcctcgtcacggcggagggcggcgggctcgggttcgccgccatcctgaagcagtccaggacgctccaccaatggtccaaggaggaggccacgaatcaatggaagcacctcaaacatgtcagggacctcgagcatctgcttccgtacacggtgggttttttaggaagtttcatggac

SEQ ID NO: 31930 - DNA, 744 bp, Oryza sativa
  Clone ID: PAT_MRT4530_3618C.1
tgcggccagcgctgatctccatccatctcgcgagcatagcggagccggagcggagcaggggaggggcgccttcgtcctactgcatcctgggagagatcagggcagagaatcagcatgatgatggagactgaactatgctcttcccgggttctgtctctgcctcggtacgatagtggagatgaggagctctcagtgcttcctcggcacacaaaggtcatcgtcactgggaacaaccgaacaaaatctgtcttggtcggtctacaaggtgttgtcaagaaggctgttggtctaggaggttggcactggctggttctaaagaatggtgtagaggtgaagctgcagaggaatgctttgagtgtcttggaacctccaactggtaacgaagacgacgatgatattgacggcaacaattcattctgtagcagttccgacatgggagacaaagacatggactatttagcgatcatagaataccataaaccaacaaagccaagagttcggcatacaaggccctggtcatcctgtacaaaatccagcaaccgaggcaattttcaccccagttcaatattgcaaacgagagtaaacctgacaagactcggaactcctaccctgtggagatactggaagcacttcaatcttgtaagcagcctggatccaacaaaccttacatttcatttccatggtctaatgctgaaaaactatgcacaggcagcaaagaggctcaagaccctgtaccactcctag

SEQ ID NO: 31931 - DNA, 243 bp, Oryza sativa
  Clone ID: PAT_MRT4530_36190C.1
atggcttttgttgatgcattgttgacattcattgatcttaagtcaagagtaatggtgctggcattggccgcacgaggtctgccacgtggcatgctatggacgtacgtcaacttcctcgggcagctgagaatggtcgaccgcgcgcgtcgtggttacgcacatggctggggcagcggttcagccaggctcttcgcgaatgtgggcaacaccaacatactgtgtgttgcaggcagctgcatctag

SEQ ID NO: 31932 - DNA, 348 bp, Oryza sativa
  Clone ID: PAT_MRT4530_36191C.1
atgctcgacttccctcttataatgattgctcggaataaattggggaaaccgaagggagaggaagcgatgaccgtggggagagggagaggctggcgccaggcgagggaaagggagtgggagggtggcacctgcgcgtgcgctggcgcgcgcgacgggggagaggaagcgatggcgggcacgatgtgggagaggaagcgagggcgttcggcggcgggcctactctggcgcgcgcgatgggggagaggaagcgagcgcgtccggccgcgcggggagtggtgggaggaagcagcttgcgatgggggaggcccggcggcggcggcaaaaggatgtttgcgatcggacggttag

SEQ ID NO: 31933 - DNA, 225 bp, Oryza sativa
  Clone ID: PAT_MRT4530_36192C.1
atgaagttctcgccggaccgcgctacggtggggagtagcgcggtgcccgggtggagcagcggcaatggcgtgggcaacatggcgaagcagcacaagatggctagcttgggtgggggtgtgctgatgcctgcggggaccgcaccgctgccgacttgctatgcctgctcgacgaacttgtggggaaaccagcaaaggagaggtgaggagaaatacagtggtcgttga

SEQ ID NO: 31934 - DNA, 435 bp, Oryza sativa
  Clone ID: PAT_MRT4530_36193C.1
ccgaaattttcggttagaccgaatgcccacccctacctccccctctggtcgacctcccccatgcctgccctactgcagacctgggaagaagaagaagggaaggagaagaaagggaaagaaggaagcggagggaatcgaggtgaagatggaaatgaagggtttgattaccgctgcccatggaggctttccccctgttttggttttctattagggtttagatcaagtgttggaagcgagtaagtttgggatccaccgatttattcctcagccaggttttcgctgatctgccccctgcgcagttctgttttggatgccttttcggccaagataataggatttccttcgaaaagtctctatacaaaagttgtaaataacgtgtagatctatcttctgaccaaatggcatgattttatatcaagtggtttaggaggtatc

SEQ ID NO: 31935 - DNA, 4720 bp, Oryza sativa
  Clone ID: PAT_MRT4530_36194C.1
tttccttttttttttttttttttttttttttttttttttttttttttttgtccgagacaaaaggctaataatccttgcgaatcaaggtgcgcatccaacaagtggaaaggaaccgcagtagctgagatcagcttgtcctggaaacatggcagcaatgtaattgtcaattattacatttcttcgacgatatgatttgagtagccacactgaaagagtctagaatcctcaacttctagtgttgataatagataaacaaccagatcatggtcgatagttcacagcaccacaatcattaacgtacacacactataggtcgttccgtcttagataacagggggcgactcaaaccgtcagacgttttcccccatacacaaatattcccaaacttagcagtagaacatgacacgtttgacattttccttcagatcaggaagcggccttacagcaacattcccagcaggcttagtgctgcgtgcaccaggaagggggccaccgccacgggtatgggcaccgtcaaacaactatttcaaccttgacattatttgagcaaaagtgggcttaactatttaaagcaaaaataaaatccctatactgacaggattatttaacttggttcttcaagcacaacaaaggtccaacaagatttaggttcccacaaacacaacgatacaagtaccagacttgcgttgttcacgctctgcagcgtcacaaacacaaatacaaaacaagtagtactacaatacccagaatagtccaacagcttatggtagcatacccgttttaacgggatcaacgacagagtgcaagtgctaaaataacataacatagtactacattccttggcgcatacggggtacagcccaagctcttagcagtaaaacatgacacgcttcacgttttccttgagagcaggtagaggcctgacggctacatttccagcaaccctggcgctgcgcacacctggtggaaggccacggctcgttgcagctccactcgccattgatccactgtcagatgtctctggctccatgtaaaagcgagctcggaaggctgccagatgagcatagtacgcaggaggcacaattgatacagagcgagtgcaccttgcataagtgtagcacaagttgttcgtgagagtttgcaaaacctctgcagtaaatttgttctcatcctacaaaacatgataatgagcatgccggcttgttccctctatgaaagcatgagtagctatctagtcattaaaccagtttcagttgcacttcgtggattttaccatacttcaaagcgatcttgtatcaattccttacgatggaccttggccctcactattccggcataattagtgagcttagtgcagtctcgagacgcaaccacagctaaaatgaaggggctagaatcttctcccaggatggggatgcgtaccattagcatcaaaaatgatcgttggcatatcactcacaagggcaatcctcccactcacaccatcaacaagtactgtatttctttctcgtaccttaacattgattttaaggacaacaattgctaaatacttgttgctcataataattacattcttcgtatgatgccattgcgaaaacaatccaagatcagtttcagataatgttcttgggccctcacaaatacaacatttttagtcacttcatattacaatcagcaggtaaagatacccgcactggaagtacaggaatcttatgcactattaggatggggccctgcgccctcattccacatattcaggtcttgcattcacaagagaatcctcaggatcaattgataagtacatccaagatatttgccacataatagcacgctcgagacagaaactcctaacagcattatctcggccatgacgagtaaaattcatgcattgccaaacgataactcgacaacaatccaacatctgcctaatcaactcattccattggcccattcttggcacgacattcgtcaggctgtcattctagcggtacatcagcctggcggctgttcggtctgaggatgttcattgcgtcttgagagcgtgccttcagtgctctttccacatggtcaggtctagcagtaagtgggggcagcacaggttccagtgcaaaatccattccagatatttggcacatgatagccagctcatgacagaagcccctggcagcactatcttgcacatttctagagaagttaatacatgcccagttgttgactctcccaccattgaccattttcttattcatcatgttccactggccaactctcggcaatacatccttttctctcccactatcatagtattcaagcaagtattgcaccagagtcttcacagtaccatgattatcaatgctaaaagacaactctcccattgcttggggcatactgatcttaaaggtatgccttgtgagatacagtccgcatatgttccagttcacgctcttgaggtcgctggcaagtcacttcttcacacgatcagcatcagataatggtctacctgagatgtctctgttcacaagcaacgatcttacgaacctccaaaggcagataattgggcctttgctgattgcccacttgaaggccagagaaagtcctgtgcgcaatactaataccatatgtctccagaaaatattgcaccacagtcttcacagtaccacgatcatcgacagggaatgataactcccttgttgcctgtgaagtgagtccagatatacgatattttctacgcatgtttcctctatgcgtcacctcaaccttcactcctgttagagcgcttgccttccagctaaaaacatggctaaataatggtctaactgagatgtctctgttctaagaagcatgagcaacaaagtcaatcacaggtagagactctgcccaacagcaaggctctcttcctcatcctgcagaataacgtcaaaggtcctagaagtaaatggtaatggaccagctgtgtataagctcttccttccatcatagactggaagacggccacccaaatgagactgcctatattgtgttacaatttctccaatgacagcacgattgacaccacgtgaaggaacctcaggagttatagacacatcatactggtgaaggtctttgtcaggcaattcagcaaagaaatggttggctttcacgatgcacctatcaccaaatgtacccttgccagggcgcattggaaatctcactgatttgctcgatggtggtgctggttgaatggcctggctagtggggctttgaccctggatggcaagttcctgaaactgatgttggacttcttcgctgctggcctcaacaggcagcgaagatgggccagttcttgatggtgatggtgcaaccaccgtagcttggtactggtcttgtgaggcttggtgcagctcgggaactgttcttgatggactggcaggaactccatgtccaccactgccactcctgtgttgtggcattcctccttgccgttggacaccacggccatagtactcatgtgcttgatattcaaccggaccaccacctggttgatgtgatgttggccctccacgaccctggtaacgtccaccacgtccctggtgttgtccaccaccacgaccagcttgttgagcatattgaggattggcaggttgccaaccaccacctccatgctgttgagctctctcaggtcgctgtgaaggaccccgtccaggagctccagtggcttgttgagttccagaactttccccagcattacggggttcagtttttttctttctcatcatgctacacaggtagaaatcaaactcagtaggatggcatatctttgaatcaaccacggtgcctggtagtatatttccacttctgtcaacagtgcgctggtccttgtggttattagcaaacagccttgtgtgatgacgcttctggaccaccacaaaggtaacgggtggctgataatcggcttccaaagatgcacatgcctttctaatggcatcaagctcataaaacaaaacctgataaaactgcccctcgctgacaccatccctgtaaaatattatcctctgaggtttctgtccagtagccctcttgaaagaaatgagaagctccttgatcatgccaccagtaacagttcctctatgcgggtcttgccatactttgaaaagatcttgtatcaattcttgacgatgggcttgggcactcaccaatccagcatacttagtgacttcaggccagtcttgagaagcaaccacagctgcaatggaaggactggaatcttctccaggatgcggttgagtgagagttttcacataagcacatttaaccatacatcatgcaaaagcacaagccttcttcagagcatcaaagaccccctggaagaatcgcatcttgcaccagcacaaccttttccctcgattttgagccagaaccaatagaaacttctcctttcttaactccaaggacggagctgatgaagtcgacgagagcggcgttggcctccccgtccctcgccggcgcgtcgatttggacgccgacggcctcgtcgccgatctcggtgatggtggcgagcttggagcctggcttggcttggatggagatggcgacggtggagggcggcatcaggcggaggcaggcccggaagcctccggcggcggcggcgttgggggcggcgggcggcggtggggcccctttggccttgcctcgttgcttccccggagccatgtctgacggtgactgacgacaatctcccggccgg

SEQ ID NO: 31936 - DNA, 2856 bp, Oryza sativa
  Clone ID: PAT_MRT4530_36195C.1
agcttcccttgcaagccttgctcctcctcctcctcctcctccaaagtccccccaaaatcggcgcctccccgtccaattctccgccgcgatccgctccccgaacccgccggagcgcgcaggaccgcgcggggacgccccgggcgcgaatgcgcgcgccccctgcgagggttggagattgttgtcctgctactgagatggatgaagtgccgggtaatcaagaagatcccagacttggggcctatgccgacaagatcactgatgcgatgtttgcggaccatgtggagttggggtctcattatgcaggtgattcttcttcagaggcaggatgggctccaatgatcgcgagaatgcagtcgcagtcgcagctggggagtaaccagcttggtgtctcctttgagaatggcagtttgccagatgacccggcgtcgttggcatcggcattcaagaacatgagcttgggattcagggattttactgttggcactcctgctaatcctgtcagtgttgcacccctaggtggacattatcctgcaagtcatgtgatttcatctggtgagaccacaatgaactcatttcatcagcaggagtttgctcaagatggtttcaggccttcatctctgaatcccaatgttgctgaatacatgaagccgaagtacggtgtacacaatgttcagatgtgcaccgggctgcatggctcggattatgtttctggggacccgtataatctaccatcatcagcttcacctttacagaaacagtattttattgatgggcaattccgggctaatgcaccatatcagcagactggctcgaatttcatgaggcaagattttgatgctgacagtcattatcttttgcaatcccagtatgcttatcagcaaatgccacaggtcgctggatctgatgttcattgggttagaagcaaccaacatggtgttcactcttctatccctgcagcttcaccttatctcaggacaccaatggttggtcagcaagcacatagcagtgctgatacttactggaatggtgctgctatttcacatggaaacaaccagctgaattccacatttgtgaacaattgctcatgtataatttaccctgattgttcacgcgaaatctgcgaatattgccagatgaagcaagcagaaaagttgaagcatcgttatatgttcaggcgttcatccaaaggtttcctgcagcctcagatttttgataaggtcaacattaaatgttttcctggaaagacgatggtgaagtctgatgatataaattcagcgagaaatattcagtctgtctttgaacctaatggccgcattgaaatgaatcagagaattaaccagcatggacacaatcaacatcttaatattcagggcaacgatttcttgctttttgacaggctaaactcccaggctctgtcacctgtggaatctgaatatggtttggccatgaaaattcctcaaatgagttatagttcagtagatgaagttgttgggaaaattcatctcttggcaaaggatcagaatggctgccgcttcctacagaggatatttacagaaggtacttcggagaatgttaaaaaggtctttgatggaatcattgaacatattggtgaacttgtggtcgatccatttggaaactacttggtacaaaagctacttgaagagtgcaaccatgatcagaagatgcatatagtctatgaaataaccaaaagaccagggcagcttattaaattttcatgcgacatgcatgggacacgtgtagtgcaaaaggtgatagaaacaataaactcgccagatgaagtttccatggttgtatgtgccctgagctctggtgccatcactttgatgatggatgcaaatggctgtcatgttgcactccgctgcttgcaaaaattctcacatgagcacaaagcattccttcttaatgtggccatggaatattactttgagctagcccaggatcgtcaaggttgttgtatcattcaaaaatgcattcttcatgcaaataaggaacagaagaaccagttgttgtacaatatcacttccagggctcttgagctgtcagagcatcagtatgggaactatgttgtacagtatattcttgatctccacatttcatgggcgacagatgaaatactggacaagctggaagatcatttcggatctctgtcgatgcaaaaaagtagcagcaatgtggtagagaaatgtttaaaagaagcatcgtggcctaaacgtgttaaaatcattcacgagcttatcaatgaccctaagttactgcatatcttgatcgacccatatgggaactatgtgatccaaacagcgctcaaggagtgtgaggatgctgcagtacgcgctgtgctgatcggagccattaggccacatgttgctgctcttcgaaacaacatgtttgggaagagaattctgtcaaaaacttacctgaagaacaggaagcactaatcttgcacctttgggcttttcttctggagtccacctgtcaggcaatgtgcataaggtgcaacactaatgtatctgtaagaatcatatgctacagaatagatccactcaaattaagtagattaagaaagatgaaagaaaaaaaaagaaagggaaatagctcggttggaggaaacaccattttgagctacttcagacaacaccgtgttgcaagctgtaagaattgtagaaattttgtccaaataattatgagttgtattatttaagccctttaagctatcagcatgtctgtatgagatactgttctgtaaacccccccccccccgcccccaagttgtaactctgtaatggtatttatattctacgtgttggcacacgtcatgaggttagctggtcttttatc

SEQ ID NO: 31937 - DNA, 816 bp, Oryza sativa
  Clone ID: PAT_MRT4530_36196C.1
cggccgcgtcgacgaaggttacaacaactcaaccgtataccatttttgggtggaggtacgatgcaaatagtgccaaacagcatcccattcatcacaaccacataaaatctaccgaggataaagctgaagtggacaatttatccatccacacaatgagggatgaggagatggctgccgggtcagtattttttattgagcaagacttgcacgttggagccaagttaaagcacgatttccagaagagacccacagttcccttgttatcatctgagattgccgagtctattcctttctcaatggataaataccatgaaatacttaaccgtttttccataaaacctgagtctgctgaagcaacaatcatacaggagaccctctctatctgtttggaaagaccaagagtaaagatcgaaaacagaacttgtgcccaatccatggagtccttggtaaatttcgtggtgcaagagttgggaacaaatgatatcaaggtaacaatgatgaacaatttaaacaagatccattcaggaattaaagaatatgtagttacaaaactaaagaagatgtcaaccggccttgatggtaactccatggtgacatgccataggatgaactacccatacgttgtctattactgccaccaccaacgcgccatcagcctcttctctgtcaccctcatcgacaacaagggtgtagccgtggacacgtctgccatctgccactatgacacctacgcatggccacccaatgttcccggcccttccggacctcaacatccaacccggtgatttcccggtctggcatttctccgctgccacg

SEQ ID NO: 31938 - DNA, 1323 bp, Oryza sativa
  Clone ID: PAT_MRT4530_36197C.1
atgaggagacggctctcccacttgctcaagggatccggctcccgatccaaccagtcgagcgatcgggcatctgccgacgtgtcaatggagaacactgacgctgtaccacagctcctgaccgacaacgacctcgatatcgttgacagacgagagaaacaagcctaccagatgctgaaggaccgatcattcgctcacaaccgagcgtacgatccaaagctactccggaaaacaagtatggatgggcggacgctgggcgtgtccacgtcggattttgctacagtagctacagtgcgaggttggatttttgcgaaaaagccctccgacccctcaaaccctagccgcttgctctccctctctcgcgccgctaccaagcactgccgcctccgcctccccctcacgccgtccccgtcgcctcgcgccgccgcctccacccccgccgccgcctccccatcgcgctgccacctccgcctcccgccgtccccatcgccggccgagctgccgccgtccgtctcccctccgccctctcttcccccactctctccttctccctttccctctccctccgccgtctcctcccccaccctcgcctccgccttcccctcgcgccattgcctccgcctacgcagccgctgtcgtcgcgtcaccgtctccaagcgcctctgcttccgcatccccctcgcgtcgtcgccatcatcgtccccgtcgccctgcgccgctggcgccattgcgtcgccgtctccgaccgccgtcaccgagtgcagccgtctccgcctccggcatccgtcaacgacgaggtcggagcgccgacggctgcatcacaggcggcgcgaaaagctgagggcccaatcctggcggcgggactgccgcgaggacaccccagcccaccactcatcggcgtcgccatggtcgtcggcgtcgccctcactgtcgccgtcgccaacagactgcgttaagaagccacttcaccaccagcagcagcaggggcatccaccgtacgccgcaccaatgccttccccttccctcccatctgtgccctctgggtcacaggtagtcgcttcatcggcagccgcgttgccgtcaatgtacaaggccaatgaccagcagcgagcaactcatggcaccagagacggcggtggcgacggtgactactaagaacctaatatcaacactatgctcattgccatagtgccaggtaaagaaagggactacaatgcttattcaaaggattatatgtcttccatagtgaagcagtcatgcactaatactagaagctgctttagagatggagacatcccgtcaaaaatctgcaattacccaatgatt

SEQ ID NO: 31939 - DNA, 882 bp, Oryza sativa
  Clone ID: PAT_MRT4530_36198C.1
ttaagtgtggcggaaggggcggacgctgggcgtgtccacgtcggattttgctacagtagctacagtgcgaggttggatttttgcgaaaaagccctccggttcttcgtaatcaggtataggcccctcgcgtcctgtgtttgaagagaaaaaatcgcggacaggggcttcgttgtgatatgtggaagacgaggggctttttcgaaaaaatactcccactagcgcagacccctcaaaccctagccgcttgctctccctctctcgcgccgctaccaagcactgccgcctccgcctccccctcacgccgtccccgtcgcctcgcgccgccgcctccacccccgccgccgcctccccatcgcgctgccacctccgcctcccgccgtccccatcgccggccgagctgccgccgtccgtctcccctccgccctctcttcccccactctctccttctccctttccctctccctccgccgtctcctcccccaccctcgcctccgccttcccctcgcgccattgcctccgcctacgcagccgctgtcgtcgcgtcaccgtctccaagcgcctctgcttccgcatccccctcgcgtcgtcgccatcatcgtccccgtcgccctgcgccgctggcgccatcgcgtcgccgtctccgcctctggcctccgtcaacgacgaggtcggagcgccgacggctgcatcacaggcggcgcgaaaagctgaggggccaatcctggcggcgggactgccgcgaggttccggacgcatcaactcgagggggagacggcggagggagtgggggttgaggcgcgcgcggtcttcatcctcccggcgccagatctgcttctcatctccacaaggacaccccagcccaccactcatcggcgtcgacat

SEQ ID NO: 31940 - DNA, 695 bp, Oryza sativa
  Clone ID: PAT_MRT4530_36199C.1
caccatgatcctcccctcccttgcctgcctcatcgctttctcacctcgctctctgtcccgcccgtctcacaaagagatgagacgagctgctactactcctccccagggtgagtgattcatgccatgtacaggggcgcaacaccgagggcgccgccaagaccggacgccaagatgagctgtcgaatagcacctgcatgcggcataagcccgctcgccaaggcgacgaaggggacaggccgctaagtgaccccaataagtccaagaggactccctccgctttcttctcttttatggaggagatccggaaggagttcaaggagaacaacccacaagaataaatctgtcgctgatgcatgaaaagcagacggtgatatgtgtgaatccctgaccgaagcggacaaggatccctatgtagcctaggacaacaagctcaaggacgagtacaacaagggcattgctgtctactacaagggcgagagtgctgccaagaacgcacccgacaaggaggaagaggaggacgacgatgagagatctgacgagtccaagtccgaggtcatagatgaggatgacgacgagtgcatcgaagaggatgtacacgatgacgagtgagcctttcagtgtacaagatgggagcagcaagacgctaagggcggcgggcgtcctaaggagcctatccatcatcatcatcatcgtct

SEQ ID NO: 31941 - DNA, 424 bp, Oryza sativa
  Clone ID: PAT_MRT4530_3619C.1
ttttttttttttttttttttttttttttttttattttttttttttattttttttttttttttttattattggttattattttttttttttttttttttttttttatttttgtcatggttgttatttttttttctaattttatttagtatgagatgaggtttagggacaggtagtgttagcgggaggggcaggacagcccggtaaacacaagccggaagtggcgagaccaaaaaataccgaaaaagagagaagaaaaaaaaggtaggaaaaaaaaaaggaacaaggcctgccgaggaaaaaatattagcagctgaaaaaaaaaaaaaaaaaagaacaagaaaaaaaaaaaaaaaaagaggggggggagaaaaaagaaaaaaaaaaaaaaaaaaaggggggagggaaaaccccctatttaacagag

SEQ ID NO: 31942 - DNA, 1560 bp, Oryza sativa
  Clone ID: PAT_MRT4530_361C.1
ggaaggaaaccgacatcacatacacatcagaagagatgcacattcatcaacatgattgttcacgcagataatatggcattattgcctacagacttgtgctttgttcttgccagtttcgtcaaattcatctagtctatggaaagtcactgtagccaccagataagtaactattacaaacattcagtgtgttcaaatcttgttctaaggttacccacaatcatacgtggttctacacaaaatactatatatatatataatcattaaaattgtttggattcatctgtgtattatcccgtcgttggatcaacccaattttgcaaaggagggtcaagccttgagctgcttcactgactcgtcaacttactgattttggatgcacactagaacaatctaaattactcccaagtttcatagaaactcaagctctgcatgctggcctccaaattctccactgatattgatctgaagtcatcagagaacaaatcttgattggttgtttccaaatttcttcccttctgggcatggcgcatgttttccttttcttcgtaaaaataaaaatcatccagaattgatgttccctggtgatatgccttgaaaatcttcaacatttccagaccctggggcagcccaatctcctgagtgtccctgctaaaagtaactactttgccttcattattttcaagagttatatgtttgaagaaccgatttggaatgtcctttataatgtgccacattacagggaaaaatccattccatttatcctgctgccaaaagtccatggtcttcttgaaatcaacaggacctaacatctcagctaatcctacaaactgcccactggtattaaccgaaaagaataggaatatagggcaccttttgccctgctccttcattaaaatctgagcttcatgaaaagcagcatccagcttattgttaccatttggagtgcttgcccaaacattgtatttgatacctttaggcgcatcatcttcgctatatgactttatcataaagaactttgcatgctcatactgaactgtgaactctggtctattaatttgatctctacagaccaaaggagggatgggttggaccttggctcctgctcgtaccgaattatttaatttatttgcccgggggccacgaacttgatcccgtatatcctcagaatttctccataggttatccttattaatcttgtagtgatcggtgctgcttacaaccttgttagccaccctaggttttgtcatagtacgtctgcttgagataatgttgacttgctcattcctaccacccctggaaatattatctcttaaacgaccattcccataagaagcaccttgctggtagttcgacaatgggcgtgcctcagcatcatggcaccactgaccagaatgcaaggggatcttatctcggtagtgccaatggtgagacaatgatgggattttatcgccatagcattgtctgactgatgtggtttcagcactataatcccatattcttgaatatgatgatgcaacattgccattacacttcttagaagatagcgatggaaactcaaca

SEQ ID NO: 31943 - DNA, 522 bp, Oryza sativa
  Clone ID: PAT_MRT4530_36200C.1
tagtggatccccgggctgcaggcattgactcttggccaagagttcagcggctacactacacaggtcaaatatggaattgaccgaattaattgtgcgttgcctcggatgtaccagcttgctcaaggtggaactgcagttggaactggcttgaacactaagaaaggatttgatgtcaaaattgccgctgcagtggctgaggaaacaaatctaccgtttgtgacagcagagaacaagtttgaagctctggcagcccatgatgcttttgttgagagtagtggtgctgtaaacacaatatctgcatccctaatgaagatcgcaaacgacatacgcttgctgggaagtggccctcgatgtggacttggtgaattaatcctgccagaaaatgagcctgggagcagcattatgcctggaaaagttaatccaacacagtgcgaggctctgaccatggtttgcgcccaggttatgggtaatcatgttggtgttacagtcggtggtgcgaatgggcattttgaactgaatgtt

SEQ ID NO: 31944 - DNA, 1506 bp, Oryza sativa
  Clone ID: PAT_MRT4530_36201C.1
atggtgagctgcccagtcattagcatgctcgggggcaaaacgtcgagcgccgtgcgcgcgtcgtcggcggcggcgccgggcgcgacggagccggaggtgatggtggaggtggcgcaccgggaggtggcgcgggcgctcgcgtccctggcggaggcgcggctgggcgcgcggctgctcccctccgccgtgccgcccgacgtcgccgagttccgcagcggcggcggcgccgggaacgccgtgggctcgctcgacgtgcgccgcggcgcgccgggatcgacgattgatttcatgctccagtcctcactacactgcaaagtcccaaatggcgcaatcgacattacatctcttctcatctttctgaacgcctcgacagatgctccgcatttcctcatggaatttatacaaggtagcccaacttcgatcgtggtgcttctggaccttctcccacggaaagaccttgcgctccatcccgaatacatagagagatactatgagaatactcaggtggacaaacagcgtgagaaggtcgaagaattgccgcaggcccgtccataccgatcgcgatccctcttcgtgcgcagcaccttctcactgacagcaatactgatgagcatcgactgtgggcaaggaggagaggagatggaagaaggcgagagagaaaacatgataaagagggaccaaattgtaaggtccaagtcaatcgaggtcgacctgacttcaaatttgccgaggatgtttggtcccgatgtcgcagaccgagtcatagctgaaatccagaaggcctttgggcaccttccacctttgcatcaaagacaaagacctgtacacgacctgcaaaggcagctttttgttgtccctgagcaccacctccgctcgccgccggcgacctccccggcccactccaccatctcctacccgcccctccgccaccgcggcgcgttccggctcccccgcgcggcgcctccccagctcaggggcgccgtgcgcgcgtgcgcgcccgcgtccgcgtcgtcggtgccgggcgcgacggcgccattggaggtggaggtggcggtggcgcaccgggaggtggctcgggagctcgcgtcccgggcggaggcgcggctgggcgcgcggctgctcccctccgccgtgccgcccgacgtcgccaagttccgcagcggcggcggcggcgccgggaacgccgtgggctcgctcgacgtgcgccgcggcgcgccgggatcgacgattgatttcatgctccagtcctcactacactgcaaagtcccaaatggcgcaatcgacattacatctcttctcatctttctgaacgcctcgacagatgctccacatttcctcatggaatttatacaaggtagcccaacttcgatcgtggtgcttctggaccttctcccacggaaagaccttgcgctccatcccgaatacatagagagatactatgaaaatactcaggtggacaaacagcgtgagaaggtcgaagaattgccgcaggcccgtccatactga

SEQ ID NO: 31945 - DNA, 1482 bp, Oryza sativa
  Clone ID: PAT_MRT4530_36202C.1
atggccgcgcttaggcagggcgacgaccccgccatcaagctcttcggccgcaccatccccctcctcctcgacccccccgccgccgccgccgccgccgccgacgaggaaaattctgttctagaaaattctgttctatcctttcttgatttcttggcaacatttggggtcatgcctaatttaggaaatggtgtaaaaaccaataatgacttacctttagtctcagacaagcttttgattgtcaaaggtattcctttttgtcccaacaatagtaagaaaaatgatttacaaggcatcagcagaccggatggaagaatagaaatcgattccatgactgaggatgttaagactgagcctgatggatctgtccctgagaagatactcaagaagccagataagattctgccatgtccacgctgcaatagcatggaaacaaagttctgctacttcaacaactacaatgttcaccagcccaggcacttctgcaggaactgccaaagatattggaccgctggtggagctatgaggaatgtcccagttggtgctggaagacgcagaaataagcatgtgtcaaaatactgtcaggcgatgatgacgtgcaataatactgtagctcctggagatgtttctgatgtggttcaccatcaggttattacacatggatcttctctccttccagcaacactgaaggaaaatgaaacacctacagaattcatatcagaagtaccaccatgtaagtcttcagcttcaatccttgatattggagagccgaatgatactgaccttgttcccttggcctctggtgataacaaggaagaaaaatcatgtgcatcttctgtggtagtatccagctgttcagagaatctgatgccagataatgcaattatgaaagagccaaacaacaggtcaggatgttgtaatggtgtggcattgcctttccctactggacctgctttggtgctcccctggagtcttggatggaacagtgttgctctcatgccagctacccagtgctcgatgcagcccgttcttgggttaaaagatgggataccctgcccgccttcatggccaccgcaactgatggtgccggccccaggaatctgtactcctgttgttccaatccctcttgtgccacctctgtggagctgcttccctggctggcctaatggaatgtggaatgcacaatgccctggaggaagcagttctctggtgttgggaaagcattcaagagaagaaagcttgcaggaagaagagaagacgagaaattacttatgggtacctaaaactcttaggattgatgatccagctgaggctgcaaagagttcaatctgggcgacccttggcatcaagcctgacgataaaggcatattcaagtctttccagccaaatgttgcgaaaaatggcacggcaccagaatcgcctcaggctctgcaggccaatccagcagcattttcgcgttctcaatcgtttcaagagacgacttga

SEQ ID NO: 31946 - DNA, 473 bp, Oryza sativa
  unsure (1)..(473): unsure at all n locations
  Clone ID: PAT_MRT4530_36203C.1
tttaaatanttttttttttttttttttttatttcccagggttacattctagctcagcggggtatataaaggggaaagcacaaataattacactcagcgtttgagtcatcaaaaacatgcaccctatatagcctaaaggtctggttatttgggacaattttcaagcaacaatcactatgaacttcgatagcatttccggctttccttggagcaattctctggtttgccaagctttccaattcatcacataaatcatttattaggatgtttgtgcacaataaattggcagatgtggccaaaactcatagcaaaagcaaagaacgggggcctcgatgtgatacaaacctatgtcttctggaacgttcacgagcctatccagggtcaggtattcactctttccagtctgatatgtttgtcagatgattgagcctgcatttggcgcaagtggaccacgttatgtccgttgggcagctg

SEQ ID NO: 31947 - DNA, 1508 bp, Oryza sativa
  Clone ID: PAT_MRT4530_36204C.1
gcaattataaatttataatcacacaatatatctgattgttcaagcaaaagggacaaaagactactaacattactttcgaatgatgtacagatgaattcctggtcacagttctaaagctaggcctcttgtaccccaaaggccttctggatttcagctatgactcggtctgcgacatcgggaccaaacatcctcggcaaatttgaagtcaggtcgacctcgattgacttggaccttacaatttggtccctctttatcatgttttctctctcgccttcttccatctctgaagtatgatcagcacaactatcaagccaaatttgaagaagtgccctagcagctgttgctagttgaccacgcactatctcttccaaggtaccctctcctccttgcccacagtcgatgctcatcagtattgctgtcagtgagaaggtgctgcgcacgaagagggatcgcgatcggtatggacgggcctgcggcaattcttcgaccttctcacgctgtttgtccacctgagtattctcatagtatctctctatgtattcgggatggagcgcaaggtctttccgtgggagaaggtccagaagcaccacgatcgaagttgggctaccttgtataaattccatgaggaaatgcggagcatctgtcgaggcgttcagaaagatgagaagagatgtaatgtcgattgcgccatttgggactttgcagtgtagtgaggactggagcatgaaatcaatcgtcgatcccggcgcgccgcggcgcacgtcgagcgagcccacggcgttcccggcgccgccgccgctgtaatgtcgattgcgccatttgggactttgcagtgtagtgaggactggagcatgaaatcaatcgtcgatcccggcgcgccgcggcgcacgtcgagcgagcccacggcgttcccggcgccgccgccgctgcggaactcggcgacgtcgggcggcacggcggaggggagcagccgcgcgcccagccgcgcctccgccagggacgcgagcgcccgcgccacctcccggtgcgccacctccaccatcacctccggctccgtcgcgcccggcgccgccgccgacgacgcgcgcacggcgctcgacgttttgcccccgagctgggaacccgcgccgcggcggcggcggcggagggggaggaggcgaggagcgagggtcgggaaggagacggcggaggacggcgagctggtcgccggcggcggcgagcggagttggagcattggatcacggcgagggacatcgacggcggcgaccgagccctcccactgcggatgggataaggtcgatgacgacagtggctcccaagccctcccaccgtggatggggttgaagacgacagcgttggcatctcctgagccctcccgccacggatgggagaagattgacaacggcggtggttcccaagctctcctgccgtggatggagtcaaagaagatggcggtggcagctcccgaactttcccgccgcggaggtggtcgacgacggtggcggtga

SEQ ID NO: 31948 - DNA, 147 bp, Oryza sativa
  unsure (1)..(147): unsure at all n locations
  Clone ID: PAT_MRT4530_36205C.1
atggggatcagccacgttgggagaactccaagctttcatgacaaancattttcaaaagccgatacaggtttaccatatgccgacgagaggggtcccagaccaacaacaggtttaggtccagaccatactgtgccaggaagcccaagg

SEQ ID NO: 31949 - DNA, 373 bp, Oryza sativa
  Clone ID: PAT_MRT4530_36206C.1
ttcctgcagccctttcgacaattcggtagctgtccagaacggtgatgatcgaacctcccttgatggcagcgacgccaattctgacgacgagggtgactactctgacgaggacgatgatgaagacgacgacaatgatgaagaggatggttttgattatgaaaacgatgatgaggatgatgtgcctccgactacttctgatggtgatctatacaaccacacggattttggtagttcagacagtgaaaactatgtttcactgtcagggaggggtgacccagatgtaaaaagtaaagggagtgcccttgacagcagaaactcgtacaatcatcaggagcaccagcagagtaaaaggagcaacttcctgaagccctga

SEQ ID NO: 31950 - DNA, 448 bp, Oryza sativa
  Clone ID: PAT_MRT4530_36207C.1
atgtgataagaggagcctaccatttctttctccctttcattcttttaggagtaaagtccatcaccggtccataaacttgtaccgctgtgtcatcccggtccctaaactcgcaaatcgaccgttcagatccttaaacttattcgactgtgtcatcccggtccctaaacttgtagatcactcgtttaggtcctccaacttgttcagttatgtcaccccggtctctaaacttggatttgaatatcatctgggtcaaataggacgggaccggtgtgatacaactgaacaagttagaggacctaaacgagtgatctgcaagtttagggaccaggatgacacagtcaaacaagtttgaagacctgaacggtcgatttacgagtttagggaccgggataacacagcgatacaagttaagggaccggtgatggactttactcttcttttagcctac

SEQ ID NO: 31951 - DNA, 448 bp, Oryza sativa
  Clone ID: PAT_MRT4530_36208C.1
attttatttttttttgttcatcaatgtgatagttgagggttgtaaagttcatcaccggtccctaaacttataccgctgtgtcatcccggtccctaaactcgcaaatcgaccgttcaggtcctcaaacttataccgctgtgtcatcccggtccctaaactcgcagatcactcgtttagatcctccaacttgttcagttgtgtcaccccggtccataaatccaaacttgtatttgaatatcatctgggtcaaataggacggaaccggggtgacacaactgaacaagttagaggacctaaacgagtgatctacgagtttagggatcaggatgacacagttgaacaagtttgaggacttgaacggtcgatttgcgagtttagggaccgggatgacacaacggtacaaatttagggaccggtgatggactttactctattatacagtacatat

SEQ ID NO: 31952 - DNA, 447 bp, Oryza sativa
  Clone ID: PAT_MRT4530_36209C.1
tgcttgttgcagactcatgaagtggaaagtgtatttgtgttctggtgtagagtctatcaccggtccctaaacttatatcgttgtatcatcccggtccctaaactcgcaaatcgaccgttcaggtcctcaaacttgttcgactgtgtcatcccggtccctaaacttgcagatcactcgtttaggtcctctaacttgttcagctgtgtcaccccggtccctaaacttggatttgaatatcatctgggtcaaatagaacgggaccggggtgacacaactgaacaagttggaggacctaaacgagtgatctgtatgtttagggaccgggatgatacagtcaaacaagtttgaggacctgaacggtcaatttgcgagtttagggaccgggatgacacagcggtacaagtttagggaccggtgatggactttactctaactcaaattattttt

SEQ ID NO: 31953 - DNA, 648 bp, Oryza sativa
  Clone ID: PAT_MRT4530_3620C.1
tttttttttttttttttttttttttttttttttttttttttttttgacgagcaattatcatctgagcaaaagtgaaagcattcgggtgaattccacgtgtggttattttacacagaataccgcgaaacacttgggatgagatgtcgaatttatgtaattgcctagctaggattttacaggtattacacaatattaattcaagaccgagttactccccaaaaaaatgaagccaacttatagagatcccaatagcctttatgctaaagagccagctaaagaaatggtttgtgtacaggtacaacaaaaaacaagcattctcctccctagccttggatctttaaaacctgcagggcttgttgccattgtttccatgcatcaatataagttcattggatgtgattgatcagaaaccttccctggagctattttttaatgtcgatgtggttttctgcatcccataccacaatcttaccatccaatcctgacgtggctggaaccgtttgacaatactgggcgtttccttttctcaatggcacgatgcaagttaaggcaattcaatgaaccaccaccccgagggtttgatggtacaacagtatcattgcttgtcacttgctttgattgcccatttacttttccaaggcttaaaat

SEQ ID NO: 31954 - DNA, 446 bp, Oryza sativa
  Clone ID: PAT_MRT4530_36210C.1
atgtggcataataatgacactttgttggggatattaaaaactagagtaaagtccatcaccggtccctaaacttgtatcgttgtgtcatcccggtccctaaactcgcaaatcgaccgttcaggtcctcaaacttgttcgactgtgtcatcccggtccctaaacttgtagatcactcgtataggtcctccaatttgttcagttgtgtcaccccagtccctaaacttggatttgaatatcatctgggtcaaataggacgggaccggggtgacacaactgaacaagttggaggacctaaacgagtgatctgcaagtttagggaccgggatgatacagtcgaacaagtttaaggacctgaatgatcgatttgcgagtttagggaccgggatgacacagcggtacaagtttagggaccggtgatggactttactctaaaaactaattaacta

SEQ ID NO: 31955 - DNA, 199 bp, Oryza sativa
  Clone ID: PAT_MRT4530_36211C.1
ttggtgagttttaatagtgttgacagcggtgttgcttgtgtggatttgtgtgtgcctgcggtgtgagttggttgatggaggatggaaattgtgaaatgttggtggaatgatggtttatttggcatggcagttggccattcattgatcaatgcattgtgttgagcaagctggttgtatttaaaaaaaaaaaaaaaaaaaa

SEQ ID NO: 31956 - DNA, 2405 bp, Oryza sativa
  Clone ID: PAT_MRT4530_36212C.1
atggatctcgacaagtctacctccaccagtgcgtcactgaagaaactgcaggaggatggcgcccttcctggtcacgggaccgcggagagggaagtaggaggtactgaaccccagcctgtcctgggtcgcatggttgcggttgaggactttattctctgcggttttcttcctccgccttctgaatttctccttttggtcttgaatttctatggtctttccttgctccatttgaaccccaactccatcgccttcctgagtatttttacgcatatttgtgaggcctacattggggtggagccgtttcttgatctcttccgcttttattatgagttacgctggatggaatccaaaagggtgtccgggtgtgttggtttctgacttcgggatggcctgaagtcgcgatacatcccctttcagtacccttcatctcgcagcaaatggcgggggagatggttctatcttcagatagaggattcggatccggtcttcgttgttcctgaggagcaaccagacaagattccatcttggaccaccaaacccgccttgaccccatccctccaatctttcatcgatatcgttgacgacctccgagaacgagggttgtcggggtatgaagttgccgcggacttcattggtaggcggatccagccgcttcaggctcgagcccatcctgcctttgattattctgggcgagaggacgcgacccaggtttctcctcggggcttggatagcgcaaccgtggagtgctgtgtcggccaactgatgatcagcggcccgacaatggcgagcaacgtccccgtccccctttgcgagaaaggggcagccgagcgcgacgctgccatcaatgtggcggcgtcgctgaaggagaaggtcgccaaggaggcatatgacgctgctgctgccgctgccacaatgagtggcggcgacgtttcaaaaaagaggaggaaattctcctctatagtcggacatcgtcggaagatacccaccccctcggcctcggacgcgtctcccccgcctccgcgatggcagcggcttgtgacgctcggcgagaaggcggtgcgggcgaaggcggcgcaagatgggtctggagggacctccagcgcgtcccctgccgtggcctcgacggatgtcgtggtcgtgcccacgagccgcgaggcgacacctagcggcccagccagcaatctcgtggctggtcgtggttcgccggctgccgtccttacctgggaggagctccaggttgagatggggcgcctcctcggggctggtgctcgcggcattggccgcgagatcatgaaggcgagggcggtggcggcgtcgtcggcgaatgagcacgccgaccggctggcgcacgatttggcggaggttcgtgaggacctccagaagatgagggaactggtggctggtaatgagcgacaacggcagggactcgagcaccgtatgtcggagctcgagaacaacttgtcggaaatccgtggctcgttgcgggtcacctatactggtttgcactagcttgccggggagtgcggtatcaagtctaccatcccggcaaatccggatgagttctcgctgacgtcttctcttacggagctggcggcggcaatggaggagatcccctccaagcatgcggccaggatcggagaggagatgtccaacgggaactacaccggggcgtgccatgtccttgcgtgtgtgaggctggcgcaccctgaactcgatctgcggaagatcttggatcagagggcggctagcgacgcgcgcaaggatgtgatggaagatgtcggcgatctgggggaagatgttgatgtcgaggatatccagcagcgcgggcagcctgagttgctagtggtcgttccgttacttgcgtccgagccacatgtgctggagggcgatgtagatcgaagttcgcctgtggaaatgagcatggcgacgactccctcagatctcgagagtgcgcttgctgaccaggatcttcgcatccagtattggaggacgaagtttgaggtagcggaactcgagaggactatgctagaagagagaaaggactaggccgtagagacactccggggtcgtgagtctgtagagagctccgagtaccccgtggggatcccgaggaatcggcggctggatacatctcgtggctgaatgaggcctgcgcccagctcgaaggcatcggtcaacgtatcgacgaggccttgaagtaggagtgtcgtcgctcaagccgatatgccgggggacacgtgttggcctgcatacaagatcatcgtccgcagctgcacctcgagttcctccgcgaagggttttctcattctcggagaactcctacggagatagatggcctggcgaagttgatggcgccgctggcggagaaggtcttccagtcgatggactggcgttggccttcgtgg

SEQ ID NO: 31957 - DNA, 442 bp, Oryza sativa
  Clone ID: PAT_MRT4530_36213C.1
atgccacttgacattgatgcagtaataatctgatctatatttggagtaaagtatatcaccggtccctaaacttataccgctatgtcatcccggtccctaaactcgcaaatcgaccgttcaggtcctcaaatttctttgactgtgtcatcccggttcctaaacttgcagatcactcgtttaggtcctccaacttgtttagttgtatcaccccggtctctaaacaggacgatctaaaaactttatatcaaaaaataattcataactttttcacgtgaactctaagttggaggacctaaacgagtgatctgcaagtttagggaccgggatgacacagtcgaaccagtttgaggacctgaacagttgatttgcgagtttagggaccgggatgacacagcggtacaagtttagggaccggtgatggactttactcaaaaaccaaata

SEQ ID NO: 31958 - DNA, 1983 bp, Oryza sativa
  Clone ID: PAT_MRT4530_36214C.1
atggatctcgacaagtctacctccaccagcacgtcgctgaagaaactacaggaggatggcgcccttcccagtcgcgggaccatggagagagaagcaggaggtattgaaccccagcctgtcctgggtcgcatggttgcgatcgaggactatattctctgtggttttcttcctctgccttctgaatttcttctcttggtattgaatttctacggcctttctttgctccatttgaaccccaatttcatcgccttcttcagtattttttcgcatctttatgaggcctacattggggtagagccgtttcttgatctctttcgtttctactacgagttgcgttggatggaatccaacaggatagaacattcggatccagtcttcattgttcctgaggaacaaccagacaagatttcttcttggaccgcaaaacccgccttgaccccttctcttcaatccttcatcgatgccatcgatgacctccgagtacgaggtttgtcggggtatgaagtcgctaccgacttcattggtttgaacagcgaaaccgtggagtgccgcgtcggccaattgatgatcagcggcccgacaacggcgagcaacgtccccgtccccctttacgagaagggggcagccgaacgcgaagctgccatcaatgctctccctctgactgatgtcatcgggccactcgtggatcatcaggcggcggcgtcgctgaaggaggacgtcgccaaggaggcgtccgatgttgctgccgctgctgccacaacgagtggcggcaacgttccgaaaagggggaggaaattctcctccgtgatcggaaatcgtcggaagacacccaccccctcgcctgtcccaatcgcagccttttgcagggtggcgcgggcgaaggcggcgcaagacggatctggagggacctccagcgcgtctcctgctgtggcctcgacagatgtcgtgatcgttcccaggagccgcgaggcgacgcctagcggcccagccagcgatctcgcggttggtcggctcgccagggagtgtggcgtcaagaccaccatcccggcgaatcccgatgagttctcgctgatgtcttcgcttgcagaactggtgacggcgatggaggcgatcctctccaagcgcgcggccaggatcggagaggagacatctaacgggatctataccagggcgtgccatgtccttgcgtgtgtgaggctggcgcaccctgaactcgatctccagaagatcttggatcagggggcggctagcgacgcgcgcaaggatgtgatggaagaagtcggcgatctgaaggagtccgtcctcctgctttttgaagaagatgttgatgtcgaggatgtccagcagcgtgggcaacctgagttgccagtgatcgtttcggcacttgcactcgagccatatgtgccgcagggcgatgtagatcaaaattcgcctgtggaaacgggcatggcgacgacttccttagacctcgagagtgcgcttgctgaccaagatcatcgtatccaatattggaggacgaaatttgaggtagcggaactcgagaggactatgctggaagttaagaaggaccaggccgtggaaacactccgaggtcgcgatgtgtggttcagctcgtacctgaagagttgctgcacgtccatgacaagagtctgtagagagctccgagtaccccgtggggatcccgaggaatcagcggccggatacatctcgtggctgaatggggcctgcgcccagctcgaaggcatcggcaagcgtattgacgaggcactgaagcaggagtgccgtcgatcgagccaatatgccggggggcatgtattggcttgcatacgagatcatcgtccgcagctgcacctcgagttcctccacgaagggttttctcgttctcggagaaatcctatggagatagatcacttggcgaagtcaatggcgccgctggcggaggaggtcttccagtccatggattggcgttggccttcctggtag

SEQ ID NO: 31959 - DNA, 439 bp, Oryza sativa
  Clone ID: PAT_MRT4530_36215C.1
acccctaattaatctgatcgtctgcaccattaaataattgtgagtaaagtacatcaccggtccctaaacttataccgctgtgtcatctcggtccctaaactcgcaaatcgacagttcaggtccttaaacttgttcgactgtgtcatctcgatccctaaacttgcagatcacttgtgtaggtcctccaacttgttcagttgtgtcaccccggtccctaaacttggatttgaatatcatctgggtcaaataggacgggaccggggtgacacaactgaacaagttagaggacctaaacgagtgatctgcaagtttatggaccgggatgacgtagtcgaacaagtttgagtacctgaacggtcaatttacgagtttagagaccgggatgacacagcggtacaagtttagggaccggtgatgtactttactcaataattatcac

SEQ ID NO: 31960 - DNA, 1944 bp, Oryza sativa
  Clone ID: PAT_MRT4530_36216C.1
atggatctcgacaagactacctccaccagtgcgtcactgaagaaactgcaggaggatggcgcccttcccggtcgcgggaccgcggagagggaagtaggaggtactgaaccccaacctgtcctgggtcgcatggttgcggttgaggactttattctctgtggttttcttcctccgccttctgaatttctccttttggtcttgaatttctatggtcttttcttgctccatttgaaccccaactccatcgccttcctgagtatttttacgcatctttgtgaggcctacattggggtggagccgtttcttgacctcttccgcttttactatgagttacgctggatggaatccaaaaaggtgtccaggcggatccagcctcttcaggctcgagcccattctgcctttgattattctaggctagaggacgcgacccaggtttctcctcggggcttgaatagcgcaactgtggagcgccgcatcggccaactgatgatcagcggcccgacaacggcgagcaacacccccgtccccggggcagccgagcgcgacgctgccatcaatgctctccctctgactgatatcatcgggccagtcgtggaccatcaggtggcggcgtcgctgaaggagaaggtcgccaaggaggcgtctgacgctgctgttgccgctgccacgacgagtggtggcgacgttccgaaaaaggggaggaaattcttctctgtagtcggacatcgtcggaagacacccactccctcacctttcgcaggcctaagagttgggtccctgtctgtaattatgtggctaggtaacccatttatggcttgtggtatttctgcttatgacgtagcactattctggcgcgggcgaaggcgacgcaagatgggtctggagggacctccagcacatctcctgccgtggcctcgacggatgtcgtggtcgtgcccaggagccgaggagctccaggctgagatggggcgcctcctcgaggctggtgctcgcggtgttagccgcgagatcgtggaggcgagggcggcggctgcgtcatcggcgaatgagcgcgccgatcggctggcgcgcgatctggcggaggggctcgagcactgcatgtcggagcttgagaacaacttgtcggaaatccatggctcgttgcgggtcacctatactggtctgcaccagctcgccgggaagtgcggtatcaagtccaccatcccggcgaatcccgatgagttcttgctgacgtcttctcttgcggagctggtgacggcgatggaggagatcccctccaagcatgcggccaggatcggagaggagacgtctaacgggatctacaccagggcgtgccacgtccttgcgtgtgtgaggctggtgcatcctgaactcgatctgcggaagatcttggatcagggggcggctagcgacacgcgcaaggatgtgatggaggaggtcggcgatctgggggagtccgtcctcctgctttttgaggaagatgttgatgtcgaggatgtccagcagcgtgggcaacctgagttgccagtagtcatttcgttacttgcgtccgaaccatatgtgccagaaggcgatgtagatcgaaatctcgagagtgcgcttgttgacctggatcgtcgcatccagtattggaggacgaagtttgaggtcgcggaactcgagaggactatactggaggtgagaaaggaccaggccgtagagacactccggggtcgtgagttctacttggacaaggggacacctatgggtataaatacaagcacccctaggaggacagggggacacccaccatgggacacccaccatgagacgatcaatacggacggacaatcaacagacgaccacctcaatcaacaaccaccacaatatacagaacaacagaagccacaacatacaagccaacatacttcaagacaagacgtcggatatcgacttcatggatag

SEQ ID NO: 31961 - DNA, 441 bp, Oryza sativa
  Clone ID: PAT_MRT4530_36217C.1
attattaattattttcctatcatttgattcattattaaatatagagtaaagtccatcgccggtctctaaacttgtaccgctgtgtcatcccggtccctaaactcgcaaattgactgttcaggtcctcaaacttgctcgactgtatcatcctggtccctaaacttgtagatcactcatttagatccttcaacttgttcaattgagtcaccccggtgtctaaacttggatttgaatatcatatgggtcaaataggatgggaccggggtgacacaagtgaacaagatggaggacctaaacgagtgatctgcaagtttagagaccgggatgacacagtcgaacaagtttaaggacctgaacggtcgatttgcgagtttagggaccgggatgacacatcggtacaagtttagggaccggtgatggactttactcttaaatatacta

SEQ ID NO: 31962 - DNA, 241 bp, Oryza sativa
  Clone ID: PAT_MRT4530_36218C.1
tggttagcaaccacttccgcgtcgatgtcgtgacgagctccaccgcatccacctcggtcgtcgtgttccacagctcccgagctcccaagttccaggcgatggggcagcagcacggagagaggagaggacgacgggtggcagtgccagaagtggctacgacgggtggcggcgccagatgcggtgatttggcaatgacgcagaggaaggataggaagaagggcggtggcgccaccagatgcga

SEQ ID NO: 31963 - DNA, 1893 bp, Oryza sativa
  Clone ID: PAT_MRT4530_36219C.1
atggatctcgacaagtctacctccaccagcgcgtcgctgaagaaactgcaggaagaaggcgccctccccggtcgcgagaccgcggagagagaagtaggaggtactgaaccccagcctgtcctgggtcacatggttgtgatcgaggactttattctctgcggttttcttcctccgccttctgaatttctcctcttggtcttgaatttctatggtctttccttgctccatttgaaccccaattccatcgccttcctgagtgtcttttcgcatctttgtgaagcctacattggggtagagctgtttctcgacctcttccgcttttactatgagttacattggatggaacccacaaaggtgtccgggtgtgttggcttccgacttcgggatggcctgaagtcacgatacattcccttccagtgcccctcctcggggtattttccttttttagttaaattgactcccttttgcttggacagcgcacctgtggagcgccgcgtcggccaactgatgatcagtggcccgacaacgtcgagcgatgtccccgttcccctttgcgagaaaggggcagccgagcgcgacgctgccatcaatgctctccctctgactgacatcatcgggccgctcgtggaccatcaggtggcggcgtcgctgaaggagaaggtcgccaaggaggcgcctgacgctgctgctgccgctgccacaacgagtggtggcaacgttccgaaaaaggggaggaaattctcctctgtggtcggacatcgtcggaagacacccaccccctcggcctcggacgcgtctcccccgcctccgcgacggcagcagctagtgacgctcggcgagaaggcggcgcgggcgatggcggcgcaagacgggtctggagggacctccagcgcgtctcctgctgtggcctcgacggatgtcgtggcagtgcccaggagccgcgaggcgacacctagcggcccaaccagcgatcttgtggctggccgttgttcgccggctgccgtcctcacctgggaggagctccaggtggagatggggcgcctcctcgaggctagtgcttgcggcattagccacgagattgcggaggcgagggcggcggtggcgtcgtcggcgaatgagcgcgacgaccggctggcgggcaacttggcggagggacttgagcactgcatgttggagctcgagaacaacttgtcggagatccgtggctcgttgtgggccacctatactgggctgcaccagctcgccggggagtgcggcatcaagtctaccatcccggcgtatcccgatgagttctccctgacgacttctcttgcggagctggcggcggcgatggaggagatcccctctaagcacgcggccaggatcggagaggagacgtccaacaggatctataccggggcgtgccatgtccatgcatgtgtgaggctggcgcaccctgaactcgatctgcggaagatcttggatcagggggcggccagcgatgcgcgcaaggatgtgatggaggaggtcggcgacctgggggagtccgtcctcccactttttgaagaagatgttgatgtcgaggatgtccagcagcgcgagaagcctgagttgccagtgatcgttccagcacttgcgttcgagccacttgtgccggggggcgatgtagatcaaagttcgcctgtggggacgagcctagcaacgactcccttagacctcgagagtgcgcttgcagaccaggattgtcgcatccagtattggaggacgaagtttgaggtcgcggaactcgagagggctatgctggaagtgaagaaggaccaagccgtagagacactccggggtcgtgaggtgtggttcaacttgtataggaagagttgttgcacgttcatgtcaagagtttgtagggagctctga

SEQ ID NO: 31964 - DNA, 450 bp, Oryza sativa
  Clone ID: PAT_MRT4530_3621C.1
gcaacagcaacatcacaccagctgaccagcgagcaatcgacaagtgtgcaatggtgcgtgaagtggtcaacaagcggggaaaggagcaaatcctttgtgactaaatttaaatggaatattgaccgatttcatatcgaagggatatctgttcgtttttgaaacggcaaatcaaacaagaggctgttttgaatcaaagcggaaaaaaatggtgcatgcagcattgccacaccgaaatgtcttgtgtccagtgttagggatggtggtgatgcagcgggggtcgacgagggcagcgactttgcgccggcagccctgacatggacttatctcctaaaatgaaggaaggcagtcgacttgccgctggactggtgctgagtcatatgggggactcactgaacgtagttggcaatgcaattgtcaagcttgacaaggagtaggtcccaaattcattag

SEQ ID NO: 31965 - DNA, 442 bp, Oryza sativa
  Clone ID: PAT_MRT4530_36220C.1
tgacctacgtaaatgtctaagaagtaaattaattaaattttatagagtaaagtccattaccgatccctaaacttgtaccgttgtgtcatcccggtccctaaactcgcaaatcgaccgttcaggtcctcaaacttgttcgactgtgtcatcccggtccctaaacttgcagatcactcgtttaggtccttcaacttgttcagttgtatcaccccggtccctaaacttggatttgaatatcatatgtgtcaaataagtagggaccggggtgacacaactgaacaagttggaggacctaaacgagtgatatgcaagtttagggaccgggatgacacagtcaaacaagtttgaggatctgaacggtcgatttgcgagtttacggaccgggatgacacagcggtacaagtttagggaccggtgatggactttactcaattatatatat

SEQ ID NO: 31966 - DNA, 2406 bp, Oryza sativa
  Clone ID: PAT_MRT4530_36221C.1
atggatctcgacaagtctacctccaccagtgcgtcactgaagaaactgcaagaggatggcgcccttcccggtcgcgggaccgcggagagggaagtaggaggtactgaaccccagcctgtcctgggtcgcatggttgcggttgaggactttattctctgtggttttcttcctccgccttctgaatttctccttttggtcttgaatttctatggtctttccttgctccatttgaaccccaattccatcgccttcctgagtatttttacgcatctttgtgaggcctacattggggtggagccgtttcttgacctcttccgcttttactatgagttacgctggatggaatccaaaaaggtgtccgggtgtgttggtttccgacttcaggatggcctgaagtcgcgatacatcccctttcagtgcctcacatctcgcagcaaatagcgggggaggtggttctatcttcagatagaggattcggatcctgtcttcgttgtacctaaggaacagccagacaagatttcatcttggaccaccaaacccgccttgaccccgtccctccaatctttcatcgatatcattgacgacctccgagaacgggggttgtcggggtatgaagttgctgccgacttcattggtaggcggatccagccgcttcaggctcgagcccatcctgcctttgattattctgggccagaggacgcgacccgggtttctcctcagggcttgaatagcgcaaccgtggagcgccgcgtccgccaactgataatcagcggcccgacaacggcgagcaacgtccccgtcctcctttgcgagaaaggggtagccgagcgcgacgctgccatcaatgtggcggcgtcgctgaaagagaaggtcgccaaggaggggtctgacgctgctgttgccactaccacgacgagtggcggcgacgttccgaaaaaggggaggaaattctcctctatagtcggacatcgtcggaagatacccactccctcagcctcggacgcgtctcccccgcctccgcgacgacagcggcttgtgacgctcagcgagaaggcggcgcgggcgaaggcggcgtaagatgggtctggagggacctccagcgcatctcctgccgtggcctcgacggatgtcgtggtcgtgcccaggagccatgaggcgacacctagcggcccagccagcgatctcgtggctggtcgtggttcgccggatgccgtcctcacctgggaggagctctaggttgagatggggcgcctcctcgaggctggtggtcacggtgttagccacgagatcgcggaggcgagggcggcggctgcgtcgtcggcgaatgagcgcgccaatcggctggcgcgtgatctagcggaggttcgcgaggacctccagaagatgagggaactggtggccggcaatgagcgacaacagcaggggctcgagcaccgcatttcggagcttgagaacaacttgtcggaaatccgtggctcgttgtgggtcacatatactggtctgcaccagctcgccggggagtgcggtatcaagtctaccatcccggcgaatcccgatgagttctcgctgatgtcttctcttgcggagctggtgacggcgatggaggagatcccctccaagtatccagccaggatcggagaggagacgtctaacgggatctacaccggggcgtgccacgtccttgcgtgtgtgaggctggcgcaccctgaactcgatctgcggaagatcttggatcagggggcagttagcgacgcgcgtaaggatgtgatggaggaggtcggcgatctggggagagatgttgatgtcgaggatgtcctgcggcgcgggcaacctgagttgctagtggtcgttccgttacttgcgtccgaaccatatgtgccggaaggcgatgtagatcgaagttcgcctgtggaaacgagcatggcggcgactccctcagatctcgagagtgcgcttgttgaccaggaccgtcccatccagtattggaggacgaagtttgaggttgcggaactcgagaggactatgctggaggtgagaaaggatcaggccgtagagacacttcggggtcgtgaagtctgtagagagcatcgagtaccccgtggggatcccgaggaatcggcggccggatacatctcgtggctaaatggggcctgcgcccagctcgaaggcatcggtcaacgtatcgacgaggccttgaagcaggagtgtcgtcgctcaagccgatatgccggggggcacgtgctggcctgtatacgagatcatcgtccgcagctgcacctcgagttcctccgcgaagggttttctcgttctcggagaactcctacggagatagatggcctggcgaagtcgatggcgccgctggcggagaaggttttccagtcgatggactggcgttggccttcctgg

SEQ ID NO: 31967 - DNA, 444 bp, Oryza sativa
  Clone ID: PAT_MRT4530_36222C.1
tgcagcatgtctatgtatactctagactctagtctagtgtattctagagtaaagtccttcaccggtctctaaacttgtaccgctgcgtcatcccggtccctaaactcgcaaatcgaccgttcaggtcctcaaatttgttcgactgtatcattccggtccctaaacttgcagatcactcgtttaggtcatccaacttattcagttgtatcaccccggtccctaaacttggatttgaatatcatctgggtcaaataggacgggaccagggtgacatagctgaacaagttggaggacctaaacaagtgatatgcaagtttagggaccgagatgacacagtcgaataagtttgaggacctgaacggtcgatttgcgagtttagggaccggaatgatacaacggtacaagtttagggaccggtgatagactttactctgtaattctcaa

SEQ ID NO: 31968 - DNA, 2373 bp, Oryza sativa
  Clone ID: PAT_MRT4530_36223C.1
atggaccttgacaagtctacctccaccagcgcatcgctgaagaagctacaggaggatggcgcccttcccggtcgtgggaccatggagagagaagcaggaggtactgaaccccaacatgtcctgggtcgcatggttgagatcgaggactatattctttgtgattttcttcctccgccttctgaatttcttctcttggtcttgaatttctacggcctttccttgctccatttgaaccccaattccatcgccttcctcagtatcttttcgcatctttgtgaggcctacattggggtagagccgtttcttgacctcttccgcttttactatgagttgcgctggatggaacctaaaaaggtgtccgggtgtgtcggtttccggtttcgggatggcctgaagtcgcgatacatccccttccagtgccccttatctcacagcaaatggcgggggaggtggttctatcttcagatagaagattcggatccggtcttcattgttccaacggagcaaccagacaagatttcaccttggaccgccaaacccgccttgaccccgtccctccaatttttatcgatcccattgatgacctccgagtacgggggttgtcggggcttgaacagcacaaccgtggagcaccgcgtcggccaattgatggtcagcggcccgacaacggcgagcgacgtccccgtcccccgttgcgagagaggggcagccgaacgtgaagctgccatcaatgctctccctctgactgatatcatcaggccgctcgtggaccatcaggtggcggcgtcgctgaaggagaaaatcgccaaggaggcgtctgacactgctgccgctgctgccacaacgagtggcggcaacgctccgaaaaaggggaggaaattctcctctgtgatcggacatcgtcgaaagacacccaccctctcggcctcggatgcgtcccccccacctccacgacggcagcggcttgtgacgcttggtgagaaggcggcgcgggtgaaagcggcgcaagatgggtccggagggacttccagcgcgtcccctactatggcctcgacagatgtcgtggtcgtacccaggagccgcgaggtgacgccgagtggcccagccagcgatctcgcggctggtcggggtccgccgactgccgtcctcacatgggaggagctccaggtcgagatggggcacctcctcgaggctggtgctcgcggtgttagccgcgagatcgtggaggcgagggcgacgacggcatcgtcggcgaatgagcgcaccgaccggctggcgcgtgatctggcggaggttcacgaggacctccagaagatgagggaactggtggccggcaacgagcgacaacggcaggggctcgagcaccgcatgtcggagctcgagaacaacttgtcggaaatacgtggctcgttgcgggtcacctacactagtctgcaccaactcaccggggagtgtggtatcaagtccatcattccggtgaatcccgatgagttctcgctgacgacttcgcttgcggagctggcgatggcgatggaggcgatcccctccaagcacgcggccatgatcagagaggagacgcccaacgagatctataccggggcgtgccatgtccttgcgtgtgtgaggctggtgcaccctgaactcgatctgcggaagatcttggatcagggggcggctagcgacgcgcgcaaggatgtgatgaaagaagtcggcgatctgggggagtctgtcctcccgctttttgaagattatcaccttggctttcttcagcattttgatcttgagtactttgttgtcgtatgtagagatgttgatgtcgaggatgtccagcagcgcgggcagcctgagctgccagtgatcgttccgatacttgcgttcgagccacatgtgctggatggcgacaggacgaagtttgaggtcgcgaaactcgagaggactatgctggaagtgaagaaggaccaggccgtggagacactccggggtcgcgctgtgtggttcaactcgtatctgaagagttgctgcacctccatgtcaagagtatgtagagagctccgagtaccccgtggggatcccgaggaatcggcggctggatacatctcgtggctgaatggggcctgtgcccagctcgaaggcatcgaccagcgtatcgacgaggccctgaagcaggagtgtcgtcgatcgagccgatatgccggggggcatgtgttggcttgcatacgacatcatcgcccgcagctgcacctcgagttcctctacgaagggtattctcgttctcgaagaactcctacggagatagatggcctggcgaggtcgatggcaccgctggcggagaaggtcttccagtccatggactggcgttggccttcctggtag

SEQ ID NO: 31969 - DNA, 2346 bp, Oryza sativa
  Clone ID: PAT_MRT4530_36224C.1
atggatctcgacaagtctacctccaccagcgcgtcactgaagaaactgcaggaggatggcgcccttcccggtcgcgggaccgcggagagggaagtaggaggtactgaaccccagcctgtcctgggtcgcatggttgcgatcgaggactttattctctgcggttttcttcctccaccttctgaatttctccttgtggtcttgaatttctatggtctttccttgctccatttgaaccccaactccatcgccttcctgagtatttttacacatctttgtgaggcctacattggggtagagccgtttcttgacctcttccgcttttactatgagttacgctggatggaacccaaaaaggtgtccgggtgtgttggtttccgacttcgggatggcctgaagtcgcaaaacatccccttccagtgtccctcatctcgcagtaaatggccagggaggtggttctatcttcagatagaggattcggatccggtcttcgttgttcctgaggagcaaacagacaagattccatcttggaccaccaaacccgccttgaccccatccctcctatctttcatcgatatcgttgacgacctccgagaacgggggttgtcggggtatgaagtcgctgccgacttcgttggcttggacagcgccaccgtggagcgccgcgtcggccaactgatgatcagtggcccgacaacggcgagcaacgtccccgtccccctttgcgagaaaggggcagccgagcgcgatgctgccatcaatgctctccctcagactgatatcatcaggccgctcgtggaccatcaggtggcggcgtcgttgaaggagaaaatcgccaaggaggcgtctgacgctgttgctgccgctgccacaacgagtggcggcaacgttccgaaaaaggggaggaaattctcctctgtggtcggacatcgtcggaagacgcccacccccttgatctgtcatgctttaggcctcggacgtgtctcccccgcctccgcgacggcagcggctagtgacgctcggcgagaatctatctcaattgcagactttcgcagggtggcgtgggcgaaggtggcgcaagacgggtttggagggacctccagcgcgtctcctgctgtggcctcgacggatgttgtggtcatgcccaggagccacgaggcgacacctagcgggccagctagcgatctcgtggctggtcgtgctccaccggttgccgtcctcacctgggagtgctccaggtcgagatggggcgcctcctcgaggctggcacttgcggcattagccgcgagattgcggaggcgagggcggcggcggcggcgtcggcgaatgagcgctgaccggctggcgcgcgatttggcggaggttcgcgaggaccttcagaagatgcgggagctggtggctggcaatgagcgacaatggcaagggctcgagcaccgtatctcggagcttgagaaccacttgtcggagatccgtggctcactgcgggtcacctacaccggtctgcaccagctcgtcggggagttcggcgtcaaggccaccatcccggcgaatcccgacgagttctcgctgacgtcttcacttgcggaactagtgacgacgacggaggcgatcccctccaagcacgcggccaggatcggagaggagacgtccaacgggatctataccggggcgtgccatgtccttgcagatgttgatgtcgaggatgtccagcaacgcgggcagcctaagttgccagtgatcgttccggcacttgcgttcgagccacatgtgccggggggcgatgtagatcaaagtttgcctgtggaaacgagcgtggcaacgactcccttagacctcgagagtgcgctcgctgaccaggatcgtcgcatccagtattggaggacgaagtttgaggttgcagaactcgagagaactatgctggaagtgaagaaggaccaggccgtagagacactccggggtcgtgaagtgtggttcaactcgtatctaaagagttgctgcacgtccatgtctagagtctgtagagagctccgagtacctcgtggggatcccgaggaatcggcggccggatatatctcgtggctgaatggggcctgcgcccagctcgaaggcatcggtcaacgtatcgatgaagccttgaagcaggagtgtcgtcgatcaagccgatatgccggggggcatgtgttggcttgcatacgagatcatcgtccgcagctgcaccacgagttcctccgcgaagggttttctcgttctcggagaactcctacggagatagatggcctggcgaagtcgatggcgccgctggcggagaaggtcttccagtcgatggactggcgttggccttcctggtag

SEQ ID NO: 31970 - DNA, 2370 bp, Oryza sativa
  Clone ID: PAT_MRT4530_36225C.1
atggatctcgacaagtctacctccaccagcgcgtcgctgaagaagctacaggcggatggcacccttcccggtcacgggaccatggagagagaagcaggaggtattgaaccccagcctgtcctgggtcgcatggttgcgattgaggactacattctctgtggttttcttcctccgccttctgaatttcttcttttggtcttgaatttctacggcctttctttgctccatttgagccccaactctatcgctttcctcagcattttttcgcatctttgtgaggcctatattggggtagagccgtttcttaacctttttcatttctactatgagttgcgctggatggaacccaacagggcatccgggtgtgccggtttcagactccgagatggcctgaagtcgcgctatatccccttccagtgtccttctcatagcaaatggcgtgcgaggtggttctatcttcagatagaaaatttggatccagtctttgttgttcctgaggaacaaccagacaagatttcgtcttggaccgcaaaacccgccttgaccccatccctccaagctttcattgatatcattgatgaccttcgagtacgggggttgtcgagcggcccgacaacggcaagccacgtccttgttccccttagcgagaagggggcagccgaacgcgaagctgccatcaatgtggcggcatcgctgaaggaggacatcgccaaggaggcgtccgatgttgctgccgctgctgccacaacgagtggcggctacgttccaaaaagggggaggaaattctcctccgtgatcggaaatcgttggaagacacccactccctcggtaagctttcctggtccctcatcgcgtactcggaaaacttccacctcacatcatacccgttatactccaggcctcggacgcgtctcccccgcctccgcgacggcagcggcttgtgacacttggcgagaacctgtctcaattgcaacctttcgcggagcggcgcgggcaaaggcgacgcaagatgggtctggaggaacctccagcgcgtctcctgctgtggcctcgacaaatgtcgtggtcgtgcccaggagccgcgaggcgacgcctagtgggccggccagtgatctcacggctagtcggggtccgccggctgccgtccttacctggaaggagctccaggtcgagatggggcgcctcctcgaggctggtgctcgcggcattagccgcgagatcgcggaggcgagggcagcagcggcgtcgtcggcgaatgagcgcgccgatcggctgacgtgtgatttggtggaggttcgcgaggacctccagaagatgagggagttggtggccggcaatgagcgacaacgacaagggctcgagcatcgtatgtcggagcttgagaacaacttgtcggagatccatggctccctacgggtcacctacaccggtctgcaccagctcgccggggagtgtggcgtcaagactaccatcccgacaaatcccgacgagttctcgctgacgtcttcgcttgcagaactggcgacagcgatggagacgtccaacgggatctacaccggggcacaccatgtccacgcgtgtgtgaggctggcacaccctgaactcgatctccagaagatcttggatcagggggcggctagcgacgcgcgcaaggatatgatagaagaagttggcgatctgggagagtctgtcctcccgctttttgaagaagacgttgatgtcgaggatgtccagcagtgcgggcagcctgagttgccagcgatcgttccagcacttgcgttcgagtcacatgtgctacagggcaatgtagatcgaagttcgcccatggaaacgggcgtggcagcgacttccttagacctcgagagtgcgctagctgaccaggatcgtcgtattcagtattggaagacaaagtttgaggtcgcggaactcgagagggctatgctagaagtgaagaaggaccaggccatggagacactccggagtcgcaaggtgtggttcaactcgtatatgaagagttgctgcatctccatgtcgagagtttgtagagagctccgagtaccccgtggggatcccgaggaatcggcggccggatacatctcgtggctgaatggggcctgcacccagctcgatggcatcggccagcgtatcgacgaggccttgaagcaagagtgtcatcgatcgagccgatatgccggggggcatgtattggcttgtatacgagatcatcgtccgcagctgcaccttgagttcctccacgaagggttttctcgttctcggagaactcctacggagatagacggcctggcgaagtcgatggcgccgctggcggagaaagttttccagtcgatggaccggcattggccttcctag

SEQ ID NO: 31971 - DNA, 849 bp, Oryza sativa
  Clone ID: PAT_MRT4530_36226C.1
atggcggcagcggccggcgccacgagggaccgcctctctgtcatggccaccgccgtacgcgccgaccaccggcccgaccctccatttcctccactccccctccctcatccccttgccgatgcttctggccggtacccgcctctccgccatggctgccgagcaggtggcgttcatgaggaagtggatggccgaccacatccacgactcagcggcggtgctctggaagccactgctggtgacggtgttcgggtggtccgcgcggtcgaacgggtacacggtggcggcgagggacgcctacttccgaacggtccacgacgcggtgacgtcggcgtgggcgggcagcgcgtgcgctggtggactcttctagcaggtgatggcgcccgggatggagagttggaccgatggctacgaggtggtgctcgagcgcactatcctttggttatatcctgcatcataccccctgttccgggagtgcgaactcccagcggtgggtatggtaagggcttgctccggcctttgacggcgttggagaaggaggggacagcggaatcccatagccctccacctatgaaggtgaagcgtcacttgacgcaccctccaattgtaagggcggccggccaatttcaaggagatgaagtaaagtcgccggagccctcggttcataagctagcatcgcaagtaaagaagctccgcaaggagaacattgagcttagggaccgaaatgcggagctaggggtagaactttttgaacttaggaataatgttgatacccttagtcacggtttttgcgctaaaatcaagcgtgcatttgtagaaatggggaaggagaataagtattatgctaattag

SEQ ID NO: 31972 - DNA, 2079 bp, Oryza sativa
  Clone ID: PAT_MRT4530_36227C.1
atggatctcgacaagtctacctccaccagtgcgtcaatgaaaaaactacaggaggatggcgcccttcccggtcgcgggaccgcggagagggaagtaggaggtactgaaccccagcctgtcctgggtcgcatggttgcggttgaggactttattctctgcggttttcttccaccgccttctgaatttctccttttggtcttgaatttctatggtctttccttgctccatttgaaccccaactccatcgccttcctgagtatttttacgcatctttgtgaggcctacattggggtggagccgtttcttgacctcttccgcttttactatgagttacgctggatggaatccaaaaaggtgtccgagtgtgttggtttccgacttcgggatggtctgaagtcgcgatacatcccctttcagtgcccctcatctcgcagcaaatggcgggggaggtggttctatcttcagatagaggatttggatcctgtcttcgttgttcctgaggagcagccagacaagattccatcttggaccactaaacctgccttgaccccgtccctccaatctttcatcgatatcgttgatgacctccgagaacgggggttgtcggggtatgaagttgctgccgacttcattggtaggcggatccagccgcttcaggctcgagcccatcctgcctttgattattctaggccagaggacgcgacccgggtggcggcatcactgaaggagaaggtcgccaagggggtgtctgacactgctgctgccgctgccacgacgagtagcggcgacgttccgaaaaaggggaggaaattctcctctgtagttggacatcatcagaagacacccaccaccttggcctcggacgcgtctcccccgcctccgcgacggcagcggcttatgacgctcagcgagaaggcggcgcgggcgaaggcggcgcaagataggtctggagggacctctagcgcgtcttctgccgtggcctcgacggatgtcgtggccgtgcccaggagccgtgaggcgagacctagcggtctggccagcgatcacgtggctggtcgtggttcgccggctaccgtcctcacctgggaggagctccaggttgagatggggtgcctcctcgaagctggtgctcgaggtgttagccgcgagattgcggaggcgagggtggcggctgggtcgtcggcgaacgagcgcgccgatcggctggcgcgtgatctggcggaggggctcgagcaccgtatgtcggagcttgagaacaagttgtcggaaatccgtggctcgttgcgggtcacctatactggtctgcatcagctcgccggggagtgcggtaccaagtccaccattccggcgaatcccgatgagttctcgctgacgtcttctcttgcggagctggtgacggcgatggaggagatcccctccaagcatgcggccaggatcggagaggagacgtctaacgggatctacaccggggcgtgccaagtccttgcgtgtgtgaggctggcgcaccctgaactcgatctgcggaagatcttggatcagggggcgactagcgacgcgcgcaaggatcattttgatctcgagtactttgttgtcctttgtagagatgttaatgtcgatgatgtccagcagcgcgggcagcctgagttgccagtggtcgttccgttacttgcgtccgagcagcatgtgccggaaagcgatgtagatcgaagtttgccagtggaaacgagcatggcagcgactcccttagatctcgagagtgcgcttgctgaccaggatcgtcgcatccagtattggaggacgaagtttgaggttgcggaactcgagaggactatgctagaggtgagaaaggaccaggccatagagacactccggggtcatgaggtgtggttcaactcgtatctgaagagttgctgcacatccatgtcgagagtctgtagaaagctccgagtaccccatggggatcccgaggaatcggtggccggatacatctcgtggctgaatggggcctgcgcccagctcgaaggcatcggtcaacgtgtcgacgaggccttgaagcaggagtgtcgtcgctcaagctga

SEQ ID NO: 31973 - DNA, 361 bp, Oryza sativa
  Clone ID: PAT_MRT4530_36228C.1
aaagaaccccgcctagttcaggttgggagttagaaggaagcccctcacacctacagacacctaaccgtctattacactacaccgtcgatggatacatcgacatgggtctactgctgagcactatctgaaacgggagacacacccgaggacgattgtgcacacagcctcaacaccaaccatttcaaccaatagggggcctgcagagccaccaaccagactgccaactcaagctgcaggtgccttgccgtccttgttgatggacgcctaccggacggtctggggcttggacctcggcttcggagactggaagggcttggccaccacactcttttacggcgccttgcactgggtgccagcgctg

SEQ ID NO: 31974 - DNA, 2163 bp, Oryza sativa
  Clone ID: PAT_MRT4530_36229C.1
atggatcttgacaagtctacctctaccagtacatcactgaagaaactgcaggaggatggcgcccttcccggtcgtgggaccgcggagagggaagtaggaggtactgaaccccagcctgttctgggtcgcatggttgcggttgaggactttattctctgcggttttcttcctccgccttctgaatttctccttttggttttgaatttctatggtctttcctttttccatttgaatcccaactccatcgccttcctgagtatttttacgcatctttgtgaggcctacattggggtggagccgtttcttgacctcttccgcttttactatgagttacgctggatggaatccaaaaaggtgtccgggtgtgttggtttccgacttcgagatggcctgaagtcgcgatacatcccctttcagtgcccctcatctcgcagcaaatggcgggggaggtggttatatcttcagatagaggatttggatccggtcttcgttgttcctgaggagcagccagacaagattccatcttggaccaccaaaccagccttgaccccgtccctccaatctttcatcgatatcgttgaagacctccgggaacgggggttgttggggtatgaagttgctgccgacttcattggtaggcggatccagccgcttcaggctcgagcccatcctgcctttgattattctgggccagaggacgcgacccgggtttttcctcggggcttgaatagcgcaaccgtggagcgccgtgtcggccaactgatgatcagcggcccgacaacggcgagcaacgtcctcgtccccctttgcgagaaaggggcaaccgagcgcgacgctgccatcaatgtggtagcatcgctgaaggagaaggtcgccaaggaggcgtatgacggtgctgctgctgccacgacgagtggcggcgacgttccgaaaaaggggaggaaattctcctccgttgtcggacatcgtcggaaaacacccaccccctcggaggagctccaggttgagatggggcgcctcctcgaggttggtgctcgcggtgttagccgcgagatcgcggaggcgagggcggcggctgcgtcgtcggcgaacgagcgtgccgatcagctggcgcgcgatctggcagaggttcgcgaggacctccagaagatgagggaactggtggccggcaatgagcgacaacggcaggggctcgagcaccgtatgtcggagctcgagaacaacttgttggaaatccgtggctcgttgcgggtcacctatactggtctgcaccagctcgccggggagtgcggtatcaagtctaccatcccggcgaatcccgatgagttctcgctgacgtcttctcttgcggagctggcggcagcgatggaggagatcccctccaagcatgaggccagggtcggagaggagacgtccaacgggatctacaccggagcgtgccacgtccttgcgtgtgtgaggctggcgcaccctgaactcaatctatggaagatcttggatcagggggcggctagcgacgcgcgcaaggatgtgatggaagaagtcggtgatctgggggaagatgttgatgtcgaggatgtccagcagcgcgagcagcctgagttgccggtggtcgttccgttacttgtgtccgagccacatgtgccggagggcgatgtagatcgaagttcgcctgtggaaacgagcatggcgacgattcccttagatctcgagagtgcgcttgctaaccatgatcgtcgcatccagtattggaggacgaagtttgaggtcgcggaactcgagaggactatgctggaagtgagaaaggaccaggccgtagagacactccggggtcatgaggtgtggttcaactcgtatctaaagagttgttgcgcatccatgtcgagagtctgtagagagctccgagtactctgtggggatcccaaggaatcggcggctggatacatctcgtggctgaatggggcctcctgcgcccagctcgaaggcatcggtcaacgtatcgacgaggccttgaagcaggagtgtcgtcgctcaagccgatatgccggggggcacgtgttggcctgcatacaagatcatcgtccgaagctgcacctcgagttcctccgcgaagggttttctcgatctcggagaactcctacggagatagatggcctggcgtag

SEQ ID NO: 31975 - DNA, 216 bp, Oryza sativa
  unsure (1)..(216): unsure at all n locations
  Clone ID: PAT_MRT4530_3622C.1
gaggttggtgactttcttggctgtcatgctgcttgcatattctcgagcccaaggccttggtccccgccggccaccactgcaaccctatcctcggccgggaaggagctgccgctgacaatgacgggggggggggagaacaccaccacccattgcaggcctctttccccgtgtgggggggggtctggccttgcgcncgccccagggggggggaggtgg

SEQ ID NO: 31976 - DNA, 636 bp, Oryza sativa
  Clone ID: PAT_MRT4530_36230C.1
atggcagaagtggccaatgtgggaacaaagtcgtccatcaataacaatgaagacaccagtcggcggcgacgaaggcggtcgacggtgaaagcgaagatgcccactaatggcggcataataggccagccgtttgattccatcgcacttttcgacagtgatgaaatcatcgttgctgcaacaatagtcgcgcaagatgaatatgagcagtcgaatgctccatggcgaggaaatgatgctagtgctttgggtctatcaccattgcaaaagattaccgctacacttagaatgataaccaatggagtcgtagccgacactcaagatgaatatctgcaaattgcaaatagtaccactatagagagtctgaaaaggtttgtgagagctattgttgagattttcggagacgagtacttgcgttatccaactagtgctgacacttctagattacttgcacttggagagcagagaagttttcctggaatgcttggatccatagattgcatgcattgggagtggaaaaattgcccttcagcatggaaaggcatgtataaaggaaaattaagcaaacgaactatagttttggaagttgttgcttcaaaagatctttggattccgcatgcattcttcggtttgccatga

SEQ ID NO: 31977 - DNA, 687 bp, Oryza sativa
  Clone ID: PAT_MRT4530_36231C.1
atggcagaagtggccaatgtgggaacaaagtcgtccatcaataacaatgaagacaccagtcggcggcgacgaaggcggtcgacggtgaaagcgaagatgcccactaatggcggcataataggccagccgtgtaagcggaaacaccagtcgacggcaacgaaggtgagccaacgtgatgaaatcatcgttgctgcaacaatagtcgcgcaagatgaatatgagcagtcgaatgctccatggcgaggtgattttgttcctgatcgtcagcccaaaaaaggaaatgatgctagtgctttgggtctatcaccattgcaaaagattaccgctacacttagaatgataaccaatggagtcgtagccgacactcaagatgaatatctgcaaattgcaaatagtaccactatagagagtctgaaaaggtttgtgagagctattgttgagattttcggagacgagtacttgcgttatccaactagtgctgacacttctagattacttgcacttggagagcagagaagttttcctggaatgcttggatccatagattgcatgcattgggagtggaaaaattgcccttcagcatggaaaggcatgtataaaggaaaattaagcaaacgaactatagttttggaagttgttgcttcaaaagatctttggattccgcatgcattcttcggtttgccatga

SEQ ID NO: 31978 - DNA, 214 bp, Oryza sativa
  Clone ID: PAT_MRT4530_36232C.1
aaacctcctcttaatttcagggggcaaatttacattttgggcccacaccctacacccattcataataatacattgtatttacctaccttcatacataccccttcctatacacccaccttctatcttacaaattttctttacatacataccttcacacaaatacccttactcactttcattcatacatatataaaaacttctaattaaataataa

SEQ ID NO: 31979 - DNA, 528 bp, Oryza sativa
  Clone ID: PAT_MRT4530_36233C.1
cccacgcgtccgtccacgtatccggcaaattaaaaagctagcttagccatggcacgtagcctctcgttgctgctactcctcgtcgcgtgcttcctcgtcgccggcgccaccgcggctcgcccggcgccgtcgacgagcggcgccgccgccatcagcagcttcgtgaggtcgtggtgcgcggggacgaagtaccccgccctgtgcgacgcgacgctggcgccgtactcggcggcggtgggggcgagcccggcgaagctggcgtgggcggcgctgacggcttggtcgagaagccagtggtgattggccgcatcaggaaccctgacaagattccgtgggctgaggctggtgctgagtatgtcgcggagtccaccgttgtcttcactgacagggagaatgctactgctcacttgaaaggtggtgccaagaatgttgtcatctctgccccgagcaaagatgctccgatggttgcttgcggtgtcaactaggacaagtacaccttaaatattgatattgtcttaaaagctagct

SEQ ID NO: 31980 - DNA, 394 bp, Oryza sativa
  unsure (1)..(394): unsure at all n locations
  Clone ID: PAT_MRT4530_36234C.1
gacactacgatgcgctgcagccatctcttgtaagaacacaatcaaggctgtgagtatagcactgtacaaaatctgacaatggcctactcatgctattaagttcttttgcttcagtcttctttttgaggaaccatccccctgtaaaatttgcaggagaggaatacagataccgaagattacgctacctaagattgttctccaaggacagtatcaagatcctctgctacatgatttcacactgtatagtggtattgtgacacatatgaaatgctagcctggctttactgttccatatttcatatttccaagctgatgataaataaacttcagatggncaantcttcttccaaccagaatggaatacataccgacattaggtatagaaaaaaaaaaa

SEQ ID NO: 31981 - DNA, 350 bp, Oryza sativa
  Clone ID: PAT_MRT4530_36235C.1
gattatgtcaagattgccttaggatgtagggcagggagatcttgaaccgagcgggactgacactacctcatctcctgagagggactgatttcgaagtgaatatgaaatcgatgatgacaaataaatattacattttttttgcatttggatgttatgtaataaataaacaagtaagggttatttcatgaattgccaatgtattgcttacaataatgttatttttacttggttcctctatgattttttaatgatgtatcagtaaatgatcagcaataacggtattttcttcaattctatgtatcaacgtgccttacgtgcacgctcactagtattttaaaaatattattgat

SEQ ID NO: 31982 - DNA, 1310 bp, Oryza sativa
  Clone ID: PAT_MRT4530_36236C.1
ctacgagagccaagataggcttatatacacgagcaaaacagttctgtttttgctcatccggttgagcttgtacttcagagcctttgctgctgatcctggtctccgaatcttagcaggccttactggacacactctgcagcctcctccatcatcagccatgatcatgtggagcagctcaagagcttcttggcttctgttctcatcacacagccccctgacttcctttttcttggagtgtgggatgacgattttcggagcatcaacgtgcatttccagagagttgaactccagagccaagataggcttagataacaagaccataacggtatgtttttgcgcatccggttcagctaatacttccgagcctttgctgctgatcttgccatcaggacactcctgtggttcagtaattcttggtctccaaatcttagcaggccttaccgggcgcactctgcattccacttggcaagagtacttgagaagatcagcatgttccactaaatacttactaacctttggtgcagatcttctcatcagggaaaccctcgaggtgcgttaattctaggccgccaacacagagagcggtccactcatgtcgcactaatctcttgtacaagagcccttggtctctgagatctcgatctcacggtcattcccttggttggagacagttgagcgcattccaagcaagctcaggaagctgtttgatttaaccaatggcttgtttctaagcgcatcagcttcagtctgtgagaatgtagcaacatggcttgggagacctacttccttgcgaccatgccggcaggcttcggcactgttcaccagcactctagcagcccacgcgcaggaggtcggcgggttccacacgatgccggcgatcaccacgagctcgtcgaacttgccggcggggctgtcgtcgtagcgggcgaggaacatgccgccgagggtgtagccgaaggcctccacgaggcggagctccctgggcacgaacgcccgcgccgtcgccgccttcaccaaatgcagctggtacaatgcccctgcagcagcagcagcctcctctctgccactgccagccgccatccgccgagggtgtagccgaaggcctccacgaggcggagctccctgggcacgaacgcccgcgccgtcgccgccttcaccaaatgcagctggtacaatgccctgcccctgaacacccatggcggcccgcgcccgtaccctgcagcagcagcagcctcctctctgccactgccagccgccatggatggccactgactcaacacacttcctccgctgcctctgcaagaatgcag

SEQ ID NO: 31983 - DNA, 2236 bp, Oryza sativa
  Clone ID: PAT_MRT4530_36237C.1
gtccagttcgtctacctcgttgccacagccattgtcatctgtcgaagctttactggtagtgcgcgttctaggggcggtcgccgtacgggaggcggtggcaatggtggacgtggaccgccggatggccggcctgtccccggcggcgcacgcggcggggctgcggcggctgtccacgcgcgccgccgcggggccctcgtcggcgtcggcctcgccgcgccacgggctccactcgttccacgcgctggcgggcgcggtgctgtcgcacctcagggcgtccggggtggccgtgctcccggggctgtccgacgcggagctggcgcgcgccgaggccgagatggggttcgcgttcccgcccgacctgcgcgcggtgctcgccatgggcctcccgtcgggtcccgggttcccggactggcggacgcgcgccgggctccggtcggcgttcgacctgcccatcgcggcggcgtcgctgcagatcgcgcgtggcgcgctgtggccgcggtgctgggggccgaggcccgccgaccccgacagggcgctccggctcgcgcgctcctccatccgccgcgcgccgctgcttgtgccgctcttcgaccgctgcttcctgccctgccgcccctgcctcgccgggaaccccatcttcttcgtcaccgacgaccgggtgctctgctgtggcctcgacatcctacacttcttcacgcgagactcctcgttccagccgctcgacctccgccccccctcgtcgtcgtcgtcggtcgccccgtcctccggcgaggcgacgccgtacatgcgccgcagcctcgacgcggcttgcggcgggaaagccccacgctggatcgagttctggagcgacgccgcgtccgaccggcgccgccgtgactcgtcctcctcggaggcctcgaccgcgtcgtcgtcatccgggtgcgcgtcgccgccggcgaggagatcgaggaccccgcactgggtcgacacctacctggacaggctcgggtcagtcctcaagagcggcgggtggagggacacggaggtgaatgagatggtcgaggtgacggcctccggtctgttcgacggcgaggaggcgccggcggtggacgccgacgcggtgctcgacgcgctcctcctgaaggccgacaggtgctcggactcgctccgccgtgccgggtggagctccgaggacgtgtccgacgcgctggggctcgacctccggcgatgcaaggagcggccgcggcccgccgttcagctaccgccggagatcgccgtcaaggtggagcggctcgcgaagtcgccgtacgtgcagccgcggcgcggcgcgttcccgttctcacttgctgctctcctctctcgtcgcaacaagcagctttggtgcaggcacctcgcctcgcacggttcatcaatgccgcggcgtgcgctccgtgcaggtggtggtgataaactgaacgtttcaactggtgataaactcctctatcttatcctcttcctctccaaccgattcaacacctcctcctcctcctctcaacggcaccgcctcctcttccgacacagaggcgccgctccccctgctccccatctagctccggcctctcccccgcgtcttctctgcaagcggcagcggtggaagggacaacgagtggcgatggcggagccccatggcggcggcggcggatttggccgcgagctcgttggcctcttgccctcccttctctacgagcggcggcggcctcttcccacgacagtgccggatctggccgccaacttcttccctctcccccctcttctcgcagcagccgagggaccatcggcggcggcggatcctctccccctcccttcttcacgagcgtcgcatcagctggcctctcccctccatccccatgtcgcgacggtgaggggccactggcggtgcacggggggaccgatcagacgaggcgacgcgcggggctctgactcctccaacgcaagttctcgagccgtggcttcgcggctcccgggcccaggcgcggcgcttggagcgtttcctctgcaagcttgttgctggcctgcgaaaccactagctcgggtgccagctcggctcagctccgacgtggagccatgttgtcggagttcatggcaccacgggccccatctagggatgaaggagaagatggcacatgatgtcaaccgctgcctcgagctcacgaaggtgaccagagaatggcggccgctcgaggacaagtttttgccacctcgaggccccgacatctag

SEQ ID NO: 31984 - DNA, 713 bp, Oryza sativa
  Clone ID: PAT_MRT4530_36238C.1
ccggccgggaaatacgccccccaccaccgcggccgatgtccaccctctccccggacggcgactccgactacggcggcggcggcggcggcggcgaagcagccggagcagtgatggccgacgtcctctccaagggccgggaagcctgctacaaggcccgggacgccttctacacgtgcgtggagaagcacgcggacaagaagcccaccgagatcgccaccatggggctcctctaccccgccgactgcaagaagtcccgcgccaacttcgtcaacagctgccgcccctcctgggtgaagcacttcgaccggcagtactccgccaagaagcgggtgcagcggctgctcgacggcggcgacgaccgccggggccccatctcgctcccccagccgtacacgttcaagcaataggtagctagctctgctgctggttccgtccctcggtaccgagctgaattacatctttgcgtcggagactggatgcggcagtatttgtttcagatttggtggtgttaagatggaaggcatatgcctctgctttctagtacgttggtatgaattgtgaatggatgagaaagaacttgcctatgacttttatcgcaatcaagatcttgttgtggtagtgtttatatctttgttgaaatacattggtactgtccataatcctcactataatttctgctgtttgatgctttatttcaaaaaaaaaaaaaaaaa

SEQ ID NO: 31985 - DNA, 1496 bp, Oryza sativa
  Clone ID: PAT_MRT4530_36239C.1
gcgttcggcagcagcagcacagaagcagcttcccttccttccgtatagtgtaacgtacgcatcaccacctcgcgggctggagatggagaaggagtaggagtaggagtgacgcctccggatttcccacgcctcgacgaacccccacaaccccgagatcgatcgggaggaggacgaccacgcccttcacctgcccccaaatcttgccccgatctcccccgaccgcggcaatgggggccgcctccgacgacgccgtcaagcagctcgccctcctcatggaccaagaatgtgcaccagggctatcctaaagaaacattattgcgtttccttaaggccagagagtggaacgtatctaaggctcataaaatgcttgtagactctttgaattggaggattcaaaacgaaatcgatactgttctggagagacctatagtcccagtagatttgtacagatcaatccgtgattcacaacttgttggactctcaggatacacaaaggagggtctcccagtttttgccgttggtgttgggcagagcacatatgacaaagcttcggtccattactatgtgcaatctcatattcagattaatgagtaccgtgatcgtgtaattttgcccatgttgacggaaaaatttgggcggcctgttaccacctgtgtaaaagttttggacatgactggcttgaagttgtcagcactgagccaaatgaagatgttgacttcaatctcaacggttgatgatttgaactaccctgaaaaaacggagacgtactatgtagttaatgttccctatatattttctgcatgttggaaggttgtgaaacccctgttgcaggagaggacaaaaaagaaggttaaagttttgcatggttgtggaagagatgaacttctgaagattatggactattcatctcttccacatttctgccgccgggagggctctggctcatccaaacattcatctactgacgctgatgactgctactcacttgaccatcctttccacaaagagctttatggtcacattgaggagctagcatcgtgcaaggaactcatcaagatgggatcattacatgtcagcattcccgagcctgaccccgatgacgcaaagattgttgaggtcatccaagctgaattccagaagatcggtgagcagaatggatccgccaatggtcacaaggtttagccaaaacattggccatctgcagaacaccttaaccagtgctggtgacttctgaatctgatgaagttgattactactgtccatgtcagtaattttgttgacaaccccccattttctggggggaatatagcagcagcagcagcagcaaggtcttgcatcattatattcccatgatgatgcaaataaacagtggtgcagccttgagttgatagaggaagagatgaaccagtcaccagtgtatatgaaattagatggaattgaaagccataaacatgtttttgttagtgtaacttacatatgttaaagctgttacaagg

SEQ ID NO: 31986 - DNA, 860 bp, Oryza sativa
  Clone ID: PAT_MRT4530_3623C.1
catcccctcccgacctcctactccggcgcaggcgcacagcatcgcagcttcgggatgaccacgactcggctcgacgaagccacggtgcgcggggcggtgagaggcggcagtctgcttcaggaagtgattctgaccgcacgccccaggacgcagctggagcgcggggcatccgcagcagagcgcaccatgcgggaaggcggaagggccggcagccagccagcacgcgaggagggcgatgcagccccggctttagcgaggggtgcggggcgcgaacgggaggccatcgaaggcgagaaggatcgaggtataaagcgcagcggctgctgcaggagcagtcggccgacagggaacgggaggccatcgaaggcgagaaggatcgcggtataaactgcagcgtctgctactgcagcagtcggcacacatatcattttttgggacagcggcactgctccatcttgcagagagcaggtaaattctttcatactttcaactcttgatctgactagtccattgcagtaattgatttgactagtccattgcagtaactatgcctgctgatgttaatgaaatttgtaaattggaacttttcaatatgataactttttagtggaatgtaatatttaaaaagaactgcaccaattttatggttgatgtagtgatgctaatttacatatacccaagagaagcgacaaaactgctgttgttgcaacagttggattccttgaataaagaggtagatgaattgtaagcatcaagggagcagcagtcgaagaaaattgaaagtttgaagaactcatcagaagagaccaattcccttcttcgtcgtttgattggccatttggcctgaatactccatattt

SEQ ID NO: 31987 - DNA, 2043 bp, Oryza sativa
  Clone ID: PAT_MRT4530_36240C.1
ggcgatcacccagggtaggcctaggcgtaaaccctgcacctgaatcgatcgccggcgatggccacgacgctgacgccgacgcagcgctacgcggcgggggcgctgctggcgctcgcgctccgccaggcccagatccaccagtccgtcctcctcggcgcccaccaccaccacgacgacgacgacgaggaacaggggcgcaccagcaccagcagcggcggcggcggcggcagctcctcctcctcctccaactccggcgccggcgccgacgccgacctctggacacacgactcccacggcctcctccgccccgtcttcaggttcctggagatcgatcccaaggcgtggtcggggctggaggagacggcggcgtcgtccgaggccaagcatcacatcggcgcgtttctaaggataatattcgaagaagatggcgaaagctcctcagacagatccgttcaggagcttgccttggcaaaaggagttgatgtgatggtaatgagtttgggcaatgacagtgaagtgggtaacacaattaaaggtggggatcaagatgctttgcctagcagctctggaacagataaatccccaggggaaagctctcatgatgaccagttaggaatcaataaattgaccttagatgatattcctgctaacaatcaccggaagatggcattgctgtttgctcttctctcggcttgtgttgctgataaacctgtatcacaagaggaagaggacagaaaatcaacccgcttcagaaagggttatgatgctcggcatcgtgttgctcttcggctgctatctacatggcttgatgtgaagtggatcaaaatggaagcaattgaggttatggttgcatgctctgccatggcagcagcgaaagaacaagaacaatcacaagaaagcgcatcacccaaaagtaaatgggaaaaatggaagcgtggaggaataattggtgcagctgctttgactggaggagcactgttggctattactgggggtttagctgctccagcaattgctgcagggtttggtgctcttgctccaaccctgggcacacttgtccctgttataggagctagcggatttgctgctatggctaccgctgcaggatctgttgctggctctgtggcagttgctgcatcatttggagctgctggagctggcttgacggggagcaaaatggccagaagaattgggagcgtgaaagaatttgagttcaaacctattggtgaaaaccataatcagggtcggcttgcagttggcatcttaatttccggatttgcttttgatgaggatgacttttgtagaccttgggaaggatggcaggataacctagagaggtacatccttcaatgggagtctaagcatataattgcagtgagtacagcaatacaggattggctgacatcaagacttgctatggaattgatgaagcaaggtgcaatgagaaccgtattaagtggtcttcttgcagcatttgcatggccagctacactgcttgcggctacagactttattgatagtaaatggtctgttgctattgacagatcagataaggcaggaaaaatgcttgctgaagtgcttctcaagggattgcaaggaaataggcctgtgactctcattgggttttcactaggtgcacgtgttatatttaagtgtttacaggaacttgctttatcgagtgataatgagggacttgttgagagggtggttcttcttggtgctccagtttctgtgaaaggcgagcggtgggaggctgcaaggaagatggttgctggaagatttgtgaatgtgtactccacagatgactggattcttggtgttacttttcgtgcgagtctgctaacacaagggttggctggcatccaggccattgatgtccctggtgttgaaaatgtcgatgttacggagcttgtcgatggccattcgtcttacctgtcggcagcacaacagatactggagcatcttgaactaaatacctactatccggtttttgttcccctgagcgcagccaacgaagaaacagatggaacagttgcacagtaa

SEQ ID NO: 31988 - DNA, 1724 bp, Oryza sativa
  Clone ID: PAT_MRT4530_36241C.1
gcagcagcacagaagcagcttcccttccttccgtatagtgtaacgtacgcatcaccacctcgcgggctggagatggagaaggagtaggagtaggagtgacgcctccggatttcccacgcctcgacgaacccccacaaccccgagatcgatcgggaggaggacgaccacgcccttcacctgcccccaaatcttgccccgatctcccccgaccgcggcaatgggggccgcctccgacgacgccgtcaagcagctcgccctcctcatggaccaagtggaggcgccgctgaggaggacgtttcagaatgtgcaccagggctatcctaaagaaacattattgcgtttccttaaggccagagagtggaacgtatctaaggctcataaaatgcttgtagactctttgaattggaggattcaaaacgaaatcgatactgttctggagagacctatagtcccagtagatttgtacagatcaatccgtgattcacaacttgttggactctcaggatacacaaaggagggtctcccagtttttgccgttggtgttgggcagagcacatatgacaaagcttcggtccattactatgtgcaatctcatattcagattaatgagtaccgtgatcgtgtaattttgcccatgttgacggaaaaatttgggcggcctgttaccacctgtgtaaaagttttggacatgactggcttgaagttgtcagcactgagccaaatgaagatgttgacttcaatctcaacggttgatgatttgaactaccctgaaaaaacggagacgtactatgtagttaatgttccctatatattttctgcatgttggaaggttgtgaaacccctgttgcaggagaggacaaaaaagaaggttaaagttttgcatggttgtggaagagatgaacttctgaagattatggactattcatctcttccacatttctgccgccgggagggctctggctcatccaaacattcatctactgacgctgatgactgctactcacttgaccatcctttccacaaagagctttatggtcacattgaggagctagcatcgtgcaaggaactcatcaagatgggatcattacatgtcagcattcccgagcctgaccccgatgacgcaaagattgttgaggtcatccaagctgaattccagaagatcggtgagcagaatggatccgccaatggtcacaaggtttagccaaaacattggccatctgcagaacaccttaaccagtgctggtgacttctgaatctgatgaagttgattactactgtccatgtcagtaattttgttgacaaccccccattttctggggggaatatagcagcagcagcagcagcaaggtcttgcatcattatattcccatgatgatgcaaataaacagtggtgcagccttgagttgatagaggaagagatgaaccagtcaccagtgtatatgaaattagatggaattgaaagccataaacatgtttttgttagtgtaacttacatatgttaaagctgttacaaggaaatccatggatgttgaaagacttctttaaaaaaaaaaagctgtcataagcttgagcgcatagttttgcaccaggatgttgaatggatcaaattttattttgtggattttattactaagatgtgaatggtaactttttctttgcatttagtagtaactacttgcaacaaaaatgagttggggaagtgagacagctggtaggccggccgg

SEQ ID NO: 31989 - DNA, 1065 bp, Oryza sativa
  Clone ID: PAT_MRT4530_36242C.1
cggcgaataaccggaagacggtggggtggaagcgtattcggacttcggagaccgatacatgcgaaggatgccgaacccgatttttagtgggggccgtatttggtgtacatatatcgacgcaaacccgcccggccggaagcctatctcatcgatctcagatcgggaaaggggaataagcggagggcaaattccggcgccgtcgatggactctccggcgacgaatcaatccgtggaagacaaagctccagcaattgatccttcggaaaggcatcccttggaggaagacaaagcttcggtgatggatctttcgggcaaaggtaaggccttggtggtagatccttcggacctaggagtatgtagaaccgaagtgaaaatcccggcgtctgcggtgaatccctctggcgaaggcaaggcgccgatggagaagaagaagaagaagaagacgaagacgaagatggcgcgatttacccaagcgcagatcaacaactgcatggctttcaaggaagagatgcccgacttcgacaacatgccgagtatcatcgagatcctcggcgacgaccttgccaaatgttcgcaggaatacattgatgagctgaaggcgatcgacgacagccgagaggaggataagaaattctggatagagatgaaccgccaaatccgcgaggaacgggagggcatcctcaaccagtactacaccaaaggctacgccgagtacgaggtcgacgacgacgaagacgaagacgaaggcaataaaggtcatgctcgagttgctgctacctccggcaggagaaggttccgtcacggggtcgccctgaagaagaaccaatcaggaggaggaagcattagaaagatatgatgaataaatatcagtgtaggcatcgatccaacttagtgaactgaataatcatcagtgttgttggcatcgatccagcttagttagtgtgggggattttacttaccttttatttatcaatacaataatgtactgtgggttgactatgatttgccaattttcgtactatgctttgattttaacctctaaaaaaaaaaaaaaaaaaaaaaaaa

SEQ ID NO: 31990 - DNA, 525 bp, Oryza sativa
  Clone ID: PAT_MRT4530_36243C.1
aaaaaggaaaaaaaattttatttctatttatatcaccttaagtttcacatggcacatacgaggatcccggggcttattttttcacttccgaactacaattttgggaaaattcagtacaagacaccgccaagggggggaatactacccggggcactatagtccctaggggagatcccatttggagatggcaagttaaaagccaacagggcttgcgcttgacccaaattccggtcaatggaaaaatccccaaactgctggaggggtacctgctgcgctatggcctggacaacgttaatgtcctgggagggaaattggggccccaccagcctgagctggtgaaaaacttggttgtttctcagttgaaacacacctgattgcaaaaaggggcttgccgaaatgctatactggtgccttacaaactcattatataggctaagcacctgttgctgtaccaggaaaggcgactgcacctgatattgcctaatatttggacctaaaacatcaaactgcgctggggcgctgcat

SEQ ID NO: 31991 - DNA, 264 bp, Oryza sativa
  Clone ID: PAT_MRT4530_36244C.1
atgaaggggcgtcacggaggagaaggtggcggcattctacatggtggaggtgagggagaaatggaccttgacatgtggggacaggggcaacctagccctgaagccaccagttcttcgccgccacctatgctaggtcctgtgccgtcatgccgttgcttgggggtgggggaggaagagctcgtgaaatgctcatcgtcgttggggcaacaatggaacgggaaggtgctatcaggaggaagagattgggagaaagagataagatag

SEQ ID NO: 31992 - DNA, 420 bp, Oryza sativa
  Clone ID: PAT_MRT4530_36245C.1
atgccgaagccgaaccaccatgcttctgccacctccgcctctactgcaagcggcaacccgatggactccactgtgtcctaccagggtgggttaggacacaagagtaaaaccaagatcaagaaaggcaaggagaagggctcatctacagtacccgcagtgtacgatgtcaacgccgacatcgaagaggagtaccgcttattcttagagaacgtgcgtgtccacgagaatgaggactttgtactggagtatgacggcaaggtgattaggtatgggggagaagagatggatgacgatgatagttgtatagaggtttcgatgaaggagaaggaggaggtgttgaaggctttggtgatctcttcggacgatgagtctccgacgagtctacgaagagtctatgagaacgattcctctcggcaaaag

SEQ ID NO: 31993 - DNA, 489 bp, Oryza sativa
  Clone ID: PAT_MRT4530_36246C.1
ctgtattataactagcgaaacacacgcggcgacaggcccccagtggcagcccggcctctgcacgaacaccgaatcgcgcgccgcataccgcaactcactcctcctctctcgtcgccggcggcgcgcgatcgccgggcgctgcggtaccgcaccactgccccccatatgcgcgcggcagcctgtgcccctgggagcggcgcggggcccgggcgtccgccaacactcagattggcgactcggcgaccggatatagccaggctccctagggggggtgcctatggagcgaggagggaggaggggcacccgttgctccatcgcggatccacacacaagcgctgcgattccccatcgccgcttgaagccctaggccactacttcgcgatctgtcgctgcgtcagactaggacgatcgtcggcctactgcagcaagtacaagattgggaaatatgactatcaaaagtagatggagggagtatttgaacccaattgt

SEQ ID NO: 31994 - DNA, 511 bp, Oryza sativa
  Clone ID: PAT_MRT4530_36247C.1
ggtgggttttttttacagttgacagacatcgcccagaatttcaagccctcggattgaaacagatgaggctgccaaacgttaatagttaaccatgctgagactagaacaggtaaacaacgccaatttttagctggggcgtactcatggttaaaaatgacacggagcgggatggctaggaaaacctgctgcagatggcgctattggatactgtgtagctgacggactaactctgcattactgtaaaggtttgttcctacacttctgcaaggacattgtgctctatgaacgcttgatgcatggcctataagcactgttatgcctccatcttatgaacaataataaccttgtttaccttgtatgcaactttggaaatcatttgaccctttacgctagtttagctacacactcgaaaggtcttttgcacagttatatatgactatctatcgtttaacatgagcgatattatcgccctctgctgctattaatggaccactgcgatcttatcaagctc

SEQ ID NO: 31995 - DNA, 246 bp, Oryza sativa
  Clone ID: PAT_MRT4530_36248C.1
atgccttcgaccggaagcaaggcggtcgttcgcccccaggtgggtcccagtgccatcctccggctgacacgggggacatccctgtcattccctcttaattccatggagacttttgtggattcgtgtatggggggcacgctcgactgcgtgccgatgggacggggcatacctgcccccactccgcctgacagggggcgggacgtgggtgcgctgccacccatcccatgcgcctgtgaccggtcatag

SEQ ID NO: 31996 - DNA, 536 bp, Oryza sativa
  Clone ID: PAT_MRT4530_36249C.1
gatctgggaccagattgttttcacttgttcgcaatgtttattattataaacttgttactgaaaactcttatccatgctactggttgttttcgtaaaattgacaagttttcatttccaatggccacaggtacctttgtgtctctgcagtgacaatgtgtacttattctgagtgttcattataaccgtgacagcagtttacacttgcctgtttttcccttcaggatgagaaactaccaaggataaatatgtataattagttagaaaactggcattcgttttttataatcatttatcagagaggaagagtaacattgccttcgtgggtacttattagttattactttccagggatgggaactggtggagtctatgtacacctgctcagcacaagatgcatgttccatgtttatagtgtatgctgtgtgtttgggcttcataccgcatgatgtattccaattttctttataaactaatgggtcctaaagaaggttacactaaatactgcaattgcagagccaaaaaaaaaaaaaaaaaaa

SEQ ID NO: 31997 - DNA, 473 bp, Oryza sativa
  unsure (1)..(473): unsure at all n locations
  Clone ID: PAT_MRT4530_3624C.1
gagctctcttagcacccaacaaggtgggaagcccgaccccgaggttcccaagcgcgagctttaggaacttccttctggcatcattagtcttgtgctcgagggaggcagtcacagaaactggcctctgtgcaacgccactcgaaggaagtgtcgagaagggaagcggcgtctttgcagcaaggctcatggatgttggagccatcttcgctcactgttaaaagtaatgaaagggagatcttgtcaatcatacaagtgttgtatggcagaaattgcttcatccgatacttcaactaagctaatcacttcatatcaatccaacttagctgtaactaacaagctgnnctaccgtaagtattnaagaacaaaggtaaagcatctcttnacaatcacccctacaagnagaagctattgnaatnccttctcgaactacaaacagctacaancattatnnnnaaacnagnatgaaatncgaa

SEQ ID NO: 31998 - DNA, 1086 bp, Oryza sativa
  Clone ID: PAT_MRT4530_36250C.1
cacgaggatcacctccacttatgaagaagatatgatgagggagggagatgcatgtgttgcacttctaagaagcaagctccatggccttgtcgagaggaaccgcagtctggaagaggagaacaagcaattgagacatcaagtcagtcgtctaaaaggccaagtatcctcccttgaaggccaggatactgatagaaagatgctctggaagaagctggataattcttccactggcaacagctacctcaaggaaaagcagtttgttcccaacaatgatgcaaaggaagccatggatctcaacagcacgtcgtgttacagcaggcagcaattctccagggcacctctggtgagatcaagagcaccaagggttccaaatccaccgccaagtccaacctacacccaaccaatagtaaatgcaagaaaggaaggaggcatggctcctcctccaccggcacctcccctaccttccagattgctgaagagcactaaggcagtgcaaagggtgcctgatgtagtcgagttataccggttattggttagaagagaaggcaaaaatgatgcaaagtctgggatccatgggaattccggcagctactaatagccgagagatgatcggggagatagagaacaaatcagcttatgtgttagctattaaatcagatgtagaaaatcagagtgaattcattaacttcctggcagtggaggtaaagaatgcgggggtacaaagaaatagctgatgttgaagagtttgtgaagtggcttgatggggaactatcttaccttgtggacgaaagagcagtgctcaagcatttcccaaactgggcagagaagaaagcagataccatgagagaagcagcattcacctaccgagatctgaagaatctggaatcagaagcatcgtcattccacgatgacaggagagttgccacacctatggctctcaagcgcatgcaagctctgcaggataaaattgaacaaggtattcataatactgagcgagcaagggacagtgcaagtggaagatacaaggatcttaagatcccgtgggaatggatgcttgactctggaatcataagccaactaaagatg

SEQ ID NO: 31999 - DNA, 2235 bp, Oryza sativa
  Clone ID: PAT_MRT4530_36251C.1
atggacctcgacaagtctacctccaccagcgcgtcgctgaagaaactacaagaggatggcgcccttcccggtcacgggaccatggagagagaagcaggaggtactgaaccccaacctgtcctgggtcgcatggttgcgatcgaggactatattctctatggttttcttcctccgccttctgaatttcttctcttggtcttgaatttctacggcctttctttgctccatttgaaccccaattccatcgccttcctcagtatttttttgcatctttgtgaggcctacattgggatagaaaattcggatccagtcttcgttgttcctggggaacaaccagacaagatttcgtcttggaccgctaaacccgtcttaaccccttctcttcagtacttcatcaatgccatcgatgacctccgagtacgaggtttgtcgggtgaaaccgtggagcgccacgttggtcaattgatgatcagcggcccgacaacggcgagcaaagtccccgtccccctttgcgagaagggggcagccgaacgcgaggctgccatcaatgctctccctctgactgatatcatcgggccgctcgtggatcatcaggcggtggcgtcgctgaaggaggacgtcgccaaggaggcgtccgatgttgctgccgttgctgccacaacgagtggcggcaacattccgaaaagggggaggaaattttcctctgtgatcggaaatcgtcggaagacacccaccccctcggtaagctctcctggtccttcatcgcgtagtcggaaaacttacacctcacatcatgcccgtcatactccaggcctcggatgcgtctcccccgcctccacgacggcagcggcttgtgacgctaggcgagaacctgtctcaattgcagcctttcacagggcggcgcgggcgaaagcgacgcaagacggatctggagggacttccagcgcgtctcctgctgtggcctcgacggatgtcgtggtcgtgcccaggagccgtgaggcgacgcctagcggcccagccagcgatctcgcggctggtcggggtccaccggctgccgtcctcacctgggaggagctccaggtcaagatggggcgcctccttgaggctggtgctcgcggcattagccgcgagatcgcggaggcgagggcagtggcagcatcgtcggcgaacgagcgcgccgaccggctgacacgtgatttggcggaggttcgcgaggacctccagaagatgagggagctggtggccggcaatgagcgacaacagcgagggctcgagcgtcgtatgtcggagctcgagaacaacttgtcggaaatccgtggctcgctgcgggtcacctacacctgtctgtaccagctcgccggggagtgtggcgtcaagaccaccatactggcgaatcccgacgagttctcgctgacgtcttcgcttgcagaactggcgacggcgatggaggcgatcccctccaagcacgcggccaggatcggagaggagacgtctaacgggatctataccgaggcgtgccatgtccttgcgtgtgtgaggctggcgcaccctgaactcgatctgcggaagatcttggatcagggggcggctagcgacgcgcgcaaggatgtgatggaagaagtcggcgatctgggggagtccgtcctcccgctttttgaagaagatgttgatgtcgaggatgtccagcagcgtgggcagcctgagttgcgagtgatcgttccggcacttgcgttcgagccatatgtgccgcagggagattattggaggacgaaatttgagttcgcggaactcgagaggactatgctggaagtgaagaatgaccaggcagtggaaacactccgaggtcgcgaggtgtgcttcagctcgtatctaaagagttgcggcacgtccatgacaagggtctgtagagagctccgagtacctcgtggggatcccgaggaatcggcggccggatacatctcgtggctgaatggggcctgcgcccagctcaaaggcatcggccagcgtatcgacgaggccctgaagcaggagtgtcgtcaatcgagccgatatgccggggggcatgtattggcttgcatacgagatcatcgtccgcagctgcacctcgagttcctccacgaagggttttctcgttctcggaaaactccaacggagatagatggcctggcaaagtcgatggcgccgctggcggagaaggtcatccagtccatggactggcgttggccttcctggtag

SEQ ID NO: 32000 - DNA, 417 bp, Oryza sativa
  Clone ID: PAT_MRT4530_36252C.1
tcgcttgttgcttcggttcgtttcggcttgtctgctgagtcggttattcaagtttcacttcataaggcttgtaaattacggtttattccacaggaaatcaagggtgataactgccatgaaagaaaccatgtgatgcataaatggtcagtcaaataggccatggaaccccgtaaaacagggcctgcgttagcttggctgttttttccaataaggctttccggccccccctcgaccgaggcattcacaaaaaaattcgatcgcttcaagttcagaatggtggtcgaaatcctcgacagggactaataaaaggttacccaggccgttctcccccctggaaagcttcccttcggtggcgcctctccttgtttcctgacccttgcccgcttaccccggataccttgtcccgccttttttccc

SEQ ID NO: 32001 - DNA, 1305 bp, Oryza sativa
  Clone ID: PAT_MRT4530_36253C.1
atgggctgcttcttctactcaagagagaagaacaagaataagaacaagaagcaatcaaggtcatcccctacactaaccgtagacaaagatgacttcagagatgaaatgtccaagaaggccaacagatcatgcagcctggttgttgcttcatcaccacggagcatactggagctatacgaggagcgtgcgcatgagctccgtgattttcgccttgccgagctgagaagtgctaccggtaacttcagtagagagctcaagataggggaaggagggtttgggagtgtgtacaagggcttcctaaaaacttcttgcggtcatttggggctcaggaatgacagtggcaatgtggtggtggctgtcaagaagctcaatcctaatggaatgcagggtcataagcagtggctggctgaagttcagttccttgctgttgtggatcacccaaatcttgtcaaactcattggctactgcgggactgacgacggcgaacaagcatacccaacacttccatggaaaacaaggcttagcatagccttgggcgttgctaaggggctgcagtacttgcatgaagggttggaaattcaggtcatatatcgcgacttaaaatcatcaaacgtgctgttagatgaggaattcagaccaaaactttcagattttggattagcaagggagggcccagtggatggacaaactcacgtgtccacagcggtgatgggcacgtacgggtacgcggcgccggactacgtggagacgggccgcctcacggcgaggagcgacgtctggagcttcggcgtcgtgctgctcgagctcctcaccggccaccgcgccttcgaccggagccggccacgccccgaccagaagctcgtcgactgggcgcgccgccaccccgcgggcacccggtggttctcgaggctccccgacccgcgactcgcggggaggtactcgcaccgcgccgcgcaggacgtcgcggcgctcgcgtggaggtgcctcgccgaccgcgccggggagcgcccgtccatggcggaggcggcgcgggccctggagcgcgcggcgcggcacggcgagctggatggtccccccgagccgccggaggagggatcgcccccgcctcctcgctgccacgccggctccggttcctcctccccggaggcgaagaaggcagcgacggcgaagcggcggcgaatggcgcacctggccaagctggcggctggcgcgagcgcggcgccggcggcgcggaggctggtgcacatgaagatgacgaaggcagcagctacatgcaacgcaggcacgcagcatggtgagacttga

SEQ ID NO: 32002 - DNA, 1527 bp, Oryza sativa
  Clone ID: PAT_MRT4530_36254C.1
atggaacccaaaaaggtgttcggatgtgtcggtttccgacttcgggatggcctgaagtcgcgatacatccccttccagtgcccctcatctcgcagcaaatggcaggggaggtggttctatcttcagatagaagatttagatctggtcttcattgttcctaaggagcaaccagacaagatttcatcttggaccaccaaacccgccttgaccccattcctccaatctttcatcgatatcattgatgacctccgagtacggtggttgtcggggtatgaaatcgttgccgacttcattggtaggcggatccagccgctccaggctcgagcccacccagcctttgattattctgggccggaggacgcgacccaggtttctcctcggggcttggacagcgcaaccgtggagcgccgcgtcggccaactgatgatcagtggcccgacaatggtgagcaacgtccccgtccccctttgcaagaaaggggcagccgagcgcgaagctgccatcaatgtggcggcgtcgctgaaggagaaagtcgccaaggaggcgtctgacggtgctgccacaacgagtggcggcaacgttctgaagaaggggaggaaattctcctctgtgatcggacatcgtcggaagacgcccaccccctcatctgtctcaattgtagcctttcgcagggcggcgcgggcgaaggcggtgcaagacgggtctggggggacctccagcgtgtctcctgctgtggcctcgatggatgtcgtggtcgtgcccaggagccgcgaggcgacacctagcggcccagccagcgatctcgtggctgatcgtgctcgccgggagtgcggtatcaagtctaccatcccggcgaatcccgatgagttctcgctgacgacttctcttgcggagcttgcgacggcgatggaggagatcccctccaagcacgcggctaggatcggagaggagacgtccaacgggatctataccggggcgtgccatgtccttgcgtgtgtgaggctggcgcaccctgaactcgatctgcggaagatcttggatcagggggcggctagcgacgcgcgcaaagatgtgatggaagaagtcggcgatctgggggagtctgttctcccactttttgaagaagatgttgatgtcgaggatgttcagcagcgcgggcagcctgagttgccagtgatcgttccggcacttgtgttcgggccacatgtgccggagggcgatgaccgtcgcacccagtattggaggacgaagtttgaggtcgcggaactcgagaggactatgctggaagtgaagaaggaccaggccgtggagacactccggggtcgcgaggtgtggttcaactcgtatctgaagagttgctgcacctccatgtcaagggtctgtagagagctccgagtaccccgtggggatcccgaggaatcggcggctggatacatctcgtggctgaatggggcctgcgcccagctcgagggcatcgaccagtgtatcgacaaggccctgaagcaggagtgtcgtcgatcgagctga

SEQ ID NO: 32003 - DNA, 584 bp, Oryza sativa
  Clone ID: PAT_MRT4530_36255C.1
cacattttgttgagaggatccttgggttgtttctgaggtccttaaaccgaatctggagtgtactggatttcttgatgtttcgcacatacatatgatccgcgtcgaaaacttcttggccaatgctgaaaaatctagtggtatgactcttttagggaatatgggactctaattctagttaggaaggtgaggtaggtaaacattgtgagactattgatgggcctgtttggttgatgcccttgatagccacaacgaatcatggcaagccgaaatttggcaggcaaaaggagatttgcttggatcatggccaagcctaatttgctcgcagtaccaatttttggtttgcttacaaggatattaagccaaaacaggcttcgaactctgcgctgacagtgacttcttgttaaaaatttatgatgatatagatttaaagattgcttattggtagtattagtaacagaaagctaataatggatgtgtaacatcggtgcatttggacatgtccttagatgcagtactatgaatctatgattaatgtgtcattcaatacactcttttataatcatatgccacacagtgcagttgtg

SEQ ID NO: 32004 - DNA, 1374 bp, Oryza sativa
  Clone ID: PAT_MRT4530_36256C.1
atgggctgcttcttctactcaagagagaagaacaagaataagaacaagaagcaatcaaggtcatcccctacactaaccgtagacaaagatgacttcagagatgaaatgtccaagaaggccaacagatcatgcagcctggttgttgcttcatcaccacggagcatactggagctatacgaggagcgtgcgcatgagctccgtgattttcgccttgccgagctgagaagtgctaccggtaacttcagtagagagctcaagataggggaaggagggtttgggagtgtgtacaagggcttcctaaaaacttcttgcggtcatttggggctcaggaatgacagtggcaatgtggtggtggctgtcaagaagctcaatcctaatggaatgcagggtcataagcagtggctggctgaagttcagttccttgctgttgtggatcacccaaatcttgtcaaactcattggctactgcgggactgacgacggcgaacaaggtcctcagagacttcttgtgtatgagtttatgcctaacaagaccctagaatatcacttgttcaataaagcatacccaacacttccatggaaaacaaggcttagcatagccttgggcgttgctaaggggctgcagtacttgcatgaagggttggaaattcaggtcatatatcgcgacttaaaatcatcaaacgtgctgttagatgaggaattcagaccaaaactttcagattttggattagcaagggagggcccagtggatggacaaactcacgtgtccacagcggtgatgggcacgtacgggtacgcggcgccggactacgtggagacgggccgcctcacggcgaggagcgacgtctggagcttcggcgtcgtgctgctcgagctcctcaccggccaccgcgccttcgaccggagccggccacgccccgaccagaagctcgtcgactgggcgcgccgccaccccgcgggcacccggtggttctcgaggctccccgacccgcgactcgcggggaggtactcgcaccgcgccgcgcaggacgtcgcggcgctcgcgtggaggtgcctcgccgaccgcgccggggagcgcccgtccatggcggaggcggcgcgggccctggagcgcgcggcgcggcacggcgagctggatggtccccccgagccgccggaggagggatcgcccccgcctcctcgctgccacgccggctccggttcctcctccccggaggcgaagaaggcagcgacggcgaagcggcggcgaatggcgcacctggccaagctggcggctggcgcgagcgcggcgccggcggcgcggaggctggtgcacatgaagatgacgaaggcagcagctacatgcaacgcaggcacgcagcatggtgagacttga

SEQ ID NO: 32005 - DNA, 628 bp, Oryza sativa
  Clone ID: PAT_MRT4530_36257C.1
atggatctcgacaagtctacctccaccagcgcgtcgctgaagaagctacagaaggatggcgcccttcccggtcgcgggaccatggagagagaagtaggaggtactgaaccccagcctgtcctgggtcacatggttgcgatcgaggactatattctctgtggttttcttctccgccttctgaatttcttctcttggtcttgaatttctacggcctttccttgctccatttgaaccccaattccatcgccttcctcagtattttttcgcatcgttgtgatgactacattggggtacagccgtttcttggtcggtttccgactccgggatggcctgaagtcacgctatatccccttccagcgcccttcttctcgtagcaaatggcgggtgaggtggttctatcttcagatagaaaattctgatccagtcttcattgttcctgaggaacaaccagacaagattttcgtcttggaccgcaaaacctcccttgaccccttctcttcaatccttcatcgatgccatcgatgacctccgagtatgaggtttgtcgaggtatgaagtcgctgccgacttcattggtaggcggatccagccgctccaggctcgagcccacccagcctttgactattct

SEQ ID NO: 32006 - DNA, 1698 bp, Oryza sativa
  Clone ID: PAT_MRT4530_36258C.1
atggatctcgacaagtctacctccaccaacgcatcactgaagaaactgcaggaggatggcgcccttcccggtcgcgggaccgcggagagggaagtaggaggcttggacagcgccaccgtggagcgccgcgtcagccaactgatgatcagtggcccgacaacggcgagcaacgtccccgtccccctttgcgagaaagaggcagccgagcgcgacgctgccatcaatgtggcggtgtcgctgaaggagaaagtcgccaaggaggcgtctgacactgctgccgccgctgccacaacgagtggcggcaacgctccgaaaaaggggaggaaattctcctctgtggtcggacaccgtcggaagacgcccaccccctcggcctcggacgcgtctcccccacctccacgacggcagaggctagtgacgcttggcgagaaggcggcatgggcgaaggcggcgcaagacgggtctagagggacctcgacggatttcgtggtcgcgcccaggagccgcgaggcgacacctagcggcccaactagcgatcttgcggctggtcggggtctgccggctgccattctcacctgggaggagctccaggttgagatggggcgcctcctcgaggctagtgctcgcgacattggccgcgagattgcggaggcgaggacggcggcggcgttgtcggcgaatgagcgcgccgaccggctggcgcacgatttggcggaggttcgcgaggacctccagaagatgggggaactggtggccggcaatgagcgacaacggcagggactcgagcaccgtatgtcggagctcgagaacaacttgtcggaaatccgtggctcgttgcgggtcacctatactggactgcaccagctcgccggggagtgcggtatcaagtttaccatcccggcgaatcccgatgagttctcgctgacgtcttctcttgcggagctggcggcggcaatggaggagatcccctccaagcatgcggccaggatcggagaggagacgtccaacgggatctataccggggagtgccacgtccttgcatgtgtgagactggcgcacccaaaactcgatctgcggaagatcttggatcagggggcggctagcgacgcgtgcaaggatgtgatggaagaagtcggcgatctgggggagtctattctcccacttgttgaagaagatgttgatgtcgaggatgtccagcagcgcgggcagcctgagctgccagtggtcgttccgttacttgcgtctgagccacacatgccggagggcgatgtagctcaaaattcgcctgtgggaatgagcatggcaacgactcccttagacctcgagagtgcgcttgctgaccaggatcgtcgcatccagtattggaggacgaagtttgaggtcgcggaactcgagaggactatgttggaaatgaggaaggatcaggccgtggagacgctctgtggtcgcgaggtgtggttcaactcgtatctgaagagttgttgtacctccatgttaagagtctgtaaagagctccgagtaccccgtggggatcccgaggaatcggcggctggatacatctcgtggctgaatggggcctgcgcccagctcgagggcatcagccagcgtatcgacgaggccctgaagcaggagtgtcgtcggtcgagccgatatgccggggggcatgtattggcttgtatacgagatcatcgtccgtag

SEQ ID NO: 32007 - DNA, 1989 bp, Oryza sativa
  Clone ID: PAT_MRT4530_36259C.1
atggagagagaagcaggaggtattgaaccccagcctgtcctgggtcgcatggttgcgatcgaggactatattctctgtggttttcttctcttggtcttgaacttctacggcctttctttgctccatttgaaccccaattccatcgccttcctcagtattttttcgcatctttgtgaggcctacattggggtagagccgtttcttgacctctttcgtttctactacgagttgcgttggatggaatccaacaaggtatctggatgcgtcggtttccgactccgggatggcctgaagtcgcgctatatccttttccagtgcccttcttctcgtagcaaatggcgggcgaggtggttctatcttcagatagaaaattcggattcagtcttcgttgttcctgaggaacaaccagacaagatttcgtctcggaccgcaaaacccgccttaaccccttctcttcagtccttcatcaatgccatcgatgacctccgagtacgaggtttgtcaggcgaaaccgtggagcgccgcgtcggccaattgatgatcagcggcccgacaacggcgagcaaagtccccgtccccctttgcgagaagggggcagccgaacacgaagctgccatcaatgctctccctctgactgatatcatcgggccgctcgtggatcatcaagcagcggcgtcgctgaaggaggacgtcaccaaggaggcgcccgatgttgctgtcgccgctgccacaacgagtggcggcaacgttccgaaaagggggaggaaattctcctccgtgatcagaaattgtcggaagacacccaccccctcgggctcggatgcgtctcccccgcctccacgacggcagcggcttgtgacgcttggcgagaacattagccgcgagatcgcggaggcgagggcggcgtcagcgtcgtcgacgaatgagtgcgccgaccggctgacacgcgatttggcagaggttcgcgaggacctccagaagatgagggagctggtggccggcaatgagcgacaacgacaagggctcgagcatcgtatgtcggagcttgagaacaacttgtcggaaaactgtggctcgctgcgggtcacctacactggtctgcaccagctcgccggggagtgtggcgttaagactaccatcccggcgaatcccaacgagttctcgctgacgtcttcgcttgcagaactggcgacagcgatggaggcgatcccctccaagcacgcggccaggatcggagaggagacgtccaacgggacttataccggggcgtgccatgtcctcgcgtgtgtgaggctggcgcaccctgaactcgatctccagaagatcttggatcaaggggcggctagcgacgcgcgcaaggatgtgatggaagaagtgggcgatctgggggaagacgttgatgtcgagaatgtccagcagcgcgggcaacctgagttgccagtgttatttttgttggcgacgacttccttagacctcgagagtgcgcttgctgaccaagatcgccgcatccagtattggaggacgaaatttgaggtcgcggaactcgagaggactatgctggaggtgaagaaggaccaggccgtgcaaacactccgaggtcgcaaggtgtggttcagctcatatctgaagagttgctgcacgtccatgactagggtctgtagagagctccgagtaccccgtggagatcccgaggaatcagcggccggatacatctcgtggctgaatggggcctacgcccagctcaaaggcatcggccagcgtatcgatgaggccctgaagcaggagtgccgtcgatcgagccgatatgccggggggcatgtactggcttgcatacgagatcttcgtccgcagctgcacctcgagttcctccacgaagggttttctcgttctcggagaactcctacggagatagatggcctggcgaagtcgatggcgccgctggcggagaaggtcttccaatccatgaactggcgttggccttcctggtag

SEQ ID NO: 32008 - DNA, 162 bp, Oryza sativa
  Clone ID: PAT_MRT4530_3625C.1
atgaaggcgaggataccagtcggtggtgacgaaagcaagccgacggtgaagatagctgatgttagggccgatgaagcagaggtgctggtgatgatgttagtgacaataatccatcaaattgttgttatagctgttgcagatgcttcacttggaggaaagtag

SEQ ID NO: 32009 - DNA, 267 bp, Oryza sativa
  Clone ID: PAT_MRT4530_36260C.1
gaaaaatgcggaaaaatgaatgcaaatttttgggtggtttacaaaaagtatgaaaaaacaagcttttaaatttgaaattataccgcaaaaagaaaatttggataaaaagttcccagtccgaccaaaaactaaggaattccttgataggaaaccccaaagtaggaagtccagggttttttgagacgctgtaaaaaggttttaaatggaggtattccctttataggctttcttttttgatgtcgcaaagttaaaaccaagaaatatctg

SEQ ID NO: 32010 - DNA, 1584 bp, Oryza sativa
  Clone ID: PAT_MRT4530_36261C.1
atggatctcgacaagtctacctccaccagcgcgtcgctgaagaaactacaggaggatggcgcccttcccggtcgcgggaccatggagagagaagcaggaggtttgaacagcgaaaccgtggagcgccgcgtcggccaattgatgatcagcggcccaacaacggcgagcaacgtccccgtccccctttgcgagaagggggcagccgaacgcgaagctgccatcaatgctctccctctgactgatatcatcgggccgctcgtggaccatcaggcggcggcgtcgctgaaggagaacgtcgccaaggaggcgtctgatgttgcagccgctgttgccacaacgagtagcggcaacgttccgaaaagggggaggaaattctcctccgtgatcggaaatcatcgaaagacgcccaccccctcggcctcggatgcttctcccccatctccacaacggcagcggcttgtgacgcttggcgagaaggtggcgcgggcgaaagcggcgcaagacggatctggagggacttccagcgcgtctcctgccgtggcctcgacagatgtcgtggtcatgcccaggagccgcgaggtgacgccgagcggcctagccagcgatatcgcggctggtcggggtccgtcggctgccgtcctcacatgggaggagctccaggtcgagatggggcgcctccttgaggctagtgctcacggcgttagccgcgagatcgcggaggcgagggcggcggcggcatcgtcggcgaatgagcgcgccgaccggctaacgtgtgatctagcggaggttagcaaggaccttcagaagatgagggaactggtggccggcaacgagcgacaacggcaggggctcgagcaccgtatgtcggaactcgagaacaacttgtcggaaatccgtggctcgctgtgggtcacctacactgatgttgatgtcgaggatgtccagcagcgcgggcagtctgagttgccagtgatcgttccggcacttgcgttcgagccacatgtgccgcagggcgatgtagatcaaaattcgcctgtggaaacgggcatggcgatgacttccttagacctcgagagtgcgcttgctgaccaagatcgtcgcatccaatattggagcacgaaatttgaggtagcggaactcgagaggactatgctggaagtgaagaaggaccaggccgtggaaacactccgaggtcgcgaggtgtggttcagctcgtacctgaagagttgctgcacgtccatgacaagagtctgtagagagctccgagtaccccgtggggatcccgaggaatcggcggccggatacatctcgtggctaaatggggcctgcgcccagctcgaagacatcggcaagcgtatcgacgaggccctgaagcaggagtgccgtcgatcgagccgatatgccggggggcatgtattggcttgcatacgagatcatcatccgcagctgcacctcgagttcctccatgaagggttttctcattctcggagaaatcctacggagatagatcacttggcgaagtcgatggcgccgctggcgaagaaggtcttccagtccatggactggcgttggccttcctggtag

SEQ ID NO: 32011 - DNA, 561 bp, Oryza sativa
  Clone ID: PAT_MRT4530_36262C.1
atgcatctgaaaactcatcttatccgctcgaatccaggatgggaggattcgacttattgccatgtttacttagaattcagcgtattagggcagtcagaaatgctgcttctgcagtacatgatgaagtacgaagtggaatgtcaactgtatatctactgggtactgactacttggttggaacttggtcacttggactgtgaaggtacggtgatttgcaattattcatcacttgaagtcttagctgacaccaacgcgagtccattttctggcgctttttcttgtcacttgttggcttgtggcctgctggtccatgcattctctgatttcaccaaggacatttgcaatttcactgttgttgcattatatggtacttatgatacactgcatcccgagaccattgaacagtgtagagctagtacaggagagaaacacggatctgagtcttcacttcttgtagtcaaccaggcattctctgccgtggtacatgctgttggtcgagcaaccaatggttatgtccagaccttgaggcagtacaaaactggaggtcatcctgataactag

SEQ ID NO: 32012 - DNA, 2600 bp, Oryza sativa
  Clone ID: PAT_MRT4530_36263C.1
ctagaaatttccggcggccatctctctcctttcctttgaattcgcaccgtcgaaggtgcgcctatttaagggagttttgggaatccaagttgaagcccgtttgttgtgaaaaaactctccagccttcgaacgtccctcattttttctgctcccacaaaaaaccttacctagctcatctcggtcctttctccggtgatccccggcagaaatggatctcgacaagtctacctccaccagcgcgtcgctcaagaagttgcaggaagatggcacccttcccggtcgcaggaccgcggagagagaagtaggaggtactgaaccccagccagtcctaggtcgcatggttgcgatcgaggactttattctctgtggttttcttcctccaccttctgaatttcttctcttggtcttgaatttctatggtctttccttcctccacttgaaccccaattccatcgccttcttgagtatgttttcgcatctttgtgaggcctacattggggtagagccatttcttgacctcttccgcttttactatgagttgcgctggatggaatccaacagggtatctggatgcgtcggtttccgactccgggatggcctaaagtcgcgctatatccctttccggtgcccttcttctcacagcaaatggtgggggaggtggttctatcttcaaatagaagattcggatccggtctttattgttcccgaggagcaactagacaagatcccgtcttagactacgaaacccgccttgataccatccctccaatctttcatagatatcattgatgacctccgagtacgggggttgtcggggtgtgaagtcgctgccgacttcattggtaggcggatccagccgctccaggctcgagcccatccagcctttaattattctgggctggaggacgcgacctaggtttctcctcggggtttggatagtgcaaccgtgaagcgccgtgtcggccaactgatgatcagtggtcccactacggcgagcaacgtccccgtgcccctttccgagaaaggggcggccgagcgcgacgctgccatcaatgtgagtgtactcagcggtccttttgcgtttttcttccgagatcgtattatgactttgttaacaaccaaatttggatataaggggaggacattctcctctgtgatcggacatcgtcggaatccgcccaccccctcagcctcggatgcgtctcccccgcctccgcgacggcagcggcttgtgacgctcgacgagaagcagtgcgtctcggcgagaagtaagtgaatgtccggagggacttccagcgcgtctcctgccgtggcctcgacagatgtcgtggtcgtacccaggagccgcgaggtgacgccgagcggcccagccggcgatccctcggctggtcggggtccgtcgactgccgtcctcacatgggaggagctccaggtcgagatggggtgcctcctcgaggctggtgctcgcggtgttagccacgagattgcggaggcgagggcagcggctgcgtcgtcggcgaacgagcgcaccgatcggctggcgcgcgatctggcggaggttcgcgaggacctccagaagatgagggaactagtggccggcaacgagcgacaatggcaggggttcgagcaccgcatgtcggagctcgagaacaacttgtcggaaatccgtggctcgtttcgggtgaccaatactggtctgcaccagctcaccggggagtgcgatatcaagtccaccatcccggtgaatcccgattagttctcgctgacgtcttctcttgcgaagctagtgacggcgatggaggagatcccctcaaagcatgcggccaggatcggagaggagacgtctaacgggatctacaccggggcgtgccacgtccttgcgtgtgtgaggctggcgctccctaaactcgatctgcggaagatcctggatcagggggcggctagcgacgcgcggaaggatgtgatggaggaggtcggcgatctgggggaagatgttgatgtcgaggatgtccagcagcgcgggcagcctgagttgccagtgatcattccgttacttgcgtccgagccacatgtgctggagggcgatgtagatcgaagttcgcctgtggaaacgagcatggcgacgactccctcagatctcgagagtgcgcttgctgaccaggatcgtcgcatccagtattggaggacgaagtttgaggtcgcggaactcgaaaggactatgctggaagtgagaaaggaccaggccgtagagacactcccgggtcgtgagtctgtagagagctccgagtaccccgtggggatcccgaggaatcggcggccggatacatcttgtggctgaacggggcctgcccctagctcgaaggcatcggtcattgtttcgacgaggccttgaagcaggagtgtcgtcgctcaagccaatatgccggggggcacgtgttggcctgcatacgagatcatcgtccgcagctgcacctcgagttcctccgcgaagggtttctcattctcggagaactcctacagagatagatggccaagcgaagttgatagcgccgctggcggagaaggttttccagtcgatggactggcgttggccttcctgg

SEQ ID NO: 32013 - DNA, 978 bp, Oryza sativa
  unsure (1)..(978): unsure at all n locations
  Clone ID: PAT_MRT4530_36264C.1
atggatctcgacaagtctacctccaccagtgcatcactgaagaaactgcaggaggatggcgcccttcccggtcgcggggccgcggagagggaagtaggaggcttgaatagcgcaaccgtggagcgccgcgtcggccaactgatgatcagcggcccgacaacggcgagcaacgtccccgtccccctttgcgagaaaggggcaaccgagcacgacgctgccatcaatgctctccctctgactgatatcatcgggccgctcgtggaccatcaggtggcggcgtcgctgaaggagaaggtcgccaaggaggcgtctgacgctgctgttgccgctgccacgacgagtggcggcgacgttccgaaaaaggggaggaagttctcctctgtagtcggacatcgtcggaagacacccactccctcggcctcggacgcgtctctcccgcctccgcgacagcagcggcttgtgacgctcagcgagaacctttcgcagggcggtgcgagcaaaggcggcgcaagatgggtctggagggacctccagcgcatctcctgccgtggcctcgacggatgtcgtggtcgtgcccaggagcccctccaaatcgcngaggcgaaggcggcggctgcgttgtcggcgaacgagcgcgccaatcgactggcgcgcgatctggcggagctcgccggggagtgcggtatcaagtccaccatcccggcgaatcccgatgagttctcgctgacgtcttctcttgcggagctggtgatggcgacggaggaggtcccctccaagcatgcggccaggatcggagaggagacgtctaacgggatctacaccggggcgtgccacgtccttgcgtgtgtaaggcttgcgcaccctgaactcgatctgcggaagatcttggatcagggggcggctagcgacgcgcgcaaggatgtgatggaggaggtcgacgatctgggggagtccgtcctcccgctttttgaagagtag

SEQ ID NO: 32014 - DNA, 198 bp, Oryza sativa
  Clone ID: PAT_MRT4530_36265C.1
atggcgatggcggtgggggaggtggaaggagtggtgacgagggatcataggggtggcgtggggatgcgtgtggcgcggtcgcaccggatccgggttgcgggccgcttttgcggcggggccatcgctgtggccggaaataactcgaactccgcgccccggcacctgggccccccgcgcccgcggggctcgggtggttag

SEQ ID NO: 32015 - DNA, 295 bp, Oryza sativa
  Clone ID: PAT_MRT4530_36266C.1
cgcttctctagtgccccaaggggatgaggacgctgagcacagggctggctctgagcacactggtgctgagaggcttggcgaacgaggaggtaggagaagacgtccacaagctcaccggtgaacatcacccctggctggacccagacctgaaccaggtgcaggtagccatactgtactgagtcctggacggagcctgactggacaacctccaggtatacatcggctggcgaggcacacacaagcacaaaacactttcttcacccagacgggcgctaggaagcatgtgcccaaggcc

SEQ ID NO: 32016 - DNA, 3102 bp, Oryza sativa
  Clone ID: PAT_MRT4530_36267C.1
atggatctcgacaagtctacctccaccagtgcgtcactgaagaaactgcaggaggatggcgcccttcccggtcgcgggaccgcggagagggaagtaggaggtactgaaccccagcctgtcctgggtcgcatggttacggttgaggactttattctctgcggttttcttcctccaccttctgaatttctccttttggtcttgaatttctatggtccttccttgctccatttgaaccccaactccatcgccttcctgagtatttttacgtatctttgtgaggtctacattggggtggagccgtttcttgacctcttccgcttttactatgagttacgctggatggaatccaaaaaggtatccgattcggatccggtcttcgttgttcctgaggagcaaccagacaaggttccatcttggactaccaaacccgccttgacccagtccctccaatctttcatcgatatcgttgacgacctccgagaacaggggttgtcggggtatgaagttgctgccgacttcattggtaggcggatccagccgcttcaagctcgagcccatcctgcctttgattattctgggccagagggcgtgacccgggtttctcctcggggcttggatagcgcaaccgtggagcgccgtgtcagccaactgatgatcaacggcccgacaacggcgagcaacgtccccgtccccctttgcgagaaaggggcagccgagcgcaacgctgccatcaatgtaagtgtactcagcggtccttttgcatttttcttccgggatcgcattatgacttcatgaagcgtaggctctccctctgactgatatcatcgggccactcgtggaccatcaggtggtggcgtcgctgaaggagaaggtcgccaaggaggcgtctgactctgctgctgccgctgccacaacgagtggcggcgacgttccgaaaaaggggaggaaattctcctctgtagtcggacatcgtcggaagacacccacccctccggtaagttctcctgttatttgatcaccctttcgcagggcagcgcgggcgaaggtggcgcaaggtgggtctggagggacctccagcgcgtctcctgccgtggcctcgacggatgtcgtagtcgtgcccaggagtcgtgaggcgacacctagcggcccagccagcaatctcgtggctggtcatggttcgccggctgccgtcctcacctgggaatagctccaggttgagatggggcgcctcctcgaggctggtgctcgcggtgttagccacgagatcgcggaggcgagggcggcggctacatcgtcggcgaacgagcgtgccgatcggctggcgcatgatctggcggaggtttgcaaggacctccagaagatgagggaactggtggccggcaacgagcgacaacggcaggggctcgagcaccgcatgtcggaggttgagaacaacttgttggaaatccgtggctcgttgcgggtcacctatactggtctgcaccatctcgccggggagtgcggtatcaagtccaccatcccgacgaatcctgatgagttctcgctgacgtcttctcttgcgaagctggtgacggcgatggaggagatcccctccaagcatgcggccaggatcggagaggaaacgtctaacgggatctacaccggggtgtgccacgtccttgcgtgtgtgaggctggcgcaccctgaactcgatctgcagaagatcttggatcaaggggtggctagcgacgcgcgcaaggatgtgatggaggagcattttgatctcgagtactttgttgtcctttgtagagatgttgatgtcgaggatgtccagcagcgcggatctcgagagtgcgcttgctgaccaggatcgtcgcatccagtattggaggacgaagtttgaggtcacggaactcgggaggactatgctggaggtgagaaaggaccaggccgtagagacactccggggtcgtgaggtgtggttcaactcgtatctgaagagttggtatcgacgaggccttgaagcaggagtgtcgtcgctcaagccgatatgccggggggcacgtgttggcctgcatacgagatcatcgtccgcagctgcacctcgagttcctccgcgaagggtttctcattctcggagaactcccgtcggaggacgtagtcgccgatcgaaagtgtgcgtgctcggatgcgcttctcgtggtaacggcgaagggcctgctggtagccggctgctctgacggcaactctttctcgatgttcctcgagtagattcacatcatcgcttcgcttctcctcctgctcctcatcggagtacttctgtactcgtgtgctctaatgtcgtagctccgtagggagcatagcctctgagccatacacgagaaagaagggtgtctccttattggatgttgtcagtgtggtactcacggcccataggacagagggaagttcttcgacccacttcttgtcgtgtgacatgagtctgtcgtagacgtgggtcttgatcccttgtagtactatgccgtttgccctttcgacttgtccattgttctgggggtgagaaaccgaagcgaagcaaatcttgactcccaatctaatgcagtaatcctggaaatcggcctgatgaactgagagccgttgtctgttatgatgcggtgaggcaatccatatctgcagaatatccctttgataaacttgatggcattatcggccttgatttccccgtgggcgtcgcttcaatccacttggtgaatttgttgatagccacgaacaggaacttgtagccgccctgtcctcgttggaatggtctgagtatatcgagcccccagcacaagaatggccaagtaagagggatagtctagagcgcttgcgctggcagtcttgtgtgtttgctgtgaaattgacaggcttcacaccgctacaccatgtcgcaagcgtctttgagggcgttcagccagaaaaatccttgtcgaaaggcttttcctaccaacgtccgtccgccggcgtgtgacccgcagatcccgctggtttagagtaagttgatggagctgccactgttgatgagaacctgtgcgacaaaaattttcttttcgcgaactaaacaggcctttacaataatttttc

SEQ ID NO: 32017 - DNA, 636 bp, Oryza sativa
  Clone ID: PAT_MRT4530_36268C.1
atggcggcggcggcgacgacgacgaagacgcaccgacgcgctacatccgccttcgccgccgacgaagccgctccagggcaaacgcgcggacgcgctaccgccgctgctgctgacgcgcaacagtcgtcgctgccgacggagccgctcctgggcagacgcgctaccgccgccgccgccgacgcgcggacacgctaccgccgccgccgtcgacagagccgacgactcgtctcggactacgatttggtccagacctgcaatgaaacacattcattgattttaccacatattcttagcgggctacagcagctgcaccacagactacaagcggtgagggcagatggcttgacgccgccgtcctcctccccccacgacggcgcgctcgccggatccgggcgcgggctcgccggatctggctgcggcggttcctcgacgccgccgtcctgctccacccacgatggcacgtacaagctcgctgacggcgtggcgagcttggcggcagcgggctcaccggatccgctggcgggaagcagcgacgacggggaagcggcggcggcagatctggcggcggcgggaagcagcgacgacgaccacggcagctgcggcagatctagcgaggcgacgacgaccacggcatag

SEQ ID NO: 32018 - DNA, 597 bp, Oryza sativa
  Clone ID: PAT_MRT4530_36269C.1
atggtctcgcaggctatcagtgagcttgcagaggaaccggcgcaagcgctgcgcctggactcgggagccacgaagccacaagccgaagcctcgtgttggaggagtcggcgccccgcgcgttgcctcattccgtcctcctatgccgtggtcgtcgtcgcctcgctagatctgccgcagctgccgtggtcgtcgtcgctgcttcccgccgccgccagatctgccgccgccgcttccccgtcgtcgctgcttcccgccagcggatccggtgagcccgctgccgccaagctcgccacgccgtcagcgagcttgtacgtgccatcgtgggtggagcaggacggcggcgtcgaggaaccgccgcagccagatccggcgagcccgcgcccggatccggcgagcgcgccgtcgtggggggaggaggacggcggcgtcaagccatctgccctcaccgctgctccccatcgccgtcagatccgccgccgccgccaccgctgctccccgccttcgctagatccgccgccgccagagctcaagcggcgccgatctgccgccgaaggcagagggaaaagagagagcggcgaggggaggggagaggagtag

SEQ ID NO: 32019 - DNA, 507 bp, Oryza sativa
  Clone ID: PAT_MRT4530_3626C.1
atggcagcgacgaaactaacttcttcgagacatcttcaactgagaagaacttccgctctggaggaggaggtggcgctggcatgcgggccccacgcggtagaggctcaaggggaggaggaaggcggcctggctcggctcggcttcaagctggccggccggttatggcgagagcggtggcgcgcgcgcgtcgccggcgacgacaaccggcggctagaggcagcggcgggcgacgacggcggacggcggcggcaagtgatggacggcggggcgcgcgggatggacgagacgggcctcgacctcgcgaggccgacgacgacgacgaagtggctcgacgcgcgtggtgagagcgacgccgcggcggcgcacggcaagcgagcggcggccgggatagctcccgtgacggcgaagctagcgcggcgaatgcacggcgtggcggcggccctagcagcgacttcgtgcggccggagctcggtagcgagcggcggcactagtagcgagtggcggcac

SEQ ID NO: 32020 - DNA, 198 bp, Oryza sativa
  Clone ID: PAT_MRT4530_36270C.1
aaccggggtcaacagtctgcgatccttagaagtccaacagaacactggatggcaacacgacaggtatcaccagaggtatcaacagggatcatgagctggtgtgtgatgctctccaccgtggaacttctaagtgcacaagggttcctcttcatgggggtcatccatctccatccacagcaggtatccaaacatccaaca

SEQ ID NO: 32021 - DNA, 1887 bp, Oryza sativa
  Clone ID: PAT_MRT4530_36271C.1
atggcggtgtacagcaagcagggcaggtgcggtggtgaccggaggccaaggcacaagattacaaagggaatagcggaactcgatgataccgacgagatcgtaatcgatcaggctctccctctgactgatatcatcgggccgctcgtggaccatcaggcggcaacgtcgctgaaggagaacgtcgccaaggaggcgtctgatgttgctgccgctgctgccacaacgagtggcggcaacgttccgaaaagggggaggaaattctcctccatgatcggaaatcgtcgaaagaggcccaccccgtcggtaagctctcctggtccttcatcgcgtagtcggaaaacttccacctcacatcatgcccgttatactccaggcctcggatgcgtctcccccgcctccgcgacggcagcggcttgtgacgcttggcgagaacctgtctcaattgcagcctttcacagggcgacgcgggcgaaggcagcgcaagacggatctggagggacctccagcgcgtctcctgccgtggcctcgacggatgtcgtggtcgtgcccaggagccgcgaggcgatgcctagcggcccagccagcgatctcgcggctggtcggggtccgtcggctgccgtcatcacctgggaggagctccaggtcgagatggggcgcctccttgaggctggtgctcgcggcattagccgcgagatcgcggaggcgagggcagcggcggcgtcggcagcgaatgagcacgccgaccagctgatgcgtgatttggcggaggttcgtgaggacctccagaagatgagggagctagtggccggcaatgagcgacaacggcaagggctcgagcatcatatgtcggagctcgagaacaacttgtcggaaatccgtggctcgctgcgggtcacctacactggtgtgcaccagctcgccggggactgtggcatcaagaccaccatcctggcgaatcccgacgagttctcgctgacgtcttcgcttgtagaactggcgacggcgatggaggcgatcccctccaagcacgcggccaggatcggagaggagacttctaacgggatctataccggggcgtgccatgtccttgcgtttgtgaggctggcgcaccctgaactcgatctccagaagatcttggatcagggggcggctagcgacgcacgcaaggatgtgatggaagaagtcggcgatctgggggagtccgtcctcccgctttttcaagaagatgttgatgtcgaggatgtccagcagcgcgggcagcctgagttgccggtgatcgttccggcacttgcgttcgagccatatgtgccgcaaggcgatgtagaccaaaattcgcctgtggaaacaggcatggtgacgacttccttagacctcgagagtgcgcttgctgaccaagatcgtcgcatccaatattggaggacgaacgttgaggtagcggaacttgagaggactatgctggaagtgaagaaggaccaggccgtggaaacactccgaggtcgcgaggtgtggttcaactcgtacctgaagagttgctgcacgtccatgacaagagtctgtagagagctccgagtaccccatggggatctcgaggaatcggcggccggatacatctcgtggctgaacagtgcctgcgccaagctcgaaggcatcggcaagcgtatcgacgaggccctgaagcaggagtgccgtcaatcgagccgatatgccggggggcatgtattggcttgcatacgagatcatcgtctgcagctgcacctcgagttcctccacgaagggttttctcgttctcggagaaatcctacggagatagatcacttggcgaagtcgatggtgccgctggcggagaaggtcttccagtccatggaatggtgttggcctccctggtag

SEQ ID NO: 32022 - DNA, 319 bp, Oryza sativa
  Clone ID: PAT_MRT4530_36272C.1
ctggatctagaaaggaaggacgcttaataagggagggggtgatatagaaaggcgggtgatttaaccaccccggggccgtggcaattgacgccaccgggggagcaaaaattgtaggagcggccctgaggcagacccagttcgacagccctcttccatggatgcagcccactggcaccaggggctagggctggcgaagcccatggaggagatgctgatggcagcgaacgcggccgccggcgcgaaaccgaatccagccgcgacggcaccgtcgtccgggactgggggcgcactgaggggcggcagactgctgtggcgcccc

SEQ ID NO: 32023 - DNA, 523 bp, Oryza sativa
  Clone ID: PAT_MRT4530_36273C.1
gttcgacagtggagttaccttcaatcccactgaaagacaaatcttttttattccagcttttcaagtgttcgtcaagcaattttctctaacgttgcactattttcatggcaagtgtgtaacagggacctataaaaataggccatatcattattgctgatattattcttaaaatttgaagtgttgatatatttattgcgacaaatgctgttaaactacgtgcattgcacgtgcacaattactagttgtaaaaaaaaggacgacaaaatccaatacaacttcggcgcatcaccacccttttgttcttctcttcggcgagttctctcgacaagaggtaacttgattcgatgacttgtactatcggggctattatgtccctttagatgtttagcccttttatcatgaccatctgctattatatgtcttagttaatctagtcttagtatctcgatttagccctattggccagttctccctttagggttctcgccgatatcagctaaattgttttgctagattatattag

SEQ ID NO: 32024 - DNA, 401 bp, Oryza sativa
  unsure (1)..(401): unsure at all n locations
  Clone ID: PAT_MRT4530_36274C.1
cccacgcgtccggaagaaggttcagacccagtcctcgacgaagnngaaagaggaccgttgctctttcttgtttaagaagactgttttcctttctctgttgaacctcctgacctaccacttttgtcattgagggcatcaccaccccgcaccctcgaactaggtgggcggccactaccacttggtctacgtcaaccaggacttatgggagtcctaacttccaccgtgcgcccgttaagtccttcagctttcgcctacgctgttgcgtgactactacctgaggatatccttccccatcatcgatgtgaacacgtggagtactactacgtacgtaccggatggttcggtctatcttaatgctgaattaaggaataacaagacatatatctcctctacttttttct

SEQ ID NO: 32025 - DNA, 1398 bp, Oryza sativa
  Clone ID: PAT_MRT4530_36275C.1
atggcgagcgcccgcgcgcgcggcgggcgagccttcttcctcctcgtactcgtgctcgtcgtcctcgcggcgcccgcggccgcgctgcggacgtcggccatctccgcggcgccggagtacccgcggctccccaccgggccgggccacggcggcgggaggcacgcggcgcccgcgcccgcggcggtcctcccgccggcgccggcgctctcgccggacataatgccgctgctcccgtccccggggcccgactccgacggctccgccgaggcgccgtccgacgtcatgcccaccatcccctccagcccgagcccgcccaaccccgacgcgctcttgccggactccgcgctcgccccgttcggctccgcgcccgccgtcgccgcccagtcccgcgcgccgccgccgtcgacgacgacggcggcggcggcggcgtgggcgctccccgtggccgtggggctagtggccatgtggttgatcgcctcccctctcgaccccttcctcctccaccaactcacagctcgctttcaccatgcaccggcggatgcccaccacctgctcgacgaaacgccgcgcagagccagctccatcgtgcgcgcgctcggcgcatgcaggggcgcgtcacgcgaggaagcggacggcgtcgcggccctccactgcgcggctctcaagtcgggggccgtgctggatccgcccgtgcgcacgtccgtcatcacggcctactcccgggtgcgcgacgtgtgctccgctctgcaggtgttcgacgaggccgctgcaccggacttgatcctgtggaatgccgcgatcagtgctttgacgttgaactgccgttatggcgatgctgtggtccttttccggtggatggtggacgtgcttggggtgattgattcgacgtcaatggtcattatgctgtcgggggcgtcccgtgcaaggagcttggagcatgggattgcctttcatggaatggcactgaagagatgcctagacactgatctgagcctttggaatactctcatggacatgtatgcaaagtgtggggatttttactcttcggaggttgtgtttcagaggatgccatatagggacactacatcatggaattctatggcagatgaggtgagcctgtcttgtgtcctttcagcttgctctcatctcaaggacctgttctcctttggggagtctgtccatagctctgtgatcaaactcggttacgaagacactaccagttcggtggcaaattccctgataacattctattatgagcttgggtttccagaggctgcagaggaggtatttctaagcacttccaacaaaaatttggtaacatggaatgctatgatcaaggggctgcttgtggtgatcatggcctacttcctgaagggaaagaagtccatggatacataa

SEQ ID NO: 32026 - DNA, 2751 bp, Oryza sativa
  Clone ID: PAT_MRT4530_36276C.1
atgctacgccggactccccgactgctcgccgccgtgaaccccgccaccgcggttcgctccacagccgcgctcgtccagatcgcctcccctctcgaccccttcctcctccaccaactcacagctcgctttcaccatgcaccggcggatgcccaccacctgctcgacgaaacgccgcgcagagccagctccatcgtgcgcgcgctcggcgcatgcaggggcgcgtcacgcgaggaagcggacggcgtcgcggccctccactgcgcggctctcaagtcgggggccgtgctggatccgcccgtgcgcacgtccgtcatcacggcctactcccgggtgcgcgacgtgtgctccgctctgcaggtgttcgacgaggccgctgcaccggacttgatcctgtggaatgccgcgatcagtgctttgacgttgaactgccgttatggcgatgctgtggtccttttccggtggatggtggacgtgcttggggtgattgattcgacgtcaatggtcattatgctgtcgggggcgtcccgtgcaaggagcttggagcatgggattgcctttcatggaatggcactgaagagatgcctagacactgatctgagcctttggaatactctcatggacatgtatgcaaagtgtggggatttttactcttcggaggttgtgtttcagaggatgccatatagggacactacatcatggaattctatggtaagtggaagcttatttaatggacttgctgagatttcagcatattacttcaaggaaatggtccgttccagttttcaggcagatgaggtgagcctgtcttgtgtcctttcagcttgctctcatctcaaggacctgttctcctttggggagtctgtccatagctctgtgatcaaactcggttacgaagacactaccagttcggtggcaaattccctgataacattctattatgagcttgggtttccagaggctgcagaggaggtatttctaagcacttccaacaaaaatttggtaacatggaatgctatgatcaaggggctggtagagaatgatagagttaatgaagccatgtgtatgttccaagaaatgagatcaaagaaccagccagatgttgccactttagtgactataatttcagcttgtggtgatcatggcctacttcctgaagggaaagaagtccatggatacataataaaaaaaggacatatttacgaggagtgttctgtaggaaatagcttacttgatttgtatatgaaatgcaatgacccatctacagcacgcattttgttcaggacaatgccaatgagagacctgatctcatggaacacaatgatttctggttactcaagaaacgattcacttggagaagaggctaaagctatgttcaaaggactactatctgaaggcctaagctgcaccttgagcactgtggtagctgttataccttcatgtttttgtccacaagaccttaactttggcaagtctgttcactctttcatcctgaagtatgggtttctgactggagtttcagctgctaactctctgatacacatgtatatatgctgtggtgactctctggccgccttttcactgctggaaagcataactcccatatcagatattatttcatggaatacagcaattgtgggctgtgtacaaaatggactctacggagatgcgttagaagcctttcagtttatgcattcaacgttaacactaaatcctgatagcattacattagtcagtgttttatcagtatgtggaaacctgaaactgcagtcccttgggaagtccatccactgcatggcgctaaagcgcttgattgaattcaatttaagggtaaagaatgccctgcttaccatgtacttccgatttggagatactgaaagtgctgagttaattttctctagtctcgttggtagaaatctgtgctcctggaattgcatgatctctggttttgcacagaataacgaaggcttgagggcatttcagttctacaagaagatggaggattttgaacccaatgaaatatctattgtcggcattatctgtgcttgcactcaacttggggatcttaggcaaggaaagaacattcatgggcatgtggtcaggtttggtctgcaaactaacgtttttatttcagcatcacttgttgatatgtatagtaagtgcggaagactggacatttcgatcagagtatttgaatcttctgctgaaaaatcgattgcttgctggaattccatgatatcagcttttggattccatgggcttgggttgaaatcgattgaaattttctggaagatgaataattctggagtgaaagctacaagaagtacttttattgctctgttgtcagcttgcagtcactctggacttactgatgaaggattgaagtactaccatcttatgatagaacattttgggattatcccaaccccagaacaccatgtctgtgttgtagacatgcttgggcgtgctggtcggctgcaggaagcacataagtttgtggagagtttaccatcgaaacaagcacatggagtctggggtgcgctgttaagtgcttgcagcaagaaatctgaactgaagatgtgtgaatccgttgccaagcatttgctctgtctggagcctgaaaatagtggatattatgtgaccatgtctaacctgtatgcgtatcaagacatgtggagtggcgcagtgcaagtcagggacattttgcaagataaaggattgatgaagccccgtggccgcagcatcatcggttaa

SEQ ID NO: 32027 - DNA, 519 bp, Oryza sativa
  Clone ID: PAT_MRT4530_36277C.1
atgcaggatccggaggaggaggacgacgatcagcagcagcagcatccggcggccaggaggtgcgccgcgtgtcggtacctgcggcggagatgcgccgacgactgcgtgctcgcgcccttcttcccggcctcccgcccacaccgctacgcctgcgtgcacagggtcttcggcgccagcaacgtcgcgaggctgctccagagcttgccgatggcggagaggggcaacgcggcgaacacgatggcgatggaggcgtactggagggtgcaggacccggtgtacggctgcaccgggatcatcaaccgcctgcaggaggagatccgagccgtccagtgcgagctggccaggacgcaggctcacctcgccatcgccgtcgcttcctcccagcaacctccacctccacctcctccgccaccattgccgtcgccgccgccgccgccgccgccgcagcagcaggaggagcagtcgccgccgccgttgctggatccggccgacgagttcctcaacctcgatggactttga

SEQ ID NO: 32028 - DNA, 279 bp, Oryza sativa
  Clone ID: PAT_MRT4530_36278C.1
atgtggaaggtcgccgccgacgcggcagaggggtggggcggctggatctgcgcgtcaatcctgctgccgaagacggcgtccgtcgtcgccaacctcgtgcgtcatcttcgaggtccaaagtcggcgacgccgccgacactcgcggcacctagaatgctcaacctcgttgtcgacgcggtgacggcgcagttggcttcgcgctccgccgacggcgtgccccactctcaccgcgaggccagtttcccctcctcctcagctgtcgtggaggacgtcgcctaa

SEQ ID NO: 32029 - DNA, 429 bp, Oryza sativa
  Clone ID: PAT_MRT4530_36279C.1
atgtgggccccccttgtcatcctctctctttcttcttcctcccctcttcctctcctctctctttctctcccctttagctggccgggccaccggaggagcacgggctggagcggcggcgggtgggggccagagcggcggaagttgaagcggcggcggcggtgggagcgccgacggatggcgctcgccctgcagaccgattgcttcaccagcgacctgagccagctcatcgccgacgtgatgtccggctcgatggtggccctcgcccctaaccagcttgacaggctcgatgttggccatgtcgtgagcctgtcgcatacgccagatgcccggatcttgttgttgcaatcggcggagaggccagagcgccggatcttgttatcacggacggcgggaggcggcggagggagcaggaagctcgttccccggtga

SEQ ID NO: 32030 - DNA, 219 bp, Oryza sativa
  Clone ID: PAT_MRT4530_3627C.1
atgtgctgcctcatgcccatcagcacctgtgcatgcgtgtgtgtggagaggcagcagacgcaaaacgccgactggctagctactcctcccgctcctgcgtttgcagcagcagcgtttgcactgtactactactactggctggctagctgctccgaccagaatcagtgcgtggcgcacgcacgatggcgagcggtgtgggcttccatcatcatcatcaac

SEQ ID NO: 32031 - DNA, 366 bp, Oryza sativa
  Clone ID: PAT_MRT4530_36280C.1
atggtgactagtcgatttgggttaagtttgaagcccgtaactgtagcgcgagtcaagatgggattgcctccacatgttgtccgctcgcgagatggctgtgggtcgttatttgtttgcccaggccaatatcatcctgctaaaaagcacacaactgatgattcaaatttaggagatgaaaaagataccttcacaactaaaaagcacacgactgataaatcaaaattaggagatggaaaagataccacaacaaaaattctagatattggagaaggcgacaacgacggaggtggaggaggtggctcctgcagactgcggcaggcggtgatagatgtgatgggcaccggcatttatcatagcaagatatag

SEQ ID NO: 32032 - DNA, 2257 bp, Oryza sativa
  Clone ID: PAT_MRT4530_36281C.1
gtggcattcgtggcccgtgtgaacgcgtccctgcaccccgcaccggtgggggcccaggcgaaaccctaggctcgtcgccggcggcggcggcggcggcgaccggtggggagatggcggggcggcggccgctcttcgacctcaacgtcgcccacgaggattgggattgggagaagggggaagaggcggaggcggaggaggaggagcccgaggaggttgttgaggaggggaagaaggaggtggtagtgctcgaggaggaggaggaggaggaggagccccatgaggtgatcatggaggaggaggtggtggaggaagtggtggaggaggaggcggcggtggcggaggaggtggacggggaggtgaggaggaagaggaaggactgcgaggttttggtgggagggcttccccgggacgcggcggaggaggacgtggcgcgggcgctcgcggacgccggcgatgtggaggaggtgcggctcgtgcgggatccggcggacccgcgctccaacaagggcttcgccttcgtgcgattcgccgccgcctggcaggcgcggtgggctgccgacgacgtccgcacggccatggtattatttatccttgtgatttcattttgttgttggcttgcaagatttaaattagtggatgtggtatcagggcttttgattagtgttgaggaagtagatgtatggtgtcaccttcccactaaggtcctatgcaccaccctgctttcccgccaagtgccttatccaaacataattttaatggtcaagggagaagcttgtatgatatgcaagaatgatgcaaacgagacccttcatctgcggaatatatgctttgattggacaaaagatgatttagcggaggaactgaaaacttacaagttggaaaaccttgaggatattaatttagtcgaggatccggaaagaaaaggaaaaaacagaggctatgcgtttcttgatttccgcacaaatgttgatggtgtggatgctttttttaaactacagaacagagatatttatcttggtacggatgttcgagcccaagtgtccttttcaaaaactctttcactggatgataagattatggaaaaggtaaaatctgttttcttggatggcttaccacctcactgggatgaagacaaagtgagagaagtgtttggaaagtttggtgaaatcgatagtatacaccttgctaggaacatgtttaaagcaaaacgaaaagattttggtttcattggctttacttcaagacaatcagctttagattgcattagtacagttagtaaaggtggtattgttgaaggtagcggaaaggttcgaatcaaggcttctttacaaaggcccagacctactttgaaaaaacattcatggcaagggattactcccatgttgggcatcaggaggggatttattggaaaaagttatggtgatagagaacactatggtgatagggaacgctatgatgatagagaacgttaccataatagagaacgttatggtgataggggatttgggttttcaggccacatccacaggtatgagagggcaaggcccagggaagcatatcttgatagtcgatatactaatgaatacccaagacataggcactcaaggcatgaagaatccatccagcgagatgcatacaggagtaaatatggacactcctacctggagaggtcacacagagattcttgcccagattgtaatccaagtgatcatagttccagtgccttctataagacaggccgtaagttgatggcatcaagttcccctgggatgtgtaattgtggcgaatgctatgttgaacaagatgcagcccccgcaagctcccaagtggtgcctcttcgtcaccagttggccaaaccttttcatgagcgaagttctgagcctgatgaccactctgcttctgcctatgaagctgcggagtacaaagaacgcaagagcagcctggtgcggttcgtatgatccatcttccagagatggccccagtaatactcaccacaggaattaccgtagacaaggaagataggtccaagtaagcaaagctaagctttcgacaagatagagaagctgctcatggcagtgcagctgctgctagagctatacttatttagtagcgtcgagttaccattggtgcattggtggtgctcccccgatgcagaatcctcccaaaaggatttctggcttttgtgggcgttgcaatttttttcggccctgtggttgcgcacattttaccttgggatgccatggcatgtgatgtgaca

SEQ ID NO: 32033 - DNA, 5308 bp, Oryza sativa
  Clone ID: PAT_MRT4530_36282C.1
atgcatgcaaataatagcataatttactgaataggtatggatgcaaatggatctcctgtcgaaaggccgctttgtttcagagatataactaacagattaaatgtaaggcaaataacaccttgtaatgaagtagaaaacaagaaggaagaaactagcagaaaacgtgaataccgtgcatggaagaaggcagaagcaaataatccatatcatggtacattgaaccatcagccaactgcttctgtttttgtaaaacatgaaactggcaattcccagctagctaaattgtcaaatgaacaacgagaagaaaggaacagaaaagaacgtaaatatcgcaaaaggaagagggatgagatgaacaatgttgacataagtgtattatcaaacaccccaatgcaaaaacaaagagaagatagaaaccgaaagcaacgcgaatatcgtgcaagtaagaaggctgagtcaaacaatgttatcttagcaaattttgatgcaaccacccctattattgcatcatttgggactacatattctaccattttgcaagcatcgagtgttactaacaataaaaatggaaacatagatgatccaacggattgacttcatagaaatgatacctataaacgacaatacaagaagaggaaaccagtgatcattgaagaagataaagactcacctaccctagatggagttacacaagaagagactatccatgtgcaagatgcaaaagtacataccccagatgacacttacgtcgaatttgatagtggattacttgaacctccactaattgattttgtccatgaaggtgagtttgagactgcagaaatctatgacatcgcagataatgttgatgaacatttttcctctacatatgatgggtacaagtcatatcgtgtggatgttaagggtgttaatggtattgaagccaatgatgtacacgaccatgtatacaataaactgcccaagacacaccacattttaaagaaagtacctgattgtgagttttgcaacgcgataaggtttcagtatgagtctcctggattctgttgcaggcaggggaaaataaatgtacatgttccagaaatccttgccgagttaatacggttgtttaccagtcaagtgcataatgatgcaaagtattttagaaagcacatacggtatttcaactcccatttctcattcacgagccttggagttacccttgaccaacgagtcagcactgcagcgagaactagtgtgtatacatttcgtgtgcacggtgcgttgtaccattgcctggataatttggttccaggttctcaagggccgcgcaatatgcagttttacttttatgatacagaagatgctgatgcactggcccatagggttcgtaggtctcctgacgttgatctcaaccatgttcgggtcaatctacgtattttggagcaaaacccgtatgcacaaaccttcagcagatttggatccatgcccaatatagatgactacatgattgagctcaacactaatgtaacgcctgaccaaggaagatataatgcacctaccgcatcccaggttgctgctattaggttatagggggatgatccaatgagaacttttgatagacatgtcttggtacatacaaaaggtgataagccctgttatatcaaagcataccatggttgttatggtcctttggcgtatcctttatttaaccctaatggggagactcggtggaacctgaaaatgtggaaatggatgaatcatgtgaggcatcaactttaggtgatgtacgtaccaacgaagaaagcacttttcttgatcttccggagaacgaggttattgacaattatctagacaatgacaatgataatgacgatagtagcaaatcaggcaaaggtaaaaaagacaagtttgtcacagtgagggagtactattgctttaggctgcaggttagaaggggacttctaaacatcattttgttcagaggacgacttttctaacaatgggccgttgatatgtacatcaaatcaagtctatgagacttgattggtactcaaaaccagagaacaaaaaaaagattcggactgagctataccaggtaaatgatataacatatttccacaaatattgacactgtctcccatctatgattcaacatatcagttatttgatcatggtgttatttaatgactgcagggcgtggttgacgtgctttcttttggagagacaagcggttcagcggttggtaaaagggttgtgctacctcgatcttttcttggaggtgatcgcgacatgcagcgaaggtttctcaatgcgatggctcttatccaacgttttgggaggctagattacttcattacaatgacgtgcaacccatattgggatgatataacggaaaatctagaacctggccagctaccgcaagattgaccagatgttgtcacaagagttttcagggataagctgcgagatatgctggatctatttgtgaagaaaatatattttggggaggttcaggctgatgcgcatgtcactgagtttcagaagaggggactaccacatgaacaaatcttgttgatcatgaagtcaggaagtaaattgacaaccccagatgagtacgataaagtgatttgtgcagagatactagacaaggccaaataccctgagctacatcgtcttgtcattaagcatatgctgcacgaaccatgcggcgcactgaacaagaattgtgcttgtatggtggatggagagtgtcgcttcgactttcctcaacagttcaaccaagcaacacaacgggggaaggactcgtacccgttgtacaggaggagagatgacggatggcgtgtcaagattagtggtgcagtgctagataacaggtgggtggtcccatataatccagaattgcttatgcggtataactgtcacatcaatgttgaggcttgtgcaagcatcaaatctgtgaagtacctatataagtatgtgtacaaaggacatgactgtgcatctttctcggttgattcatctggggaaataaatgagatacaacagtacaaaaatgcgagatatgtgacaccaccagaggctatatatagaatgcttcatttcccactatttggtatctatccagctgttctgcagctccaacttcatcttcctaatatgcagtatgtcacatatgatgaggatggtaatcttgagaatgttgtcaataatcgatcttcttctaggacaactcttacggagtatttcaaaatgaatcaagtagacccggaagcaaggaaattgctatacaaggagttccccaaacattatcgttggataactggacagaatgtgtggcagaaaaggaaaacgaagagaggccaagttggacgggttgtgtacgctcaccctagagaaggggagagatactacttaggagttcttctcaaccacgtgcgaggtgcaacctcatttgaagatttgaggacactgtcaggtacaacgtactctacttttagggaggcatgcgagaagagagggcttgtggagacggacaaatcacaagacgattgtttgaatgaggcatccactttccaaatgccatctactttgcgtcggttatttgcaaccatactggtattttatgaagtcaccgatatccgtgcattatgggacaaccacaaggctgcaatgtctaaagattatagtagagggagcactaaccctgcagcagtagagcagatggtgctacgagacatacgtgatttgctccattccatggggaaggatatcacgaagtatggtcttctcgagatcattgatataggtattttttgaaacgacgtaatgacaaagattatagaggaacttaacgtgtcagtggaccaagaccatttagacatatgcacatcccttaatgatgagcagcgtgcaggatttgatgagatcattgatcatgtaactaataagaagagccatgtattttttatagatggctcaggtggcactggcaaaacatttttgtacaaggcgcttcttgctagagtgcggtcttaatagccattgcaactacgacatctggtatagcagcgtcgattttgcccggaggacgtattgcgcactcgagattcaaaatccctattaagattgctcacaacagcatgtgcaacttcaagaagcaaaatggcactgcaaagttgcttcgcatggcgtccttaattatttgggatgaagctgcaatgacgaagcgtcaggcagttgagactcttgatagatcccttcaagacattatgggttgttcattgccatttggaggtaatgtcattgtatttggtggtgatttcagacaagttcttcccgtggtgacacgtgggacaagggcacagataatttatgctaccttgcagagatcttatttatggaaaaatataaggaagatacgcctttcgcataacatgagggctctatatgacccgtggttttcggattatctacttcggattggaaacgggacggaaaacacaatcggagatgattacgtctgtctgcctgatgaaattgtcattggttatgtagacattgaagattcagtgaacacactgattgaatatgtgttcccctcgctcaatgatgagagaaatacaacctccgtggaatatatgagcacacgggccattctcttaacaaaaaatgattttgtagataagctaaacacaaagatgatcgacaggtttcatgacaaggaaaagatttaacatagctttgattcgtcgatgatgattcccaaaataactaccctttgaactttctgaacacgataactccaaatggccactctccacatgagctgaaagttaaggtcaactgtcctgttattctcctccgcaaccttgatcctaaaatggactatgcaatggaacaagactaatgatcagcacattccaagacaatgcattgatgctgaaatcgctggtggacatcatgcacgcaaaagggtgttcataccaaggatccctctatctccttcaaatgatatttcccttcctttcaagtttaagagaaagcaatttccaatacgtctaagtttcgcaatgacaataaataaatcacatggacaaaccatcccaaatgtcggtatctatcttctaaagcctgtattctcgcatgggcaattttatgttgcattatcaaaaggggtgtcaaggaaaacgacaaggattttagcaaagcataaaaaagaagtggaccccacaggaaggagcacaagaaatatcatgtataaagacgttcttgattgcataaatgatctcctattatctctcctgctcacttttttatccatattttctag

SEQ ID NO: 32034 - DNA, 864 bp, Oryza sativa
  Clone ID: PAT_MRT4530_36283C.1
atgcctgatgctaatgtcttctcaagcttttggattgtaagtctaatagtggaaccctttccttgtgggaattccatgaaagatattggtctccagattttaagattggtagatcctttcgtggctgccacttcaactgcagatcacgtgaacttctgtggactcacggcaggagctgtatacacctcattggtgatcatatatacgacctccgcggaatatatgagcacacgggccattctctcaacagaaaatgatttcgtggataagctgaacaggaagatgatcgacaggtttcctggcgaggaaaagatttaccatagctttgattatgtcgatgatgattcccaaaataactaccctttggactttcttaacacgataactccaaatggcctccctccacatgagctgaaagttaaggttaactgccatgctattctcctccgcaaccttgatcctaacaatggattatgcaatggaacaagattaatgatcagggcattccaagacaatgcaattgatgctgaaatcgttggtggacatcatgcacgaaaaagggtgttcataccaaggatccctctatctccttcagatgatatttcactttctttcaagtttaagagaaagcaatttccaatacgtctaagtttcgcaatgacaattaataaatcacagggacaaaccatcccgaatatcggtatctatcttccagagcctgtattctcgcatgggcaactttatgttgcattatcaagaggggtgtcaagaaaaacgacaaagattttggcaaagcctaaaaaagaagtgcaccccacaggaaggagcacaagtcactatgatgttatatctttttcaatttga

SEQ ID NO: 32035 - DNA, 534 bp, Oryza sativa
  Clone ID: PAT_MRT4530_36284C.1
gcaagatcaattggcgaacggcgacggcggcggcgacctggtggccagttggcaccttgtcgatttccttccaacctaccttccttctccctctatcttctccatcttccaccacttgtatcccttagttcatcctccttccacctctatttactggagtatggttgctattgtattggatgcttgcatatttgagtggaattgagatcagaggttggagttcctaacacaccgccaatgttcggccctgcgacatgaaaggtaggtttcctccaagaccagcagcaacggtgtataggctacacagatctacagccatgccatgctgagtcaggtccgatctacagccatgccatgcggaatcagggtgccgttgctctcctggtttggagatgtacagggaaaatggaaatggtacaggtatttcatattggcctacgaggtaatatttcttcactcggtaatctgttcaggcaatgaaaagttgtgcaatctcctgactctttcaggacatcgacataactactacatggg

SEQ ID NO: 32036 - DNA, 471 bp, Oryza sativa
  Clone ID: PAT_MRT4530_36285C.1
atgcggctggcttggtgggctggggtactgcggcgcccttccttgggtggcagcgtgacatatggtgcttgggggtggccggcaatgatgacccccgaggtggaggcctgcaacagggacaatgtgtgggccatgctagcatgtggggttaagcggaagatggctagcggtaggcttcgatacagtagtgttgatgtgctgacggaatctttgttgctaaaactgcactcagacagtttgggtgaagcccttgcatggtggcgggtcgtccttacgacggagaaggatctttcttctctctcaccctttgtccctccaaccatcctccggcaacgtctaggagcatatgctcagttgtttctagtaggcgttgggggtgcacctatagctctttcgttagtccagtggcagccggtcatgcttagcagtgtctggattagtgctagtcccttcctcgattgtgtgggatag

SEQ ID NO: 32037 - DNA, 352 bp, Oryza sativa
  Clone ID: PAT_MRT4530_36286C.1
gagaagccaatcacctcctccagcgtctctggtcgcccgcagcccttgacgccgtaccttattggtactatggcgaagggcgcggcgtgtggcgaaaactcttcgcccgcagcccttgacgccgtaccttattggtactatggcgaagggcgtgggtgtggcgaaacctattcacccgcagcccttgacgacgtaccttattggtactatggcgaagggcgtggcgtgtggcgagaagggtcccattttgccctttcggtctgggtatccccacggacggcgccagctgttgtcgaatggacaactatgtcacattgaaaggcgtggttctctcaacaatatttggaatgta

SEQ ID NO: 32038 - DNA, 575 bp, Oryza sativa
  Clone ID: PAT_MRT4530_36287C.1
gaatcacaagctgacggtgttggagcccgacgggaattacgtggacccgttcgccgtcgacgacatcgacaatctactccggcgacagctactccgtgctgctgacgacggaccagacacgtcgccgaactactgggtcagcgtcggcgtgcgcgcccgcagcccaggacggcgccagcgctgccgtgctcaactaccgccccaaccgcgcgtccaggctgccggcggcggcagccgccggccaccccggcgtgggacgacttcgcgcgcagcaaggcgttcacgtaccgcatcctcgccgcgccggcgtcacgccgccgccgccggcagacgtcggaccggcgcatcgagctgctcaacacgcagaaccggatggcggcgggcacgtgaagtggtcgatcaacaacatgtccatggtgctcccggcgaccccgtacctggggtccctcaagatgggctgaggtcggcgctcccgtcgcggcgagccgtccaacacgttcggcgcggtacaacgtacgcgccgctctagagaatccaagcttacgtacgcgtgcatgcgacgtatagctcttcat

SEQ ID NO: 32039 - DNA, 2223 bp, Oryza sativa
  Clone ID: PAT_MRT4530_36288C.1
atggttgcgatcgaggactatattctctgtggttttcttcctccgccttctgaatttcttctcttggtcttgaatttctacggcctttctttggtccatttgaaccctaattccatcgccttcctcagtattttttcacatctttgtgaggcctacattggggtagagctgttccttgacctctttcgtttctactacgagttgcgtttgatggaatccaacagggtatccggatgcgtcggtttccgaccttgggatggcctgaagtcgcgctatatccccttccagtgcccttcttctcgtagcaaatggcgggcgaggtggttctatcttcagatagaaaattcggatccagtcttcgttgttcctgaggaacaaccagacaagatttcgtcttggaccgcaaaacccgccttgaccccttctcttcagtccttcatcgatgccatcgatgacctccgagtacgaggtttgtcggggtatgaaatcgctgccgacttcattggtttgaacagcgaaaccgtggagcgccgcgtcggccaattgatgatcagcggcccgacaacggcaagcaacgtccccgtccccctttgcgagaagggggcagccgaacgcgaggctgccatcaatgctctccctctgactgatatcatcgggccgctcgtggatcatcaggcggcggcgtcgctgaaggaggacgtcgccaaggaggcgtccgatgttgctgccgctgcagccacaacgagtggcggcaactttccaaaaagggggaggaaattctcctccgtgatcggaaatcgtcggaagacacccaccccctcggtaagctctcctggtccttcatcgcgtagtcagaaaacttccacctcacatcatgcccgttatactctaggcctcggatgcgtctcccctgcctccgcgacggcagcagcttgtgacgcttggcgagaacctgtctcaattgcggcctttcacagggcggcgcgggcgaaggcggcgcaagacgaatctggagggacctctagcgcgtctcttgctgtggcctcgacagatgtcgtggtcgtgcccaggagccgcgaggcaacgcctagtggcccagccagcgatctcgcggctggttggggtccgccggctgccgtcctcacctgggaggagctccaggtcgagatggggcgcctccttgaggctggtggtcacagtattagccgcgagatcgcggaggtgagggcggcagtggcgtcgtcggtgaatgagcgcgccgaccggctgacgcgcgatttggcagaggttcgcgaggacctccagaagatgagggagctggtggccggcaatgagcgacaacggcaagggctcgagcatcgtatgtcggagcttgagaacttgtcggaaatccgtggctcgctgcgggtcacctacactggtctgcaccagctcgccggggagtgtggcatcaggaccaccatcccggcgaatcccgacgagttctcgctgacgtcttcgcttgcaaaactggccacggcgatggaggcgatcccctccaaacacgcagccatgatcggagaggagacgtcaaatgggatctataccggggcgtgccatgtccttgcgtgtgtgtggctggcgcatcctgaactcgatctccagaagatcttggatcagggggcggctagcgatgcgcgcaaggatgtgatggaagaagtcggcgatctgggggagtcaatcctcccgctttttgaagagacaaaatttgaggtagcggaactcgagaggactatgctggaagtgaagaaggaccaggccgtggaaacactccgaggtcgtgaggtgtggttcagctcgtacctgaagagttgctgcacatccatgacaagagtctgtagagagctccgagtaccccgtggggatcctgaggaatcggcggccggatacatctcgtggctgaatggggcctgcgcccagctcgacgacatcagcaagcgtattgacgaggccctgaagcaggagtgccgtcgatcgagccgatatgccggggggcatgtattggcttgcatacgagatcatcgcccgcagctacacctcgagttcctccacgaagggttttctcgttgtcggagaaatcctacggagatagatcacttggcgaagtcgatggcgccgctggggagaaggtcttccagtccatggactggcgttggccttcctggtagtctccgtatcctatga

SEQ ID NO: 32040 - DNA, 2328 bp, Oryza sativa
  Clone ID: PAT_MRT4530_36289C.1
atggatctcgacaagtctacctccaccagcacgtcgctaaagaagttgcaggaggatggcgcccttcccggtcgcgggaccgcggagagagaagtaggaggtactgaaccccaacctgtcctaggtcgcatggttgtgatcgaggactttattctctgtggttttcttcctccgccttctgaatttcttctcttggtcttgaatttctacagtctttccttgctccatttgaaccccaattccatcgccttcatgagtatcttttcgcatctttgtgaggcctacattggggtagagccgtttcttgacctcttccgcttttactatgagttgagttggatggaacccaaaaaggtgtctggatgtgtcggtttccgacttcgggatggcctgaagtcgcgatacatcctcttccagtgcccctcatctcgcagcaaatggcgggggaggtggttctatcttcagatagaagattcggatccggtttttattgttcctgaggagcaactagacaagatttcatcttggaccgccaaactcgccttgaccccatccctccaatctttcatcgatatcattgatgacctccgagtacggggattgtcggggtatgaagtcgctgccgacttcattggcttggacagcgcaaccgtggagcgccgtgtcggccaactgatgatcactggcccgacaacggcgagcaacgtccaagtccccctttgcgagaaaggggcagccgagcgcgacgttgccatcaatgctctccctctgactgatatcatcgggccgctcgtggaccatcaggtggcggcgtcgctgaagaagaaagtcgccaaggaggtgtctgacgctgttgctgctgctgccacaacgagtggcggcaacgttctgaaaaaggggaggaaattctcttctgtggtcggacatcgtcggaagacacccaccccctcgcctgtctcagttgcagcttttcgcagggcggcgtgggcgaaggcggcgcaagacgggtctggagggacctccagcgcgtctcctatcgtggcctcgacggatgtcgtggtcgtgcccaggagccgcgaggcaacacctagcggcccagctagcaatctcgccactggtcgaggtctgccggctgccatcctcacctgggaggagctccaggttgagatggggtgcctccttgaggctggtgctcgcggcattagccgcgagatcgcggaggcgagggcggcggcggcggcgtcggcgaatgagcgcgccgaccggctggcgcatgatttggcggaggttcgcgaggacctccagaagatgcgggagctggtggccggcaataagcgacaacggcagggactcgagcaccgcatgtcggagcgcgagaacaacttgtcggaaatccgtggctcgttgcgagtcacctatactggtctgcaccagctcgccggggagtgcggtatcaagtctaccatcccggcgaatcccgatgagttctcgccgacgacttctcttgcggagctggcgacggcgatggaggagatcccctccaagcacgcggctaggattggagaggagacgtccaacgggatctataccggggcgtgccatgtccttgcgtgtgtgagactggcgcaccctaaactcgatctgcggaaaatcttggatcagggggcggctagcgacgcgcgcaaggatgtgatggaagaagtcggcgatctgggggagtctgttctcccactttttgaagaagatgttgatgtcgaggatgtccagcagcgcgggcagcctgagttgccagtgatcgttccggcacttgcgttcgagccacatgtgccggagggcgatgtagctcaaaattcgcctgtggaaacgagcatggcgacgactcccttagacctcgagagtgcgcttgctgaccaggatcgtcgcatccagtattggaggacgaagtttgaggtcgcggaactcgagaggactatgctggaagtgaagaaggaccaggccgtggagacactccggggccgcgaggtgtggttcaactcgtatctgaagagtttctgcacctccatgtcaagggtctgtagagagctccgggtaccccgtggggatcccgagaaatcggcgactggatacatcccgtggctgaatggggcctgcgcccagcttgagggcatcagccagcgtatcgacgaggccctgaagcaggagtgtcgtcgatcgagccaatatgccgggggcatgtattggcctgtatatgagatcatcgtccgcagctgcacctcgagttcctccatgaagggttttctcgttctcggagaactcctacggagatag

SEQ ID NO: 32041 - DNA, 672 bp, Oryza sativa
  Clone ID: PAT_MRT4530_3628C.1
atggcggcagcgactccggcgaactccgggaagggcggtggcctgatgaggttcactgaggcgagaggagtcctagggtggcgacggcagaagctaggcggtctggagcgacggcgcgccgtgcagccggcggcggccgaacagagcagtgacggcaggaggcggccccggcgacgttctggggacggattggatggggaaagagaggggaaagggagtacttggcatgaagaatccatttttaccttaaatttcagaggattagcgacgtatacgacgaattttggagctcctgtgaatggcgccggactagggtttcggggattttttcctccggtgacgacgattgagtcagcgggagttgggggcggatttgaggaggtgaaagaggtcgaaattgcggtccttttgcctccggtgttgagccttctagtggaagaacgaaggagttatggaggcgggaagctggaggtgtcgtccgggcattcgtcggtcgatcggcctcatggcccgacatttgggatagaatttaatttggattcaaaggaattatttgaaagggctgttacagagggactgcggacggctgctggcggcagccgtggcaagggcgtgcacgcggcggcggcagccgtggcaagggcgggcatgcggcggtggtggccgcggtga

SEQ ID NO: 32042 - DNA, 311 bp, Oryza sativa
  Clone ID: PAT_MRT4530_36290C.1
atgaacacgtctcaaacttttctaaagataaaataacaaataagtccacatggcagactcttaacatatctctaatttaaactgacattaatatcctaattaatagatacaattgctttaaataagctctatctctatgcggcaatgacgattatctaaatcgaggcccaaactgaacccaagccaagctgtattggcttcttgccatatcggctcgatcagtgcagtccgttttgtcaagatccaatttcctttgattccacttcgatatccaactccaaatccaaatctatcttgcgaaatttcactat

SEQ ID NO: 32043 - DNA, 459 bp, Oryza sativa
  Clone ID: PAT_MRT4530_36291C.1
atgtcaccgacagcggcggcggcgtcgtcggcgaatgagcgcgccgaccggctgacacgtgatctggcggaggttcgcgaggacatccagaagatgcgggagcttgtggctggcaatgagcgacaacggcaagggctcgagcatcatatgtcggagcttgagaaccacttgtcggagattcgtggctcactacgggtcacctacaccggtctgcaccagctcaccggggagtgcggcgtcaaggccaccatcccggcgaatcccgatgagttctcgctgacgtcttcgattgcggaactggcgacggcgatggaggcgatcccctccaagcacgcggccaggatcggaaaggagacgtccaacgggatctataccagggcatgccatgtccttgcgtgtgtgaggctggcgcatcctgaactcgacctgcggaagatcttagatcaggggggcggctag

SEQ ID NO: 32044 - DNA, 688 bp, Oryza sativa
  Clone ID: PAT_MRT4530_36292C.1
ctttggttccccatgaaggcacaagaggagttttcatgctcaatgctgctaaaaaacaagacacaccactacgttgcttataagatcaacgcacaaaaattgaatatataccgcattgagccatgcagtggtcttatatctccacagttcacgtgcaatattagtgtaagaatgcaagcacaacaaggggtatcaccaaacatgcagttgatggacaggatacttgttcaaagtgtggtagtgagcgatgatctgattgatattgctaaagacttgtcctgcaaacaaaaggggaagctagtcttgaaagggcctgataagattatgtcaaagatttatgtgaacatccggaaaacaggagcccttgatgagaacaagcctatatgtggtaccacagaggggattggcaatagccatcatgacaataagctttctggtttaagtatcatgaaaaactcttcccgtgacgactacgtaattgatgggatgcatatatatgtcaagatcccatctattgcaaagaccattaaactcattgtgaagaactccaactctgttgctgatgtcaaggtggagattgaacggaaggaaaggattcttcaggataaccaaatgctgatgtatgcaggtcgacagcttgatgatcgccagattttaagtcattttggtctatcagatgatcagatac

SEQ ID NO: 32045 - DNA, 908 bp, Oryza sativa
  Clone ID: PAT_MRT4530_36293C.1
gccaatcactttaagtacatcccattagcaggtgcaaacaagtaatgatgtcacataacatttcagtttgaaatagagaaacaaactggacccagacattccctatgaaactactaatttacattcagcatgcccccatcacataacccgtttagcacaacgtattgcgtgctgagatccaaggttgggcatgcatacgtaaaaaggcttacaatgtctgcacgatctaactcaatattcaaaattcagcatagaaaaagaaaacattttttcaccaggcataagcattaccagagaggaagagaggaaacagctcagctccgggatggtctccagttgtttatccattctgtcagtgtgcccacattcctactgatatcctccacattgtcacttcgcaagggcatcactatctcctctttgtagctctcccttgcctcctccaggagcatctggaaaatttcacattctatgttgtttgtgagcttggcacccatataacctctgctagtcaagcgatcatgcagaattgagttatctgtttggagcacaactacaaggtcaaaccaacgttctggaaagaaatcacatccatggtaatctactagtataccaccttcttccatcacgtcctcaagctcatcgcaaacctgaggaactgtgcatactggattacttggttgtggtaatccaatgctttccaggtcctcgttgatgatgtggcactcgagctcctcgtcccagccgtcatggaggctcttctcgcggacgaggtccccgatgttgatgtggcggaggtccaccgcgtcggcgaggagtgagcacgtcgtcgtcttccccgtgcccggcgtccccgtcaccagcacgttcggccgcgtgcgccgcgcgccgccgccccgcgacgccat

SEQ ID NO: 32046 - DNA, 4056 bp, Oryza sativa
  Clone ID: PAT_MRT4530_36294C.1
atggctgttagctcaatgcaagcaggggagaaagctgtattcaccatccctccagaattagcaggcaccaagtctcggtgtcctgctgatatcccagcgaaccttcctcctaaccaagcactacagtttgatgttgagctcatctctcttatcaccataactgacatcctcgacaatgaaggcatattgaaaaagactatgaagcgtggagtggggaatgataaaccttgtgatttggatgaagtgcttgtgaactacaatgcttgcctggaggatgggatgtcagtgtccatgtctgaaggtgttgagttcaaccttgcagaaggcttcttttgtcctgcctttgcacgtgctgtggagactatgacagaaggagaggaagttgttctcattgttaaactagaatatggttttggtgaacggggtagaccgtccataggggatgaagctgctgtgccacctgatgcaactctttatgtgtaccttcaattgatgtcatggaaaacagtgagacacattggacagaacgggacaatccttaaaaaaacccttcgcagaggaaacttggaaggacagcacaccgagaatcaagcagtggttggagttcggctgattggtaaactgcatgatggggctgtttttgatcagaggggtcaccaaggagatgagccatttgagtttgtggttgacgaagagcaggttagtgatggcctagaggaagctgttctgacaatgtgggagggagaggtctccttgttcaccattccaccccagtgtttgcaggatcaacacgtggttgtccctcctggttcttccgtcacctatgaaattgagcttgtctctgttgtaaatgacaagcatccctggctcatgagtcaagcagagagcgttgaggctgcagttgagaaggaaaaggagggtgacaaactattcggctcaagcaaatatttgagagcttataggagatattacaaggtattggaatacgaccctggaaatgtgaaagcacaggaaatgtcagggcaggcattccccgaggcttcgcttgtaatagacactgctgcaatgcacagaggtttggagccgtttcgtccgaaggaacagcattccattggttggacaacgacgacgggggctatatctagcatgaggctaaaacaaggacacaaataccgtggaggcatgatttttgtccctcctattgcaagaccaggggccaatgtacctacaagccgtagtccagctacacaagcaacgcgtgttgttaacacaaacagagttacgacaaacatcgagaaccaaattaactctggcaccaccaggaagagcctagaggataacgccacgctcccgtcgtcttcgtcatcgtccagcccatctgcaagatccgccgccggcgcaccgctacagcccgaccttcgccaccgcccgggctctgccgccgtcgcaccactgtcgttgtctgagggtgcgacagccgccgcagcggaggtggtggcgccagagacaaaggaggtgagggcgaaggcgtcggtggatgaggcggtgacgctggctaccgttgtgtccaagaacgtgtcgttcagggaggagagcaacttcctggataatctcaaggacggcgagaggaaggcgttggctgagctccgtgccaaggtggaggaggccatcgtcgagggcaagttgttcgatgatggcaaggtggaggccaggaagaaggccaccacgataccgacgacgacgacggcgaggcactcccggcggagctcgctgacatgtgctacctcgacggcgcggaccgggagggccacccggatcgaagtatcgaacggaaatgcaggtcccggccgggattctgcatcacttgttggatggaaacacggtgaagtaggtctgcgtagcagcgagcacgacgacgaaggcggcgacgacgacggagatggccgatcacgtgctggcaaaatagttgcggcggagccccgccatgtgcctgttgcgccacgtcccgcagtagcgcgtcacgtcctcgtacagccccgcgaacgcctgcgtgtcgtagtccaccgggtcgatgtcgcccaggcggttgaagaaccgcgccgcctcctcgtcgttgtccaacaggttctccaccacgccgcgccgccggagcagctcgacatcgcgcgccgtcatgatgagctggctcatcagcgccacgtagctgctcaggagcctggccacctcgccgccctggctctgctcgaacgcgatcagatggagaaggtggtggacgtcccagtcgccggaaggccacttgattggctcctcgtcgccgatatacatgacggcgagaaggttgaggagggactgcctggtgccctgcacgccggcgacggcttcgtagagcctctcgatgacgaagaaggggattgtcggggcttggacagcgcgaccgtggagcgccgcgtcggccaattgataatcagtggcccgacaacggcgagcaacgtccccgtccccctttgtgagaaaggggtagccgaacgtgaagctgccatcaatgctctccctctgactgatatcatcgggccgctcgtggaccaccaggtggcggcgtcgctgaaggagaaagtcgccaaggaggcgtctgacgttgttgccgctgctgccaaaacgagtggcggcaacgttccgaaaaaggggaggaaattctcctctgtggtcggacatcatcggaagacacccaccccctcgcctgtctcagttgcagcttttcgtagggcggcgcgggcgaaggcggtgcaagacgggtctggagggacctccagcgtgtctcctgttgtggcctcgacggacgtcgtggtcatgcccaggagccgcgaggcgacacctagcggcccagccagcgatctcgcggctggtcggggtccgtcggctgccatcctcacctgggaggagctccaggtcgagatggggcgcctcctcgaggctggtgcttgcggcattagccgcgagatcgtgaaggcgagggcggcggcggcatcgtcggcgaatgagcgcaccgaccggctggcgcgcgatttggtggaggttcgcgaggacctccagaagatgcgggagctggtggctggcaatgagcgacaacggcaagggctcgagtattgtatgtcggagtttgagaaccacttgtcggagatccgtggctcacggcgggtcacctacaccggtctgcaccagctcgccggggagtgcggcgtcaaggccaccatctcggcgaatcccgacgagttctcgctgacgtcttcgcttgcggaactggcgacagcgatggaggcgattccctccaagcacgcggccaggatcggagaggagacgtccaacgggatctataccggggcatgccatgtccttgcgtgtgtgaggctggcgcaccctgaactcgatctacggaagatcttggatcagggggcagctagcgatgcgcgcaaggatgtgatggaggaggttggtgatctgggggagtccgtcctcccactttttgaagaatatgttggtgtcgaggatgtccagcagcgcggacagcctgagttgccagtgatcgttccggcacttgcgttcgagccacatgtgccggggggccatgtagatcaaagttcgcctgtggaaacgagcatggcaacgactcccttagacatcgagagtgcgcttgctaaccaggatcgtcgcattcagtattggaggacgaagtttgaggtcgcggaactcgagaggactatgttggaagtgaagaaggaccaggccgtagagacactccgaggtcgtgagctcgaaggcatcggtcaacgtatcgacgaggccttgaagcaggagtgtcgtcgatcaagccgatatgccggggggcatgtgttggcttgcattcaagatcatcgtccgctgctgcacctcgagttcctccgcgaagggttttgtcgttctcggagaactcctacggagatagatggcctggcgaagtcgatggcgccgctggcggagaaggtcttccagtccatggactggcgttggccttcctggtag

SEQ ID NO: 32047 - DNA, 1460 bp, Oryza sativa
  Clone ID: PAT_MRT4530_36295C.1
tgcgtctcctcctcccgcacggctcgctccctgcccactcctcctcctctcctctcctcctcctgctgccgtccacgcgacaccaccgagcgtcgccttcgttcttcctccgccttgcccttccccgtacgtcctgctcttgcggagggaggtgtttcgctccggttcctcgccgtagcagcaggggggaggtgatacctttagtctggcaaacataaaatatggttaagataatggatatgggtaatcagtcatcgattgaagaactggatgaaccattagggagagttccaatactttcatatggttttgggcatatgctaaatgacctcacttcctcatgttggtctactttcttgctgattatctagccagaccataggcttcgtacaggtggcgcttcttttttcattctttatggtcgatttggagttagctccgcatcaatcttcgttggtgaacggattgatagctttgaacatttaaatctctggcactcagggagatccttttttggagcaatttcttgctcaactgtttttgttagatttttatcttgacagcttatatgaactatttcctctgcattcaaggctgttggatatagcaaattcgctgctattattaatgttagtcgaacagatactcacttggccattcttaatttgtattgaattgctttgttgttattaagtctactttagttagtgaacgtgatagttctgaatagctagatagcatattactacatgtcccttgggagtagtatcgtctttgtgttcttgataaaaacggtagagaaagtggcatatcagcattgccagaataagagactttccaggatttcatggacccactggttcaagaaagtattgtactaccaagttgctctagtatacatgtttactagattggttaccaatgtttcacaggcacttcttgctttctacgtcataaatgatttggaaatgccacaatcatccaaagcattggtacctgctattatctatgtctgcagcttgatagtatctgtcatattacaggaaactagatggtcaagttggcgtttaaaaaattacttttctgctggggccatgctttggatattgtctggtgttggaattgttgttctaccaagtggaatgcacaacttcatgtatgcactatcaatcacaataggagttgccaatgctcttatgacagtaacaagtatcagcatggaaggaattttagtaggtgaagatctaaatggttgtgcttttgtgtatggctcattaagttttgttgacaaagtgtcatgcggactagctctgtatattcttgagtcctatcaagatgacacagtgaaaggtactcagcaacgagttgagtatgtaccaaaagtagcatgggagtacaatcctgtaaagtcagtttgcacaggaatactgggaatgtacatactttatgcaactggttga

SEQ ID NO: 32048 - DNA, 525 bp, Oryza sativa
  Clone ID: PAT_MRT4530_36296C.1
tcagaattcgcctgtggaaacaggcatggcgacgacttccttaggttggttatttttgttttcatctcctttactcttccgtctagatcgacttgctttgctgtgttctcgggagagaagagcagtttgccttagtcgtttccatgctgagcagacctcgagagtgagcttcctgaccaagatcggcgcatccagtattgcaggacaaaatttgaggtcgcggaactcgagaggactatgctggaagtgaagaaggaccaggccgtggaaacactccgaggtcgcgaggtgtgattcagctcgtatctgaacagttgctgcacgtccatgacgagggtctatagagagctctgagtacctcgtggggatcccgaggaatcggcggccggatacatctcgtggctgaatggggcctgcgcccagctcgaaggcatcggccggcgtatcgacgaggccctgaagcaggagtgccgtcaatcgagccgatatgtcggggggcatgtactggcttgcatatgagatcat

SEQ ID NO: 32049 - DNA, 694 bp, Oryza sativa
  Clone ID: PAT_MRT4530_36297C.1
gcgaagcaataaaaagaccaattcattattttagtaaaaatagctaaatggtaattcaattacatccaaagcgaataaatataaaattagcatacaagctatgtattcttgtgaacaatgcggctaggctacatttgtaaggggattttggattaacttacacaggattgtactcccatgctacttttggtacatactcaactcgttgctgagtacctttcactgtgtcatctataacttaattcagaatttcagaccaagtcaaaatgaattgacaatgtccgagtttctttcctttcgagtcgtataactgtactgttgttaatagctccagcctccagcagtggagtcattggccgttggacatatatacagttgcaatggaagtgctaccagcagagttatgcgagaagaggttcaactaaaggtcttcgccgagtgtcaggtaggtccatcgtataagctattatggctgagagcagtgaacaggcagctgggactaaccccaaaccaagtcttgtaactgaataaccaaatgccaactctaggttctgtctggtattggtacttccttgataggactcaagaatatacagagctagtccgcatgacactttgtcaacaaaacttaatgagccatacacaaaagcacaaccattttagatcttcacctactaaaattccttccatgctg

SEQ ID NO: 32050 - DNA, 1050 bp, Oryza sativa
  Clone ID: PAT_MRT4530_36298C.1
atggatctcgacaagtctacctccaccaatgcgtcactgaagaaactgcaagaggatggctcccttcccggtcgcgggaccgcggagagggaagtaggaggtactgaaccccagcctgtcctgggtcgcatggttacggttgaggactttattctctgcggttttcttcatccgccttctgaatttctccttttcgtcttgaatttctatggtctttccttgctccatttgaaccccaactccatcgccttcctgagtatttttacgcatctttgtgaggcctacattggggatggcctgaagtcgcgatacatcccctttcagtgcccctcatctcgcagcaaatggcgggggaggtcgttctatcttcagatagaggattcggatcctgtattcgttgttcctgaggagcaaccagacaaggttccatcttggaccaccaaacccgccttgaccccgtccctccaatctttcatcgatatcgttgacgacctccgagaacgggggttgtcggggtatgaagttgctgccgacttcattggtaggcggatccagccgcttcaggctcgagcccatgctgcctttgattattctgggccagaggacgcgacccgggtttctcctcggggcttgaatagcgcaaccgtggagcgccgcgtcagccaactgatgatcagcggcccgacaacggcgagcaacgtccccgtccccctttgcgagaaaggggcagccgagcgcgacgctgccatcaatgctctccatctgactgatatcatcgagctgctcgtggaccatcaggtggcgacatcgttgaaggagaaggtcgccaaggaggcgtctaacgctgctgctaccgctgccacgacgagtggcggcgacgttccaaaaaaggggaggaaattctcctctgtagtcggacatcgtcggaagacacccacccccttgattacaaagggaatagcagaactcgacgataccgtcgagatcgtagtcgagttgatccggctagatctcccggcgacttggctccgacaagctccggcttcgtag

SEQ ID NO: 32051 - DNA, 300 bp, Oryza sativa
  Clone ID: PAT_MRT4530_36299C.1
atgagggcgacggagacgctggccatggtcgatgaggcggcggcccggtggagcgcgacgacggcagatgagcgtgacggcaacaacggggaacacaagcggagcgaacgcgctggtgattttcatggtgacatcgtgttgctcgtcgacgttgtgcgcagggctggtttcaaggctgatacctgtggtatcatggttgatactcacaagtttcagacctgggaccaactttgccacctaagccactactggtactgtggccttctcctagcgcctcgcgcgtgctcctccgccagctag

SEQ ID NO: 32052 - DNA, 434 bp, Oryza sativa
  Clone ID: PAT_MRT4530_3629C.1
ctttattgacccggccggaatctcttcctgctgctcggaatagatcgcgaaatactaaccaacagcatctaccctttattgttactaatcaaatctctaacccgcctgaacctcctggaggaaaagaagtcattaccttcaatggttctcgtaatatctttatacataagataatggaagtctcaacaagctcagagtcatcatctggatctaattctttgtcatcatcaccaaagaacaatatttttcctttatatggaccaatgctcaaatcctcacctcttatccctacagatatgatgaggataacagaaatcaagagtatatgaaaacctcttgatcctgacgagatcatccaaaaattatcttaacaacaaaaatttcaactctgaataatcgcaactattatttttataataataagcgaatgaagg

SEQ ID NO: 32053 - DNA, 429 bp, Oryza sativa
  Clone ID: PAT_MRT4530_362C.1
atgcccgacgtccctctcctcgccgatggagctaacgaacaatggcctgcgcgcactcctgaacctctccatcgtgccggcgaacgcgtcgcagctgttgtctgcggtgctgacaccatcgctcgtcgccaccgtgggcgacacgcccgcgggccacggcagcggaccgcgcgctcgccgcactttaccccgagggccgccgatgtgctcaattggtccgacaagccggtgtgccaggagaaggccgcgtacatcttaatggtcctcgcccaccggagctacgcctcatggtccccgctgccgaggagagggtcacaggacgccgagcacggagggaacttgccggcgctgggcttggagggacgtagggagggagctcgcggagggaggcatgcgcgtgggagcttgccggcaccgggctcggactag

SEQ ID NO: 32054 - DNA, 3309 bp, Oryza sativa
  Clone ID: PAT_MRT4530_36300C.1
ctatggctcgggcagaagtgctggccccagcggcaggaggtccgcgtaggcgaaccacgcactcaacacggacggcgccgccgcgggatgctgcgctgcggcactgtcggcgaagaactcggcggcatatgaatatatgatgagggaagcggtcattagtgagccttttcgttttcgtgggttgattttgtcggcgtgggcagtaatgaagccagtaaatctgccgtgtttgttctcctccgtccgatgctgatcgagcggtgtagcagcatcggacgtccctctgacgtagatcgctcaaatcgtgaggggtccgatatctccaagtcctacttggagatcaactgacccgcggtatataagggacccccggccgggcagtgtagggcgatggccgatggcgaaggcatcacgcagacaagtagaagctcgcgacttgcgagttgaagcagcaacactgatgggccttgacagcagattagtgaggatcccaccagcaataaggccttggcagtcgaacgggccgtagaccggatatagagggtattggggtatgctggtacgaggattggtctcccagtaggactcggagacatcgaacccgatatgatacaatgacgacccagttctatccgagtaggactccttacatcgatcgcgacttctgatgtcgaagttgtcgtcgttctcgtcgtgaggaccgagagacaaggagtgatcgacaacgccgggtgaagcttcaccagcacgtcgctgaagaagttgcaggaggatggcgcccttcccggtcgtgggaccgtggagagagaagtaggaggtactgaaccccagcctgtcctgggtcgcatggttgcgatcgaggactttattctctgtggttttcttcctccgccttctgaatttcttctcttggtcttgaatttctacggtctttctttgctccatttgaaccccaattccatcgccttcctgagtatcttttcgcatctttgtgaggcctacattggggtagagccgtttcttggcctcttccgcttttactataagttgcgctggatggaaccaaaaaagatagaaaattcggatccggtctttattgatcctgaggagcaaccagacaagatttcatcttggactaccaaacccgccttgaccccatccctccaatctttcatcgatatcattgatgacctccgagtacggggactgtcggggtatgaagtcgctgccgacttcattagtaggcagatccagccgctccaggctcgagcccatccagcctttgattattctgggccggaggacgcgacccgggtttctcctcggggtttggacagtgcaaccgtggagcgccgcgtcggccaactgatgatcagtggcccgacaacggcgagcaacgtccccgtccccctttgcgagaaagggctagccgagcgcgacgctgccatcaatgtggcggcgtcgttgaaggagaaagtcaccaaggaggcgtctgacggtgttgccgctgctgtcacaacgagtggcggcatcgtttcgaaaaaggggaggaaattctcctctgtggtcggacatcatcggaagacacccaccccctcgcctgtctcagttgtagcttttcgtagggcggcgcgggtgaaggcggcgcaagacgggtctagagggacctccagcgtgtctcctgccgtggcctcgacggatgtcgtggtcgtgcccaggagccgcgaggcgacacctagcggcccagctagcgatcttgcggctggtcggggtctgccggctaccgtccttacctggaaggagctccagctcgagatggggcgcctcgtcgaggctggtgctcgcggcattagccgcgagatcgcggaggcgagggcagcggcgacgtcgtcagcgaatgagcgcgccgaccggctggcgcgcgatttggcggaggttcacgaggacctccagaagatgcgggagctggtggctggcaatgagcgacaacggcaagggctcgagcaccgtatgtcggagcttgagaaccacttgtcggagatccgtggctcactgcgggtcacctacaccggtctgcaccagctcgccggggagtgcggcgtcaaggccaccatcccggcgaatcccgacgagttcttgctgacgtcttcgcttgcggaactggcgacggcgatggaggcgatcccctccaagcacgtggccaggatcggagaggagacgtccaacgggatctataccggggtgtgccatgtccttgcgtgtgtgaggctggcgcaccctgaactcgatctgcggaagatcttggatcagggggcggctagcgatgcgcgcaaggatgtgatggaggaggtcggcgatctgggagatattgatgtcgaggatgtccagcagcgcgggcagtctgagttgccagtgatcgttccggcaacttgcgttcgagccacatgtgccggggggcgatacctcgagggtgcgctcactgaccaggatcgtcgcatccagtattggaggacgaagtttgaggtcgcggaactcgagagaactatgctggaagtgaagaaggaccaggccatagagacactccggggtcgtgaggtgtggttcaactcatatctaaagagttgctgcacatccatgtccagagtctgtagagagctccgagtaccccgtggggatcccgaggagtcggcggccggatatatctcgtggctgaatggagcctgcgcccagctcgaagacatcggtcaacgtattgacgaagccttgaagcgggagtgtcgtcgatcaagccgatatgccggggggcatatgttggctttcctacgagatcatcgtccgcagctgcacctcgagttcctccgcgaagggttttctcgttctcggagaactcctacggagatagatggcctggcgaaatcaatggcgccgctggcggagaaggtctttcagtcgatggactggcgttggacttcctgctcggtggggagcatggcctctgagccgtacatgaggaagaagggtgtctccttgttggatgttgtcggtgtgttctatgccgtttgccctctcgacttgtccattgctctaagggtgagaaaccgaggcgaagcagatcttgactcccagcctgatgcagtaatcttggaaatcggcactgatgaactgggagccgttgtccgttatgatacggtggggcaatccgaatctgcagaatgtccctttgatgaatttgatggcgttgtcggccttgatttcccccgtgggtgtcgcttcaatccacttagtgaatttgtcgatcgccacgaatag

SEQ ID NO: 32055 - DNA, 309 bp, Oryza sativa
  Clone ID: PAT_MRT4530_36301C.1
atggccatgcatggcgagcgcgaacggctgccagtgatggcgcgagtgcagccatgggggtgcggtggccggcgtgcgtccaggacgatgtggcctgtcgccggggaccaatttaagcgcttcgtgtgtgatatccattgtggtggtgttttcatccaggagcaaatgctggtgactggtcatgcctggcatttcaagaactatgacaaacggccacaatttgcgaagttcctcaggcttcttagggccaaaaagcaaactggcgctgccactcaccatcttcttaggcaggcccgttgtcggcactga

SEQ ID NO: 32056 - DNA, 426 bp, Oryza sativa
  Clone ID: PAT_MRT4530_36302C.1
ctagagcaccgtatgtcgaagctcgagaacaacttgtcggaaatccgtggctcgttgcaggtcacctatactggtctgcactagctcgccggggaatgcggtatcaagtctaccatcccggcaaatcccgatgagttctcgctgacgtcttctcttgcggagctggcggcgacgatggaggagatcccctccaagcatgcggccaggatcggaaaggagacgtccaacgggatctacacctaggcgtgccacgtccttgcgtgtgtgaggctggcgcaccctgaactcgatctgcggaagattttggatcagggggcagctagcgacgcgcgtaaggatgtgatggaagaagtcggcgatctgggggagtctgttctcccactttttgaggagtaggattttgactctcttgtactccttagacat

SEQ ID NO: 32057 - DNA, 336 bp, Oryza sativa
  Clone ID: PAT_MRT4530_36303C.1
atggggtcaaggcggaaccacctcccccgccatttgctgcgagatgaggggcactggaaggggatgtatcgcgacttcaggccatcccgaagcctcacaaagatgcgaaaagatactcaggaaggcgatggaattggggttcaaatggagcaaggaaagaccatagaaattaaagaccaagagaagaaattcagaaggcggaggaagaaaaccacagagaataaagtcctcgatcgcaactatgcgacccaggacaggctggggttcagtacctcctacttctctctccgcggtcccgtgaccgggaagggcgccatcctcctgcagttcctttag

SEQ ID NO: 32058 - DNA, 258 bp, Oryza sativa
  Clone ID: PAT_MRT4530_36304C.1
cggacgcgtgggcctgccactccctgaaatggagctccgtctttgtctacgactccacgcgccgttcgtcttcgatttgacgacacatccgtcgatgtcggtgacaccatgctccaatcttgcgctttgacgtgttaggtccgatgggagctgtgtggatgctacgtgatgatgcgcaatgcattagtaaactgcagtgtgaataatctatgttacagtgttcttgcatgaagatgatatactacacttgatacttgt

SEQ ID NO: 32059 - DNA, 3282 bp, Oryza sativa
  Clone ID: PAT_MRT4530_36305C.1
atggtgtcaagaagtctgcagcttgtcggcgcgttgctgctgccgctgctcgccgtcgtgtcgtcgtttgatccgttccaccgtgatgcgaaccccatgggcggcggcgccgggcagggccccttcatcccccacgagtacgtccgcttcgccgacgtgaagcggcagtgcaagtccgtgctctcctccgcggcggagctcacgttcgacgccaaccgcgccaacggcctcatgccggagctgtccttcgtcaagggtgactggaagcacgacggcgacggcgacggcggcggcggcgcgccgctgctgccattcgacggcaccgacgtggcggaggacgccgccgccggggcggcgcgcgacccgctgccgctcgcgtcgttctcgctcacgcacgtcgacgcggcgcggcgcgggaggacggcgctgaacgtgagcggcgtgctcggcgtcgccatctcccgcaacggcaccgggccggagatggggccgtacgtgtcgccggagttcaaggtgtggcccgggaacaccgagctgaaggtgctgctcgagggggtgtacaccgagaacgacgacggcgagagcgtgctgtgcatggtcggcgacgccgtcctgccggcgcgcggcggcgacgccgccaacccgtggggctgggccaagcactccgaccgcgacaggttccagccgccgatcaccaaggacggcaacatcctcctcgtgctccgctaccccaagacgctgacgctgacgacgcgcgccgtccacggcgagctcacgagcaccaatggcaagacccacgccgcctacttcgacgccgtgcacctgctgtcgcagctcggcgcctactccaactaccagttcggctccgaggagctcgtcggcacggcgtgcaagccccacccgtaccgcgacgacgtcctcgccggcggcggcggggacagggggctgtacaagggcacctccttctgcggcatcctcgacaggttcacgtcggaggacgtgctcgccgtcgtgccgaactggaggtgcaacacgacggacgacgcgctctgccggcggctggggccgttcgagacggacaaggcggtggacgccaccgacggcgggttcgccggcgtcaggatcgtgatgcaggaggtccggtgcgagccgaggaccgacggcggcgagatctcggcgagggtgtcggcggtgttccgcgccgtcccgccgtgggagcacgcgtacacggcggcgaagcgcagcgggctcggcggcgcgacgatgtccgccgagggcgtgtggcgcgcgtcctccggccagctctgcatggtggcgtgcctcggcgtcggcgccaaggcgtgccactcccgcgtgtgcctctacctgcagaccaccttctccgccactcgccgcagcatcacggtgggccagatcaccagcatcggcggcggtgccgcccacttcccgccgctgacgttccagcggacggtgcacccgatggagctgtggagccggttcggcgtcaccggcggcgagccgctgagcttggcgtacagctacaccaagaccaagcaggccggcgagttcctccggcgaagcgagccgttcgacttcggcaccgtcatcgccaagtcgctgctgagctacccgaggaaatccggcgacgccgccgacgagacgacgagcctctccaacctcgccgaggagctcacgctccacgtcgccgccgtgccggatccgttcccacgcggacgattcgagcggccattccttcagcttgaggtgctctcgctcggatcgctcgtcggccgggcctcgccggcgacgtttccggggacgccagctgcggtagggcaaagcatggcatcatcatcgtcgtcgacgacgacgaagctggatgcgacggctatcctcaacgtgtcggcggagctgacgatctccggcgacgcgtacgtgaacgtgtcgacgctgtccttggaaggcgtgtacaacccggtggatggccggatgtacctcatcggctgccggagaatccaggcgccgtggcgagccttctcggcgatgggcggcgtcgaggaaggcatggactgctcgatcgaggtgagggtggagtacccgccgacgacggcgcggtggctgatcaacccgacggcgaaggtgcacatcgcgagcacgcgcggcggcggcgacgacccgctgcggttcaacgcgacggcgctccagacgctgccgatcctgtaccgggaacagcggcaggacatcctgtcgcggcggagcgtggaggggatcctccgcgtcgtgacgctggcggcggcgatcgccgccgagttcagccagctcatgtacatcaagtcccacaccgacgtgatgccgtacgtgtcggtggtgatgctgggcgtccaggcagtcggctacagcgtgccgctcatcaccggcgcggaggcgctgttcgcgcgcatcgccgcgtcgagcggcgacggcggcgcgacgccgccgccgtcgtacgaggtggacaagagccagctctactggaccatcgactgcgtcgtcaagatcctcatcctcgccgcgttcctcctcacgctccggctggtgcagaaggtgtggcgctcccgcatccgcctcctcacccgctcgccgctggagccagggcgcgtgcccagcgacaagaaggtcctcgtctacacctccggcgcgcacctcgtcggcttcgcggtggtcctcgcggcgcactacgtgagcgtgctggcgcggccggtgaggtcggaggcgtcgtacatggacgcgcgcggcgaggcgcacgcgctccgggagtgggcggtgacgctggaggagtacatcgggctcgcccaggacatgttcctgctgccgcaggtgatcgggaacgtggtgtggcggatcaactgccggccgctgaagacggggtactacgccggcttgacggcggtgaggctgctgccgcacgtgtacgactacgtgagggcgccggcgatcaacccctacttcgcggaggagtacgagttcgtgaacaccagcctcgacttctactccaggtccggcgacgtcgccatcccgctcgccgccgtcgcgctcgccgcggcggtgtacgtgcagcagcggtggaactacaagatcatcagcaagacggtgaagacgcagcagaagaagctgcagcacctcgggtcgcgggtgtacgagcgactgccgtccatgtcgtcggccaacttcgaggccgagctcgtcgccggcgtcaacgagggcgtcggccatggcctccgccgcgacgccagcttgagctag

SEQ ID NO: 32060 - DNA, 1128 bp, Oryza sativa
  Clone ID: PAT_MRT4530_36306C.1
atggagagagaagcaggaggtttgaacagcgaaaccgtggagcgccgcgtcggccaattgatgatcagcggcccgacaacggcaagcaacgtccccgtccccctttgcgagaagggggcagccgaacgcgaggctgccatcaatgctctccctctgactgatatcatcgggccgctcgtggatcatcaggcggcggcgtcgctgaaggaggacgtcgccaaggaggcgtccgatgttgctgccgctgcagccacaacgagtggcggcaactttccaaaaagggggaggaaattctcctccgtgatcggaaatcgtcggaagacacccaccccctcgcctgtctcaattgcggcctttcacagggcggcgcgggcgaaggcggcgcaagacgaatctggagggacctctagcgcgtctcttgctgtggcctcgacagatgtcgtggtcgtgcccaggagccgcgaggcaacgcctagtggcccagccagcgatctcgcggctggttggggtccgccggctgccgtcctcacctgggaggagctccaggtcgagatggggcgcctccttgaggctggtggtcacagtattagccgcgagatcgcggaggtgagggcggcagtggcgtcgtcggtgaatgagcgcgccgaccggctgacgcgcgatttggcagaggttcgcgaggacctccagaagatgagggagctggtggccggcaatgagcgacaacggcaagggctcgagcatcgtatgtcggagcttgagaacttgtcggaaatccgtggctcgctgcgggtcacctacactggtctgcaccagctcgccggggagtgtggcatcaggaccaccatcccggcgaatcccgacgagttctcgctgacgtcttcgcttgcaaaactggccacggcgatggaggcgatcccctccaaacacgcagccatgatcggagaggagacgtcaaatgggatctataccggggcgtgccatgtccttgcgtgtgtgtggctggcgcatcctgaactcgatctccagaagatcttggatcagggggcggctagcgatgcgcgcaaggatgtgatggaagaagtcggcgatctgggggagtcaatcctcccgctttttgaagagtag

SEQ ID NO: 32061 - DNA, 659 bp, Oryza sativa
  Clone ID: PAT_MRT4530_36307C.1
cctatgttacccggacacaaactggcagcttcaatagcagatgaccatcattttctgaagttttgagttagttgagggagcaaactttgccccagattaaccagctttcctcctggggagtctgaaagaggtgttaggatgataaactatagccatattagaagctctggtgaatagtcctgcattcaccttggtatattttgctagttggaactgaatgtgtattggccagacacctggagatgaagtagagaaaagtgcagggatagggtcaaatgtttgaccagtacttgggatcaatttggtagttgcgttagatatatattgcttattaacccagcatattgaaaatgtttagcagaccatagacgatgtaaagcattttatagatgctaatttgtattgcagttttgtttccgtttctggatattttgttccattttccgtctctgtactacagcaagcaccatgggtgtatctgaatatctcatctcgacgataatttcaccgattgctgtaaaattcctaccttccgataagctaccgctattatcaatgaaccgccgctatggcctatgatcaatgaaaaaaaaaaaaaaaaaaaacgcgagactagttctctcactctctctctcctcgtgccgaattcctgcagcccg

SEQ ID NO: 32062 - DNA, 366 bp, Oryza sativa
  Clone ID: PAT_MRT4530_36308C.1
atgagcgccaccgccgccacgccggattcctcggcttccgccgccgccgccgccgttggcggggaagtggggaaggaggcggaggatgtggtggtgcagtacgtggtgcttcggcgcgacctggcggacgcgtggccgctggggagcgtggtggcgcaggggtgccacgccgccgttgccgccgtaacactggaggtgaaaggagagacacaactgaagaacctggctgagaagctggaaaccgctggtgtccggcacaaggtgtggatagagcagccagagaacataccaacttgcatagcgactgcgccgtgcccaaagtcacaggtttcttcattcttcaagaagctcaagctttgtaaatga

SEQ ID NO: 32063 - DNA, 892 bp, Oryza sativa
  Clone ID: PAT_MRT4530_36309C.1
gtcaatggtgttttcacggtcaaatcagcctataattatgaaaggaggaattgcaggactgctctggcttcaacgacaagtagcaatgagggtggtcagaaagaatggaagaaactatggaatctcaaatgtccaaataagatgaagcacttcttatggctgctcgcacacaatagcttagcattgcgaatgaggttgagtagaaaggggatggaaattgacatgtgtgatatgccaacgttttgatgaggatgggggcatcttttttttttcaaatgcaattaagtaaagaagccgtggagggaagtgaatatggaaggaactcgtctcaaattgtcagagcaaaaatctgcatgggaggtactgaagagtataatggaattggaatacgattcccagttaactgcagtcctactgatgtatacgtggtggcatgagtgaaatcgaatcaaagaagaaaatacaagatcaacacagaaatggaggaatcccgatgtggagatgttaaagatcaatgtggatggagcatatacaccacaaacggggaatggtggatggggatatgttattagggatgatgctggctcattgattgaatctggagccggaagaatcacacatctcatggacgctttccactatgaagtcttagctctcagagcaggtatagaagcagcagcacggaaaaggcatgatgagagcaactggaaactgacacttttagctttcatcactgtccccgtagttgtaacaaagtggcacatcctttggctgcttatggttgtaactgttctcagctaactgagatcagttgggacggtattcctcctaaactagaggattttgttgccagcgattctgtcgtaccagtggtataatgcaattcgatgtt

SEQ ID NO: 32064 - DNA, 746 bp, Oryza sativa
  Clone ID: PAT_MRT4530_3630C.1
cccgggctgcaggcagcattttttcccgtatcattctgtgcaactttgtcttcaaatagcatgtcagatatatcatttaatccgtttattacttaaagtgaaaatttgaacatcaacaggtaaataatgtgatcttgacaaaaaaaagtgtgttcggtgcttttgttggatacacaacacgcgctcatggcatcgcgaatatgctccaaggatgttaacatgatgaaattctaaaatgttagaggtttttttatactctttaactgattctcgaaatattaattcacatattgatatgtcctgtaccattagccttttctctcaagtacttaggtttatacacttcaataaagacgcatgctcatcgagcagcatccatctcactagaatataaaatgtagatatctaattgtatatcatttgtgcgcatgttacaactggacctttttttgcattaccatgatagaatatgaatttgcttatcaccttttgttgtcattgtcatcaaaataatgtactacctgataggatgtctggatgaaacaactgacttgttgatagctctgttttaccaatctgattgctagatgaaacaactggcttgttgatagctctgttttaccaatctgattgcttattaattttgttttattctgctgcagattgtgttttggaagaaagccaacttgatcttccttttcttccttctccggaagctcatactaccgttctactctttcacgctc

SEQ ID NO: 32065 - DNA, 880 bp, Oryza sativa
  unsure (1)..(880): unsure at all n locations
  Clone ID: PAT_MRT4530_36310C.1
gcacgaggcacgatatgaacttattcgagaaaaaattggggaaaacatacagtagaattttgtatcaggaaacagtaacaaattcacaaccatgctgtccttgcttccccttcgcttgccgttctccgcagccgcgacgcatccaaactccactttcctcctccaacgcgccgttaggcttcccatcctcccgatctcaccgcgagccagcatgagcgccaccgccgccacgccggattcctcggcttccgccgccgccgccgccgttggcggggaagtggggaaggaggcggaggatgtggtggtgcagtacgtggtgcttcggcgcgacctggcggacgcgtggccgctggggagcgtggtggcgcangggtgccacgccgccgttgccgccgtgtgggcgcaccgcgaccacccggacactgccgcctactgcgggccagacaacctcgaccggatgcacaaggtaacactggagggtgaaggagagacacancttgagaacctggctgagaagctggaaacccgctgttgtccgcacaaggtgtggatagagcagccagagaacataccaacttgcatagcgactgcggcggtgcccaaagtacaggtttcttcaatcttcaagaaagctcaagctttggtaaatgaagcactattttaggatccctcaaaattcaaaacttttccaagccaatccggcttttcaataactgggntttaacgtcaaaagggtggcatttggaaggtccaaccagaatcttgcagcccaggaactggctataacccggttccattttttgggaatatatggaccgggccttgtttttgccaaaanaaaaaaaaannnnnntnnatttaatttttatccccccttggg

SEQ ID NO: 32066 - DNA, 914 bp, Oryza sativa
  Clone ID: PAT_MRT4530_36311C.1
cagctataacaagttttgttgtgcaagtagtcacgtgatgtaacaagttttgcctcatgttacagattttgtaaggatgcttctctggtagcaatttaatatcatgttacagatttgcatacttcagttgaggtagatgtgagaggcgacgtcttgaattcaaattgtagcaatttttcagttgaggtagatgtgagaggcgacgtcttgaactaaagcagcctggtttgagcaccaacaatattgtagatatgcaataccagcatgacggcgtaggcagcgccgttgtaggacacgacgtcgacggagcactcaaagtagaccggggccaccggcgtcggctccggcgcgccacccaccccgacgccgccgtgagcagagagagaagagcggggaggacaccggcgccggctccgacaccgccacccgacctaacgtcgccgccagggaagggagaaaaaggggtagagggcagtgggcgccggctccgatgccgccgcgaggggaaggagaagaggggaggggtgcacgcgacgtcccgtgcaagggcggcggacaatgaaggagaagatggtgccgcacccgttggcctccgccgctccgtcgctagcgcctatggtggtcatcctcctccgtcgcgccgtcttctccaatcgccagatccgacggcggcgttagatctagccgcgggcgtagccaccgcgccagatcgggaggggagggccgccgctgccacctccctcccccctcccgacagagccgccgctcgtccaccctccaagccgcctccgccctccacctccgctggatttgggaggagggaggggagccgccgctggatccacccttcgcgtagccatagcctagagccgctgccgccacaggccttcggtcgaatccgcgccgagagatga

SEQ ID NO: 32067 - DNA, 328 bp, Oryza sativa
  Clone ID: PAT_MRT4530_36312C.1
gaagctccggctccactcccacaggcagctcaactggggtatgagccaaacgtcttctccttcgcaacttgtcttcaactgaggttgattgattattgcaagaatgagcatatgacatactcaacaagccacacagcaaatatgcaagtgcacaaggataccaaaggatggcataatataggctcatttgcaaaagcagcatttaacaaaacatttaagagaagaaaacgctctcctccggaacgtcggaaactaaagcgaaagaataaaaatcaacaaaacaaacttggggatcctctagagtcgacctgcaggcatgcaagcttga

SEQ ID NO: 32068 - DNA, 2397 bp, Oryza sativa
  Clone ID: PAT_MRT4530_36313C.1
atggccaccgccaccgcctcccgcctcgccgtgccggcgccgcggacgtcgccgcacgcgccggggcgccgtaggcctgccgctcctctcccctccgccccgccccgcccgcgcgccctctccgcggccccccgcggccgcgtcgtctgccccgccgcccccgcctcctcgccggcgtccaccaccgacgccggccaggaccgcctccagaaggttcccgtttcgaacatcaggaacttcagcattattgcgcatatcgaccatgggaaatcgacgctggcggataaactgcttgagctcacggggacggtgcagaaaagggagatgaaacagcaattcctggataacatggacctggaaagggagagagggatcaccatcaaattgcaggcagctcggatgcgctacatcatgaacgatgagccctactgcctgaatttgattgatacaccaggccatgttgatttctcatatgaggtttcccgttctcttgctgcttgcgagggtgcacttctggtcgttgatgcttctcagggtgttgaagcccagacattagcgaatgtgtatcttgcactggaaaatgaccttgaaatcataccggtactaaacaaaatagatcttcctggtgccgaacctgatcgtgttgcgcaggagattgaagagataattggaatggactgcagtaatgcaattcgttgctcagcaaaggagggcataggcataactgagatactagatgccattgtgactaagatacccccaccacagaatactgcaataagtcctctcagggctcttatatttgacagttattatgatccatacagaggtgtaattgtatattttcgagttgttgatggcagtataaagaaaggggacaaaatatgttttatggctagcggaaagatgaaattggagtattatctcccaatcagatgcaagttagtgaactttacgctggcgaggtttgaggagttacgtgaagcattggaaaagcttcaactaaatgatgctgctttaaaggcagtaacaaggttttcaatgcagtttgaaccagaatcttcaagtgccatgggttttggcttcagatgtggatttctcggtcttcttcatatggagattgtgcaggaaaggctcgagagagagtataacttgaacttaataattactgcacccagtgtagtttaccatgtcaacctagccgatggcgaaactgttgaatgttcgaatccatccttgcttccagaacctggtaaacggagatccatcgaagagccatatgtcaagattgacatgcttacaccaaaagagtatattggcccaataatggaactgggtcaagagagaagaggtgaattcaaggaaatgaacttcatcacagaaaatagggcatcagttgtttatgagctaccgctagcagagatggttggtgattttttcgatcaactgaaatctcgaagtaaaggatatgctagcatggaatattcacttatcgggtacagggaaagtaacctagtaaagctggatatacagatcaatggtgatcctgtggaggcactgtcaacaattgttcatagagataaggcatactctgtcgggagggcgctaactcaaaagctaaaagagcttatacctcggcaaatgtttagagtacctattcaagcatgtataggtgcaaaggtcattgcaagtgaagcactatcagccatcaggaaggatgtcttgtcaaaatgctatgggggtgatatatcgaggaaaaagaaattgctgaagaaacaggctgagggaaagaagagaatgaaagcaataggaagggttgatgttcctcaagaggcatttatggctgtgttgaaactagaaaaggaggtgctatgaaacagctttgccatcagcacaagtctatcgtttgtgtaaagacctctgtttggcctcaactgaatctaattcatttgagaggaagcatagtttgttttcagctgggccagaggaaccaattgacggacatatccatgtcggaaagtaaggagctaatctgacatgcactaattttgttccatatgtcaggctacgaagccccaaaaatgatgtggtcacacagctctgccagacatttctgcgatcttcttataccaaatagagtagtacgcattttgtttggttatcgttaattcccgtcactgagtttgtatcagaaaaggttattctgtaatttaattacttgtaatgctaagtactcttaaatcgtatgtgatatggacaaggaacaagagtgtagtacacaagagaaaagaaatggtcagcttaatcagaaaaaggtattgtaaaatggaataaaattaaggtcaagttactgaatataatatacgcagatgagtacaaaaaaaaaaaaaaaaaaaa

SEQ ID NO: 32069 - DNA, 407 bp, Oryza sativa
  unsure (1)..(407): unsure at all n locations
  Clone ID: PAT_MRT4530_36314C.1
ggagatcctcaaattggcaccggaatggcttcaccnttattgaaagcttgattgcttataaagangaatttggctcgataagggaacatgacangtctccagtgactaaccaaacacttgctaactgtgacactatccccaatatcncactgcgttcggccattcaagaatatctcaagcagaacaacatgaacaagtcatttgcactatatgaacagcagcattagtggcctgtattgagtttcatctgtgcttcgactgtaatagatcgtttctgtgccagtaagaaactaaggaggtagtgttagaatagtgtttttcttttttcagttgagctgtaaacctaagttaaaacttaggaaccaattcttttcattttacctgagtttttgaaaattaaaaaaaaa

SEQ ID NO: 32070 - DNA, 942 bp, Oryza sativa
  Clone ID: PAT_MRT4530_36315C.1
ccccccacaaaacccggagaagcgaaatcaaccaccagatacgacgagcgcctcgacagcgatccgccgccgccgccgccgccgcgtcgggtgtgtggtagggtttggggcgatggggcccccctccgcctcctcctcgccggcggcggcgccgcggcggttcggcgccgacgatgaggctgcggagggaggcgctggagtcggtgctggaggaactccggcgggcgctggacgagcttcgcgagtgcggggagctcggcgtgcctctccctgaccccgagggagccgttaacgacggcggcggcggcgaggagcagccggataacgaggaagaaggcggcggcggcggcgggcagcggcggtggtaacgatgatgattcggcggcgtcgttggcgggtcgctccgacggtcaagctatgtgactatgtgatcttcttaaatctacattcgaatcacccaatttttttcaaaaggttgatgaaattcagaagtcactgtatcaaaatgatgcagttgaacaagatccatcatgggatatagtaaaggcagtagatttgtgggaagacgatgacttaggtgatggatatgttcttgttaagaacgatgatgcaactgaggggatggctttctttattgccacatacatatcgtcgcttaaaacagccaatgaatgttctcctgatcaaattagaaaagtgctgaagttgctcatcattcttttgccagccctcaagaagacattttcatctcgaaagagaaaaggtaaacttcggaaggcatggaatgggacaaaagttatttataatgtagattcatggagtgccacagctattggaatctaccataatcaagcaattcttaaggtagcaactacagccttccggacgtcctgcagtgtgatatccaaatttctgtgagtaaattggctaacacggctacac

SEQ ID NO: 32071 - DNA, 381 bp, Oryza sativa
  Clone ID: PAT_MRT4530_36316C.1
ttttgtgtttttaatttttttgggttttttttttttaaaaaaataaatcgtgaatgtgggtcccaccataaacactgacaaaaaaatttttgtgagggcaacacaaaaggggcccccctaaactgtgggagaaacagaagccttttcatcccacatctggaggggggggcttacaattattaaaagcccaaatagtttatgtggcacgattcttaaccaaaatcccggggccaaaaacacaaatgattcatcccaccaaaaacatgccacggccatatagcctttcccaaaaaaaatcctcctaatcacaaggccgtagcggagattacaatgaccgggacgatgggccggtggacgatttaccaccgttagctccttggc

SEQ ID NO: 32072 - DNA, 603 bp, Oryza sativa
  Clone ID: PAT_MRT4530_36317C.1
atgggtgaaatccgcgcgctccacaacatggacgacgacgaggtcttcgcctacgccaaccgcatcgccgcgccctacgacctcgtcatgcagaccaagcagctgggccgcctccccgtcgtgcagttcgcgaccggcaacgtcgccacccccgccgacgccgccctcatgatgcagcccggctgcgacggcgtcttcgtcagctcgggcatcttcaagagcggcgaccccgcacgccgcgcccacgccatcgtgcaggccgtcacccactgcaggtcatcgcgtccaagcacgccgccgcctcgtcgtcctcgctggcacaccttcgccgtggagctctgcccggtggtactttttgttgccctgtgcaatctttgggtgattcggaatgatgtacatcatatcgatgttccagagtctcctaacgttgtcatggagaggatcgctttttggttggaagaatgggcaaatctgaatagtggtaaatcaccagctgttcactacccggcgaaatggtggcaaacgccttctagcggctggttcaaggtgaacatagatggagcattcatggcgtctgaacttaaggggtctgggagctgctag

SEQ ID NO: 32073 - DNA, 804 bp, Oryza sativa
  Clone ID: PAT_MRT4530_36318C.1
atgggcgaaatccacgcgctccgcaacatggacgacgacgaggtcttcgcctacgccaagcgcatcgccgcgccctacaacctcgtcatgcagaccaagcagctgggccgcctccccgtcgtgcagttcgcggccggcggcgtcgccacacccgccgatgccgccctcatgatgcagctcggctgcgacggcgtcttcgtcgcctcgggcatcttcaagagcggcgaccccgcgcgccgcgcccgcgccatcgtgcagtccgtcacccactgcaggtcgtcgcgtccaagcacgttgccgcctcgtcgtccttgctggcacaccttcgccgtggagctctgcccgaataggtacatggtgatggaggcattcatcgatacggcaggcaaggaccagtccgaccctctcattctcacccagctcaatagtaccaaagctatcagagacagcatccagatcaactttggggagtgtggcctagcagcttgtcttgggtcgttgcaaggtatttatgagctctattcatctatagtgaagtatgtaaatccgataacgaagctttgcgtgatccgagtttcccgtgaagatcaccagaaagtgtgggctgctatcaccatggtgaggagcattgggaaaatcccagtttcattcaatctgcgggatgtgagtggaagtatcagggcttgcaagaaggctgcgttggagtgtgaagaagcaaagtttgagtattacaagctggctgctggtgatcgtatcacgcccaagttcgtggagaccatggagagctgttttaacaaagattaa

SEQ ID NO: 32074 - DNA, 291 bp, Oryza sativa
  unsure (1)..(291): unsure at all n locations
  Clone ID: PAT_MRT4530_36319C.1
acataaacttggatcccctttagcgcccccctcctttttttatgggcctttaaaacacatgagcttacaaaagctgtcnatttgccatcaaatagaacagtactcctgtgcgtccacacaaaaatccaacacatattaaacggcacaaatcaagaagattacatgtactaaattgatccaaactaagaaaccatcatgtattacctctaacaccaaattcaaaaaaacctactctatgggtaacacaagacaagcaactctacccttaacctacaacaaagtgcacaccaa

SEQ ID NO: 32075 - DNA, 472 bp, Oryza sativa
  Clone ID: PAT_MRT4530_3631C.1
gtgttttttttttttttttttttttttttttttttttttttttttttttattctttttttttttcattttttttttaaaatcactttttttttaaatgcagcacagacacggtgggaaaaaaccatccaagacgcccgccaagggagccaaggggggggggggcccaaaaatcccccgggggtggcccaaaacccggggcacctaaaaaacccacccaaccttctgcgtaaacccaattccaacaaaccccaaaaggcccaaaaggcggggggggcccacctgaccacagggccgaaaaaaaaccaagggccggggcccgggggccacccgcgaaaccccggccccgaacttccggggaaacaaaaatccccaaaacgggggggaggaacaaccgggggccattaccggaaaaaggggaacacccggggaaggggggtcccccggcaaaattcccccaacataccggggggg

SEQ ID NO: 32076 - DNA, 651 bp, Oryza sativa
  Clone ID: PAT_MRT4530_36320C.1
atgggcgaaatccgcacgctccgcgacatggacgacgacgaggtcttcgcctacgccaagcgcatcgccgcgccctacgacctcgtcatgcagaccaagcagctgggccgcctccccgtcgtgctgttcgcggccggcggcgtcgccacccccgccgacgccgccctcatgatgcagctcggttgcgacggcatcttcgtcggctcgagcatcttcaagagtggtgaccacgcgcgccacgcccgcaccatcgtgcaggcgatcacccactgcaggtcgttgcgtccaagcacgctgccgcctcgtcgtcctcgctggcacaccttcgccgtggagctctgcccggcatctgagaacaaccaaggtaatgaggaggaagagaagaaagacgaagagcaaaaagatctatccatagctccatgcatgcttgaggaatgtttaattgaccaagcgcttacaatttctgaagatgagaaaaaaggtagtgacaatggtgctacaactgctcaagaggtccttgcttgggtgaaggaaaagaaatcgagcgtaaggaatacttggacgatcaaagaagttgattggggaccaaaccaagaccttttccaagtctacttctacctcaccacgtcacttttggtccatagaagataa

SEQ ID NO: 32077 - DNA, 468 bp, Oryza sativa
  Clone ID: PAT_MRT4530_36321C.1
atgcgctgcactgcgccgctcacgcgcgagcagatccaagaaacacatctcgtaattaccagctgccgacgacaacgacgaggactagtcgccggattcggtgttgacgacgacgtgattggtggtgacgacgagcttggattcgtcggccacgagcttgagggcctcgcctccatcactagctgcgaaggagaacctccaaatcagctctcgcctctcgccatagcagcatccaacaaaacaattaacagcggcggcggcggcggcgagaggaagaagaggaggatgggggagaacctggcgcggatgatggagagcgcgatgagggaggagagcatgagtgccaggacagccgcattcctcagcctcctcctcggctcccctcctcacctcgccgagctcctcggcttcttcttcttgcctccctttctccctctcctcagttgccgagctgggaagctgagctga

SEQ ID NO: 32078 - DNA, 282 bp, Oryza sativa
  Clone ID: PAT_MRT4530_36322C.1
atgtgtcaacaccggccagcacagacacaaaggtggaggtgcatggaagagctcatggaccaaacccgaggactcagtggtggcactgctactggagctgtgtctacaggacgggctgctcttcccgctgctcgaatcgtcaccgccgacatcatgtgtaaggccatagcgccatcgtcgccgcagatgtcggcatgtccgctgtcctctcgcttccctcctactttgggcgatgccaggaatgtgttcctcgacagcaaggaaagtattttgactcgttaa

SEQ ID NO: 32079 - DNA, 1215 bp, Oryza sativa
  Clone ID: PAT_MRT4530_36323C.1
atgctctgcgccaaccagctcctctccgtggagagctccacccgccaccgtcaccacggtgctcaaggtcctccccgagcgttgacttgtgcttccgccgctcagccgcatgctcctgcactccttcccgacgcgctccgctgctccttagccacccgcaacttccacgaactctttcacgcactgctcctgttcctcaacctttcttgtcagctccgccacggcctcgccatgcgccgcgtgccgttcccacgccgtggtgaagacggcgtgcatctgctgtcgcaaaccccttcctctcccgcagcgtgggctttatctgcggcgaccaccggcaccgccgcctcccgtcggtcactctcgtgcactggaaagagatgggggaagagaagggaaagaggaagaggagctgaggctgttgtcgatggctgtggtggagatggcgacgaaagagcgtcaggtgtcgccgtcactgttgccttcgctgggcaccccccgcctcgaaggtctcgcgcacggacagaaaggggaggaggagaaggaggaagtgcccaggtcgtggtcggtgacatcgccgccgccggccaccacccgtctttgccagcgagcgccgccgccaatggccgccacttgtctttgccagtgagcgtcgccgtcgcgccgcacccttgttgtcaatcaccaagaagaggactgcaggtcagaggaagagaggtagagagagtagtgcaaatagtcactgacaggtacatggtgatggaggtgttcatcgatacaccagtcaagggccagcccgaccctctcattctcacgcagatcaatatcaccaaagctatcaaagacagcatccagctcaactttggggagtgtggcctagcagcttgtcttgggtcgttgcaaggtgtttatgagctctgttcatctgcagtgaagtatgtaaatccgataacgaagctttgcgtgatccgagtttcccgtgaagatcaccagaaagtgtgggctgctatcaccatggtgaggaacattgggaaaatcccagtttcattcaacctgcgggatatgagtggaagtatcagggcctgcaagaaggctgcgttggagtgtgaagaagctaagttcgagtattacaaactggctgctggtgatcgtatcacgcccaagtttgtggagaccatggagagctgctttgccaagattaaaggattagagagctaa

SEQ ID NO: 32080 - DNA, 168 bp, Oryza sativa
  Clone ID: PAT_MRT4530_36324C.1
atgcctagccccctcctgcacgctgtaattgggttgggtggcctacacctggccgggtcgtccccgttgcctggccggcccacggacactgccatcactatttcacaacggggattcgggttcgggaagggaatagttgatgccaagtgcccaagcctggaggtgtga

SEQ ID NO: 32081 - DNA, 1391 bp, Oryza sativa
  Clone ID: PAT_MRT4530_36325C.1
ccacgcgtccgcgcctccatcgatcgatcgtctgcgatccttgtcacggcttgaactgtgatcaagaaacgcctttctgatcgatgcgcggttgattgatcttggtgcggacggagggagagagagagatggtgcaggagcacggcgggagtaaccacctgcagcagcagcatcagcaccagctggcgaagtacggcggcggtgtggctggcaccggcgtggcgcgggcgtcgaggaagaacaagcccaagaaggtgccccagcgcggcctcggcgtggcgcagctggagaagctccggatcgaggagcagaagaagatggagggtggcgccgcgttgtcctcccacggcgcgctcggcggcggtgatggcgtcctcggccacctccctcctccgccgccgccgtcgctcgcgttgagcgccctgcagtcgaggtccgccgcggacggtggcttcccggcggcgctctggagcccagtggatcccatcaaacacccgtacaagaggagcctgtgcccacagcctccatccccgatggtgagcacgggcctgtcgctgacggcgtcggcgcgccacccaacggagcccccttcaaaccaaatgtacagcagcagcggcagcaggagcagcgccgcggcggcggaggaggagagggagacgggcggcgtggacaggtcatggcctttcatgttcaagggcatggccgccttcaggacgacgacgagcagagctcctcctctggtggcgcctttctcggcgaggacgacgaccaccggcgagctggcagggttggccgatgttggtcctgacctgagcagatacgagttcagagcaacaaattatttcagtgccaatgcaaattattcagactggacatctgactttgctcactgcaaaagcagcaaggagaacggccgtgccagagaccctgccttcctcaccttgagctcacagcctccacacctcctcaagcagcctcatgtgggaagcaacatttcatcatcgtcgtcgcagccattctacagcttccttccagtcggtccggttcgttgcgaaaggaccttgagcgagtgcaagaccgatgtgtctgaaggcgtcgacttagaactgaagctaggaaattgctgaactgaacttgtcctgttgctttttgaaaaaaaaaaaactgcaatgaggtttacccaattaccctgttgtgtgaaaaaaagtaaaaacttgtttagtcagtaagcccaaatgtataatcagttgcttctaaaaaatgttttcccccccaataatcatctgctaaaggttttatctggcccccggtccttttctagcaaagcaaaaaagtgtgcataatggaaacatgaagcattttttttacccccatgggtcccgattaacaac

SEQ ID NO: 32082 - DNA, 753 bp, Oryza sativa
  unsure (1)..(753): unsure at all n locations
  Clone ID: PAT_MRT4530_36326C.1
ctttttttttttttttaatataaatgcttcatgtttccattatgcacactcttttgctttgctagaaatgaactggggacagagtaaaccatcagcagatgattattgggagggaaagcatcttctagaagcaactgattatacatctggtcttactgactaaacaagtttctactttttttcacacaacagggtaattgggtaaacctcattgcagtttttttttttcagaaagcaacaggacaagttcagttcagcaatttcctagcttcagttctaagtcgacgccttcagacacatcggtcttgcactcgctcaaggtcctttcgcaacgaaccggaccgactggaaggaagctgtagaatggctgcgacgacgatgatgaaatgttgcttccctgagatgccatggcactgaagtcgttgtatgatggcaccacatgaggctgcttgaggaggtgtggaggctgtgagctcaaggtgaggaaggcagggtctctggcacggccgttctccttgctgcttttgcagtgagcaaagtcagatgtccagtctgaataatttgcattggcactgcatatcacagatcaaaagtaaaatcaaattatccgtgagaatccaattcgaaaagagaaaagaatgcacnccgaatgtgctactctttttttcaaggaaaacaaggtattcaagttcattcgtttggtctttgccttttgctactatngttgntgggacacagaaaactcatgttcag

SEQ ID NO: 32083 - DNA, 3167 bp, Oryza sativa
  Clone ID: PAT_MRT4530_36327C.1
cttgtaatgttgaatgagataggggccgagaaccgtgtttggtgaattgctttattttctctagaaggatgagtttgccaagtgccctttttttggaaatctaaaaccagttattcaatcaaaaaaaaaaattactgcaactgcaagtacagcggaaaaggacgcgagaataagcaatttcgtgggtcgtagtaattcactcgtaatcctctttgctccgtggaactaactagtgtttcaccctagtaacggtgaatgagatcggcgaatgctgcagggttcttctcgtagtgatcgatctcagcctttcgtacagcaataacggcagtgacttaagtttatcgccgatcaattcatgcatgatttttgttctgcagctagtgcttcgacagatttccatcaagttccttcggccatccttttgagcttggagttggaggcataaccgggacggtatgatgtcagttggtgtcaggcaacgtaaggctctctcccgagtccatcaatcccagcagcaactttagcttcgcttggtcccattaagacattgtgatcgaattcccataaactcagatgcacatgagaaccggatccaatatcattcaagtcaggttttggaagaaaagttgcaagtagcccatgctttcgagcaactgatttaataatctcacgggcatatatcagtttgtcagcagcaagagtgcacaacacatacttcaaggctatctcaaactgcccttttccagattcagcatgcagctgctcaaccacaatttccgccgctttaagagaagtatatacttcttgcaacacagatgatgcaccatagatcgccgtagttgagcagtagggggtattgtcaaatgggacccacagctccttttcaccacttactgcttttttgcgtaggaaaaattcaatctcacaacccgccatcataccttctttatgggagctagctcaaggagctctttaattgatgatgtcattccttgaacactaagttttggaattgccaagccaaaatcaaggtatacctgggactatttcttcgcgtcttgaccatggaagcctcaatagtgttgacatatccggcataagcctgatctctcctacaccagtaaggtttgttccatctgctgggccatcagtaaatgaagtcattcccatcgatgcaaaagtcagaccaataccctttttcctagcaatttcataaggtgatatgatacagcaatttcaagactgcaagtaaattgaattgtcaatcaggttcttatttgtaatccgaagaggcctctgacctgataactccttactttgtgctattgctgttatctgaccgactgacccgttggcaacattcaacttgtatagatacaatgcatttcgtctaaatatgtcctcaactgcttcaatagcttcttgaatgctaaggtcaccatcttcacatgcagctgagagtacacgataaacaacatcacgtgccctccttgcacctaggtaatatgtctctggaaaagcataaccatctgtgctgaacatgaccttctttatgggagctagctcaaggagctctttaattgatgatgtcattccttgaacactaagttttggaattgccaagccaaaatcaaggtatacctgggagtacactgatgctagatatgatgcttcctttgaaaatggataagaggcatgtaaaagaacaatttggcacttagagaatcttgtgtcctcaagaacagcacgcagatggagagggttgcactttcgcaagtccaggtccttatctccaaatcctgtgtgaatctgcattggcaggtgatatgatacagcaatttcaagactgcaagtaaatagatagtcaatcaggttcttatttgtaatccgaagaggcctctgacctgataactccttacgtagtccatcctctgcatctgtcttgctaatatttggatcaatctctaagccacttctatatgcagctatatggggaggatatgatttcagcttagtgacaaaaatttcagtaaaagagtcaagtgtccagcttgatgcgctgaatgattcatcattaataattgtttctgccagcttttcaatcctcagaattctgccaactgtaggagcaaacgccttgtgtgcctccagttcaagcatcttgtcaaagtctatgccatcatctataagaattgcagataagttggcagccttgaagcactttgagcttatagacgacaacccttcagcccttctgaactcctccaccttctcaagtgaagcttcacagttgtacaatgcagcgatgtccctcaggcttctcttgaaggagagggtgtggggagcgagggcgagggcgtcggcggcgtcggcctcggagaagcagcggaggaaggggaacgcggagccgtcggcgacgaggttgtgcgcgtgcgcgtccaccgccgccgcctcctccgccgcgcgccgcagcgccgcgtacttggactccatctccatctccgccgggctccggctccggcggtcgtcgtcggtggccgcctcgccgccgctcgctcactcgctcggtgtctcgaggatttttttttttttgttttgtttttaagaaatttttttttctctcgcttcgtttgctatgctgtttatctgaccgacttgacccgttggcaacattcaacttgtatagatacaatgcatttcgtctaaatatgtcctcaactgcttcaatagcttcttgaatgctaaggtcaccatcttcacatgcagctgagagtacacgataaacaacatcacgtgccctccttgcacctaggtaatatgtctctggaaaagcataaccatctgtgctgaacatgaccttctttatgggagctagctcaaggagctctttaattgatgatgtcattccttgaacactaagttttggaattgccaagccaaaatcaaggtatacctgggagtacactgatgctagatatgatgcttcctttgaaaatggataagaggcatgtaaaagaacaatttggcacttagagaatcttgtgtcctcaagaacagcacgcagatggagagggttgcactttcgcaagtccaggtccttatctccaaatcctgtggaatctgcattggcaggtgatatgatacaacaatttcaagcggacgcgtgg

SEQ ID NO: 32084 - DNA, 1306 bp, Oryza sativa
  Clone ID: PAT_MRT4530_36328C.1
tacgtcctctaccactccggcaacatccacgacgtcgtcatcggcccactcaaacccagcaccacctacttctaccgctgcagcaacgacacatctccctggaccctggtccctgggcctgctgctgcggaggtggcgcggcctgcgacgacaccgccccggcgtgatgcgcgacctcgcgggggtcctcggccgccggtaccggacctgcgccgtggtcgggaacagcggcgtgctcctcggctccggccgtggcccgcagatcgacgcgcacgacctcgtcatccgcctcaacaacgcgcgcgtcgccgggttcgccgcggacgtcggcgtcaagacctccctctccttcgtcaactccaacatcctccacatctgcgccgcccgcaacgccatcacccgcgccgcctgcggctgccacccgtacggcggcgaggtgcccatggcgatgtacgtctgccagcccgcccacctcctcgacgcgctcatctgcaacgccaccgccacgccgtcctccccgttcccgctcctcgtcaccgacgcgcgcctcgacgcgctgtgcgcgcgcatcgccaagtactactcgctgaggcggttcgtctccgccaccggcgagccggcggcgaactggacgcggaggcacgacgagaggtacttccactactcgtcggggatgcaggcggtggtgatggcgctcggcgtctgcgacgaggtgagcctcttcggcttcggcaagtcgcccggcgccaagcaccattaccacaccaaccagaagaaggagctggacctgcacgactacgaggcggagtacgacttctacggcgacctccaggcgcggccggcggcggtgcccttcctcgacgacgcccacggcttcaccgtgccgccggtctggctgcgctcggacaagtttacacatgcggtgccattatcccaagttgatcttgctcgtgctcgtaaaaaggagatgcagaatcatcaactaccagcaggaagtcttgatcacaactcacagaaatggggtgctcgtatctataggcgccatgagatctccctttacgaaaatgcaactcctgacgccagcttcagttggctctgtcatgatgatgatctctgtgctgcacattgcaatgcaagacggacacacacatccagtcatacagatggagttcaatgctgctacaaggtcaacatgtcagatcagaccaagaatccaaatctcgaatccaagattattctgccggtagtaggacctgctgcatccatcccttgcccatccatcagatcagaaattcagatgaagtag

SEQ ID NO: 32085 - DNA, 546 bp, Oryza sativa
  Clone ID: PAT_MRT4530_36329C.1
atgaagtggacctcggagccttcacaaactgttcttcgaaccttggtacatttgaagccttcacgaactgttcttcggctcttcattgattctgacatgtccttgactgatgatgagacattgatattgatgaaggcccttcacaaactgttcttcggaccttcacggattgatgatgatgccagctttgatgggaagctgatgatgatggttaactccgacgagttgttgatgacgaagaccagctccgacgtgaagctgatggacaaagaggacgtcttgctgctgtcactgctggaaccgaactggaggacgacaggaggattgacgagaggccaccacgagctggacgatggctgcaagcctgcaattaccggatctgacgcggccgagcaggcccaggcgtcggcccacgctggacgagcgggagccgtacggagaaggacatgtgttgaagacggatttgatcagcagagggagtccgacatggcgacggcgatttttcatggctggtgcggctgtggttttggagaaaaaggaaagtga

SEQ ID NO: 32086 - DNA, 252 bp, Oryza sativa
  Clone ID: PAT_MRT4530_3632C.1
atggcgcccatgacacgttcccagagaggtaaagatacacagccagagggccagagtttagggaagcagcagcagcagcaaatgaaggacggcggcgatgaccagagggcgtcagttgcgaagactgacagcatctcagccacggagagattgcaacgggcctccagtacacgcggcggcgagctcgtcgcagcggcggcaaagtctcggagacagatggtcctacagcagctcggcgcggcggagagctga

SEQ ID NO: 32087 - DNA, 1884 bp, Oryza sativa
  Clone ID: PAT_MRT4530_36330C.1
atggatcttgacaagtctacctccaccagcgcgtcgctgaagaagttgcaggaagatggcgcccttcccggtcgcgggaccgcggagagagaagtgggaggtactgaaccccagcctgtcctgggtcgcatggttgcgatcgaggactttattctctgtggttttcttcctccgccttctgaatttcttctcttggtcttgaatttctacggtgttttcttgctccacttgaaccccaattccatcgccttcttgagtatcttttcgcatctttgtgaggcctacattggggtagagccgtttcttgacctcttccgcttttactatgagttacgctggatggaacccaaaaaggtgtccgggtgtgttggtttccgactttgggatggcctgaagtcgcgatacatccccttccagtgcccctcatctcgcagcaaatggcgggggaggtggttctatcttcagatagaggattcggatccggtcttcgttgttcctgaggagcaaccaaacaagattccatcttgggccaccaaacccgccttgaccccatccctccaatctttcatcgatatcgttgacgacctccgagaacaggggttgtcggggtatgaagtcgctgccgacttcattggtaggcggatccagccgcttcaggctcgagaccatccggcctttgattattctgggccagaggacgcgacccgggctctccctctgactgatatcatcgagccacttgtggaccatctggtggcggcgtcgctgaaggagaaagtcgccaaggaggcgtctgacgctgctgctgccgctgccataacgagcggcggcaacgttccgaaaaaggggaggacattctcctctgtggtcagacatcgtcggaagacgtccaccccctcgcctgtttcagttgcagctttacgcagggcggcgcggccaaaggcggcgcaagatgggtctagagggacctccaacgcgtctcctgtcgtggtcgcgcctaggagccgcgaggcgacacctaacggcctagctagcgatcttgcggctggtcggggtctgccggctgccgttctcacctgggaggagctccaggtcgagatggggtgcctcctcgaggctggtgctcgtggcattggccacgagatcacggaggtgaaggcggcggcggcgtcgtcggcgaatgagcgtgctgatcggcttgcgcgcgatttagcggaggttcgcgaggacctccataagatgcgggagctggtggctggcaatgagcgacaacggcaagggctcaagcaccgtatgtctgagcttgagaaccatttgtcagagatccgtggctcactgcagtgtggtgtcaaggccaccatcccgacgaatcccaacgagttctcgttgtcgtcttcgcttgcggaactggcaacggcgatggaggtgatcccctccaagcacgcggccatggtcggagaggagacgtccaacgggatctataccggggcgtgccatgtccttgcgtgtgtgaggctggcgcatcctgaactcgatctgcggaagatcttggatcagggggcggctagcgatgcgcgcaaggatgtgatggaggagtattttgatcttgagtactttgttgtcatttgtagagatgttgatgtcgaggatgtccagcagcgcgggcagcctgagttgccagtggtcgttccgttacttgcgtccgagccacatgtgccggagggcgatgtagctcaaaattcgcctgtggagatgagcatggcaacggctcccttagacctcgagagtgcgcttgctgaccaggatcgtcgcatccagtattggaggacgaagtttgaggtcgcggaactcgagaggactatgttggaagtgaggaaggactag

SEQ ID NO: 32088 - DNA, 657 bp, Oryza sativa
  Clone ID: PAT_MRT4530_36331C.1
aggacgagcagctgccacggggtcgcgcgctggcaagcttcccctgccacggccacggcctcgccgcggcacggcggcgggcgcagcgatggcacgagcgccgacactgggggctgtcattacacggtgtcccattttggacataccagctgagtagcagatatgggtgggcagaaaaagaccgaaccgaaagaccgagaccaagaccgaaaaaatcgagaccgagaaatttggtcatcaattcggccctaggtagtgaaaaaccgaattttgttcggtcaattcggttggtctcctcggataacaaagaccgaaagaccgaagatcgagaccgaaattttcggttagaccgaatgcccacccctagtagcccgttttacagtgtaagactttctagcattgcccacatacatataaatattaatgaatctaaacatacacatatgtctagatttattaatatctaaatgaatatgagcaatgctagaaagtcttacattttgaaacggaggaagtataatacatgggttagacactaatgtttctttttttttaattcgaacatttttacggtacttggtactccttccatctacttttcatagttatattttatttggcacaatgaccaaggataagtaattctacttatcatcc

SEQ ID NO: 32089 - DNA, 2262 bp, Oryza sativa
  Clone ID: PAT_MRT4530_36332C.1
atggatcttgacaagtctacctccaccagtgtgtcactgaagaaactgcaggaggatggcgcccttcccagtcgcgggaccgcggagagggaagtaggaggtactgaaccccagcctgtcctgggtcgcatggttgcggttgaggactttattctctgcggttttcttcctccgccttctgaatttctccttttggtcttaaatttctatggtctttccttgctccatttgaaccccaactccatcgccttcctgagtatttttcacctttgtgaggcctacattggggtagagccgtttcttgacctcttccgcttttactatgagttacgctggatggaatccaaaaaggtgtccgggtgtgttggtttccgacttcgggatggcctgaagtcacgatacatcccctttcagtgcccctcatctcgcagcaaatggcgggggaggtggttctatcttcaggtagaggattcggatcctgccttcgttgttcctgaggagcagccagacaaggttccatcttggaccaccaaacctgccttgaccccgtccctccaatctttcatcgatatcgttgacgacctccgagaacgggggttgtcggggtatgaagttgctgccgatttcattggtaggcggatccagccgcttcaggctcgagcccttcctgcctttgattattatgggccagaggacgcgacccgggtttctcctcgaggcttgaatagtgcaaccgtggagcgccgcgtcagccaactgatgatcagcggcccgacaacggcgagcaacgtccccgtccccctttgcgagaaaggggcagccgagcgtgacgctgccatcaatgctcttcctctgactgatatcatcgggccgctcgtggaccatcaggtggcagcgtcgctgaaggagaaggtcgccaaggaggcgtctgacactgctgctgccgctgccacgacgagtggcagcgatgttccgaaaaaggggaggaaattctcctctgtagtcggacattgtcggaagacacccaccccctcggcctcggacgcgtctcccccgcctccgcgatggcagcggcttgtgacgctcagcgagaacctttcgcagggcggcgcgggcgaaggcagcgcaagatgggtctgggggacctccaacgcgtctcctgccgtggcctcaacggatgtcgttgtcgtgcccaggagccatgaggcgacggatgtctgggggatcttgtggctgattgtgctccaggttgagatggggcgcctcctcgaggctggtgctcgcggtgttagccacgaaatcgcggaggcgagggcggcggctgcgtcgtcggcgaacaagcacgccgatcggctagcgcgcgacctggcggaggttcgcgaggacctccagaagatgagggaactggtggccggcaacgagcgacaacggcaggggctcgagcatcgcatgtcggagcttgagaacaacttgtcggaaatccatggctcattgcgggtcacctatactggtctgcaccagctcgccggggagtgcggtatcaagtccaccatcccggcgaatcccgatgagttctcgctgacgtcttctcttgcggagctggtgacggtgatggaggagatcccctccaagcatgcggccaggatcggagaggagacgtctaatgggatctacaccggggtgtgccacgtccttgcatgtgtgaggctggcgcaccctgaactcgatctgtggaagatcttggatcagggggcggttagcgacgcgcgcaaggatgtgatggaggaggatcgtcgcatccagtattggaggacgaagtttgaggtcgcggaactcgagaggactatgctggaggtgagaaaggaccaggccgtagagacactccggggtcgtgaggtgtggttcaactcgtatctgaagagttgctgcacatccatgtcgagagtctgtagagagctccgaataccccgtggggatcccgaggaatcggctgccggatacatctcatggctgaatggggcctatgcccagctcgaaggcatcggtcaacatatcgacgaggccttgaagcaggagtgtcgtcgctcaagccgatatgccggggggcacgtgttggcctgcatacgagatcatcgttcgcagctgcatctcgagttcctccgcgaagggttttctcgttcccagagaactcctacggagatagatggcctggcaaagtcgatggcgccgctggcggagaaggttttccagtcgatggactag

SEQ ID NO: 32090 - DNA, 102 bp, Oryza sativa
  Clone ID: PAT_MRT4530_36333C.1
atggtctccctcagcctgcccgccgtcctcctcaccttcgccactgcccaggaatcaagaggggttcctgcaaagaggccagctccagattactttctgtga

SEQ ID NO: 32091 - DNA, 460 bp, Oryza sativa
  Clone ID: PAT_MRT4530_36334C.1
gtaattatcatgcataaaacggaaggatatatttatttttgttggtgcaataattaaatgagtaaagtccatcaccggtccctaaacttgtatcgctgtgttatcccggtccctaaactcgcaaatcgatcgttcaggtacttaaacttgttcgactgtgtcatctcggtccctaaacttgcagatcactcgttgagatcctccaacttattcagttgtgtcaccccggtccctaaataggatggtctaaaaactttatatcaaaattttagagaccggggtgacacaactgaacaagttggatgacctaaacgagtgatctacaagtttagggaccgagatgatacagtcgaacaagttaaattcgtgtttaaaatccataccaaccttaacgtgggacctagcctcgagcaaaataaatataccaccatcccctttgccttttctagcttgtctcctc

SEQ ID NO: 32092 - DNA, 247 bp, Oryza sativa
  Clone ID: PAT_MRT4530_36335C.1
ttggacagaaaaattatttagatttattatattatattatattatatttaactaaaatcttttatatttaaaaagaagggagtacatcgaaatcaggataaccctgattcaacgtttctgcgagtaacatacatacgagccatcgagatgataattagattttatattaccatttatcggttagaaacgacggcgatattcaaaggggatacaatttcagtacatatatagatcatcggacaaaggt

SEQ ID NO: 32093 - DNA, 345 bp, Oryza sativa
  unsure (1)..(345): unsure at all n locations
  Clone ID: PAT_MRT4530_36336C.1
cagttttgtaagaccttggtgggntggggtgctggggttgggctgaattgcctggcacctgcctgcgcctgctgttgcttgttgtgttgtgtttgcctggncttggatggaaaccgatggcgccagatnatgcatggcgtgattgcgtgaaaaaatgggtgatggcacatgtttgcttgtggcttgttgcatggatgatgaggaccaagttgctggcatgancataagatgctaaaccatacgatattacaatttacggacccatgaacataagatactaaatactttgtatcgaacataattttaactcnttaaaaatcccaataaaaaaaaaaaaaaaaaaaa

SEQ ID NO: 32094 - DNA, 353 bp, Oryza sativa
  Clone ID: PAT_MRT4530_36337C.1
atgggctattttgatccgggttcctgggcaccccccccattgggctccgcccctaacggctcgtcatccaactccgtcaagctcctcgtcgcgctagcggagaaggccagcgccgctctcgtcaaggctgcggcggtggtaccctcccctgccggaggccgtcgccgacggggcgcggtggcgccgctcgtgttcccgctcctcgatgagggagagatggttgtggcagcggaggccgcgcccaagccagcggtggtgtggaagcggcaggtggcgtgccgaggcgggagggcgagcaagcggcctgctcggcgctcgcggaggaggcatgggctccccgacagacctctttt

SEQ ID NO: 32095 - DNA, 458 bp, Oryza sativa
  Clone ID: PAT_MRT4530_36338C.1
ggatcccccgggctgaggctgcgctcctctcggtctcgcggagtcggtggcgccgcggcgctgcggcgttgggcggcgcgcgcgccgccgaaggccgaagcgttacgtggaggccgcacgcacgccgaccccccctcccctcgtctccgtcgtcgtcatcatccactctcctctcccctggttttaaagaagacgagaccgccacttcttcgtctcatccaacccaagtacccaaccggggtcgtcatcgtcgtcttcctacttcctcctcctccccaccccacgcacgcgcgtgcggcgccgatcgcggccgacgccgagatttccgcgtgcgcgtggagatagggcacacccgttctctctctccctctctcgggctctgaagcgcttcgcttggtttggcgtgttgtttggctgccgtggcagtttactcctgtcacatctcgcagagggttctg

SEQ ID NO: 32096 - DNA, 336 bp, Oryza sativa
  unsure (1)..(336): unsure at all n locations
  Clone ID: PAT_MRT4530_36339C.1
gtcggtcgaccgaagcagagtagagaggagaggagctgacgcatcagccgtccgatcgagtgatccgatgctctcgtctttcacctctgctgctctccgctgcgcgcgcgcggcgctcggcgagggtacgcgcgagggttacgcgcgtcggctcgtcggcgatagcggcgcgcgcggtggaggaaggcgctcgggatacgagcgaagacggtcgtcgcgtcgcgcgaggaggtgtcgtgggtnccgaccccgtgacggcactaccggcctcaacttcgcgcggccgacgcnacctcggcgccactcgccgagtacgccnggtatnggacctcgcgt

SEQ ID NO: 32097 - DNA, 1166 bp, Oryza sativa
  Clone ID: PAT_MRT4530_3633C.1
gttaaactggaacaacaaaaaaccaatgccgagctttaatttgtttctgttacagcagctctgatgtagacaagattataagaaacattaccaactcagctcttcgtcaggagataaatcttagcacaaacaccctcccaacagaatataaccgtgaaaaactacagtgaccactagagagcttatgacagtccagatatcactctttcacacttctcctcaaggatcctcacggcttctgtgaagagtgcctctggcggtagccctccagtagactcgattgtaacgtttcccaggtcttcaatatcaaaaacattgaccgggcactttttcactagcttctctgcgttatcacctttgatttctttacggaaaacaacctggcctggcccaagccttgcaatagttatatctttaaatttcacaccaagaggcttttctaagatatccttctggctttgactgaaggaagtgtaggtcttttgtttgtacctagattgagcaggagatgccaaaggtagtcggctgccttctggcaaccactctaaatcaccagacttcactgtgcataaaaaactatgtgaaaagttgatacggtagcagacacttttccacattccacaaaatacaattcacgcaagtgctgtaagccgccgtggaccctttctacacgaaacatggagtttttacatattagtgtaagattcatttcggagatcatttttttacctatatttaaaaggacgtgtacgtctttcaatttgaatccagattgacctatgtaatagaactttatctgccaaaactctggtgttgtcaaccattaatactttctcgctttaaattgtaggaaactcttttataaggattccccgaaatgcgttaactattgatgtatcattaccaatcatatcaaactccatatcattttccgtaagtcgacttatctcaactttgaagtttttgcaaaatttctccgctgacacgctattatcaattcccatagcagaataagcaccagcgtattgaaaaccttcagtattaacgggggcgtcggccttgcagacaacacgcgtgcgctggacctcaaggtgttccggaagcttcttttcctgctgcttgggctcgtgatcgtcgtccgtgtccttgctcgatttgctccccat

SEQ ID NO: 32098 - DNA, 816 bp, Oryza sativa
  Clone ID: PAT_MRT4530_36340C.1
atgggtagcttgccactcgacgcgctccagccactggacccggacaccttcgccgccgactcctccgccgtcgtcgacttcctcgccggctactaccgcgacgtcgacaagtaccccgtccgcgccgccgacctcgagcctggccgcctccgcaggctcctcccggaggccgcgccggagttcggggagccggcggagcggacctcgctgacccccagcttcttcgcctacttcccgatgaacgccagcgccgccgggttcgccggcgagatgctctccgtggggctcaacgtcgtgccgttcatgtgggttgcgtcgccggctgccgtggagctggaggccgtcgtggtggactggatggctaggctggggagcacctgcgaggccgtggtgtgcacgctcgccgccgcgcgggaccgcgcgctggggaggattgggcacgagggcatcgtgaagctgggggtgtacgcctccgaccagacgcacgccacgttccagaagggcgcgcggctggtcggcatcacgccggcgaacttccgcgtcgtcccgacggcggcggcgtcggggtacgcgctgacgggcgccgccgtgcgcgccgcggtggagggcgacatggcgcgcgggctggtcccgctgtacctgtgcgccactgtgggcaccacggggatcggcgccgtcgaccccgtccgcgagctcggcgaggtggcgcgccgccacggcatgtggctccacgtcgacgccacgtacgccggcagcgcggcgatctgcccagagtccagggctacctcgacggcgccgagctcgccgactcggtga

SEQ ID NO: 32099 - DNA, 387 bp, Oryza sativa
  Clone ID: PAT_MRT4530_36341C.1
atggtggctgatactgatagttcaaattgccccctggtaattttggaggttgaccaccaggtgttgcaaacccagccaatgcattcattggactttgttgctgaattggctgaacaacctgttgcctcaacggtgtctgctgaattggctgcaagacctgccgtcttggtggcgtctgctgaactggttgcacaacctattggattggcggtgtttgctgaattggttgcacaacctgctggattggcggtgtttgctggattggttgcacaacctgctgccttggcggtgtttgctgaatcggctgctgctgggctggatcaatggtgtgttgaggatgtgctggagccgatgctggtgccatcggctgagccgacggtgcattaa

SEQ ID NO: 32100 - DNA, 1788 bp, Oryza sativa
  Clone ID: PAT_MRT4530_36342C.1
atgggtagcttgccactcgacgcgctccagccactggacccggacaccttcgccgccgactcctccgccgtcgtcgacttcctcgccggctactaccgcgacgtcgacaagtaccccgtccgcgccgccgacctcgagcctggccgcctccgcaggctcctcccggaggccgcgccggagttcggggagccggcggagcggatcctcgctgacgtgcgccgcgacgtgctcccggggctcacgcactggcagagccccagcttcttcgcctacttcccgatgaacgccagcgccgccgggttcgccggcgagatgctctccgtggggctcaacgtcgtgccgttcatgtgggttgcgtcgccggctgccgtggagctggaggccgtcgtggtggactggatggctaggctggtgggcttgcctgatcgcttcctcttctccggctccggcggcggcggcggcggcggtggcggtggtgttctgcaggggagcacctgcgaggccgtggtgtgcacgctcgccgccgcgcgggaccgcgcgctggggaggattgggcacgagggcatcgtgaagctggtggtgtacgcctccgaccagacgcacgccacgttccagaagggcgcgcggctggtcggcatcacgccggcgaacttccgcgtcgtcccgacggcggcggcgtcggggtacgcgctgacgggcgccgccgtgcgcgccgcggtggagggcgacgtggcgcgcgggctggtcccgctgtacctgtgcgccactgtgggcaccacggggatcggcgccgtcgaccccgtccgcgagctcggcgaggtggcgcgccgccacggcatgtggctccacgtcgacgccgcgtacgccggcagcgcggcgatctgcccggagtaccagggctacctcgacggcgccgagctcgccgactcggtgagcatgaacccgcacaagtggttcctcaccaacatggactgctgctgcctctgggtggcgagccccgccgcgctcaccgccgcgctgtccaccgacccggagtacctcaagaacgccggcggcgggaagccccaggccgccgccggcgccggcgccatcgactacaaggactggcagatctcgctgtcgcggcggttccgcgccatgaagctctggttcgtgctgcggcggtacggcgctgcgggcatgcgcgcgcacatccggcgccacgtcgccatggccgagtggttcgagcgcgcggtgagcgccgacgagcggttcgaggtggtggcgaagaggaggttctccctcgtgtgcttccgcctccgcggcggcggcggcggcggcgacgcgatgaaccgcgagctcctggcggcggtgaacgcgagcgggcgggcgttcatgacgcacttcgtggtggagggcaagttcgtgatccggctcgccgtcggcggcgccatgacggagatgaggcatgtcggcgacgcgtgggagctggtgcagcgcacggcggagcagctgctgcagcgccgggggacacgtaaaaacgaggatgaaaatccacttccctggtagcatgataacatgtcgcctcccaaacaaaacttaaattcactttactctagtagaaacaaaacctccccatgtgcctgaattgggcattttcgtctctactatatatgatgaattctaattcatctgagtggaacaggaaatctttcatattgatatatcatatgaagatgttcctaaattggttcgataactctcagggggacacgtcctagcgaggatgaaaactcaattccctggtag

SEQ ID NO: 32101 - DNA, 1546 bp, Oryza sativa
  Clone ID: PAT_MRT4530_36343C.1
tcctcctcctccccctagttccgctgcgtccccccgcgcccgcgcccgtgccccgccaccctccggggcggccgcaatggcgctcacctcccagagcctcttcttctccccgctggccgccggcccatcccggagagtccgggggcggggccgctccacctccgtgtcagccgccgcctccgcctcgtcgcacaactcgcagccccacggccacccccaacaacccctcgccgtcgcgtcgtccagctccaaatccgaatctaagggctcgaaaaccttcgccctcgcctccgccatcactgccgccgcctctggtgcattccttctcgcgtcatctggtggcgggttcgggggcggcgccgggggtcctctcggcggtggaggcggtggatggggcgccggaggaggaggaggtggtggtggtggtggcggcggcggcgggttctggtcgcggatcttctccggcggcgcggcgcacgcggatgagaagtcgtcgggggattgggacccgcacgggctcccggcaaacatcaacgtgccgatgacgaagctgagcgggctgaagaggtacaagatctccgagctcaagttcttcgaccgcgccgcgggagggggaggcgcgttcacggggcccgaggattccttcttcgagatggtgacgctgcagcccggcggcgtgtacaccaagtcgcagcttctgaaggagctcgagacgctcgtgtcctgtggcatgttcgagagggtcgacctcgaggggaaggccaagcccgatggcacccttggcctcaccgtgtcttttgtcgagagcgtgtggagcgctgctaagcagttcaagtgcatcaatgtggggctaatgtcgcagtcgggccaggttgacttcgaccaggacatgacagagagggagaagatggattacctccggaagcaggagcgtgattaccagcagcgtgttcgtggtgccaagccgtgcatattgccagataacgtgcgtggggaggtgctaggaatgatgaagaagcaggagaaggtgagcgctaggctcctgcagaggatcagggaccatgtccagaaatggtaccacaatgaggggttcgtctgcgcccaggtggtgaactttggaaacctaaacaccagtgaggttgtttgcgaggtggtcgagggggatataaccaaagtggagtaccagttccaggataagcttggaaattttgttgaggggaatacccaaattcctatcatagacagggagctcccacagcagcttcgacctggccatatctttaacattggagcagggaagcaagctctgaagaatataaattcacttgctttattctccaatatagaggtgaatccacgccctgatgaaacaaaagaagggggcattgtggttgaaatcaagcttaaagaattagaaccgaagtcagctgaagcatccattcaacctggaggaactgtgtcatttgagcaccggaacatctatggtctaaacagatccattgttggttctgttacatccagcaacctgctcaaccctcaggtttag

SEQ ID NO: 32102 - DNA, 543 bp, Oryza sativa
  Clone ID: PAT_MRT4530_36344C.1
atgtcgcccgccgctgtgtctcctccgcgagcctgccgcccctgccgctgcctcccctcctaccagatctggcggatgggagggctcctccccgccagcaagccctttgtcacctcccctcatcgagcccgccgcttcccctcctcgagcaactccgctcgctgtcgaagcaggatccagccaccccgtccgccgccgacgctagatctagacaccccgcccgctaccgaccccgtcggcccctcctaccgccgactatgcctgccgctaatgcctcccctcctgtcgcagccgcctcccctcccgctgaatctggtggaggggagggcgcggtcgccgctgccgcctccgccggctagtcgccggccgccgctcccagagggccgcgagaagagagcgagacaaagaagaggagaagaggcgggaagaagagagcgagagagcgagaccttatcgcctcgtcgtggtggggcccgccggcttggctccagcttggcttggctcggctctatttggctcgatttttggggtgtcagtttttaa

SEQ ID NO: 32103 - DNA, 897 bp, Oryza sativa
  Clone ID: PAT_MRT4530_36345C.1
ctttgaattccctccaagtgaatcctgaaggagaaatgtcaattttgaatctcggtaaggcacgtgatgtgactttttgtttgatacagcaataagattttaatcaacaaaccccaaggtggagagtgacttattgatattggtagcttccttcaagcgttccccttcagcacctgagctcttttgcctctctgagcctgcaaggtcaactaggttaagccgagaaaaccggtgatggttgataccttgagattcccacttactctcgataaggcaagtgaaaacactatgagagcgactgcttgctctattcatattggtagccgccacctttctgtttgctgccccctcaacaagttgttgcattgcttctcgagcattggaaacctcatgttctgtcaagttctcaacatggacaccctttttagcatcctctcttatctgcaaatttactgaattcggatttagcaaatcaaggatctgctcattgtatatctccaaaaaagagcatttgcaagtaaacctgagtttttcttctttccttatttccttttcctgaccataagcaaacatacagctgttatagccagccatgcagttgtccaccatgggcaccccagcaaccttgaacagattctcctgcgtgacatactcgtccgcaacgagatcgaacttgaaccgcgactccgggtggcccgtccaggtgatgctctggcagctatcctgcctgacgcatctcttctgtccctgcaccgatatctcgccgctgctcagcggccgaacacggatcacaacctgcacgttggtgtccttccagaaggagggatcctcctggagctcgaaccccgcgggggcggagccgccgccgtggtcgtcgtcgccgcagtcggatggcat

SEQ ID NO: 32104 - DNA, 564 bp, Oryza sativa
  Clone ID: PAT_MRT4530_36346C.1
atgtcggaaggacaaggtttggccgtatcagaatccttcccgagcttggatgtcgtcgatgatccgttctccgttttgacgggtggatttttcgacatggagtcgccttggtttgtagccactgtgttctcgtttccggtcattggaggaccagttgagatcggcgtcgtgaaccttgagtatcaagtccccctacctggcgcgccactgtcgacgggtgatacccgtagaccggatatagagggtattggggtacgttggtaccgacgagatcgtagtcgagttggttcgactagatctccggcgatttggctcctgcaggctccgacttcgtaggctgtgggggttgtgttggctctgagattcgatgccttaggtccttcccggggggtcccttttatatcgcaggtcagacggtttccaagtagaactcggagacatcagaccctacacgatacattgacgacccagtcttgtccgagtaggactctttccatccgtaaactccgtgaaggatttccttagtgcatgcagagagtatccgtatgctcgtgggtatgccat

SEQ ID NO: 32105 - DNA, 169 bp, Oryza sativa
  Clone ID: PAT_MRT4530_36347C.1
atgtcggacttagtggaaaaaaacggggaaaatggaaatcaagatggagcgagcagcaagggaacttcaccacccaaggcagctattataccttttgattacaagaacctttcaattccttcacccaacatcgtatccgtgcttaccgggcgagatccacaatttgatg

SEQ ID NO: 32106 - DNA, 447 bp, Oryza sativa
  Clone ID: PAT_MRT4530_36348C.1
cggacgcgcgggcgtcccttttaatagaactccagcgacgatgccggtgggaaagaccaccctgtctcatctgaggatgcgaattcattcgtatgccagcaccagatcatatgccactgccaaacttgactatgatgtgaatgaacgaatacctggagacgaggggcatctggctgaacctgatgactgtcctcgggtgcgcggttacctatactttacctcggccttgtggggacgaatgacctatttgatgtgcgctggttgatctaatagatgctccagataaaggctggtacgacactccagagaacctaataaggttgaattctgacactgccaggaaaggttctacatccacaagcgcatttcgaccaccggagccgaggaaaatttttgagatgactctcagtgcatcctgcattctggtttctgatgctacccggaaaa

SEQ ID NO: 32107 - DNA, 315 bp, Oryza sativa
  Clone ID: PAT_MRT4530_36349C.1
cccacgcgtacgcggacgcgtggggtacatagatgatcgatgtcattgcacagcactattaacgcaactggacagccttaagtggacgatgagcatgactgaacctgcacgctccaggatggtctgcgcattgagtggagggactcgcttcagtgcttcctagaggaacgccgtaacaggcatgcgagcaaagcttgatatcccacagaatactactagggcatgtcagcataacggatatgagtcactgctgacgtcaatgaccatcgacttagaactgagaatggtgaacgctgactctagcatgcagaagga

SEQ ID NO: 32108 - DNA, 427 bp, Oryza sativa
  Clone ID: PAT_MRT4530_3634C.1
tctattgtcaggagcattacaagattgctttctataagattgtgctggataaacccactcacttgccctcttttaataagggagtaaaatgggctgaagaagtcttcatactgggaagagatggaagttcacatctgaggataagccatggtagggtgcagtatttaaatgcacatgtgaatgaacgccatcactatatgtacattcatggtgtcgatgcagcttctgagtactacaacggggggccagtcattgacttcagaggagatgttgtgggcatgtataacctcagtacaagggggtcttttattccttctaacatcctacttaagtgcttgcagttgtgggaagaagtttcactacatccctcgaccacatcttcagttgaagctctggggcatcaaatttcttgagcctgcccatattt

SEQ ID NO: 32109 - DNA, 423 bp, Oryza sativa
  Clone ID: PAT_MRT4530_36350C.1
attcttctactagatcctttggtttaaattagtagttagatccttatccttaaatccttctgaaccattggtatgcacacttgggagtaataatcaccttgctggctaaaccaactatttaaaacatcattagagctagatgtggatgggtttctcttttactgtttcaataagaagtttagagggtatggagctcaaagtcagaactattgattctgataaggcacttgatttggagcaagtttcaattttcatttgagtggtcacattctttaatcagttgggctagagtttggtaaagacaccggttgtggagctgatggtttgaagcaaacatatagcatcttgatgatgaccctgcaggtctgcatgtatttatatatccgtatcaaacataaccattcaactaaaaaaaaaaaaaaa

SEQ ID NO: 32110 - DNA, 254 bp, Oryza sativa
  Clone ID: PAT_MRT4530_36351C.1
atccacttcaagatttgtactccacggcctccttcctcatctccgacaatcccccaagtgcaagagaccacggtggcgccacctcggcgttgaaagaggaggagagtggtgacctgtttcaacgacggagccgcggaagacaagctatgagtatggcggtgcggggtaccgaagccaaagaagataaaggaggtgatggtatggaggtttcagggagagggataagtgacaccggtaaggccaagggggagtag

SEQ ID NO: 32111 - DNA, 342 bp, Oryza sativa
  Clone ID: PAT_MRT4530_36352C.1
gaatactaacagatatcagaactgaagtatacttcatttacatactggcattacaattttcaaaaacatgattaagcacatattcttgcagggctatatatatatatacacgagtactccgtagtctatacacagtgaacacttacacgaggagtcattaactaaaaaagaaaaacttacacaaggagtatcattagaacataaaaggcaccagatcagttcctactcgttgttacccttttattccatgagagtataactgacaaaaattgtttacccctcaagtaagaagaacctgacgtggagtgggttgaaaatctgccaaacaactgaaacatgctt

SEQ ID NO: 32112 - DNA, 1593 bp, Oryza sativa
  Clone ID: PAT_MRT4530_36353C.1
atggcttccgacgacctcttcgagggcctaccacctcccgccgccgccgccgcgccggccgccggaggagagcgcgcgccttcaccatcgccgcctccgcctccgagactgcccgcgctgaagagcgctctcaagcgggacaagctctcttcctcagatgctgccgcttcctcacccgctgccgccgccgccacggatgccgcagccgaaggacgtgctcctgagaagcgacttaggtttagaactactgttgatgcctcagaaacgcaagtcattgatgctatgcacaagataacttcacacatacggaatccttcaaaattcagcaaggcatcaaaactagctctacagcttattgaggctgggagtgtcaagccagggacaatcagtcacttctttgctatattagaggctgcaatgtcttcaccaggagcttgtaatgagccttctgtacgtgctgattaccaggctttgtttaatgcagcccagggtgtaacagagtgtttcaaccaacaacagaaaaatcagtttgatatatgggtgctgcatgcagtggtggcaaatgatctttttacggatgacagttttgtgttctcaaaggctgtagggaagatcaaagatgccatctcagccctgccaatcacaacagtggatgatgacaatgatgaagcagcagctctagcagctgttgaaagtaataacacagatgataacccgcaagctgcggcatccaactcgttgccagatgatagcactcatgctgcagcctccaactcaagtgaggaatcctctgatccttttggtttggatggtctacttgagcacaagtcaaagaagtctgaaaaggctcgagagaagacggtcgccgctctaaataggaaagcagatgaggatgaatcaaagagatttctgaagtcacaacgagaagccctcctgaaatgtctagaaatagctgctcggcgctataggattccgtggacacagaccgccattgacatctttgcgaagcacgcctacgacaacatgaaccggttcacgacgcagcagagggacgccatcacgaagctgtggaactcgatcaaggagcagcagatcaggcggaagcagggcaagtcggtgagcgggaagcttgatgtcaacgcgttcgagtacctccaggagaagtactcccatgagaagatcagcatccgccatgctgtaggcggtggcggtgaacggcgcgccactcagtggctcggctaaaactacgaggtaaggttgctgtctgctgatgtacactggtgtgaggtcgctcagcggaagaaactgcaagaaactcgatgattattccacaacgacggcattcattttgagatgttgtgtacatcagcatgggttgtgagtatgtgacatatacggatgatgcaattgcttggaattttgatggcaagaatgcgatttatactttgatgatatagctgggcagctggctggctatgtacatgggtacgttgtcattgatggatctccattcttgtgatctcacctatcttgtaaacttgctggtgctctctccgagctggtgaacgtgtagtagctgaatgagaggagaag

SEQ ID NO: 32113 - DNA, 1111 bp, Oryza sativa
  Clone ID: PAT_MRT4530_36354C.1
ccggccgggatttccctccctctccccctcttccgccccaacctccaacctcacctcgtcgtcgccacggcctccctcgcgagttcgccgtggaacacccgatgggctccggcgaggacaccggcgcgggcgtcgcgggaggagggggaggcggaggcgccggtggggtggtgcggggcgcggtgctgaaggcgctcgtggtcgtcggcggcgtgctgctgctccggcggctgcgccgctccaccacccggtgggaccacgcccgcgccgtcgtggacgcgctctccggtgagaagttctcgagggagcaggcgaggaaggatcctgataactactttaatttgaggatgcttacatgccctgcaacagagatggtggatggttctagagtgctttactttgagcaagcattttggagaagtccagaaaaacctttccgacaaagattctacatggtaaagccatgcccaaaggatatgaaatgtgatgttgagttgagttcatatgcaattagagatgttgaagagtacaagaatttctgtgaccgtccaaaggatcagaggccacaaccagaagaagtcattgcggacattgcagagcacctgactaccatacacttgtcgcggtgtgagcgtggaaagcgctgcttgtacaaaggatcaacccctcctgaaggctttcccaacagctggagcggtgcgacatattgtacatcggatttgtccattcacaagaatggtgaggtgcatatctgggacaagggttttgacgatgatgggaatcaggtttggggaaccaaagctggcccttacgagttcaagcctgcccccaagtcgaattacgacgacatgttctcgccgttgaatttttctgctccattgacgctggagaagaagattgagagctcgttcgcaatcgatgatcagtagtatattagtatgtacatacagttcatgtacctctctctctttttttttaatttaagaaaactaagcagaaaaaactgccttcgtttagtatatagccccgtgtactgaattttgttgctaagaaatgcaataaaaagtagcgttgcatgtacaaaaaaaaaaaaaaaaaaaaaaaaaaaaaa

SEQ ID NO: 32114 - DNA, 603 bp, Oryza sativa
  Clone ID: PAT_MRT4530_36355C.1
ctgcaggaatcggcacgaggatgcttatgattttctccactgtgggtagtactctccaaattagtccaaattagtccaaatgataacaaacttcacaacaccgttttaaaaaaagacattatagccttcatcatttcgctgaaacttattatgtgtgaaacaacttgttagcgattataaaatcaattctaaattaagtatgctgataagctgaaggctaaatgataggggtgtattcttgactactacactgatcatctcacactcagtggtgacaattgaaaaaatccaataaaatcctcatttattgcataatctactttagaattaagggtaacctgatcagtcagctcccttgtaaagcagagatctgctgctcttggtctacttggcttttcatacacatacccaacttgcttcatcatgatgtagtagctacagaaatgaaagaaccggcaaggttattaaaccttttgattagaaagtatagcatcgtttatagatagtaatcagtccaacatattatcaatttcaaatatgctgaaaatgtgttaagatatctgcttacttactgtttcatgcttatatgcgaattagaggatc

SEQ ID NO: 32115 - DNA, 696 bp, Oryza sativa
  Clone ID: PAT_MRT4530_36356C.1
atgggtgggacccacataaatcatcctccccctctctctctttctcttcccttcggcgagccgcgagcgtgtgacgacggcggcggcgggcaggagccggcagcgacgggcgagagccgccggcggcggcggctgtgggccagagcggcggcggcagaccgaagatggacggagggcgaccgaggtgggctcggcccattccaccccggcgacgaggtcccgacgatttctcttcccattcggttggcggtggcggtggcggcaggcccagctcccgcccgtcgccgtcgatggccgccgcatctaccgctctcgccggccctcggccgcccgcccgccgatggttgtcgtcccgtccccactgcccgtcgatggccgccgcatctaccgccctcgccgtccccgccgtcgctccagctcccgcccggcgcccgacccatggtgccatcgtcagctccctccgtcattcacggcgccgccgagaggacagagcctatcctcacctccaccggcacagcgccctcactaggggacaagctccctcacggcgccgccgctattcctgaccgccggccgccgccgccactactcacgaccaccggacgccgccgccgctactcccgaccgccggatgccgccgccgctactcccgaccgccggacgccgccgccatccccactgccactccggtggtga

SEQ ID NO: 32116 - DNA, 206 bp, Oryza sativa
  Clone ID: PAT_MRT4530_36357C.1
atgcaggcgctgcacttgtgggatcggcttgaggcaattcagctacagccggattccagggacagctttgtgtggaagctttcggccgacggaaactactactcctcctcagcttactccatgtttttcatggggaaaacaaaggtggtttgggcgcaactgcgactccgcctccgccttcagccgcaaacaccaaatatcccccg

SEQ ID NO: 32117 - DNA, 473 bp, Oryza sativa
  Clone ID: PAT_MRT4530_36358C.1
gcctcctctgcgccgtccgcgacaagatccccgggcccggcagttgctgcgctggctcaggcgcatccgtcggggaggggaaggccgccaaggcgaagggcttccctgtgtacaatgcggagggcgcgcggcgcgcgctcgcgggatgcggggcggcgaggaagggcgatacggactagtcctcgtggcatcacgtggaggacatgctgaggcgcgccgtgtacaatgcctagtaggcgctgcagcagagcgagctttattcttggtcctaggagaagtacccttcttcttgggtcgcctgcatttctctctgttcttgaaagcttgttcctactccgctcacctgaccggagtccacgacgtgtcctgctcctgcgcacttgtatgtccgagaccgatatcatttaccggtcatgtgctagcgccgcggttgcattcaagcaaattatgtcgatgcccgtgccgtttttttt

SEQ ID NO: 32118 - DNA, 289 bp, Oryza sativa
  Clone ID: PAT_MRT4530_36359C.1
tttttggttttttaaattttattttttttatttttgtttttttttttttaagggaaaaattttttttgaaacaaaaggggaacatgaacttccttaaaaagcgccctccttaataaaaacatcacagaaaaatcatatattaactcggggaagcagaactatagggggggacgaaaggtgagagcgctaaataaataaatccaaagggggaatttacgaagcaaggaggcatttgggggttttaaattgccttaaaaaaaggcctaattgacctaaaaaaacggggagg

SEQ ID NO: 32119 - DNA, 1553 bp, Oryza sativa
  unsure (1)..(1553): unsure at all n locations
  Clone ID: PAT_MRT4530_3635C.1
tcacctccatctatctcgcaagctcgatcttctgctgaatagtaatttatatttcttcttccttgtataatttcagcttcatgtttatcagttgggtcgatgatgcatnggcagaaatctgtgtttcatgttcttcttcagttgttatgtttgactagcaaaggggactgcagatcttcagatttgtggggggtggtaattctagcttatcatctgatctgacgtagaatctgaatgcctgtgtggtggtatttctttcgctgaatcctgtaaaaaatgtcggatttttgctgaatgataaacgaaacagatgcaaagattcatgcagtggagtggagaagagaaggaataaggagaagccttgaactgacttgcaatggtgatgaactaactaattgactgcaggagaggagatgggtgacgtggccaaggacctgacggccggcacggtgggcggggcggcgcagctggtcgtggggcaccccttcgacaccatcaaggtgaagctgcagagccagccgacgccgccgccggggcagccgcccaagttcgccggcgccatggacgccgtcaagcagacgctggcggccgaggggccgaggggcctgtacaaggggatgggggcgccgctcgccaccgtcgccgccttcaacgccctcctcttcaccgtcaggggccagatggaggccgtgctgcgctccgagcccggcgcgccgctcaccgtcagccagcaggtcgttgccggcgccggcgccggagtcgccgtctcgttcctggcctgtcccactgagctcatcaagtgcaggttgcaagcccagagcgcgttggcgtccgctgctcctgccgccgccgccgctgccgcctctcccgtcggcggaggcgcggccacggcgacggcgacgagcgtggcggcggtgaagtacggcgggccggtggacgtggcgaagcaggtgctgaggtcggagggcggcgtgggggggctgttcaaggggctggggccgacgctggcgcgggaggtgccggggaacgcgctcatgttcggcgtgtacgaggcgatcaagcagtacctcgccggcgggcaggacacgtcgtcgctggggcgggggtcgctggtggtggccgggggcctcgccggcgcctccttctgggggtcggtgtacccgacggacgtggtgaagagcgtcatccaggtggacgactacaagaaccccaagtactccggctccatggacgccttcaggaagatcctcgccgccgacggcgtcaagggcctctacaagggcttcggcccggccatggcgcgcagtgtccccgccaacgccgcctgcttcttggcctacgaggtcactcgctctgcactaggctgaactcatgtatcattacatcctcctccttcttgacccttaattttcttcttctgattctgattctgattcttgctgtcatccatctcatctgtggatgtaagaacagtgtaattctgtacacacaaatactatctttataaaaatttcctagatcacaaaaaaaaaaaaaaaaaaactcgagggggg

SEQ ID NO: 32120 - DNA, 339 bp, Oryza sativa
  Clone ID: PAT_MRT4530_36360C.1
gaaagtctgcactgagatacactatagtcttctgggtcatagacataaatagttgacagtgaacaaaacactatgcatgtacatgcatcgctcattaatagactaatggtatggacgcacacgcctgagagcactgacacatacaaagctacgatcacagatatacataaagcgccatatggatacctacgaacacatgagcaggcgaactcgctcacccttaccgtataacacacatggcatagtaaagtgcgctacaatgcgaacaaactcttagtatgcatgcgcccaagacgtgcctactatagcccttaccagcagacaggaaagggattaact

SEQ ID NO: 32121 - DNA, 374 bp, Oryza sativa
  Clone ID: PAT_MRT4530_36361C.1
cccacgcgtccgcccacgcgtccgcccacgcgtccgctatcctgtccttaaaaaaaaaaaaaaaaaaaaaaaaaaaaaaaaaaaaaaaaaaaaaaaaaaaaaaaaaaaaaaaaaaaaaaaaaaaaaaaaaaaaaaaaaagggggggccgttttaggggttcaaaatttaattgcgcttgattgcgacgtaatagcttttttttaggggcacttaaattaaattaattggcggtggtttaaaaatgtggtgattggaaaaaccgggggttaacaaaatttaatcggttggaaaaaaattcccttttaacaagttgggttattaggaaataggccttaacggagcgcttttataaaaagttacgaaccttaattgg

SEQ ID NO: 32122 - DNA, 1818 bp, Oryza sativa
  Clone ID: PAT_MRT4530_36362C.1
tcgagcggccgcccgggcaggtcgcctcgcctctctctcttccttctgaccaacccgacctcggcgcctccccccatttctctctctctctcttcgcgttgccgtctcgaccccgcctccaccgccgaagccgcccgaggcggcggccgccggcagctgggctcctccgaatccgaacacggcgggggctctcccctcgctccccacggcggttggcacctgctggctctcgatccaacgtgtacagctaatttgatctgttggcgccttagctagaaaggtggcgactctggcatctcagtgatcatagggcatttgaaggtggcctgcatccctgttacaagtaagggacaacaaagcaatttgttgtctctttatttggagctgggaagaacccggcatggcagatgctagttcgaggactgacacatcaacagtcctggataccgacgataagaatcagatggtagacgggcaaagtggagctattgtgccttctaattcatctgatcggtctgacagatctgacaagcccatggaccaaaaggtgttacgccggcttgctcaaaatcgtgaggctgcaagaaaaagtcggctgagaaaaaaggcatatgtacaacaattagagagcagtaagctgaaacttgcaagcttggagcaagagatcaataaagctcgccaacaaggaatttacatttcgagctcaggagaccaaactcatgctatgagtggaaatggagctatgacttttgatttagaatatgcccgttggttggaggaacaaaacaagcagataaatgagctgaggactgcagtaaatgctcatgcaagtgacagcgacctccgtctcattgtagatgggataatggcgcattacgatgagatattcaggctgaagggtgttgccgcaaaggctgatgtgtttcatatactttcaggcatgtggaaaacacctgctgaaaggtgcttcttgtggcttgggggttttcgttcctctgagcttctaaagcttcttgtgaatcagctcgagccattaactgagcagcagttgttgggactatcgaacctccaacagtcctctcagcaggctgaagatgctctatcacagggaatggaagcgttgcaacaatccttggcaggtacgttggccgggtcccttggtccatcaggatcttcagggaacgtggcaaactacatgggtcaaatggctatggccatgggcaaacttgggacccttgagaatttcctccgtcaggctgacaatttgcggcagcagactttacatcaaatgcagcgaattctgacaatccgacaagctgcccgtgctctacttgcaatacatgattacttctcacgtttgcgtgccctgagttctctctggcttgctaggccacgggagtaacaacacatagggtgcatcaccgttaatgcttcatgaactgatctgggaggaacggcggagcgggactgattgcggatgcatttgcagaagattggtggctcagttccctcggcacaagttgtattgacaccttttggtttcatgttgtacctgatgttgtacaagtagggtaaagcttgtaacttgtaagttatggtgaatttatgattggcagattgtacaattgtattagcaataaaataaaaggtagataaaggctggaagaatacccagcgatcttacagtggtcggaaacgaaaagcaaaggggacatctcgcacgggatggtcgattgttctaactgaatagataagcacttaagcagggcctttcttttatgacaaccgaaatataggtgaaatggaaactatgggtag

SEQ ID NO: 32123 - DNA, 465 bp, Oryza sativa
  Clone ID: PAT_MRT4530_36363C.1
atggcccatacaagttatactaagctgggggaggcaaagacccaggttggtctctatgatcctctgcaactgccagaatggtttgaggttgggccacttgctgcctattataaactaccacttaatcgtgtccttgtggcatttgatggcacggacctgccctgtggaattcttcgtttacaacctaaaggaggattcgggcgccataatgggtctgttgattttgtaaccatgtgttttaatgaagtaatttgtcattcaaaaggaattggatgtccacctggccaaatggaccccaaagcttttgtgctccagaagtttaataagaccagtctagaacggattcatatgaccaacagtctaaaaccctggttatatcctgcatatgtaaagaccctgaagattgattcagccatagaagagggtgttgagattctaaagttggttgttaccaagggtttatga

SEQ ID NO: 32124 - DNA, 900 bp, Oryza sativa
  Clone ID: PAT_MRT4530_36364C.1
atggcagatgctagttcgaggactgacacatcaacagtcctggataccgacgataagaatcagatggcacatcattttgatatcaattttgtgaagaatttgattgttaaggtagacgggcaaagtggagctattgtgccttctaattcatctgatcggtctgacagatctgacaagcccatggaccaaaaggtgttacgccggcttgctcaaaatcgtgaggctgcaagaaaaagtcggctgagaaaaaaggcatatgtacaacaattagagagcagtaagctgaaacttgcaagcttggagcaagagatcaataaagctcgccaacaaggaatttacatttcgagctcaggagaccaaactcatgctatgagtggaaatggagctatgacttttgatttagaatatgcccgttggttggaggaacaaaacaagcagataaatgagctgaggactgcagtaaatgctcatgcaagtgacagcgacctccgtctcattgtagatgggataatggcgcattacgatgagatattcaggctgaagggtgttgccgcaaaggctgatgtgtttcatatactttcaggcatgtggaaaacacctgctgaaaggtgcttcttgtggcttgggggttttcgttcctctgagcttctaaagcttcttgtgaatcagctcgagccattaactgagcagcagttgttgggactatcgaacctccaacagtcctctcagcaggctgaagatgctctatcacagggaatggaagcgttgcaacaatccttggcagatacgttggccgggtcccttggtccatcaggatcttcagggaacgtggcaaactacatgggtcaaatggctatggccatgggcaaacttgggacccttgagaatttcctccgtcag

SEQ ID NO: 32125 - DNA, 175 bp, Oryza sativa
  Clone ID: PAT_MRT4530_36365C.1
gcacaaacacgagcgcgatccgtggtagaagaagaagaagaagaagacgaagaagaggcgatcgagagatggagagcgccatgtgcggactggagacgccgatgatgacggcgctgcatcacctgctcgacataccagacggcgagggcagagccaacgggatgcagggcgcgac

SEQ ID NO: 32126 - DNA, 515 bp, Oryza sativa
  Clone ID: PAT_MRT4530_36366C.1
cccacgcgtccggctgtctctcgtcactgtttcatagctagtaggacgaagctgagcttttccaagaagagaggagatcgacgatgatggcgagcagggcgtccttgttgctccaggtcgtccggacctcgtcccgctcgcgcaagggcgagggcggcgtcgtcttctccgaggtcgcgccgtggcagcagcagcagcccatctcggcgcccgccggcgccggcgccgccggcataggctcgccgcggccggcggcgaagctggacaccatcgtggaggaagatcactccagcatgatgatgcaagaagccgctaccgcctttcaggccggcccgtctgctgctgctgcttcttcttcttcttcttcagcgtcgtcgtcatcgtcagctccggcggccatggcttaccgtttcggcgccgcagaagaacatggccatggcgaagcgttgctgataaggtgaattttgagagcagaggcgttgcgtgggtgtgtgtggcaggcagaggatgatgca

SEQ ID NO: 32127 - DNA, 240 bp, Oryza sativa
  Clone ID: PAT_MRT4530_36367C.1
atgggcaagataccaaagggcggcctcttgcgccatgcctacgatcacctcggaccagggtcgagaacagttgttgaatacgcggttgtcccgttccttccaaatggaccacgcgccaagggtcacgatagtgtcgaatccacgacgatgctccctcccaactttgagccggcagggcatatccagatatcatacaatgcacgccgtgttgaacagtgctgtatgcgcattgtgcaatga

SEQ ID NO: 32128 - DNA, 358 bp, Oryza sativa
  Clone ID: PAT_MRT4530_36368C.1
tcgtcgcccgctgctcctgctcgcttcctccggggcaatgtgtggctctcctcctcctttccgccgccgctcgggttggcgtggctgcgccactggcgctgaggcagcagcgcccggtggtgctgcccggaggccagctccgcacgggaagcggcgccggcgcagcgtcggcgtgggcggcgcgccctctccggccggagctcgccgcggtctcccgccccgccgaccccgcccgcggcagggcgcctctgacccggcctcgcgcatggatggcgtcaaattagaacgcgagctccgcctcaacctggggcaccatcgccgaactccctttctacactaacatggtcgacgcccccaa

SEQ ID NO: 32129 - DNA, 747 bp, Oryza sativa
  Clone ID: PAT_MRT4530_36369C.1
atggcgcacgacagcacggtggcagatggggaaggagcggtgaaaggacgagctcttccaccctcaccgcgcccctccgcgagcgtcctcaccggtggcggtcgcgcccgcgtccctccacgacctcctagctggcttcctctctctccacaaccattgcagccatcgttgtcgaccacctccgcggtgggaggcctcgagacccgccgtcttcgccgtcgtcgaccttatctgcgcaggagagcttgggagccaccgctttcgtcgctgtcctcgtcatggtcttcggcgagccgcaccgcctccacccggatctggcgagctcgtgaccgtcctcgccggcagcggctacgcccgcgtccctccgcaacctcctcaccgtctacctctctctccaccaccattgcagccgtcattgttgaccacctccacggtgggagacctcgggactggctaccgtcgccgtcattgatctcatctgtgcgggagagcttgggagccgctgccgccgtcgctgtcctcgtcgtggtcgtcggcaagccgcactgcctccacccagatctggcgagctcgcgaccgtcctcgccgacagcggctgcgcccgcgcccgcctccacgtccgtcctcagcaacagctgcgccccctccacgacctccccacgagagagagagagagagagagaggaggatgacaacgtgagagaggaggatggaaatagtgacgggagtaacatggttccaatttaa

SEQ ID NO: 32130 - DNA, 2907 bp, Oryza sativa
  Clone ID: PAT_MRT4530_3636C.1
atgccctgcagtccgccatcttacctgttcattattgtcactggtgtactgcttgtgcttgtgcactcccagacctccttaggcaatccactcaaaatggcaggcaagaaccaaataaccattatttgcccccaaaaaattactggtgccaaatcttgctatgaccaatattttggtaagtttctggtagtgactgattttgtcacaagaaagcaaattaaagttgaccagagaaataatttgggaaaacaaagactcttctcaaatggtacttacttccatatatctgtagatgaagactttataagcatcgattgtggccttcccagtggctttagctatgtggatgagaagacaaatatcacatatatttcagatgatcagtacatagacacgggagaaaaccacaacatttcttcacaactccaaggggcagaacaattcagatcaggtttaaatctcagaagttttcctacaggaggtaggaattgctatactctttatcctgccataaaaggtcagaagtatcttataagaggaatgttcatgcatgggaattacgataacaaaggccaggatcttgtaagctcaccagtgacattcgacatccgcatcgggctcaacttctggaaccggctgaacataatcaatgcaaccatgacttacacatctgaagctatcgtagttgccattgtaaattcagtatcagtttgtttggttgataatggagaaggaactcctttcatatcatcgttggaaatgaggccaatgaagagttcaaattaccctgcagcaacaccaaatcatccccttttgcttcaggatcgacgaagcatgggcgcaagtagaataattaggtatccagatgatccctacgaccgtgtatggtggctgccacagattacatctgggttgataaagatttccacaagaagcttgatcagccgctacactgatgatgtatatgaggtgccagttgcagtcctgaagacagccgccacaacatcatcgacctctaccgccctgaatttcttgtgggctgctccaacaggctgggacgcaacacctggatacttgattggcttacacttcactgacttccagcaggggcagctgcgtgagttcgacatatactacaacaacgacctgtggaactatgataataagaaaacaaaaccgccctatctcctggctaattatatcaatggcaccactccatacacgtctgacaattatctatacaacatctcactcgttgccaccaatgcatctgtgctgccccccatgctcaatgccattgaaatatactaccaagtccaacaagatgagaagatgacctactcggaagatgttgaagccatgatgactgttaaaattgattatcaagtgaagaaaaattggatgggtgacccatgcttaccagaaaagtacacatggagtggcttgaaatgtagaagtcaaggagttacgtcaagaattatatccttgaatttgtcgaacaatgatttaactggatcactacctgaatccttgacaaacttaccaaatatccatgttctagatctatcaggaaaccaactaaatggtacattccctgaagcattatgcaaaaatcgagcgctcacattgaggtatgacacggcaaatggagatccatgcagtccaagatcatcaaagaagaaacataaagcagtcttagcagttgctgtagtggttccagtggtgatagtagttatacttatatctgctatgctgatgctacttttctggaaaaagcaagccattgtgaagtctagaggtcaagaacaatatggagatcatatacatattcctgaaaaccgtgagttcacatatgaggagttagtgaaaattacaaacaatttctcagtattcataggtgaaggcggatttgggcctgtttttcatggtcagttaaaagatggcactcagttggctgttaagatgcgctctccgacatcaatgtcagggaagggaatgccagagtttttagctgaggtcgagagtttaacaactgtacaccacaggtatctggttttattggttggttactgcactgaccaggatcatttaggtcttgtttacgagtatatgcctaatggaagcctttatgatcatttgagaggaaaaaatgctattatccagagattaagttggcaacatcgagcaaaaattgcacacgaagctgcccaaggtctggactacctgcacacaggatgtgtgttgcctatagttcacagagatgttaagtcacacaacattcttctagggtgtgacctaactgcaaaaatatcagattttggattgtcaaagtcatatctgaatgttgcacagagtcacattacagccactgctgctggcaccctaggctacattgacccagagtactgtcttagtggcagacttactattagcagtgatgtcttcagctttggagtagttctgctagagattgtaacaggggagcctcccatcatacccacaaatggacatattgtgcagcgcataaaagagaaggttaatatgggaaatattgaggcaattgctgatccgcgacttcatggtgagtttgatatcagctcaatttggaaggttgtggacatagcgctgttgtgcacaaaagaggcatctagtgaaaggccaacgatgagtatggtggtagcacagctaaaggatgccctagcattggaagaagcccgtttaagctacagtaccagtgacattagccaaggtggtgccaatgccgaattgtcaatcaactccatgccaacagcgagcttaagtaatctggaggagtatgccaagaaaagcctactaccagcggttgcgctttttgcactttgtttgcatggtgtttcggataagtctggagatatagcaagcacataa

SEQ ID NO: 32131 - DNA, 349 bp, Oryza sativa
  Clone ID: PAT_MRT4530_36370C.1
gcgtggcttgtcgacttccaagtcttccgccttcgttggccccaccagtcagtgacccagtgcgatctccggcgatgggggccggaatgagcagcggccggcggccgagcttctacggcggcggcggcggcggcggggtcggccggccgagagggatgctgcccctgctggcgctgcaggtgctgctgaacggcggccgcgcgggcgccagccggccccccgtgacggcggcgctgctcgccgccaacgcgctgctgtacctgcggccaggctccctcgacgcgctcctgccttcgctgaaccgggggggcttgaacgctggcctggtggttgactgctgggacctggc

SEQ ID NO: 32132 - DNA, 569 bp, Oryza sativa
  unsure (1)..(569): unsure at all n locations
  Clone ID: PAT_MRT4530_36371C.1
attcggcacgaggggggaacagcaacaggtgcacctctctccctacccaggcaacggcggtgccctcccttccaccaaatcaggcgggaggggaggcggcggcaacagcggttggtagagggaggggaacttgcagcagggatgatgccctcccctccgtcaaatccgacaggaggggaggcggcggcagcaggggcacctcccctccgacagatccggtgggaggggaggcagtgccagctacgagcaatggcagaaggggaggcggctgtgatagcagcagcgccctccctgacttcagcccattctttatgttatgagtgttcttagtgttggacttttttagtgtttggtattcttgagtgcttggttgttcttgtgtttttggattaaatgttatatacaattttgattcgagccgatgcatcgagttgggtatttnttttatttgtagaaccttaaaagtgtcggttcctaaaccggcaacagaacctaaatccgacacctttgtggggtttccaaccgacatcaattanagtttttgagtagacacgttcaagggcgagcga

SEQ ID NO: 32133 - DNA, 909 bp, Oryza sativa
  Clone ID: PAT_MRT4530_36372C.1
cccggacgcgcgcactcccaactcctctcctctccttcccactactctcgcgaggaggaaagcgaagccaagcgagagaggcttccgccgtcgccttccccttcgccttccgatcggtcgcgaggtttcaagatggcgacgtgcacacttgcaacttcatgtgtgtccttgagcaatgctagaactcaggcctccaaggtggcggcggtcaagagcccggcatctctaagcttcttcagccaaggcatgcagtttccaagcctgaaggcctcctccaagaagcttgacgtctcggcaatggctacctacaaggttaagctcatcacaccagaagggcaagagcacgagttcgaggctccggatgacacctacatccttgatgccgccgagaccgctggagtagagcttccctactcatgccgtgctggagcatgctctacctgtgccggtaagatcgaggctggctccgtcgaccagtcggatggatcattccttgatgatgcgcagcaggaagaaggctatgtgctgacatgtgtctcctaccctaagtccgactgcgtcatccatactcacaaggaaggagacctttactaaggtgctttttcttgaaaattttctgccaagaggcaaaaaactctcaatgtcgtcggcaaggtccatcgtgtgtaccagttgtctcaactctcaattaaatcggactttgatggtggttttgaatgttgtctttcgttagtatgcgtttcaaggttggggctaagagatgggaacccaatggtaatactagctagtcaataataaccagctgctatggcgtaatacaattcgtggttttggatataatttgcaatattattatcttcaaaaaaaaaaaaaaaaaaaaaaaaaaaaaaaaaaaaaaaaaaaaaaaaa

SEQ ID NO: 32134 - DNA, 199 bp, Oryza sativa
  unsure (1)..(199): unsure at all n locations
  Clone ID: PAT_MRT4530_36373C.1
gaattcgatatcaatctaatactgataccttagaatatttcttttcctcttttgatatattntntaagttatttcattttcattaaatttagatataagaatggaactaacctagaagctatttaacgaggtttagacaggggtttaggcgaaaatttaagataagtgtattttagagataacatttgcccgtaagcat

SEQ ID NO: 32135 - DNA, 204 bp, Oryza sativa
  Clone ID: PAT_MRT4530_36374C.1
ccccaagcgtgtttggaatatacgcagaccttctcactatatatggggggaaagctggtgggatacgccccctgcacggggataccgcgggtgtcgcgggagatgttgtcccgcgggggttgcagaccccacacgcgcgcgtgctcgccgcggtgtgaaacgtgtgtgccacatgccacatatatgtgtgtggtatatgttata

SEQ ID NO: 32136 - DNA, 1047 bp, Oryza sativa
  Clone ID: PAT_MRT4530_36375C.1
atggcgatggagagaaacgcggcgccgcgcgtctcggcctcgtcgtcggcggcggcgtcgccctccaccgtcggtgcgctcctctcgaaggcctcggtggctgccgctcccgcacgcgagatcccctcgccgcggtcgctgctgtcgcgcatcctccataggagtggcggcggcggcggcttcgggtgtcgccttcgcctcccccgatactgctccagcggcgcggccgccaaggaggacgccgccgccgagtacgtggaggttgaggttgaggcggaggctgcggcgccgaaggtggtgggccgccaagcggttgatcgcgagtcgcctcggagctcgctcgggaagaaggcggcggaggaggtgtcgccggcgagcctggggctgggcgcgagcctcatgctgctgctctccaagagcgcggcggagctgaacaggatggcggagctccgcgcccagatggagcggctggtgctcgacaccaagggggaggaggaggcgcggagcagcaaccaccccaacgcgtccgacgatcacgccgacatcaccaaggaggagcccaccgccttctccggcggcgcattatcccgctgctcacgcacggccgccgccccgggaaacgcagggcaccacgccgccgttccaatggaccagatggaagcggagctcgaggcggagctgacgctcctgcaatgcgcgactcctcgtcgggatcgtcaactcgagatcggcgacgacgaggaggagtccacggacacccacgcggccaccttcgccgacgccgacgatgacacggacggtgctgacgacgaggaggaggaggaggaggagagcggggcggcggcgcagggcggcgtgtcggcgagggagctggagaggaggctgcacgagctgctccagtggcggcacgaggagcggatcgcggagctggagacggcgctggagcgcgccaggaagaggctgcaggagaaggagcgcgaggtttgctggtggcgcaacaccgccaagctcgtcacccgccacaaggacgactcccgcctcagatag

SEQ ID NO: 32137 - DNA, 563 bp, Oryza sativa
  Clone ID: PAT_MRT4530_36376C.1
gcacgaggctccctctccctctctcccgccgccgccgccgagcgccgcgtccgtcctcccctcgcgccgtcgccatcgtcgtccccgtcgtcgagcgccgccatctccgcctccgcctcctcctcgcgccgctacctccacctagccctagcagccgcgaaaccctagccgccgccgcctcctcctccgcccccaaaccctagccgccgacgccgtcaccacgtcgttgcctccgagcgcctccccatcgcgttgtcgtcctctctcctcgtgtccccactcctcctcgatggtggtggcggtagttccgcggccagcaggcacgcgcgacgggtggtccaccgtggccagcagcgtggctcacgggagcgccatttcttttagagaggaagttgcactgcagtggtgggtggggaagacgtgtgtcgatgaggctcgatcgccgtggcctcgtgggtggagctcctgaacggtgagccatggcctcgtggttttggtgagtctagctccccgtgcacgggcaccgctgtggctcctggtcgccgtcggtgttgtaatactgg

SEQ ID NO: 32138 - DNA, 570 bp, Oryza sativa
  Clone ID: PAT_MRT4530_36377C.1
ggattgattggcgacgaatgatggtgaatcagtgagatgcttcttgcttgcttctgttgggtgatttgtctccggtgatgttgcagcaagctttgtggtttgagctgtgtgacgggcacggactgaccgtggctcgatcttgtcctcgtatatggccgagttggccagagagcgagattgccatggctctgaaataataagcggctttgtttgtgcgtggatgcacagaccagctgattgagtgagtgtgtgtttcttgaatttaattagcattctgggtgtggatgctcagatgcatgtgcgtgtgtggcttgatatgatgatctgctttgcgtttgaaacaataataagcagtagccatttgtgcctgcgagcatatgtatgtggctgctgcagtgtgactgtgtgagagtgcattgcttgtgtgtaactgaattctgaagattctgaacagatgagcagctggttgtgtgtgcttgcttgcatgcatgcatccaccttgctccaatgcgtgtatgtgtggtattgtaattatcagaagctatagttggttcttctaaaaaaaaaaaa

SEQ ID NO: 32139 - DNA, 1656 bp, Oryza sativa
  Clone ID: PAT_MRT4530_36378C.1
atggcgctcctgtgctccgcctcggcgcggccgccgctcgccgccggagcccgtggccggcgccccgcgcggggggcggcccgcgtcatcggcggcggcggcggcgcggaggcgcgcgcgtcgctggtgctggcgctcgccgcgcaggccctcgccgcctcgcagcgccgggcggccggcctcgccgcggaggccgtcaagtacgcgttcccgccgcgccgcttcgagccccgcaccctcgaggaggccctcatgtctgtgcccgatctcgagaccgtccccttccgcgtcctcaagcgcgaggcggagtacgagatcagagaagtggagtcctactatgtcgctgagacgacaatgcctggaagaagcggattcgatttcaatggatcatcccagtcattcaacgtgctggcgtcttacttatttggtaagggtgaacccgatggtgaaaagatggacatgaccacaccagttataacaaagaagtcagctaatgaaaacaagtggaagatgtcctttgtgatgccatcaaaatatggtccagacctgccactgccaaaagacccttctgtgaccatcaaggaggtgcccgccaaaatcgtagcagttgcagccttttcaggtctggttacagatgatgacataagccagagggaatccagattgcgggaaactctccaaaaggactctcaatttcgggtgaaagatgattcagtggtagaaattgctcagtataatccccctttcacacttccattcacaaggcgtaatgaaatagcattggaggtgatatattccttatatgccatagccgagatcaatttcgagaagttatgctatttgatggagctggcactggacaagactgaggaattgatgcattcatcctgtaggaggaagctagctcatgtggtatttgggtacagtgggagtactggtccagagcattgggggagcttaagtcctaatttcacaacgtgctcaaaagggacgtaccagtccccaatcaacattttgaaagatgacgcagtttacaacccaaagttggagccccttgaaatggattatactgctgcaaacactaccattgttgacaatgtcttcaatattgcgctacgttacaacgacactgctgggactgtgaaggtggatgggaaaaagtataaactgaggcaattgcattggcactctccctcagagcacaccatcaatggccaaaggtttgcagtggagctccacatggttcaccattctgatgatggcaacattactgtcattgcagtcctttatcgacatgggaaacctgatccatttctttttcagataaaggataagttggctgcattatacttagagggctgtaaagcggagaaaggcgaacctcttcctgttggactcgtggatatgagggaattgaagaaaggcgcggataggtatttcagatacgttggatccctcacgacacctccatgcaccgaaaatgttatctggaacatttttggagagataagagaaatgaccaaagagcaggctgctgctttgagggcccctttgcacgggagttacaggcacaaccgcaggccgacacagccactcaatggtcgcaccgtgcagctcaattacattatgtacccaagttcaggaatgtcaatgtaa

SEQ ID NO: 32140 - DNA, 841 bp, Oryza sativa
  Clone ID: PAT_MRT4530_36379C.1
ccgcaccctcgaggaggccctcatgtctgtgcccgatctcgagaccgtccccttccgcgtcctcaagcgcgaggcggagtacgagatcagagaagtggagtcctactatgtcgctgagacgacaatgcctggaagaagcggattcgatttcaatggatcatcccagtcattcaacgtgctggcgtcttacttatttggtaagaacacgacttctgagcaaatggaaatgacaacccctgtttttactcggaagggtgaacccgatggtgaaaagatggacatgaccacaccagttataacaaagaagtcagctaatgaaaacaagtggaagatgtcctttgtgatgccatcaaaatatggtccagacctgccactgccaaaagacccttctgtgaccatcaaggaggtgcccgccaaaatcgtagcagttgcagccttttcaggtctggttacagatgatgacataagccagagggaatccagattgcgggaaactctccaaaaggactctcaatttcgggtgaaagatgattcagtggtagaaattgctcagtataatccccctttcacacttccattcacaaggcgtaatgaaatagcattggaggttaagaggcttgatgcaaacttctgatgacctagattaacaaataagttattagatttcagtgtatataaaaatgcacgcacctacaaatttagaatttcaatcttctctttgctcatattgtatatacatatgtatcgtgtatcagacacaaatttacatgattgtaaaattgaatgttgaagtatcatagttcattttcatacttttaatttgcgtacggtattttttagc

SEQ ID NO: 32141 - DNA, 414 bp, Oryza sativa
  Clone ID: PAT_MRT4530_3637C.1
atggccgccaccattgtcggaggggagcggggcccggtgccattaccaccggagggacgcagctgccgctgtcgtcagagaggaactgggcacggggcggtcgctaccgaaggggggttgggcgtgaggccgccgtcggaggggaggggctcacgggaccactgccagatctcgtcgttgtttttgggcttgggtaaaaggaagaaaagggacaacgtggtcatttgcgacttattgccaccgctcggtactggtaccgcccggtaccaaaatcatcgaactgttgaatccggcatgggtaggatcgggagaaaaaatgagcaagggtggcggggccgcgttgtcgatctaggcaacggcatcgttgaagtccaggcggcgacggagttgaagtccaagcagcgacgtcgttga

SEQ ID NO: 32142 - DNA, 285 bp, Oryza sativa
  Clone ID: PAT_MRT4530_36380C.1
catctgtcctcggccagatcggcgccaccgcggtcgccgtcacatacatgatacattgcctccctgtccaccgcctccgccgccgacgccccacccaggtatcttattcctctctcaagcgtcgccaaccctctccccaaaacctaatctcttcctctcctcccctcacgcgtcgccgcggatgcccttgccgtagtgtcgtctcgccgtcggtcgcccgagcagggtggagtgggcgaggcgcctctcttcgacaaaaccatcggacgcgcctccacatcgtca

SEQ ID NO: 32143 - DNA, 180 bp, Oryza sativa
  Clone ID: PAT_MRT4530_36381C.1
atggcgttgctccctatcctccattgtcgcgaggactgcggcactcccccattctcacttgtcgtggccctagacgagaggaagaggagcaataggcaaagagaaggagcagcggaggcacatggagaaagagaaacgttcgttgctcgcaatagatgcaaagcggggaaaggagattga

SEQ ID NO: 32144 - DNA, 202 bp, Oryza sativa
  Clone ID: PAT_MRT4530_36382C.1
ccgtgccaccatattcgtcctcgtctactggcaccggcggcgtttccggcggccacatcaaacccgccagtggaccctgggccttttctttcggccggaagctgtcgttcgtccgcaccgtgctggtacgtcgtggcgcagtgcctcggcgccatcgccggcgccggcatcgtcaaggggatcatgaagcgcccctacgacg

SEQ ID NO: 32145 - DNA, 475 bp, Oryza sativa
  Clone ID: PAT_MRT4530_36383C.1
gtgacaagttttgagttttccaaaatatgtttaaattcatcaaaaatgcatttaaatttgaatatgcaaggtgggtaaactcgttttcttttcctcacaaagttttatctctcaatttgaaggaaacatattaaaaaaatggttagagtttctttcgggaaaaaaaccacaaattagagtgtcctatggtaaagccataaaactagagtgtcttagataaaatgtcacaaaactagatcaagtgtgctagagtgttacattagttatttcaaaccgcatatgtctgttatatggtaggcatggataaaagattactgttatgttgggatacttgatgttcaatacagatattgatgagtgtcaactccgaacacttgctatggtcgctgccggaatagcccggtttctttgaaagttggtgtccaagggtattccaggctgatcattcaggaacgtgcacccaaatttcctttcc

SEQ ID NO: 32146 - DNA, 1535 bp, Oryza sativa
  Clone ID: PAT_MRT4530_36384C.1
ttggtcctctaacttcgtcttcagctcagaagcactacacttctgaaaagggggaataatagcaagactgagtacaaccaccgtactcagcaagccacaccaacgatgcgaacgtgcaaggggatacaaggaggggaaaaggccgtgctgacgtcatcaaaggggaggccggcgccgacacgcgggccccgcacgtcagcggtacaaaggggcggcgcatggtggaccaagtccacacgtggcctcgggtgcgcgtccaccacgtggacggcccagatcggcccgagccgatcggacggccacgaggcggcgcggctggggcacgggcgcggccgagactgacccggccggccatggcacggcggctacgcgcacgcggccagacgaccaccggcgacggcagcgcgtcgcgaaaggagagggggcggtggggattctcaccgaggacggcgacggcgagacgaccacggggagatggccggcggcggaaaagatggcggcgaccggcacgggaggcgacgggaacggcgttccgacgacgcccgaccacggtggagccgcggccgagggccggcaagacctaaggaaaatattggagcggttagggagagaaataggcgaccggagcggtgaggagcggtggtttgagacgacaacggcggtagcggagctcgggtcgacggcggaaaggtggttgcggcgatgaaatggggaaacggagcagaggccgaggtagagcttggcacagcgttgccgccgacgcaaacgacgaggtgcggcgacgactaacgcggcagcagcggccggctgaagacggcggcggtgggggagagaggtggtgcacgaggcggcggtgttccagaggcggagaggggaaatggggtagaggccgggctgcggcacggcgccgcgaagccgacagtggtggcggattggcgcggcggtgggtggagcggcggaatcggccggccggagctcgccggaaagcggtggtgcacgggagcacggtggggaggtgtctagggagcgcggggtgctcggggagaggggaaaacggatgaagggaggcacgtgagtcgtttatataggtcccggagggggagaacgtggccgggagaggcggatttgaagggggaagaggcgccggcgacgtgggcgagtggggtggttcggcgccggttatggagggggaaagtgggggaggagagcggggtcgtgggcggcgaggtcccacggacgagcgcgcgcgcgtggggtggaggaggtgggcggaaactgcggcgtcgtggggcggctcgggcggccatggtggttgcagccggccagccagaggaaggaggaggagctgacaggtggggccgcgggtcccacctgtcggccaaagaggagagggaggccggctggggaggcaaagtagacttcggagaggagagggccgagcggcgagctgggccgagggagagagagcccgagagggggagggggaggaatttgggccgagcccgaaagcaaggaaggggaaaattattttcttt

SEQ ID NO: 32147 - DNA, 1648 bp, Oryza sativa
  Clone ID: PAT_MRT4530_36385C.1
ctacggccagagttccgactccgatggtagcgtcaagagccatgacaagtggttgcgattgcttgaggatgacgacggtgagccccatgcatgttctgcccaagggtggcccaccattccaccaccgcgaacagctgccgcgacttgccatccccgtcctccttcgacgtcggcactcggcaccggcgttccctgcccgatagcacgtacgctggtggcggactgggcgacgtccaccgcacggatgaggtccagctcgacaagccgtagcaccgtggcagccgcagccgccatgcgacggcggccgtcgtcaccggcgcccacgaacgtcacatactcacgtcttctcctcctccgactagcttgctcagcccatccatggcgcgcaccgcggccccacctgtcagctcctcctccttcctctggctggccggctgcaaccaccatggccgcctgagctgccccacgtcgccgcttccccagcccacctcctccaccctgcgccgctcccgcccgaccgtgggacctcgccgcccacgaccccgctctcctcccccactttccccctccaaaaccggcgccgaaccaccccactcgcccacgtcgccggcgcctcttcccccgtgctcccgtgcaccaccgctttccggcgagctccggccggccgattccgccgctccacccaccgccgcgccaatccgccaccactgtcggcttcgcggcgccgtgccgcagcccggcctctactccatttcccctctccgcctctggaacaccgccgcctcgtgcaccacctctctcccccgccgccgccgtcttcagccggccgctttccgccgtcgacccgagctccgctaccgccgttgtcgtctcaaaccaccgctcctcaccgctccggtcgccgttcttagggttcgcccccgtccccagcaggcaacgggcagcccccctttcgtgccgcggtgaatccggcagccgatcaaccggacaccccggccgacccaactccatcacgcccaccctcgcctggggctgacgtcagcaaggggtggggcggcgccgacatgccggacccgcgggtcagtgactcaaggagagagaggggcggctggcaagcgggccccaccgagcggcggctcaagagagagagcgggaggggcgccgctggtggctcggcttggcttcaaagccggcaggccaagcatggcgagcgacggcggcacgcgcggtcaccggcgacggcaaccggcggcgcggacggcgacggcagacggcgcgaaaagcggcgtcggcggccgaagacgacgggaacaaaatggaaaggattagagggagaggggtggtctacggcgagcggattcgccggtcgaaggcggcggccatggtggtactcaccggcgcgcggggagaagcgggtcccgacggcgggattggatggggatgcggcggccgggggggtgagcgggagtggggcgtgggcgcggggagtgcgggcgcgcgggggagtgggcgacgtggcccggggcggcagggagcgcggggcggtagggaggagggaggccgtccctccggctggaggttggggaaggtgctgacaggtgggccccacctgtcagcgcccgagggagtgagggggaggcgacctgga

SEQ ID NO: 32148 - DNA, 363 bp, Oryza sativa
  Clone ID: PAT_MRT4530_36386C.1
atggccggtggaggggggtggggttacgcgacggcttctgcaggatggaatgttgtccggatcacacgcacgcagatgcgcttctgccgctgcaggttgcatacgagggagatcctgcaaaggcacaacgccgacgtcgccggccgtggcggcatggactcatggcccgccgacgtcctggtcatccttgaaacacagcagcgcgccagcgccagcgccagcagccagcagtcagccttaagaaagattcgggagggtggtgccttcgcgtcccggcgacaccgcgagttcaccgctctgcgctctgctatagctttccacgcgcgcgccttcgccgcttgtcgcttcgcttcgccccagtag

SEQ ID NO: 32149 - DNA, 5286 bp, Oryza sativa
  Clone ID: PAT_MRT4530_36387C.1
atgggttccgtctccggtatcgacgacctcgtcttcccacccgggcagacgtttcggttcggcagcctcgacttcgtcaccaacaacttcggcaagatctctctccttgactcggtgtcagaccagtcgggagagaaccggatttcagtcccgtttggactcccaaacgcggctgaaagctacttcaagaccatctcaatcgagtcggattcaaaccactcgggcgagatcgcatcttctccaacgacaccaaatcgagatgatggggcttacccacttgtcctgatgaagctccccgacgatttggcggccatctccatcacaacagcgtctccatcccgtaggcctaggcggaagtcggcttctacaccgatttcgcctagcttcagggaagtcggcgtcatcctccaaccactcggcacggtttcgacggatcagctagatgaccactacagctctcccaccgtcgactcgcgccccaccgacatcatggagtacgatgagtttagctctcgctaccacgacccggatctcgacgacttcgacggaagcttagatgacaactacacccctctctacttcggcgtcttcatggccgataatgagacggaggagcaacgccaagcccgggagaccgaagcacgtcgcgagtttgagcgtcgccgactggaggaggagcatcaagcacaagaacaagaacggctacggcgtgagcagcaggagcgtgagcggaccgcgaaggaggctgaggatcgacggcagcgagctttggaagcagggcgccgagcgcgtgatctcatcggccaacaagatgttgaagagacaccggttttccgcacccctcaacagaatgcggttgccgcgatcaccctcctcgacactctcctcaaggaaaacgagctcaatcaatctgatcacgtcgtcaacatcttgaaccagacgaagaccatgattgcggcctcagtcccagttaactccgaaagcgtccacacgccgactggtagccgagtcccccacttccgatctcatgactaccgtcatccaagcctcagcatcaccggcgcaggatccaatcgcaggagcaggggtcatgacgagcggtccattcactcacctcccgaccaatatagggagcgccgagtggaacggcctcgctcaccacctcgtcgccgccccgtcgatcttcgcggcacaatcatacagcgccgagcagctcgaggccatcatcattcgccgaaccgccacgacgacgaccttgacggagtagcagccttcaccgacgatctgcgtcgagtggattggccagccggcttcaagccgactggaatagagaagtacgacggtaccactaatccagaatcgtggcttaccgtctacggtctcgcaatccgcgcagcaggaggagacaacaaggccatggcgaactatttaccagtggctttagcggattccgcccgatcttggctccatggattgccccgtggcacgattgggtcttgggccgagttacgcgaccacttcatcgccaacttccaaggcaccttcgagcgtcccggcacacaatacgacctttacaacgtcattcagaagtccggagagtcccttcgagattacatccggcgattctctgaacagcgtaacaagatctctgacatcaccgacgacgtcatcatcgccgcattcaccaaagggattcgccacgaggaattggttggcaagttcgggcgtaagcctcccaggactgtcaagctcatgttcgaaaaagccaacgagtacgccaaagctgaagacgccgtcaccgcttcaaagcagtcgggtctcagttggaagccaaaaaaggatacgccggcttcgggaggaggtggaagtaacaatcataaggaccgcaagcgtaagcctgcggaacttgtcgcaaccgccagccactcttctcgacagcgttcgcgcgtcaacacgttcgacaagatcatgaactcccaatgcccgcaccatcctaattccaaccacgtggccaaagattgcttcatctacaagcaattcgcggatcaatacgccaagtctacgcggaagaaccccgacgaagaacaaagcacgtcgaggaagaaggacgacggcgataccccggcaggatttcaagaccaccgcaaggagcttaaccatatcttcggcggccccctggcttatgagtctaaaaggaagcacaagttgaccgagcgggagatcaatgctgttcagcccgacacgcctcaatatcttcgatggtcagagattgcaatcaagtttgaccgctcggatcatcctgaccgagtggtccacccggggcggtaccccctggtactagacccagtggtccgtaatgtcaagcttcgcagaaccctcattgacggtggcagcgcactcaatatcctcttcgccaagaccttggatgatatgcagattcctcgctccgagctaaaaccaagcaatgcgccttttcacggagtaattccaggattatccgcaactccactcggccagatcacactcccggtcacctttggcactcgggaaaactttcgcacagagaatatcagcttcgaagtcgccgatttcgagacagcttaccatgccatactcggacggccggcgttagccaagttcatggccgtcccgcactacacttacacgattcgcacaagacaggaaggacgcgatcaaggaggaattaaccaagctgttagcagcaggcttcatcaaagaagtccttcatcccgactggctggcaaacccggttctagttcggaagaaaacagggcaatggcgcatatccgactgaaggaatccgactgcttgaagacttcattcatcacgccctttggtgcatactgctacgtcaccatgccgtttggactaaaaaatgcaggagcaacttatcaacgtatgattcagagatgcttctcaacacaaattggtcgcaacgttgaagcctatgtggatgatgtagtcgtcaagaccaagcaaaaggatgatttgattttggatctagaagaaactttcgcgagcatccgcgctttcaggatgaaattaaaccctgaaaagtgcaccttcggagtaccgtcagggaagctgcttggttttatggtgtctcataggggcatccaagccaacccggagaaagttactgctatcctcaacatgaaaccgccaagtacccagaaagatgttcagaagttgactgggtgcatggcggcgctcagccgatttgtttcaagacttggcgagcgggggatgcccttctttaagctactgaagaaaacagatgatttccagtggggacccgaagcacagaaggccttcgaagatttcaagaaactcctcaccgagccacccgtcttagcttcaccacatccgcaggagccgttgttgctgtatgtgtcagccacctcccaggttgtgagcacagtcttggtcgtcgagcgtgaggaagaaggccatgtccagaaagtccagcgaccgatttattttgtcagcgaggtcctatccgactccaaaacgaggtaccctcaggttcagaagctgttatatggtattctaattactaccaggaagctatctcactactttcaaggagtggttttgatttccccaactggagaaagattgagctatgtgctttggatacatttttcggcgtcccacaacgtcgccgagtatgaggccctccttcatggactgcggattgcaatttccctagggataaagcgtctaatagttcgaggcgattcacagctggttgtcaaccaagttatgaaagagtggtcatgccttgacgacaatatgatggcatatcgacaagaggtacgcaagttggaagacaagttcgatggactcgagctcagtcacgttcttcgacacaacaatgaagccgccgacagacttgccaactttggatccaagcgtgaggcggcaccctctgatgttttcgtcgaacacctttatacgccgacagtacctcacaaagatactactcaagttacgagcactcatgacgcagctatggttgaagtagactggcgagagcccctcatacgatttttgacttctcaagaactcccccaagacaaagatgaagccgagcggatttcaaggcggagcaaactttatgttttgcatgaagccgagttatacaagaaaagcccttcaggaattctgcaacgctgcgtatctttagaggaagggagacaattgctacaagacatacattctgggatatgcggaaaccatgctgctgcacgcaccattgtcgggaaagcttaccggcagggttttttctggcctactgcagtgtccgatgccgacaaaattgtgcgcacatgtgaaggttgccaatttttcgccagacaaattcatctaccagctcaagagttgcagactatcccgctgtcttggccgtttgcggtttgggggcttgacatggttggcccgtttaaaaaggcagtcggcggttacacgcatctctttgtggccattgataaattttccaagtggattgaagctaaaccggtcgtcacaatcacagcagataatgctcgagacttcttcatcaacattgtgcatagatttggagtgcccaatcggatcatcaccgataatggcacacaattcactggcggagtttttaaagacttttgtgaggactttggaattaagatttgctatgcctcagtggcacaccccatgagcaatggacaggtggagcgagccaatggcatgatacttcaagggattaaagcgcgtgtctttgaccggctaaaaccctatgccggcaaatgggtgcaacagctgccatcggtactttggtctttgcgaactacacccagtcgggccacaggccagtcaccctttttccttgtctatggggcagaagcaatgttgccgagtgaagttgaatttgaatctttgcgctttcgaaatttccgtgaagaacgctacgaagaggaccgagtggatgacttgcaccgattggaagaagtccgcgaagcagctttgattcggtcggctcgatacttacaagggttgcggcgttatcataatcgcaatgttcgatcccgtgcctttctagtcggcgacctggttttgaggaaaattcaaactacacgagatcggcacaagttatctcctttatgggaggggccgtttatcatctctgaagtcacccggccaggttcctatcgactcaagcgcaaagacggtactctcgtcgacaactcttggaatattgaacatcttcgccgtttctatgcttaa

SEQ ID NO: 32150 - DNA, 5586 bp, Oryza sativa
  Clone ID: PAT_MRT4530_36388C.1
atgggttccgtctccggcatcgacgacctcgtcttcccacccgggcagacgtttcggttcggcagcctcgacttcatcaccaacaacttcggcaagatctctctcctagactcggagtcaaaccagtcgggagagaaccggatttcggtcccgttcggattcccgaacgcggctgaaagctacttcaagaccatctcaaccgagtcggcttcaaaccactcgaccgagatcgcatcttctccaacgacaccagatcaagatgatggggcttacccaccagtcctgatgaagctccccgacgatttagcggccgtctctaccacgacagcgtcttcatcccgtaggcctaggcggaagtcggccttaacaccgatttcgcctagcttcagggaagtcggcgtcatcctccaaccactcggcacggtttcgacggatcagctagatgactacaacagctctcccaccgtcgactcacgtcctactgacatcgtggagtacgacgaatttagttctcgctacaacgacttcaacgacttcgacgacttcgacggaagcctagatgacaactatacccctctctactttggcgttttcatggccaataatgagacggaggagcaacgccaagcccgggagaccgaagaacgtcgccgactggaggaggagcatcaggcacaagaacaagaacggctacggcgtgagcagcaggaccgtgagcggaccgcgaaggaggctgaggatcgacgtcagcgagctttggaagcagggcgccgagcgcgtgatctcatcggccaacaagatgccttcaccgacgacctgcgtcgagtggattggccagccggcttcaaaccgactggaatagagaagtatgacggcaccactaaccccgaatcgtggcttaccgtctacggtctcgcaatccgcgcagcaggaggagacaacaaggccatggcgaactatttaccagtggctttagcggattccgcccgatcttggctccatggattgccccgtggtacaattggatcttgggccgaactacgcgaccacttcatcgccaacttccaaggcaccttcgagcgtcccggcacacaatatgatctttacaacgtcattcagaagtccggagaatcccttcgagattacatccggcgattttctgaacaacgtaacaagatctccgacatcaccgacgacgtcatcatcgccgcattcaccaaagggattcgccacgaagaattggtcggcaagttcgggcgcaagcctcccaggacagtcaagctcatgtttgaaaaagccaacgagtacgccaaagctgaagacgctgtcaccgcatcaaagcagtcgggtccgagttggaagcaaaacaagggtacgccggctacgggaggaggtggatgtaacaatcataaggaccgcaagcgtaagcctgcggaacttgttgcaaccgccagtcactcttctcgacagcgttcgcgcgtcaacacgttcgacaagatcatgaactcccaatgcccgcaccatcctaactccaaccacgtggccaaagattgtttcatctacaagcaattcgcggatcaatacaccaagactgcacggaagaattctgacgaagaacaaagcacgtcaaggaagaaggacgacggtgacaccccggcaggttttcaagatcaccgcaaggagctcaaccatatctttggcggccccctggcttatgagtctaaacggaagcagaagttgactgaacgggagatcaatgctgttcagcccgacacgccccagtatcttcgatggtcagagattgcaatcaagtttgaccgctcggatcatcctgaccgagtggtccacccggggcggtaccccctggtactagacccagtggtccgtaatgtcaagcttcacagaaccctcattgatggtggcagtgcactcaatatcctcttcgccaagaccttggatgatatgcagattcctcgctccgagctaaaaccaagcaatgcgccttttcacggagtaattccaggattatccgcaactccactcggccagatcaccctcccagtcacttttggcactcgggaaaatttccgcacagagaatatcagctttgaagtcgccgatttcgagacagcataccatgccatactcggacgcccggcgttagccaagttcatggccgtcccgcactacacttacatgatgatgaagatgcctggtccccgtggagtcctatccctacggagcgacatcaagcaagccgtcacatgcgacaaggagagttgcgacatggcccaaactcgcgagatggcgtctgcccgagaggatatccgactggctgcagccacggcgagcgaaggagaaatacctgccaccaagacttcaaaaagtggagaaagcgaagccaagactaaaaagattcccctagatccctctgatcctactaaaaccgctaataataaagatatcttcgcgtggaaaccttcggatatgcccggtattcctagagaggtgattgagcactccttacatgtcaaagaagatgccaagcctatcaaacaacgactccgccgattcgcacaagacaggaaggacgcgatcaaggaggaattaaccaagctgttagcagcaggcttcatcaaagaagtccttcatcccgactggctggcaaacccggttctagttcggaagaaaacagggcaatggcgcatgtgtgtcgattataccgacctcaacaagtcttgtcccaaagatccctttgggttgcctcgcattgaccaggtagtcgactcgaccgccggctgtgagcttctcagttttttggattgctactcggggtatcatcagatccgactgaaggaatccgactgcttgaagacttcattcatcacgccctttggggcatactgctacgtcaccatgccgttcggattaaaaaacgcaggagcaacttatcaacgcatgatccagagatgcttctcaacgcagatcggtcgcaacgttgaagcctatgtggatgatgtagtcgtcaagaccaagcaaaaggatgatttgatctcggatctagaagaaacctttgcgagcatccgtgctttcaggatgaaattgaaccctgaaaagtgcaccttcggagtaccgtcagggaagctgcttggctttatggtgtctcataggggcatccaagccaacccggagaaagttactgctatcctcaacatgaaaccgccaagtacccagaaagatgttcagaagctgactggatgcatggcggcgctcagccgatttgtttcaagacttggcgagcgggggatgcccttcttcaagctactgaagaaaacagataacttccagtggggacccgaagcacagaaggccttcgaagatttcaagaaactcctcaccgagccaccagtcttagcctcaccacacccgcaggagccgttgttgctgtatgtatcagccacctcccaggttgtgagcacagttttggtcgttgagcgcgaggaagaaggccatgtccaaaaagtccagcgaccgatttattttgtcagcgaggtcctagccgactccaaaacgaggtaccctcaggttcagaagctgttatatggtattctaattactaccaggaagctatctcactactttcaaggtcactcggtaacggtggttacatcatttccactcggtgatatactgcacaaccgcgaagcaaacggacgtattgctaagtgggctttggagttgatgtctttggacatatcattcaagccccgaatttcaatcaagtcccaagcgttagctgattttgtcgccgaatggaccgagtgccaggaggatacccccgcggagaacatggagcactggaccatgcattttgacggatccaaacgactttcgggcactggagcaggagtggttttgatttccccaactggagaaagattgagctatgtgctctggatacatttttcggcgtcccacaacgtcgccgagtatgaagccctccttcatgggctacggattgcaatttccctagggataaagcgtttaatagttcgaggcgattcacagctggttgttaaccaagttatgaaagagtggtcctgccttgacgacaacatgatggcatatcgacaagaggtacgcaaattggaagacaaatttgatggactcgagctcagtcacgttcttcgacacaacaatgaagccgccgacagacttgccaattttggatccaagcgtgaggcggcgccctcagatgttttcgtcgaacacctttatacaccgaccgtacctcataaagatactactcaagatgcggacactcatgacgtagctatggttgaagccgactggcgagagcccctcatacgatttttgacttctcaagaactcccccaagacaaagatgaagccgagcggatttcaaggcggagcaaactttatgttttgcatgaagccgagttatacaagaaaagcccttcaggaattctgcaacgctgcgtatctttagaggaagggagacaattgctaaaagacatacattctgggatatgcggaaaccatgctgctgcacgcaccattgtcggcaaagcttaccggcagggttttttctggcctactgcagtgtccgacgccgacaaaattgtgcgcacgtgcgaaggttgccaatttttcgccagacaaattcatctaccagctcaagagttgcaaacaatcccgctgtcttggccgtttgcggtttgggggctcgacatggttggcccgtttaaaaaggcagtcggcggttacacgcatctctttgtggccattgataaattctccaagtggatcgaagctaaaccggttgtcacaatcacagcggacaatgctcgagacttcttcatcagcattgtgcatagatttggagtgcccaatcggatcatcaccgataatggcacacaattcactggcggagtttttaaagacttttgtgaagactttgtaattaagatttgctacgcttcagtggcacaccccatgagcaatggacaggtggagcgagccaatggcatgatacttcaagggattaaagcgcgtgtttttgaccggctaaaaccctatgccggcaaatgggtgcaacagctgccatcagtactttggtctttgcgaactacacccagtcgggccacaggccagtcaccttttttccttgtctatggggcagaagcaatgttgccgagtgaagttgaattcgagtctttgcgctttcgaaatttccgtgaagaacgctacgaagaggaccgagtggatgacttgcaccgattggaagaagcccgcgaagcagctttgattcggtcggctcgatatttacaagggttgcggcgctatcataatcgcaatgttcgatctcgtgcctttttagtcggtgacctggttttgaggaaaattcaaactacacgagatcggcacaagttatctcctctatgggaagggccatttattatctctgaagtcacccggccagggtcttatcgactcaagcgcgaagacggtactcttgtcgacaactcttggaacattgagcatcttcgtcgtttctacgcttaa

SEQ ID NO: 32151 - DNA, 627 bp, Oryza sativa
  Clone ID: PAT_MRT4530_36389C.1
cactggcagcggcacaaggggaaaggagagggaggcgccggcatgtgggccccacgggcagtggctcaagggggagggagtgggcggcgtcatgctcggcacgactcaagccggccggccatggcgaggcgacgacggcgcacgaccgccggcgggtgaccggcggcgcggggagacggcggcggccggcgcgaaggcggcggcgggcagccgaagacgacggcgcacgcgcggagggcggcggcgctcacgggggagaggaaaggaaggaggaaaggggattcctcaccgaggttggcgcggcggcgactctagcggcggcggctcgcagccgaaggcggcggcaagcggcggagctcgggtgcgcggcgcgagggcgggtagacggcacgggagagcgcggcgagtgcgaaaaatgagagaggaagacgcggggagcgatttataggcggagggggaggcggacgtggccgggaacccaccctattgcgccggcgacgtgggaaggtgggggagagagagaggggtgggattcaaattcgaatcccgcccatttgcgaggcgcgcgagggcgggagacgcgggggagaggcggcgacgtgggggggaacgcgggagcggcgcggc

SEQ ID NO: 32152 - DNA, 584 bp, Oryza sativa
  Clone ID: PAT_MRT4530_3638C.1
cccacgcgttcgaacgacctgtggaactatgataataagaaaacaaaaccgccctatctcctggctaattatatcaatggcaccactccatacacgtctgacaattatctatacaacatctcactcgttgccaccaatgcatctgtgctgccccccatgctcaatgccattgaaatatactaccaagtccaacaagatgagaagatgacctactcggaagatgttgaagccatgatgactgttaaaattgattatcaagtgaagaaaaattggatgggtgacccatgcttaccagaaaagtacacatggagtggcttgaaatgtagaagtcaaggagttacgtcaagaattatatccttagacttgtccagtagtgatttgcagggtgcaatatctgaacaattttccatgctcaggtcactcgaatacttgaatttgtcgaacaatgatttaactggatcactacctgaatccttgacaaacttaccaaatatccatgttctagatctatcaggaaaccaactaaatggtacattccctgaagcattatgcaaaaatcgagcgctcacattgaggtatgacac

SEQ ID NO: 32153 - DNA, 318 bp, Oryza sativa
  Clone ID: PAT_MRT4530_36390C.1
atgctggcgccctcggtaagggaggcggaagcggcggcatcgatggcggcgacggtggcggtgcggcgccagcgacgatggcgcggtggtggaggcgcgggatctggcgggcataggccgtccccgcacggatctggcggctggctgcccttccccgccacggatccggcgtgggaaccggctgccctcccctcccgtccccttccctccccagcggacgggagcgcgcaggcgacggatccggtgggcgggctagcagcggccttccccgcacgaatctggcggccggccgccctccccccgccacggatccggtga

SEQ ID NO: 32154 - DNA, 1679 bp, Oryza sativa
  Clone ID: PAT_MRT4530_36391C.1
aactagtggatccccgggctgcaggaatcgacgaggcgcacctcccacccacccgcagccgccggcgagttcgagcggcggccaccgggcgggcggcggggcggcggctcggctcccctgatctccctcccctgcgccgctgcgcggtatggacctccaggatccagccgcggacgccgtcgcggccgagccactcaccgtcgccgagaccgacgaccagccgccgccgccagcgccgcctctggaggcggagggtgttgtcgtcgcggaggaagacccgctgccgcatccgccccttgaggtggtggaggaggatgtggcccccgtcgtcgcagaagccggcgccgctgccgtacctatggagccctccgaggctggcgcgggtggtgtcgtgctcaccgacgagctctgcgaccggatcgtcaaacaggtggagtactacttcagcgatgagaatcttcctacggatgagttcctgattaaattcgtgaagaagaacaagcaggggtttgttcctattggagttattgcctcattcagaagaatgaagaaactcagtcaggatctctctataattgaagctgcacttaggacatcatctaagctggtcgtgagtccagatgggaaaagggtcaggaggttacatccattgccaaataatgaattgaatgatgttaagaaaaggatagtcgtggtggaaaatctgccttctgatttctccatggaaagcatacatgcgaaatttgaaacagttgggaaaattgcgaagataaccattcatgatcaacattcagtgggagaatctgcaacaattaagaaccatgacatcatgctaagtaacaaggtgcatgctcttgttgaatatgaaacagcagaggcagctgagaaagctgctatcaccttaaacgatgggagcaattggaggactggaatgaaagtcaggctggctaagcgaaccgtaggatcaggaaagcataaccagtcttcaaaagaaaatcaggccatccagggccagccttcaaaagtagagcagcagatggtatcagaaaagaatggtggtactgattcagtggagagtgctttcgacaatgagaatgtgaactctaatatttcccatgaggacatgcaccaacaccaaaaagtaaatgctaaaggaggacgaaaaggtcgatataaatctcaaggaagaggtcagattcagcaaaatacaagtgggcaaggccatgtctcatcccctgccacttctggttctgatcatgtgaacaagcctattcctggaccgagaatgccggatgggacaaggggctttacaatggggcgtggtaaatctcctacattccagaaaggggataatgctgaagaatagtgcttttgtcccaaaaagcctggtaacaatctaaccgcgtgaaaaacataattctgctgttatgctataagctgtcttgcttcgtgtaagaacgtagggacatgtcactgatatagaaaaggctcttattttttatgtagtgtcttttctgaattaactggtgctttagtaggtctggtaaaaatttaacctcatgaaaaacatagtactgctgttatgctataagctgtcttgcttcgtgtaagaacgtagggacatgtcactgatatagaaaaggctcttattttttaagtaaaaaaaaaaaaaaaaaaaa

SEQ ID NO: 32155 - DNA, 3128 bp, Oryza sativa
  Clone ID: PAT_MRT4530_36392C.1
ttggtgccttgctgcgaggggcccagttcggtctgcatgtacagggggttccggccgtaggcgaaattgggtcggtactcttgtctaagtctaggatgggttggaaattatgtcacgtcttccgtccgtataccgtggtgctaaaatatggaatggttggcctgggttggcttgggacgagctggaacccagggtcgggttgccagttcggtccgaatcatcgtaggccttgggttaaggcagtaagagaagctttggagaagatgtctttggtggagtcctggcttataccccagttgagcgcctgtgaagatggagccgtagtcgactcgaccgccggctgtgagcttctcagttttttggattgctactcggggtatcatcagatccgactgaaggaatccgactgcttgaagacttcattcatcacgccctttggggcatactgctacgtcaccatgccgttcggactaaaaaacgcaggagcaacctatcaacgtataatccagagatgcttctcaacgcagatcggccgcaacgttgaagcctatgtggatgatgtagtcgtcaagaccaagcaaaaggatgatttgatctcggatctagaagaaacctttgcgagcatccgtgctttcaggatgaaattgaaccctgaaaagtgcaccttcggagtaccgtcagggaagctgcttggctttatggtgtctcataggggcatccaagccaacccggagaaagttactgctatcctcaacatgaaaccgccaagtacccagaaagatgttcagaagctgactggatgcatggcggcgctcagccgatttgtttcacgacttggcgagcgggggatgcccttctttaagctgctgaagaaaacagataacttccagtggggacccgaagcacagaaggccttcgaagatttcaagaaactcctcaccgagccaccagtcttagcctcaccacgcccgcaggagccgttgttgctgtatgtatcagccacctcccaggttgtgagcacagtcttggtcgttgagcgcgaggaagaaggccatgtccaaaaagtccagcgaccgatttattttgtcagcgaggtcctagccgactccaaaacgaggtaccctcaggttcagaagctgttatatggtattctaattactgccaggaagctatctcactactttcaaggtcactcggtaacggtggtcacatcatttccgctcggtgatatattgcacaaccgcgaagcaaacggacggattgctaagtgggctttggagttgatgtctttggacatatcattcaagccccgaatttcaatcaagtcccaagcgttagctgattttgtcgccgagtggaccgagtgccaggaggatacccctgcggagaagatggagcactggaccatgcattttgacggatcaaaacgactttcgggcactggagcaggagtggttttgatttccccaactggagaaagattaagctatgtgctttggatacacttttcggcgtcccacaacgtcgccgagtatgaggccctccttcatgggctgcggattgcaatttccctagggataaagcgtctaatagttcgaggcgattcacagctggtcgtcaaccaagtcatgaaagagtggtcctgccttgacgacaacatgatggcatatcgacaagaggtacgcaaattggaagataagttcgatggactcgagctcagtcacgttcttcgacacaataatgaagccgccgacagacttgccaattttggatccaagcgcgaggtggcgccctctgatgttttcgtcgaacacctctactcgccgacagtacctcacaaagatgctactcaagttgcgcgcacccatgatgtagctatggttgaagccgactggcgagagcccctcatacgatttttgacttctcaagaactccctcaagacaaagatgaagccgagcggatttcaaggcggagcaaactttatgttatgcatgaagctgagttatacaagaaaagcccttcaggaattctgcaacgctgcgtatctttagaggaagggagacaattgctgaaagacatacattctgggatatgcggaaaccatgctgctgcacgcaccattgtcggcaaagcttaccggcagggtttcttttggcctactgcagtgtccgacgccgacaaaattgtgcgcacgtgcgaaggttgccaatttttcgccagacaaattcatctaccagctcaagagttgcaaacaatcccgctgtcttggccgtttgcggtttgggggctcgacatggttggcccgtttaaaaaggcagtcggcggttacacgcatctctttgtggccattgataaattttccaagtggattgaagctaaaccggttgtcacaatcacagcagataacgctcgagacttcttcatcaacattgtgcatagatttggagtacccaatcggatcatcactgataatggcacacaattcactggcggagtttttaaagacttttgtgaggattttggaattaagatttgctacgcctcagtggcacaccccatgagcaatggacaggtggagcgagccaatggcatgatactgcaagggattaaagcgcgtgtctttgaccggctaaaaccctatgccggcaaatgggtgcaacagctgccatcggtactttggtctttgcgaactacacccagtcgggccacaggccagtcaccttttttccttgtctatggggcagaagcaatgttgccgagtgaagttgaatttgaatctttgcgctttcgaaatttccgtgaagaacgctacgaagaggaccgagtggatgacttgcaccgattggaagaagtccgcgaagcagctttgattcggtcggctcgatatttacaagggttgcggcgttatcataatcgcaatgttcgatctcgtgcctttttagtcggcgacctggttttgcggaaaattcaaactacacgagatcggcacaagttatctcctctatgggaagggccatttatcatctctgaagtcacccggccaggttcctatcgactcaagcgcgaagacggtactctcgtcgacaactcttggaacattgaacatcttcgtcgtttctacgcttaa

SEQ ID NO: 32156 - DNA, 5098 bp, Oryza sativa
  Clone ID: PAT_MRT4530_36393C.1
atggacatctctaggacaaatgaaggctacacgagctgcggcccggtagtcgagatgtcatggcacagggctggtgtcctgctgctaggggctcaatcctgcctacctgtcccggaggttccggccgtaggtggggttgggtcggtactcttgtctatggctaggatgggttggaaactatgtcatgtcttccgtccatatgccgtggtgctaaaatgtggaatggttggcctgggttggcttgggacgagctgggacccagggtcgggttgccagttcggtctgaatcatcgtaggccttgggttaaggcaggttcgtgagggttcacggccttgattaataatattgtatagctctaggatcgtgtttacaaaatagctttgggcaactaagtgacttttaaatgctgtttactgcaaaacttaacccctattattatccccttgtacccccttgcattaatcatgcatctgccggtgtgacttgctgagtactgtggttgtactcactcttgctcaatctttcccctcttcagtaagagaggctttggagaagatgtcttaggtggagtcctggcttataccccagttgagcgcaatgttgatgaagaaatctcgagctttatctgctgtgattgtgacaacccgtttagcttcaatccacttggagaatttgtcaatggccacaaagagatgcgtgtaaccgccgactgcctttttgaacgggccaaccatgtcgagcccccaaaccgcaaacggccaagacagtgggattgtttggaactcttgagatggtagatggatttgtctggcgaaaaattggcaaccttcgcacgtgtgcacaattttgtcggtgtcggatactgcagtaggccagaaaaaaccctgccggtaagctttgccgacaatggtgcgtgcggcggcatggtttccgcatattccagaatgtatgtctttcaacaattgtctcccttcctctagagatacgcagcgttgcagaattcctgaaggtcttttcttgtataactcggtttcatgaataacataaagcctacttcgccttgaaatccgctcggcttcatctttatcttgagggagttcttgagaagttaaaaatcgtatgaggggctctctccagtcggcttcaatcatggctatgtcttgagtgtccgcaacttgagttgtttctttctgaggtacggtcggctcataaaggtgttcgacgaatacatcggagggggccacctcgcgcttggatccaaagttggcaagtctatcggcggcttcgttattgtgtcggagaacgtgactaagctcgagtccatcgaacttgtcttccaatttgcgtacctcttgtcgatatgctgtcatgttgtcgtcaatgcaggaccactctttcataacttggttgacgactagctgtgaatcccctcgaactattagacgcttgatccctagggaaatcacgatccgtagtccatggaggagcacctcatactctgcgacgttgtgggatgtggaaaaatgtatccaaagcacataacttaatctttcttcggttggggaaattagaaccactcccgctctagtgcccgaaagcctttttgatccgtcaaaatgcatggtccagtgctccatcttttctgcgggaatatcctcctggcactcggtccattcggcgacgaagtcggctaatgcttgggacttgattgaggttcggggcttgaaggatatgtccaaagacatcaactccaaatcccatttagcaatccgtccgtttgcttcgcggttgtgcagtatatcgccgagcggaaacgatgtaaccaccgttaccgagtgaccgtggaagtagtgggataatttcctggtagtaatcagaataccgtataacagcttctgaacctgaggatatctcgttttggagtcggctaggacctcgctgacaaagtagatcggtcgctggactttttggacatgggcttcttcctcacgttcgacgaccaagactgtactcacaacctgggaggtggctgatacgtatagtagcaacggctcctgtaggtgtggcgaggctaagactggtggctcggtgaggagtttcttgaagtcttcgaaagccttctgtgcttcgggtccccactggaaattgtctgttttctttaatatcttgaagaagggcatcccccgctcgccaagtcgtgaaacgaatcggctgagcgccgccatgcatccagtcagcttctggacgtctttctgggagcttggcggtttcatgttgaggatagcgttgactttctccgggttggcttgtatgcctctatgagacaccataaaaccaagcagcttccctgacggtactccgaaggtgcacttttcagggtttagtttcatcctgaaagcgcggatgcttgcgaaggtttcttctaggtccgagattaaatcatccttctgcttagtcttgacaactacatcatccacgtaagcttcgacattgcggccaatttgcgtcgagaagcatctctgaatcatgcgttgataagttgctcctgcattttttagtccgaatggcatggtgatgtagcaataggccccgaagggcgtgatgaatgaagtcttcaagcagtcggattccttcagtcggatctccttgatcgcatccttcttgtcttgtgcgaagcggcggagtcgttgtttaataggtttagcgtcttctttgacgtgcaaggagtgctcaatcacctctctaggaatatcaggcatatcagatggtttccacgcaaagatatctttattattttgaagaaaggtgacgagcgcgctttccttggtcgcaggcacttctccttcgcctgccgtggtcgcagccagtcggatatcttctcgggcagacgccatctcgcgagtctgggccatctcgcaactttccttatcgcatgtgacggcttgcttgatgtcgctccgtagggataggactcctcggggaccgggcatcttcatcatcatgtaagtgtagtgcgggacggccatgaacttggctaacgccagacgtccgagtatggcgtggtatgctgtctcgaaatcggcgacttcgaagcagatattctccgtgcggaagttttcccgagtgccaaaggtgaccggaagggtgatctggccgagtggagttgcagataaccctgggatgactccgtgaaaaggcgcattgcttggtcttaactcggagcgaggaatctgcatatcatccagggttttggcgaagaggatatttagtgcactgccaccgtcgatgagggttctgcgaagcttgacattacggaccactgggtctagtaccagggggtatcgccccgggtggaccactcggtcgggatgatccgagcggtcaaacttgattgctgtctctgccggggggtcgccatcgtccttcttcttcgacgtgctttgtttttcgtcggagttcttccgtgtagtcttggtgtattgttccgcgaactgcttgtagacgaaacaatctttggccgcgtggttggacttaggatgatgcgggcattgggagttcatgatcttgtcgaacgtgttgacgcgcgaacgctttgatgatcttccaccccctcccgtagccggtgtatccttttttggcttccaactggagcccgactgctttgatgcgatgacggcgtcttcagccttggcgtactcgttggctttttcaaacataagtttgactgttttgggaggcttacgcccgaacttgccgaccaattcttcgtggcgaattcctttggtgaatgcggcgatgataacatcgtcggtgatgtcagagatcttgttgcattgttcagaaaatcgccggatgtaatctcgaagagattctccggacttctgaataacattgtaaagatcgaattgtgtgccggggcgctcgaaagtgccttggaagttggcgatgaagtggtcgcgtaattcggcccaagatccgattgtaccacggggcaatccatggagccaggaccgggcggaatctgctaaagccactggtaaatagttcgccaaggccttgctatctcctcctgctgcgcggattgcgagaccgtagacggtaagccatgattccgggttggtggaaccgtcatacttctctattccagtcggcttaaagccggctggccaatccactcgacgcaggtcgttggtgaaagcggcaactccgtctaggtcgtcgtcgtggcgatctagcgaatgatgatggcctcgggctgcccggcgcggtgtcccctcaacgtcttgttggccgataagatctcgcgctcggtgccctgcttccaaggctcgtagccgccggtcttcagcctcctttgcggcccgctcacgctcctgttgctcacgccgtagccgttcttgttcttgtgcttcacgttcctcctccagtcggcgccgctcggcctcgcgtcgtgcttcggtttcccgggcttggcgttgctcctccgtctcgttatcggccataaagacgccgaaatagagaggggtgtagttgtcttctaagctttcatcgaagtcgtcgagatctgggtcgttgttgtgaaagccgaactcattgtagtccacgatctcggtcggacgcgagtcgacggcgggagagctccagtagccatccagctggtccgtcgaaactgagccgagtggctggaagatgacgccaacttccctggagctatgcgatatcggtgttgaagccgacctccgcctaggcctacgggatggggacgtcatggtggtgaagacggccgccaaatcgtcggggagcttcattagaatcggtgggtaagccccatcatctcgatctgatgacgttggagaagatgcgatctcgtccgagtggtttgaagccgactcgattgagatggacttggagtatatttcagccgcgttaggaactccaaacgggaccgagatccggctctctcccgactggtccaattccgaatcgaggagagagatcttgccgaagtcattggtgatgaactcgaggctgccgaaccgaaacgcctgcccgggtgggaagacgaggtcgtcgatgccggagacggaacccattgca

SEQ ID NO: 32157 - DNA, 400 bp, Oryza sativa
  Clone ID: PAT_MRT4530_36394C.1
cccacgcgtccggccactcgtacgacaaacgcagtgagagagaggcagagagcagatcgaacagatctcttgtgttggatgatcgatcgagtcaggatgccgatgaacatggcgatgggaggcaagaaccgatatgcgctggaagatcgaggcggactactagaagcgatagctgctgttcaaggaggacggacaagagtacgcgcatgtggcgcatatgctgttcaaccggcggcgcgaggcgcaatgcatcgacggtacgaagcggctgtgccacatccagtgggaagatgcacaacaacgtgtggatcgcgagagcggacatcgtactcagctgactccgcgactaccacgacgacatggccgacgttatcctcatatacatgaacgacgaggcccg

SEQ ID NO: 32158 - DNA, 551 bp, Oryza sativa
  unsure (1)..(551): unsure at all n locations
  Clone ID: PAT_MRT4530_36395C.1
gnggattcggccgagaccaacattacgatagagttagggggtgggttggtttttccatcangttggctcatcnaatgacancangggctgatatactattgatgccatcnangtntganccatgtggattgaatcaactctattccatnatntatgggactgtcccnataatccatgccgtcngtggtcttccaaacaccnttgaacactacaatcccnnccaanatcccgacttggttggacttttgaaaaagcggaagcnaacnnactgattgatgctctccggcactgcttnaacaccttnnngaactacacgactanttngganggactcccccanaaaaggatgatnccccatctcanttnggataatgctgctaaactntattaagaaatcctccncctcccnactatcaatggtgatcattcccnaaaaannccacnggggttctctcnttcntgaaccaaatncctntttctcctgtttnctgctccaatccggccccatctantccntggcttacatcttcccntnaatttgaataaaaaaa

SEQ ID NO: 32159 - DNA, 419 bp, Oryza sativa
  Clone ID: PAT_MRT4530_36396C.1
gccgtcctcgagtacctcgccgccgaggtgctggagctggccgggaacgcggcgagggacaacaagaagaacaggatcgtgccgcggcacatccagctggcggtgcgcaacgacgaggagctgagcaggctgctgggcaccgtcacgatcgccgccggcggcgtgctgcccaacatccagcaggtcctgcttcccaagaagggcggcggcaagggcgacatcggctccgcctcccaggagttttgagcgggtttttctcatcgggtggatgaagaggggatcgccctttcgccaatctcttgtctggatcgttcatgcgatgcttttttttgcccatgtttccgtgtggttgggggtgtttgaacttcgtggcatgtaaaaaactctgggttcattaaaggtggatgaatagatgatat

SEQ ID NO: 32160 - DNA, 378 bp, Oryza sativa
  Clone ID: PAT_MRT4530_36397C.1
atgggtcagcggctcaaaggggagaggaagggggcgccggcatgtgggccccacgggcagtggctcaaggtggccgcttcaaaactggccgaccggccatggcaaccggcggtgacgcgcacggtcgccggcgacggcaatcggcggcgcgggaaacgacggcggacggggtacaggacggcggcgtcgaccaaaggcaacggcgagcgcgtggagagaggcggcgcaaacgagagagaggggaagagggagaaggggggatcctcaccggcgagtatggcggccggagcggaggatgaaggtggcggcgacgacctggcgatgaggaggggcggacgggcggcggcggcacctacggagggagttgagaaggattag

SEQ ID NO: 32161 - DNA, 2001 bp, Oryza sativa
  Clone ID: PAT_MRT4530_36398C.1
atgcgcataaacgaatacgggcattgtattcgagaaattcggcacagaaggagctatggactatccgttacgttaatcattgtgacatggatcttggtattgctaaaaacctgctatgtgctgccgtgttggcaacttcgtggcggcagcggccagcctcatcggggctacggccagagttccgactccgatggtagcgtcaagagccatgacaagtggttgcgattgcttgaggatgacgacgggtggcccaccattccaccaccgcgaacagctgccgcgacttgccatccccgtcctccttcgacgtcggcactcggcaccggcgttccctgcccgatagcacgtacgctggtggcggactgggcgacgtccaccgcacggatgaggtccagctcgacaagccgtagcaccgtggcagccgcagccgccatgcgacggcggccgtcgtcaccggcgcccacgaacagggagaaggaaatgcagaacatgtataatgggagaggagatgacgaaccacgttgggtcagcgagagagagacaaggagcgccggtcaccaaggacatcgggctagcagcaagcgtcggcgtggtgggtcgccggagaaccaatcgacgtcgtccccaatgctaacggtgttttccattgtctttccccttctcacaccagatcggagggcatcagttagactgtggaggccgatgagatcatgggaccgccgaaattgtagttacggtggcgacgctccgagccggttccttgccatcgacaacggcgataggggaggaaggaaaatcgtgtggacagtgggacccgaggccccacctgtcagctcctcctccttcctctggctggccggctgcaaccaccatggccgcctgagctgccccacgtcgccgcttccccagcccacctcctccaccttgcgccgctcccgcccgaccgtgggacctcgccgcccacgaccccgctctcctcccccactttccccctccaaaaccggcgccgaaccaccccactcgcccacgtcgccggcgcctcttcccccttcaaatccgcctctcccggccacgttctccccctccgggacctatataaacgactcacacacctccccaccgtgctcccgtgcaccaccgctttccggcgagctccggccggccgattccgccgctccacccaccgccgcgccaatccgccaccactgtcggcttcgcggcgccgtgccgcagcccggcctctactccatttcccctctccgcctctggaacaccgccgcctcgtgcaccacctctctcccccgccgccgccgtcttcagcaggccgctgctgccgcgttaatcgtcgccgcacctcgtcgtttgcgtcgtcggcaacgctgtgccaagctctacctcggcctctgctctgtttccccatttcatcgccgcaaccacctttccgccgtcgacccgagctccgctaccgccgttgtcgtctcaaaccaccgctcctcaccgctccggtcgcctatttctctccctaaccgctccaatattttccctaggtcttgccggccctcggccgcggctccaccgtggtcgggcgtcgtcggaacgccgttcccgtcgcctcccgtgccggtcgccgccatcttttccgccgccggtcacctccccgtggtcgtctcgccgtcgccgtcctcggtgagaatccccaccgccccctctcctttttccccatccgccgctccccatgcccgccaccgcgacgcgctgccgtcgccggtggtcgtctggccgcgtgcgcgtagccgccgtgccatggccggccgggtcggtcttggccgtgcccgtgccctagccgcgccgcctcgtggccgtccgatcggcttcgggccgatctgggccgtccatgtggtggacgcgcacccgaggccacgtgtggacttggtccaccatgcgccgcccctttgtgccgctgacgtgcggggcccgcctgtcggcgctggttccccttgc

SEQ ID NO: 32162 - DNA, 168 bp, Oryza sativa
  Clone ID: PAT_MRT4530_36399C.1
gatggcgagcgctgctcgacggactacgcccggctgcaaccctacagcacatctggtttctgtggctgccccatgtttgggggtggcatggattaaccttccattagtaattaattaattacgcgcctttgcttaattaattatttaattagttatccgggttactgg

SEQ ID NO: 32163 - DNA, 3058 bp, Oryza sativa
  Clone ID: PAT_MRT4530_3639C.1
tcacttccatatttgggtaccaacaattttgttgccccacatgccaccaatcccctgggaactaacaccctttgtgcccatttggttgggcttctcttgattctctaaagaatttggccccggaagctgaaagctctggcaccggtcccggtattcctcaggaagctcttctgcggccagcaagccatcaagcatgccaaagtatactgtcatatctcccaaggatttagagcagattgggcaggtgtagtgactacaggtgtacgcctgaaagcaagctgaatgcatgaaatggccacaaggtagacctttaactgctgcactcgatgtaaataggaagtcgcagcagattgggcaattcatctctagcatcttttctcgacatttatgctctttccattgtatggtcactaactttatcatgacaaaacagccaaaaatctgattctctggatctcggtatgaaggacaacatccaggtaatactgtacatccattgcgatcttctgactgaggttggggcgatttctgctgagcagctatccagcggctggtcatgagattttggattagataagccttcctccttgggtcaagagtagaatcacgagaaacctttcgtatctcagcctcaagctcactctggttcattcggaagatgtccttccaaccaggcttaaacatctgttcactctgatcgaacttttcctggaaatgatcttcttctggatgggaggcatcgcttgaagggccagaagaagtaggtgatctcttccaccattcatttagccattcatcaaacattgtattcttagttacttgcctccatgtgtccagcatattgttctgttcatctagactaagcgctgatgtaacccagggtaacattgactgcagaacctcagctcctgtacttccaattatacggcctacaatcttatcctgctcctctacagaaaaatgtttatcaaatagtggccacaattcaagttcttctctatggacatgattagacagagtaacccggatagacttgcacattccttgaagctttgtcaaaagttcattattctttttggaccaatcgatcctattatatggatgaatgtggttcgctccaactgcatcagcaccaccaagaggatgcttcaaatcagcatgcaattgtgaaagctcaaaaagaatagtggatatatctttaaataattcttcttcctgcttgtggtcaagagtatatgagtggctgacattgtgcagtgtctctttcgattcaagagcaggaaatacaatttcatcttcagcattgctgtgtgctctataaagaccccacagtaaacgaaaccttccgatgaattggcgaagggaagattcatccccatctatgagctttctagattccacatctaagaactccaaatctttgcgaattgccttatgaaatttgaatattgtgtcaattggccttgaaatgttatctgggccagaaaaggctgcatctgtctcccatgaaaaaagacttgaatacaatgaaggagcagaataattgagagacagcgatcggaaggactctgccaaaaacatattctgaagaaaagcttctgcatcctgatcattcagcttcgatacaaaccacggtaaaacacgctccaataacttcaacggtatgacacagagactcttatataaaagttccctttgtttctctgatgaaaaatgaatcctagcttgaggaagtacctttgtttcctcatttttgaagtgcctctcgattttctccattatctgatcagcttgtgaacatagctcagagtaaaaatccactgctgttgatctggctcctgttatttggatttgttcaattaaacatctaaatttattaaaccgccgttcttcttcagcgtgctcctgctcaaaggacacttgatcgttgactgctggaaatataacctgatcctctgcaatactgtggaagatgcacacatccgcaataaattgaagtttcacattaaagtctgatatatccgagaagtccccagattgttggatccttcttgtttcttctactatatcgctcaattcttttcggatagcattgtgccaacacaaaatctcatctattggatgcataacaagctgactataactagattctgcacgctttctctttccagttttaaagtgctcatgtgagcatccatacttgtctgtttgatcaatagcatccttgcatctaacattgctttttgaacaaggactacaaaaatcatgtgatattgttttcactgcttcccctccaatccacgcaaatacaacctgttggagaagtttctcgtccggaactattttatgtaagcagttaagaatatcttggtgctcatcagatgaaacagaagtagcaagccatggaaggaactctgccatcatattgacagggatgctgcataagaattgccagactaaatcagcttgctcttcatgtgaaaacttcttaatgagcagtgggaagacctgctcttcttccttggacatatgttgggttataaacgtttgaattgcacctgtacaggacgcgagttccctccgaagaccatcatcattccgcacatcaagctttaacagagagaacaggtgtgcaaacagatcattttcccccttatgttcaagggaatacgtgcctgctacatttttcactcgaatatcaagtgctggaaagataaccgcgtcctcggcgtcgcagtggtgcctgtagacggagaagaggaagcggcaccgcctctcgagctcccccacgtcgccggaccgctccgtggcgaggcgcacggccgcggcgtgcagcctctccagctccgcgcggatcgccttgtggaagtagacgaatatcagcatcggcgcctcggccgccgaccccgcggcggcggccggtggagaaggcgagcgcggcatcaccgcggcggcgatcgagccctcgtcggccaacggggtcgccatcctcctcctcgtcgtcggcggcggcggaggcggctgctccgcgtgcgcgtctgactcgccggacgcgtgg

SEQ ID NO: 32164 - DNA, 2479 bp, Oryza sativa
  Clone ID: PAT_MRT4530_363C.1
atggcgtcgtccccgcggccggcggcgacggcggcggcgcaccgccgggggctgatccagcgcccgccctccgcgcaggcctacctctccgccgcggcggcgctcctcgtcctcgccgccgtcgccttctcccgcgccggccaccgcttcccgcacccgcccgccacccgccgctgccgccccgacgccgagggctcctggtccgccggcgtcttcctcggcgactccccgttctccctcgagcccatcgaacactgggggatctcgaaggccgacggcgcggcgtggccggtggcgaacccggtggtgacgtgcgccgaagtggaggacgccgggttccccagcagcttcgtcgccaagcccttcctcttcctccagggggatgccatctacatgttttttgagacaaagaatcccattacgtcgcaaggcgacattgctgctgctgtgagcgaggacgccggagtgacatggcagcagctgggagtagtgttagatgaggaatggcatctttcgtacccatatgtgtttacctacaaaaacaaggtctatatgatgcctgaaagcagcaagaatggagatattcgtttgtatcgtgcattagattttccgctcaagtgggaattggaaaaggtccttttggagaagccattggtagattcggttatcataaatttccagggttcctattggctccttggaacagatttaagttcttatggtgcaaaacgaaatagagagatcagtatttggtacagtaattctccacttagtccttggattccacacaagcagaatctgattcataacacaggtaaaatgttaagcactagaaatgggggcaggccattcatttacaatggcaatctttatcgtgttggtaaaggccaagggggtggatctggccatggtatccaagtgttcaaagttgaaatcctgaagtcaaatgaatacaaagaagttgaagtcccatttgtgatcaacaagcaactcaagggccggaatgcatggaatggggcacgctcacatcaccttgatgtccagcagcttccatcaggtaaaccttggattggtgtaatggatggtgacagagtaccttcaggtgactcagttcaccgtctgaccataggttacatgatttatggagttgttcttatactagttcttgtcactggtgggcttattggtacaattaactgttccttaccactcagatggtctctcccgcatactgagaaaaggagtgggctcttcaatgtagagcagaggttctttctataccataagctaagctctctgatctccaatttgaacaaactgggatctcttatttgtggaaggattaactacagaacctgtaaagggcgagtttatgtagttgtagtaatgttaattttagtggttctaacttgtgttggaactcactacatctatgggggcaacggtgcagaagaaccgtatccaatcaagggcaagtactcacagttcacattgttgactatgacctacgatgcccggctttggaatctgaagatgtttgtggagcattattccaattgtgcatcggtgagggatattgtagtggtctggaacaaagggcagcccccagctcaaggtgaattgaagtcagtcgttcctgttaggatcagagttgaggataggaactctctgaacaacagattcaacatagacagtgaaattaagacaaaagctgttatggagcttgatgatgatattatgatgacatgcgatgacttagagcgtgggttcaaggtgtggagggagcaccctgacaggatcattgggtactatccacgcctttctgaaggcagcccactggaataccgcaatgagaggtatgctcggcaacaaggaggttataacatggtactcacaggcgcagcatttatggaccatggtttggccttcaagaaatattggagcaaggaagctgaggtaggaagacagattgtagacagtttcttcaattgtgaggatatccttctaaatttcttgtttgcaaatgcaagcttgacaagcacagtggagtatgtaaagccagcttgggcaattgatatgtccaagttctcaggagttgccatcagccgaaacacacaagcacactatcatgttaggagcaaatgcctggctaaattttcagaaatatatggaaatttaactgctaagaggttctttaacagccgaggtgatggctgggatgtatagtgacacatattagtggatagctttattcctgagactcaaataggctgattagccaagtatataaggtggggaagcagggggaggactagtgcaggaggaattatgtaattaagttattcagcaatgtatcctgttgtggttctactccctccgttccataatataagggattttgagtttttgcttgaaaaaaaaaaaaaaaaaaactcggactagttctctctccctcgtgccgattcctgcagcccgggga

SEQ ID NO: 32165 - DNA, 441 bp, Oryza sativa
  Clone ID: PAT_MRT4530_36400C.1
aaaaccaaaaaggggggctttaggcccaaacttttattatgggccccccctaataaacagaccccaggcgaaaaactttggcgaaaccaccggaacattttgggcccccaccccccccccccggaaaaaaccccccccgggggcccccccccctttttacgggttgggtcccgccccaaaccgccccaaaaccaaatccaaaccggccccgatttggggggggacccccccctaaatggccccaaggggaaaccatccccggggtttagggacccccccccggcgtccccggggggggggggggggcaaaggggcccttgggggccccctcgtggggcccggccccgttttgggttccccccggggggcttatccccgggtcctggggcccgccccccgggcttttccccggggccactccgccggggggggggccccccc

SEQ ID NO: 32166 - DNA, 486 bp, Oryza sativa
  Clone ID: PAT_MRT4530_36401C.1
atggcgctatatattcatattgagtccctcctcctctccttctccatcctccaccacggtcaccaccaccgccgagggctgctatcgccaccgccgccgcgcgtttgccgtcgccaccaccgccgcgggctgccgtcgcctctccgttgcaagctcggggctagatctggccgccacgtcgatgggggaggccggagccgtcgccgccatgacggaggtggctggatccgctgccgcgacgacgggggaggccggatccgccgcctcgacgaccggggaggccggatctgccgccgacgccgacgaggcctcggcagcagcgcggggaagggggcggcggcggcggcagcagtggctctcagtgtcaacggcgcgggggaggaggcggtggggagcggatctggcgcctcctccctccccaccggcggcggtgaggtggcgacgacgagagatcagcggcggcacaaatctgacgagctcggctag

SEQ ID NO: 32167 - DNA, 897 bp, Oryza sativa
  Clone ID: PAT_MRT4530_36402C.1
gcacgacggtcgcggttttcccaagctgagagttgtcgtgcgagagtgaggagcatggcgatgctggggagctcgtcggcggtggtgctggagctgatgacgatggggtaccagtcggcggcgtacctcggcgagctgctccgggcggcgtccccggcgcaggcaggggatgagcagcaggagctcgccgcggagatcctccgctgctgcgaccgcgtcatcgccaagctgaaccggggaggagccactggtgctactaccggcaagaagcggaaggcggcggagtccgccgccgccgccgccgtgacctccccttctctccccgtcacgccgaccaaaagaagggcgcgtggcgcggaggcggtgagggaggtgaggagcggcacgacgacggacgggttcatctggaggaagtacgggcagaaggagatcaatggctgcaagcacccgaggctctactaccgctgcgcgttcaggggccagggctgcctcgccacgcggcgggtgcagcagtcgcagtcgcaggacgacccggccgcggcgttcgtgatcgcctactacggcgagcacacctgcggaggcgacgccgccgccgccgccgcgtgccgggacggggaactaatgccacctgccgtcatcaactccggcgcgtcgagcttcgccgccgcttggaacatggcctcgcgtgagccggcgtcgtcgctcgccgtcgagcggaggagctgcgacggcgacgctcccagcgagacgtcgcaggggtggtctccctccttctcgtcggaggtggagctggacgtggtgggattcgacctcgccggagccgactcgtcggcgtcgccggtgtgggagttcttgaatggcagcttcgactgggaattcgtcatcaactccctctga

SEQ ID NO: 32168 - DNA, 298 bp, Oryza sativa
  unsure (1)..(298): unsure at all n locations
  Clone ID: PAT_MRT4530_36403C.1
gaganggtgatngcgccagggagagaagaagagaaaatggtggcgactactacgatagaggacctgcacnncgacgtntgngcgcgcncgtgnngcncttggnacgggcggtcgctggcggcggcgagctgcncacggcgggctccgggcgctcgccggacccggagacgtggcgcgcgctctgcctcgcggtagtggccgtccatggcggggcaccgggcntgctgtccgtggtcccgccgcgccgctcttcgccgacggttcccgttcccgcgcccggacgcngngagctcggcgc

SEQ ID NO: 32169 - DNA, 559 bp, Oryza sativa
  Clone ID: PAT_MRT4530_36404C.1
tgttatgtaaaggtaaatattgtaagtattcgggatggaaaggcaggtaaatatttaagtgttattaatttagaaatgtagctgagacattagaaagttttaacacacaacattacatattagtttgaatgagcaaaatataaaagcgttctactcattagcctcatcatcgaaatttcgtgacgtgttagtgtcctttttctttccctttcttctagcaccggttggaggtctgcatcctgacaaagataatcttttaggtgaatgtcgctcgcggacagacctacggaccacctcaacaccgctgagatcaacgtggccgtagttttgggtcgctgagttactggtggcgattcatcaagctgtgacggtcctatctcgtgttgtgctgttgacgaccccccaccgtagctatatggttctccgtaggactatgtgctgccagcatatcccatcatttgttcagggttgtacattcctacaaaacattgaatgcaaagttgtagcgtacacacataatggaaataaaataattttgtagtaaattataatttgtacc

SEQ ID NO: 32170 - DNA, 258 bp, Oryza sativa
  Clone ID: PAT_MRT4530_36405C.1
atggattttttccgacagagaatatttttcgtggcagagattgctcgagcaggtccaaatggatcccacggtcatgcgctcacgtacggccacgagccatattttcgttgggttaacgcattcatgggtgcaaaatgcgatggaaaacgacttgaactttatcgaaaagggccggcgggactgatgcgcttggagatagtgaaaagtggggaaatggttcgttgttctcgtatgtacgctgcagcttttgttcctgct

SEQ ID NO: 32171 - DNA, 1183 bp, Oryza sativa
  Clone ID: PAT_MRT4530_36406C.1
ccctttcgacagccttggagctccacgcggtggcggccgctctagtcccggccccacacttgcacgcacacacgaacaccacagagagagtccagcggcgcccggcgagaagcttcagccaagtcacagcggcctcggcttcttgcagctcgctgctcttccctctcttgatcgtgtctcgtgccacacatcctcgtttcgtcatctccatggcggcgtcgaccaaggccttggctctcctcttcgcggtgctcgtcgcgctcgtggcggcgacggcggccgtgagagtgctggaggaggaggccgtcgagctgggcggcctcgcgcctgctcccgcgccggccaacgcggcgggcgccgtcgcgccgggggcgtgggccgtggccgcggtcgtctcgctcctggccttcctcgcgcattgagatgagattcgacccctgagagggcgcagcgggtagtttgcggaatctgttgggacgggaatcctgtggtttggatttccgttgcagcggtagcatttggtgtttatctgaggagattattgctgtacgtttctatagttattttaggcgtgtttgttctagtccgttatggaggtgttgtgtactgccgatctctcttttgcctgtataagagaggaatatggttttgaataatacaattcatttactattctttttaaaaaaaaaaaaaaaaaaaaacgtgcactggagcggcgacggtggaggcatcagtgcgccagctaggcggtggcaagcaacagccgtcatcggtgacccgaccaagccgcaccaagcaggatccgcggcaagcaggaagcggtgagcagcggaagccgacggctgttgcttggtgccccttcctcgacgtcggcgagcaggaggcggcaagcaagcccagcggcgtcgcccttgctggaccgcagaaatgcggaggaggtggagaaggaggtcgcgtgacggcggacggcggcggtgacggtggaggacatcgtcgtcatcgaccccgccgcatgtgcctccccccgtcctcctgctactcgcaggccgccgcgccatgcccgcgcctccgccgctcaccgccgtctctgcccgccgccgctccggccctcgccgccgtcgccgcgagagagagaagggacacgtgggtcccacaaattcttttgcgtgtcaatgacaaatga

SEQ ID NO: 32172 - DNA, 747 bp, Oryza sativa
  Clone ID: PAT_MRT4530_36407C.1
atggagatgatggaggtggtagccaccgagattatggacgccgcgctgcacgtagccgtggccgggcgcacgctggccgtggctgagcgcgacggcacgcacgacccggccacggggcgcgcgctcaccggctcatggctctgggactcctccctcgtcctcgcctcccacctcgcgtcctgcgtccaccaccaccacctccgtggcgccaccgtcctcgagctcggcgccggcacgggcctcccgggcatcgccgccgtcgcctgcctcggcgccgcgcgctgcgtgctcaccgacgtgcgcccgctcctccccggcctcagggccaacgccgacgccaacgggctcaccgccgagcaggcggacgtgcgtgagctccggtggggtgggcacctcgagcccgaggtccaggtggacgtggtgctcatgtccgacgtgttctacgacccggacgacatgccggcgatggcggacacgctgcatgggctatggcgagacggcgacagcgacagcgacggcggcggcacggtggggtgggcggcgagcgaggcgcgcgacggcgtgcaggactgtatcgacgtgctgcgagagcaaggcttcgaggtggtcgaggtagacagggtcactaggccgctgctgcgcgaccccgagcaggccgccgacttcgccgtctatcgtctttttcgccggacaacttcgccgtccatcgtctccaatccaacgccgataactacagccgggtgttga

SEQ ID NO: 32173 - DNA, 1278 bp, Oryza sativa
  Clone ID: PAT_MRT4530_36408C.1
cccacgcgtccgattcgatcgctcgccggcgacgtgtactctgcgggtggcctccgccgctgcagcatctcctccaccggcgcgatggccgcacagcgaccatgcaatggtggctcgtggccggatctcccgtcggagctcctgggcctcgtgctcctccgcctgccgtcccacggcgaccgcgtccgcctccgcgccgtctgccgcccatggcgctccagcgcgcggctggagcggaagcttctgccgccgccgctcccgtggctcttcctccccgacggcgccttcctcaccctccccgacggcgcagcccaccgccgcttggccatccccggcgatgtcgcgcaccttgtgcccacagggagcggcctcctcctcgcgcacaacgacggcatgttctccctgatgaacccgtcctcctcggcgacgacccctctccccgacctcgccgcggtctttcatggcgagatcaagtgcaaataccctgacaccgcattccaactgggtcaacggagaatcaccccgatcatcaaggcggtggtgtctgaacacttcattgctttctatttcaacagctcgaaggtcatcatcacttctggacagccgcatacagtggtgaagtggagtcctcctgattctagctacatcctcgacattgcgctcttccaagggaagctctactgcctaacatttgatatagagaattgtcaggaggagctctacatccttgaagtccgcgatgaggagcccatggtgtctgatgtcaaatgcatacacagcactcctagagatgtgggcgatgaagacgaagcatggttcaaccctcactccaccgacaggtacacgttccatcgatatctagtcgcggatggcgatcggttgctcatggtggcacggtggattaatcttaatctgccgcccatgctgccgagagatagcagcatcaagcggactcgccgatttgatgtctttgaggcggtggacctgagcagcgaacatggacgatggataaaagttgatacactgatggggcattctctctttgttagcgagagctgctccgagtcactcactgccggagctgaagaagactgtatctacttcatgaatgatggcatcatgaataggattcctaaggatcctctttcggactctggcgtgtacaacatgagagatgggatggttgcgccattgatgccagagactgcagtgacagagcatcttgctgcacatgacggtccatggttttcgacttggctttttccaacagaaacttaa

SEQ ID NO: 32174 - DNA, 714 bp, Oryza sativa
  Clone ID: PAT_MRT4530_36409C.1
atggccgccagcgattcctcttctctctctcgggcacagcctcacaggacgagccgccgctcaccgccggcacggagaaaagaccccttttctcctcccaaggttcaccgcagccacaagctcctcctcgagatcgaggcgctcatggaggtggagctcgaaggaggcaacgcactgggaggtcggcacaggtggcggaagcagatcatgactggcggagcttcgccggagccgcaccaacatggatccagtggcagggaggagagaactgaagccgctgccctcaccggagccaatcatgacgggaggagcttgagccccgtctccgcggcggcggatggcgaatggacgaatcttgccgacaacaattttcaaggtcctattcctgcaaacatcagttcttgcactgctctaaacaaattcaatgtttatggcaatgagctcaatggttctattcctgctggtttccagaagttggagagtcttgacttacttgaacatatcttcaaacaattccaagttcctgctgaggttggaaacttgaaaagcgtccaagtaattgcacccccttgttttaatgctagcttcgcccctgtttgcaagcactgcaactttcaaagaagatgtaagttattgggtttgtctggacattttggtcttggaaacaccaataacttcgccatcgttgatgctgctggagctttttttttttaa

SEQ ID NO: 32175 - DNA, 237 bp, Oryza sativa
  Clone ID: PAT_MRT4530_3640C.1
gaggatcaccacgatgctgcaccctcgttgcttggctcttttggccgccgcctttttttttgtttttttttttttttcttttttttttttttttttggttcaagagagaaaaaaataacccttcatgattccgtttggaaaaccaaagggttcacaatttcttggaagattcccatggggcacttacctggacccgggtgaaggggccaaagagacccctctcaattttacagcgcg

SEQ ID NO: 32176 - DNA, 134 bp, Oryza sativa
  Clone ID: PAT_MRT4530_36410C.1
gttaagatattcaacatcctcatgattctacctaatgcttaattaaccaattaacaagttagcaaccagcaggtcacaaaacacaaataaaccgaaaaattttaaggataagtcaccttaaccaaaattatttt

SEQ ID NO: 32177 - DNA, 411 bp, Oryza sativa
  Clone ID: PAT_MRT4530_36411C.1
atggaggaactggaagagtgggcgaacctgagggagcagaagaacctcaccattccaagtccggcacaggggtggacgaagccaccaaatggagaccgcgacgaccgcgagacggcgatagagcgcaggctgaacaacgctgcgaccttcgagatgccaaagccgtgcgagaggcggcgctgcgggcgacggccgacagggcgagcgccggcgctgcggcggcgcggcgagccggcgacgcgaggcagcgcgcggcggcacggctgcgcagggcagcggcgcggcgggccggcggccaggcaggcaggcaacaccgcggcagcaggaggcaaggcaggcggcaggcagcaccgcagcagccagcaggaagaaggcaagcagtcaggcagaagcaggcaagcagccaactag

SEQ ID NO: 32178 - DNA, 240 bp, Oryza sativa
  Clone ID: PAT_MRT4530_36412C.1
atgagtaccgttgcatccgtcttccaccacgttgccgcctcttcctcccttctcttcgccgcacagtacgccaccgtggacgagggatctagcgctatctctgatttcgtcgggcgcgagcttgaggagaaaggctaccttgttgtcgactacgagtcagaccttcagaccgccatgaaaattctattcgacattgttgaagactccatgtctctgtggttctacaccaagatcgactaa

SEQ ID NO: 32179 - DNA, 243 bp, Oryza sativa
  Clone ID: PAT_MRT4530_36413C.1
aaatgtgacattgtaagagagctatgggttatgcatggtgatgcagggtacatgatgcatgggatcacagacgattggcctcaccgcgtcacgaaggactgtgcaccttatcccaaggcaagctacactaggctgcaacacagagaactgggcacagatgtcgctgttaatgtgtttcaacagcaaaatgatctcttcatcagcaaggcttcctggaagcacctccacaaaattgtttttcat

SEQ ID NO: 32180 - DNA, 883 bp, Oryza sativa
  Clone ID: PAT_MRT4530_36414C.1
ccgcgtaaagcaaccgcggcaggggcgaacaaatcacacggaccggcaacgccacgggccgaacggcagaaacaccacaaggaacgcgcgaaaagggcggaaaaggaaggggagggggaagagaacgcaacgagacacaggggaaaaacacgggcaaagagccagcacccgaaacaaggacggcgcagaccccgcccacacaccgccccaaacgaggccaaaccgagggacgcaaaaacatgacctgcaagccgggcagagaaggaacggggggcaacacggggagaaacaaacgccggaaacgaacgccctcggcacacagccgaaaccacaggcgtcgggccacggcggcgggaggtaccgcccacaatacacacattggactgccccaccccctaaccagacaaacgggggcgccgccggggacgaagcagcgcacacccggaacaagtcacgcacgcgaaaccaacgaccaaacgaccagccacccgccagcgcgcgaccgacgacccaaaccgagaggagagacagcccggccccggccccccaccccgccgcccgctcagatgacaccaaccaactaaaaaaacacggggcacagttccgacagggcagctggcccccaggccaccccacccccgcagcccagcccccagggcccggcaggcacatatcgaacaagcaaacttcgatagggtggcatgtcgaacagcccaagttcgatagggtctcagctacagtgtgctacagtgtttttcctctttttaaaaattattttatcacctgtcgaactgccggcaccctgtcgaactgcggttgttcgataggtaccctgtcgaaccacggatattcgatagggtgccaaacttgcgatttcgtctaa

SEQ ID NO: 32181 - DNA, 209 bp, Oryza sativa
  Clone ID: PAT_MRT4530_36415C.1
aaggagtcaacagaggaggagagaactgcacctgtgcctgtacttactgctaacaatagtactggagactgaaatggctaaatgccaggtgctgctgaatcgatatttgatggtgggccaagataaatatgaagcagatcaagtgcataagatgaaaacacatgcgactgacgagctagaagcatgcgtgaacagatctattgatgaca

SEQ ID NO: 32182 - DNA, 397 bp, Oryza sativa
  Clone ID: PAT_MRT4530_36416C.1
cataagagaatcctgcaaggtaattgtaaactttgtgttatcgacggagacttgaccatcactatcggaatgagctctggagtgctcatgcagcacacacaccacagaaatgcgccggccaacaacacatttggccaatgggccacacatatatgtgtcataattaaccatggcatcccagtcacaacattatgataaacgaaatactccctctagttcacggcaaagaaattatccggtcagtcaaaggcaatccactgcctcctgccgctatccacactgacctccagagtccacactccaggcttgcagtgatccggatgccccagcaaatgacagagaaaattagaaatggattaagtagcattttcttcagaaatgattctgtagcactttc

SEQ ID NO: 32183 - DNA, 526 bp, Oryza sativa
  Clone ID: PAT_MRT4530_36417C.1
gttacgtttaccctattggacatttgttcggcaccatggacatcagtgacccggcgagaccctgcttcctggacatcgacaccggcagcaccctcacctggctgcagagcgactacccctgcattaattgcaacaaggtaccacacgggttgtacaagccagaactaaaatatgtggtgaaatgcaccgaacaacggtgtgccgacctgtacgctgatctgagaaagccgatgaaatgcgggcccaagaaccaatgtcactatgggattcagtatgttggtgggtcatccattggcgtgctcatcgtcgacagcttctccctcccagcaagcaatggcaccaatcctaccagcatcgcatttggctgtgggtacaatcaggggaagaacaatcacaatgtgcccacaccggtaaacggcattctcgggctcggtagaggaaaggttacgctgctctcacagctcaagtcccagggggtgatcaccaagcatgtgttgggccattgcatcagcttaaaaggaaaggg

SEQ ID NO: 32184 - DNA, 261 bp, Oryza sativa
  Clone ID: PAT_MRT4530_36418C.1
atggaggaaactactcgcggatttgaggccgcctacgccacctccgctgcccacctatgccgccgctgcatcctctccaccggcgcgcccctcgcggatttgaggccaccgcttccacagcctgcttcggccaccgccgctccgctcgccgcacgccttgctctgccggtcggccgctctgaacccttcgccacccgcatgccaaaaaggggagcggtcgtctccgcccactccgcccttctgctctgcttcgtggcttga

SEQ ID NO: 32185 - DNA, 351 bp, Oryza sativa
  Clone ID: PAT_MRT4530_36419C.1
ataaacaccataagacaccttcattcttataattcaaaacgtgacgttgtacaatgtctttcacgagaactaagtgaacatactttgcaactaacaaacgtcaatacattgaactacccaaatactatatacagcctagggaggctaagagacagggcgcactattgatcatagggacaacaacatagattgacgaacccatgcagatcgatagagattgctattgaccccctctacgatcaaagaccccgaccaccagactgctggagacggtcttcatgccctatgccccgaccatggaaacgggcttaacacccagacgctgccgctgccagctcaagacctcaccac

SEQ ID NO: 32186 - DNA, 406 bp, Oryza sativa
  unsure (1)..(406): unsure at all n locations
  Clone ID: PAT_MRT4530_3641C.1
cggacgcgtgggcggacgcgtgggcggacgcgtgggcggacgcgtgggcggacgcgtgggcggacgcgtgggcgcagagaaaggcgtcttcgtactcgcctctctccgcgcctccgcgcttttcctcctcctctcccctctctcccttctccgccgccgtcgcagcatcaacccaatccgccgccgtgagggagtgcattncggtcctatcggccaggccggtatccaggtcgggaacgcgtgctgggagctctactgccccccccatggcatccaggctgatggtcagatgcccagtgacaggactgttggaggaaagagaagatgcttgcgacaccttgttcagtgagactggtactggggaggatgacccccgggggctgcattgggttggcaacgggccctc

SEQ ID NO: 32187 - DNA, 1268 bp, Oryza sativa
  Clone ID: PAT_MRT4530_36420C.1
gcacggggctccccgcgccgcgctctcctctcctccgcatcgcgatcacctcctcctctcctctcctcgcctcgcctcgccggagatcgcctcgcccacgcgccgcctccctcccatggacgcatcctaccgccgcgacggccgcggaggcggcggcggcgggggcggcggcggttccgcccctcgctccgtcgaggacatcttcaaggacttccgcgcccgccgcaccgccatcctccgcgccctcacccacgacgtcgaggatttctacgcgcagtgcgatccagagaaggagaatctgtgcctgtacgggtacgcgaacgaggcgtggcaggtggcgctgccggcggaggaggtgcccaccgagctgccggagccggcgctcgggatcaacttcgcccgcgacgggatgaaccgccgcgactggctcgcgctcgtcgccgtccactccgactcgtggctcgtctccgtcgccttctactacgccgcgcgcctcaaccgcaacgaccggaagcgtttgtttggcatgatgaatgatttgccaactgtttacgaagtcgtatctggttcaagacaatctaaggagagggacagatccggcatggacaacagcagcagaaataaaatttcatcgaagcataccagcgacgtggcgcgtgtcgaaaataatatcaaggaggaagatgaaggctacgacgaggacgatggcgaccacagtgagaccctatgcgggacttgcggtgggatatacagcgccgacgagttctggatcggctgcgacgtgtgcgagaggtggtaccacggcaagtgcgtcaagatcactccggcgaaggcggagagcataaagcagtacaagtgcccgagctgcagctccaagagacctagacagtagtagcatatgccaccctcctccggcgagaggaggtgtcgccggcgacgccgccattgacagaggcgtcaggctgtgggttactgtacctttcgtttttcgacttacatatgatgaagatgatgccaaatgtgaggtaagaagatcacaagacattcatgtgaggtggagatatgaggctatgtatgttgccagaggaataggggtaacgtaatatatgtaactttgcgaaacaagatggaagtttatctgacaataatccgagaggtttgtgttgatatgttgtgtcaatgactcgaatccgctgtaatgtgggtcttgtacctgaatacatgggtttattcccattagataaagccataattttatgacatttccc

SEQ ID NO: 32188 - DNA, 2451 bp, Oryza sativa
  Clone ID: PAT_MRT4530_36421C.1
tccgggtaacccacgcgtccgcggacgcgtgggccaaaaaccaaaaaccaaaaaccaaaacctctcctcttccctctacttctctaccctcttcttcgtcctcctccatccgagaggcagcaagccagcaactgcacgagcaaccacccgtagtcagtgacctaggcggcggagggagatcggccggcggcgagcgacgacgatgaagtacgtgctggtgacgggcggggtggtgagcggcctcgggaagggggtgacggcgagcagcatcggcgtcgtgctcaaggactgcggcctccgcgtcacctccatcaagatcgatccttacctcaacaccgatgctggaaccatgtctccattcgagcacggtgaagtgtttgttttggacgatggtggtgaggtggacttggaccttggaaattatgagcgatttctggacatcaagttgactcgtgacaacaatataaccacgggaaagatctatcaggctgttattgacaaggaacgaagaggagactacttgggaaaaactgttcaggttgtaccacacattacggatgaaatacaggagtggattgaacgtgtggcaatgaatccagttgatggcacagatgagccagctgatgtttgtgtaatagaacttggtggcactataggggctggaaacttttgcctagttcatgtcagtcttgtaccagttctaaatgtagttggtgaacagaaaaccaaacctacccaacatagtgtccgtggactaagaggacttggactgatacctgatattttagcatgtcgcagtactcagccacttgaagaaaatgtgaaagtgaaactcgcacaattttgccacgttccgatctcaaatattgtcaatcttcacgatgttaccaacatctggcacatccctttgttgcttagggaccagaaggctcatgaatctattctgaaagttttagatcttcaatgtgtgggaaaagtgcctcgagcacctaagctgactgaatggactgaaagagccagcaaattcgacaaactgaaaactcctgttaggattgccatggttggaaagtatactggcctatcagactcctacttgtcagttttgaaggctcttctgcatgcatcggttgctttggacagaaaacttgtggtggattgggttccttcctgtgatcttgaagattctgcagccacagagactcctgatgcatatgaaaaagcttgggatctactaaagggtgcacatggtgtactagttccaggaggctttggagatagaggggtccagggaaaaattcttgctgcaaaatatgcgcgagaaaacaatgttccatatcttggtatttgcctgggcatgcaaattgcagtgatcgaattcgcccgctctgtcatgaagttgcgtggtgctaatagtacagagtttgatccagctacaacgacgccatgtgttattttcatgccggagggctctaaaacccatatgggggcaacaatgcgccttggatcaaggaggaccttcttccaggccaatacatgcaaatcagctaagctgtatggcaatgcaagctatgtagatgaaaggcaccgccaccgatatgaggtgaatcctgaaatggttccagaatttgagaaggcaggtctctcttttgttggcagggatgaaagcgggacacgcatggagataattgagctaccaactcataggttttttgttggcgcacaatttcatcctgaattcaagtcaagacctggaaagccatccccacttttcatgggattaatagcagcttcatcaggacagcttgaccatttacttcagcaatcttgcggcgttgtcagctcgccagtcagacgtggcaactactgcaacggagccacgaaacaacagaagctataccaaaatggacatgtcaagaacggcctggtgaatggctgctactatgcaaacggcaacagcattcttcatacttagcagcatagctctgcatcaggccattgcacttgagagatttacctgctttgttttttctcccttttttttgcgtgttttttctcctattttttttagggttatggattcgtctctctgctaaactaagaagagattgaaagggtccttagctccagcgacatgaagagccatttccgatgttttaaggagggagaaatgagcacttgagctgtcgcatcaacgcaaaaatagctagggtttactagtagtgaactagttaatctaatgcaatattattatttcttttgtttgttcgtttgcttgcttgatgccttatattatattgaagtttaaggctagctggaggtgtgtagctagcttggtggagcctgcacatttcatctgtttgtacattggaaaagaaccactattttcttagtaactgaattgatgaatacacattatttggacatatgtattaagataaaaaaaataaaaaa

SEQ ID NO: 32189 - DNA, 552 bp, Oryza sativa
  Clone ID: PAT_MRT4530_36422C.1
ctccccctcgcaaaaagtcgcagcgtacacgcaccccaactcagcccacgcccactgaccggtgggcccacgcccactgaccggtgggcccacgcctcgaattaattcctcgccttcccctataaataccgcgactcctctcccttctcttctcccccctttcttttttatttttttcttcgaggaggaagcaaacagcgtcgctccacgaaaccatcgctgcggttgcgtgctcgcgcgaagaagaggagagagaggaccaaaccctcgtctcctcctcctccggtggtggggggagaggaggcggcggcggagaggacgagccgtctactggatcggccgcccacgaggaggtattgcccccgttcccctccgattcgctccccccaaattccccccgcgtaataatccaagggtttgtgttgatcgggtggggttttctcgccgggtagaccatttcctgcggttgattgttggtgcgtgacgggagcggagcgtgatcgggtatcggacgtggtcggattgatgggggaatttctgggattactcgtc

SEQ ID NO: 32190 - DNA, 637 bp, Oryza sativa
  Clone ID: PAT_MRT4530_36423C.1
ccgtccgcgcctccagaggactgtccctgctccgtgcctgccatgtcgtcctctctggtggacaaagcgaggaggaggcgaccgtgaacctcaacgccatgaacaagctcagcaccaagaagccgtgggctctgtccgtcgtcccttcgccgtgctctccagcagaggcacagcctcaaaggcctggggccggccaaagaacgggagaaaccgttggttgaaagggccccagaaagcctttccaatccaccaggtgccaaagcccaaaccttcttgaaggcttaccccttgggtacaataaccaggggtggaatcctgttggcttcggcgagggtgccctccttgagaaccctttcacgtcaaaggacttacaagtactgatcttccctcttgggtggtggcctgaagaattccgattgggacatccccccgtaatgccaatatttaggttctgatgtgtttgctattcaagcgccaatcttacgggtaccaaaactttggtcccaataatctggaaccggggctttttaataattaatacctgtcatccggtagtagtttttgggtatccggtaatcaatggctgcgtatggtaaattggagcagcgccttaattccatgctatctttttattgta

SEQ ID NO: 32191 - DNA, 1101 bp, Oryza sativa
  Clone ID: PAT_MRT4530_36424C.1
tttttttttttttttttttttcaacacaagcacatacttccatgcttcatgacgaaccaacatccaacattgttgacaagcaccaagcgattcacacatacggtaggaccaatttatgtacaataataacatcttgatgtaactgggatcacgcattgaaggttttacattcagcagaatattatggtagtgcattcagttagcctgcagctgcgcatccttgcttgtgaggggcacatagcgcacagccgtctcatctcttatgctgaccttgccatcctggttcttgtccaccactttcagctcctggaacatagtcccaactgggatcaccattctgccaccgggctttagctgctcaatcaacgcctgtggaatctgcggtgcagcagctccgacatggatggcatcatagggtgcgagctctggccaaccttctctgccatcggtaatatgtatactgagggatccatcagttaactgtggagccgctgcacttttcttgatgttttcaatagacgaagtaaccaactctgggatatgttcaacaccaactgctcgcccttctggtccaaccataatcgcgaagcaagctgttaggtaccctgtgcctgatccaacatccagagcacgcatgccaggctgaaggtgcttctccaggagctccaagcaagaggcgtgcatgtgaggcgcagaaatggtggcgttgtaaccgatgggcatcgggctgtcgaaatagggagaagcaccaggaggcacaaacagccccctgtcgatggtctccatcacctgcgcgaccttgctcgacttgataatcccgtacctctggagctgctcaaccattgccttgttcttgtcgctagccccgcttgaccacagtcggtgctccatggcgaaagtgagagaacactcgatcgggtggtctctcctggtttaatcttaatcttggggccgattgggagcgcgcgggtgggtcgcggtgcagctgcctttgccggtgcagcggcggagacgtgggggatgtcgccgcgggaaccggattcccgccccggcaggggctgggggctggccggggtggcgtggcggggggtggggggagag

SEQ ID NO: 32192 - DNA, 297 bp, Oryza sativa
  unsure (1)..(297): unsure at all n locations
  Clone ID: PAT_MRT4530_36425C.1
gcaaggagaaggtgtcccccgtcttcagtctcttgagtgactgacggacactactctactccctccgctcgccggagctaatggcgacgcggcgagcttccaccaccccgcctccncgcagccggcgatacccggcgcggcggcggcggcggtggccgttgcgccgcatggccgtttctacgtggggtctctacgcccacggcctcctccgctcngcccgacctcctcacgtttctcacgcgttctctggcgcttctctctcggctcctctgcaacgctcntctcggttgagatcga

SEQ ID NO: 32193 - DNA, 632 bp, Oryza sativa
  unsure (1)..(632): unsure at all n locations
  Clone ID: PAT_MRT4530_36426C.1
ccactgccgcggcgggaatccggttcccgcggcgacatcccccacgtctccgccgctgcaccggcaaaggcagctgcaccgcgacccacccgcgcgctcccaatcggccccaagattaagattaaaccaggagagaccacccgatcgagtgttctctcactttcgccatggaggtactccgctacatcttttcctgcttctcctcctcctcctccaaatcatcctcagcatctgcgggctcccaccgactgtggtcaagcggggctagcgacaagaacaaggcaatggttgagcagctccagaggtacgggattatcaagtcgagcaaggtcgcgcaggtgatggagaccatcgacagggggctgtttgtgcctcctggtgcttctccctatttcgacagcccgatgcccatcggttacaacgccaccatttctgcgcctcacatgcacgcctcttgcttggagctcctggagaagcaccttcagcctggcatgcgtgctctggatgntggatcaggcacagggtacctaacagcttgcttcgcgattatggntggaccagaagggcgagcagtttggtggtgaacatatcccagagttgggttacttcgtctattggaaacatcaagaaaa

SEQ ID NO: 32194 - DNA, 288 bp, Oryza sativa
  unsure (1)..(288): unsure at all n locations
  Clone ID: PAT_MRT4530_36427C.1
gcatgangtcatctcctcctcctctcgcatggcagccatggccaccaccgcgtccagcctcctcaagacctccttcgctggcgcgcgcctccccgccgtcgtccgcaaccccaccgtctgcgtcgcgccgcgcaccggcggcgccatctgcaactccatctcgtcgtcgtagcccacttccccctacgacctgaacgccctcagggtcaggctcatcagggggccatcgtgtcccgcgagatgacccggcggtccatgacccgcatgatcacctacgccgacaccgac

SEQ ID NO: 32195 - DNA, 176 bp, Oryza sativa
  Clone ID: PAT_MRT4530_36428C.1
aaggtgggggcacccaaaagagggatttaagggctgaaaaaatccaccaacataccggaccaaaacctcgtgcattacaaaaccgagcactgacacaaataaggccaggccagaggtttttaagagcaggaggtaccataagggtaattcagcaacgttataatatcttgcacagg

SEQ ID NO: 32196 - DNA, 438 bp, Oryza sativa
  unsure (1)..(438): unsure at all n locations
  Clone ID: PAT_MRT4530_36429C.1
gcggcgtgggtttttttttttttttttttttttttgaaagttctattcataaagtagagtgattcaaatttgaacaggggcgtttcgaagaaacatgacataggttcatgtcatcatgtattcatgtctgccccgggttttggttctagctcggtccggcggttgagggggggagtcaattgagacaaaacacgagactgtgcgacgactataatttggtccacgccaaaaagtgcacgacaccgacgcgacgccggcgaccgttattaccgttactgagctcacactgacacagtgacggaactgacaactagaggccccgccggccgccgttgccggagccccagttgcggccggntcggtgcacgccgaggtggaaccttagcatggccgctaggaacgcgccggcctgttttggttctagtgttctgtcgacgt

SEQ ID NO: 32197 - DNA, 149 bp, Oryza sativa
  unsure (1)..(149): unsure at all n locations
  Clone ID: PAT_MRT4530_3642C.1
gatcacgagtggattttcggggcaccaagcctaaattgggtgttcccncaattatattgtaagggctcaggcacattgagtagtttagacttataaatatatctttgtgctcgcttacatataaaaaaaaaaaaaaaaaaaaaaaaaaa

SEQ ID NO: 32198 - DNA, 2085 bp, Oryza sativa
  Clone ID: PAT_MRT4530_36430C.1
ggtgtaaagggagtatgtatacagcatttctggaattggagagttgggaatacatacagttgtagcatgaagaatattgtacaaacaaaattttgaagtgcaaaaacaatgtctattttcctataatcctgtgttcattggacgccatgtgacagcacattgttagcttcagaataattgcaaaagcacatcgttagttcgaaatgttgggcattattcactcgacaatattcctcatcattcaactgtaccacaccaaacataaatccaatgtccactagcctctttggccaactgctaccacgaactgctaccacgaactcatgcagggaatgcacttgtcactgtcctaagtcctaaatccgctttcacaaacgaatggctcctgtgcaaaagaataatcagcttcatcatgcttaagttcctaatcacaagtcgttgtctgcttcagcattcttcaacgagtgaaataacctctcaaatgtaatcactcatttaactcgctaattcagccatgtgctcctcaatctgcttcaacaactctgagttcccatgtattatgcaattcccagctagtatctcccaaatttgcttgcgaaaaagaagtggcgaacttttgatcaattcaaccattttatcatgcgaagatgagcgggaaaacaaatcaaccaagcaaacatagtgatcttcccctggaacaatcctatatctctcagtcatcaactcaaaaaatcctataccttcttcaacaaggttgcaatggcagcaagccttcaaaactgtcaagaatgtattcgcatcaggcttccatctctctcgaatcatctgaacaaatgatcctatcacctcctgcccatgcccatgatgacatagagcacccagtagcgcattccacaacaatgtatccttcttttcctgaactgctagactgaacacctgtctagcatcagccaaatagccacatcttgagtacatgtcaatgagtgagctcaaaatcatgacatttggataaaaaccagttcttagcaaccttccatggatctgctgcccacatttcagtgcgcacacagctgcacaagcacggaaacaactactaaaggtgatctgatctgggtggacaccctctttgatcaaatgctgaaatatgctcagtgcttctgcttcctgcccatggcgaacatatccctccatgagagaattccatgagaggatattcttctttggcatttgatcgaacaaccgacgggcagtgctcagctggccatcctctgcatagccgcaaactagtgtcgtccacattcgctcacttttcacaggcatctcattaaacagatcctctgcatctgcaatgcatacgcatttggtgtacacatcaacgagggagctggcaatcctgatatctgacaagaacccatgaagaatcagatccccggggccccgcctggcgacctcccggcccgcaagcttctcacagcctacaaggagtgccaagaaggtttgatcactgtacccaagtgaagtcgacgtgccgcggagctcggagtagagcgccacggctttctgcatctcaccaccgccggcgagcgcgagcagagtagcattataggagaggaggtcgcggtgtggcatggcggcgaacacctcggccgcgggggccgcgagcgcgaggcgggcgtaccccgcgagcatggcgttgtaggagcagacgtcggggaggggcattctggcgaacaggcggcgcgcatcgcgcgggcggcggaggaggaagttgagcgacaggaggtggttggcgagctgggtggagcaaggcacgagcctcttgaggccggcgaggcggacgtagaggaggaggcggccggcgagggaggggaagcacggcgccgtggcgcggcggagcaggaggaggcgggcgagcgaggagaggagcgggaagggcgggcgcaggccggcgcgggagagctccgggaggagggccaccgcggcggccgcgtggcctcctgcgatgctgcggtggagggcggcgaggatgccggtgtacggcggcgatgtcggcggcggcggcggcgagccgacggggagggacat

SEQ ID NO: 32199 - DNA, 855 bp, Oryza sativa
  Clone ID: PAT_MRT4530_36431C.1
atgctcccgtacgcgacggcggcggaggcggaggcggcggtggggcggggcctgacgtgggcggaggcggcctggttccgctactcggcggccatcccggactactgcctctactgccacaacgtccccatcctcctcctcgtctacaccctcgcgccgctccccctcgcgctgctcgagctccgccgccacctgccgctgccgcacaagctgcagcccggcgtgcgccacccgccggccgccttcctccggtgctacgctgccaccgcgcgcgtgctgctcctcgccgtcgggccggtccagctggcgtcgttccctgcggtgagggcggtggggatacggacggggctgccgctgccgtcggcgggggagacggcggcgcaggtggcggtgtacctgctggtggaggactacctgggctactggatccaccgcctgctgcacacgccgtgggcctaccaccacatccaccgagtccaccacgagttcaccgcgcccatgggctacgccgccccgtacgcccactgggccgagatcctcatcctcggcttcccggccttcgccggcccagccatcgtgccgtgccacatgaccaccttctggctctggttcgtgcttcgccacctcgaggccatccacatccacagcgggttcaagttgccgttcgatccgaccaagtatatcccgttgtatggaggagtggagtaccatgactaccaccatttcgtgggaggacacagccagagcaacttctcttctgtcttcactttctgtgattacatctacgggactgacagaggctacagataccataaggcaagcttgtcaaagatgagaatatttgttagagcttag

SEQ ID NO: 32200 - DNA, 540 bp, Oryza sativa
  Clone ID: PAT_MRT4530_36432C.1
ccaagaaaagggggatatggcaaaaaagcgaaagggcaaaaccagcatcaaaatcccaaagtaaccccaaaaaaaaccaagtggcccaaaagcccctacccaagccaagggaaaaggggacaaagtaaccccacctatgtaaaaatggccggggaccataaccaacaggaatagggcaaatccaaaccaacctggaaggcccaggttttggaaaaacacccatggccatgggaccgaggcccccgaaggggcccccaaacggatggaaaaacccacccggaggggcagggaacggagcctgcggcggcggctgtggtgggaaaaccggatttgggggaaaaggggccgaaaaaaacaggttagggggaggttgaaaacccgggaaaggaagaggcgggaaaaatgggggcgggggtggaaacgggaagaacggaggcggcggcgggttcaccattgcaaacgggccctgggaggggggcaaaaaccggccccccgaaccaaagggaccgtgggggccaaaagggtggggggctccccccc

SEQ ID NO: 32201 - DNA, 551 bp, Oryza sativa
  Clone ID: PAT_MRT4530_36433C.1
aaaaatggcattatgctgttattgataatgaaacccccaatacaacacatggactattaatatgctattaaacactcattccgcaatcatgacatgctcactacccctaaatcatagtcgagtccgctgcagtcgtgacaggtctatttggtagagctccaactactaaattcaacttcaggagttgagttagaggtacttcaggagctgagtgtgaagtacaagagcggagaagtctaaattcagatcctacacctctatagttcattatgtgagagcgccccacctatgtacactcccattttaagtggactgaccggctggactggagctgtgacatacaggaacttaaagccggacatcctactagtaccgtaaaattggccactggtagaagcattggtcgatagccttctgcacaggaagatatattgattgagtattgcagctttcagacttgactattgttacctccactggtttcgcaatattttccaccaagacttcaaacaactcgaaattcgtagtaacacgattcccattgcatcgaa

SEQ ID NO: 32202 - DNA, 792 bp, Oryza sativa
  Clone ID: PAT_MRT4530_36434C.1
atggtgtatcctatacatcaacacactattgctaatgtccgcaaactaaatcgcctttgggaggacgcgaagagggccgcctgcaaaatcaccatggccggcatcatggatgaagaaaatgctagctccacgaacagcatcaaactagaactgagaatctacatgcattgcaaagcctgtgaacgatctgttcgccgagccatagagaaaatcgacgctcaaagcatattacctgagatttcgaccaactacacttacgcaggagtcgagaaagtcgaggtggagaggggagagaacaaggtgacggtgacgggcggcggcgacttcgagccggagaaggcggtgaggcggatcaagaagaagaccgggaagaaggtcgagatcctggctctcgaggaagaagatgatgatcacggggaaggcggaggaggaggagcagatgcgcaggctcatcacgagttccagaggcacggctactacgtcccgtattatcatcatcgtcatcatcaccatctggtgcctgtgccttgcgcttacgttccgagttgctatgatcatctggtgcctgtgcctccgccggacaatggaggaggaggaacagcagatgtggctcatgagtttcagaggcgcggcggcgtggggcactacggttattacgctccgtgttattaccatggaggaggaggaggaggaggaggagatgtggctcatgagattcagaggccggtacgctcggcgtgggatcttcatggcttcgatgatgaaaatacacaagcgtgcagggtaacgtag

SEQ ID NO: 32203 - DNA, 217 bp, Oryza sativa
  Clone ID: PAT_MRT4530_36435C.1
acgcgtcccgcccacgcgtgcgcgggcgttaccaggtgcccgcggggcggcccgccggccggacctccttggaggacgacgcgctcaacttcctgccgccgccaacgtcaacggccgccgacctgttggccaacttcaccgccaagaaccttaccgccgaggacatggtcgtcctttccggcgcccaaaccatcggggtttcccactgcgactcctt

SEQ ID NO: 32204 - DNA, 654 bp, Oryza sativa
  Clone ID: PAT_MRT4530_36436C.1
atggagaacggcggcggcggaggtggaggtggagggatcgccgggaagaagaggaaggcggttggtggcggcggcggcggcggaggaggaggcgggtccggctacggcgagagggcggcggcggcggcggtgatgaggagggagccgcggcgagggctcggggtggcggagctggagaggatcagagtgcagctcgaggcggcgcagagcctcttcatgatcccgccgtcgctgctgccctcgtcgtcgtcgtcatcgtcggcggcggcggtgggtacgcaactacgaccacctccgccgccgccgctgctgccgtctcacgtggccggcgtgcgctacggccaccaacaacaacaacaacaacaacaatacgctattacttgcatcaaacagcagcagcagcagcagccaagcttatttccaacgtcagatcaatcaggatgcttcaggcaagagctatacaggatgcagctgcaggattatcgccgccgtcgagcgcagccgcagatggagctgcacggcgagacgactgcggcggcgagtagatctcagagtattattccgtttgtgaacctcgtcgacgacgacgacgacgaggaggctgctgccggcgacggcgccgggaaagaattggacttggagctcaggctctag

SEQ ID NO: 32205 - DNA, 357 bp, Oryza sativa
  Clone ID: PAT_MRT4530_36437C.1
atggaggtggcagtggcgagcagcgagctggatgcttcgcgtggtcggctcgatgaactcaccgtcgtccgaccactcctcttcctgcagcggcttctcgacctcgatgatgacaacgacaacgacgacgtggtgggcgcgatcatcgggtcgttcgggttcctgtacctggcgcagagccctgacccggccaaggcggcggcgcacggctacctgccaggcatcggcgtccgcaactcgctgttcacgctcgccggctgcagcttgctcggcttcctcctcaccttcctggtgcccgagcccaagggcaagtcgctcgaggagatgtcacgcgagaacgaggtcggccagccatga

SEQ ID NO: 32206 - DNA, 1320 bp, Oryza sativa
  Clone ID: PAT_MRT4530_36438C.1
atggcgtcgggatcgctcctgctgcctcccgcctgcctccagcatccgcttccggcggcggcggcggcgtcaggcggcgtgggagggagtagcagggagcagtgcccgcggtgcgcgtcgcacgacaccaagttctgctactacaacaactacaacacgtcgcagccgcgccacttctgccgcgcctgccgccgctactggacgctcggcggctccctccgcaacgtccccatcggcggctccacccgcaagcgcccccgcccccccgtgcgccgcccgcccgtccacttcaccgccgccgccgccgccgccgccgccgctgcaccgcctcatcaccatcatcatcatcacggsgggccgctcacgccgccgccggcgacctcttcttcctcgcagcaggcgggcctgctcggctcgctgttcgcgctcggcgcggcgccgctgctggagggccgcgtcggcgtcggcttcgacctcggcctcggcctgcccggcccgggccaccaccatgccgtcgccggcggcggcggacctgctgcagcggtggcgacgtcgtcgtcgtcgtcggcggcggcgcctctgctctggcccaccgggctgttggacagcagcagcaataatgccgagacatggaggatggcgsccggcggcatgtggccggagttcactgcggcggcggcgcagaacatcaggctggtgattgacatcggcgacacaacgatccaggtccctctcaatggccccaccgtcgtgcagaacatcggccgtcaggctgccgccgccgtcgccggagattcgtcagccggtggtgttagtgagaaaaccggtggtgctggtggcggcggcggcgaggagtggatgcaagaacaggatggcttgttgtgcatgcgcgggcggcgctgcggccgccggggtggatgcctgccgaggccgcgtgactggttcgcggcgctgctcgccgccgacccggcggcggccgccgtcacgagggaccaggccgggaaggcgatgctgtacctgatcgtcaacacctgcaccttcgccacgtcgctcgccgtgctccctgatgctgttcgccgtcggcggcggctgcgcgtcgaggagggtcaccgcgtggctgatcaccaacatgatgacggccgtcgcgctgttcgccgcggcgacgttcgcgctctgcgccgccgacgactaccggctcatggaccgttcgtcggcaccgtcgtggccgcagtcaccgtcgtggtcgtcaggtgcaatcttgctctgccgtttcggggaggcgacgccggccatggttgtagctgggtttcaagattgtaa

SEQ ID NO: 32207 - DNA, 586 bp, Oryza sativa
  Clone ID: PAT_MRT4530_36439C.1
atcgaatggaattaagcaaatacttcaaggcaattgtgactgccgaggatgatatggagtcaatagcccataggttcctctcagctgctatgaagctggatcggaagccctcaaagtgtgtggtgtttgaggatgacccgagaggcgtaaccgctgctcacaactgtaccatgatggcagttgcactcattggtgctcatcctgcgtatgagctggtacaggctgatctcgccatcgcaaaatacagtgagctctcggttatcaatctcagaaggttgtttgcacataaggggttaagtttcatggacttgcagaagcagatcatcgagaggtcacctcccaagaggaagctgacagtagacaccatcttctaatgaattctttacctcccaatactgaaaaagagagaaaagaaaatagcaccatgcatcctccctactgtgctgtgtatatagcattccatgttggttagattacatagaaagctgatgttagatgatctgttgttgcatacctccattctggatgtactagatgtaaactgatgtttaaccattttaatcatgataaatactaccagtctacc

SEQ ID NO: 32208 - DNA, 428 bp, Oryza sativa
  Clone ID: PAT_MRT4530_3643C.1
atggatttgtcaagcggcgtgaaatggtgggaggagtggcagctgcgcattcttgtattgggcagcctcggcgtacagtactttcttgtaatttttggcggcatgcgcaagttctcccgtattccgcactgctataggtttttcatctggctctcgtacctcgctagcgacgccttggccatatatgcgcttgccactctcttcaaccgcagaaacaaactgcagcctgacaacaacgacaatagcagccgcgacctagaggtggtgtgggcacctattcttctgatgcatcttggaggccaagtgttcatcaccgcctacaatatcgaagacaatgagttgtggaggcgccacatcctaaccgcactatctcagggtacactcgatctcattgattgacaccgtggtaacttcttcaatctcaaaat

SEQ ID NO: 32209 - DNA, 502 bp, Oryza sativa
  Clone ID: PAT_MRT4530_36440C.1
gcttccgcaccgccgcctcgccatcgccattcccctcgcttccctcctcctcccgacaagcgccgccatgctccagcctccgattccccagaccaagaaacgggaggatggtgggggtgctgaggagggcgtccggattcgaggccttccctcccctacctggtaaggtgttcgtcgaggaggcaattggagctgaatatggggaaggttttgagacatttaggatggatggaccactcaaggtcgatgtggattatctgaacgaaaaattgcaagaatgcttccttcaaaggataagacatgctatgaagccagatgaagcatgtgggcttattttctcatgggacaacgtaattgctgatacagactcactaaagttggatgcctggagacagcttgctttggaagaagggaaggatatcccaaatgctggtcatgtccaaaagagtattcttcatggtgctgccgaccatgtgcttagaaaggttttatgttgggcaaa

SEQ ID NO: 32210 - DNA, 4738 bp, Oryza sativa
  Clone ID: PAT_MRT4530_36441C.1
atgccaccggttgcgtccggctccggccggaagaggcagctggtgctggagtccagcgattcggaggcggatgagttctttgtctcgacgcggcgcaaggaggatgatgatgatgatgccggaaatgccggcggcggaagcggaggaggtggtgatcagggtggggaaaaggtggtgactgttagtcctgagaaggtttctggtgccaagtctactgatgaaggaggtggttcagacaagagcaagggaagtgaggtgggtaagagtgttttgcaacctgatgtgaagaggatcagaactgaggctgcccatggtggcggcagcggaagcggtgggagtgtatcgaaggatggaaccggcgggaaaatgctgcgcccggggttccccaagtggcgatttgagaagccggaggtaagggcagggcgggttcttgatgagaaaggtggggtcgagacgaaggtaagcagttcccaaaaggttaaggaccatgcatcgagttcggtttatgagagaagacggccagagccactgaaacctgagaaatcgacgccatcgaagactaaccaagaggttataagggtacaagggaaaagcggtgtcttaaagatccgtccgaagaacaataaggtggctagtgaaactggtgatggcaagaacctgccgaagaatgctaaggtggatggggatactggtgatggcaaagttctgccaaagaagactacagtggaggaaaatggtgatggaaagattttgaccaagagtggtgttttaaagctcctcccaaagaacaataaggtggccaaggaaaccagtgatggcaatcctcgaagcaagaacactaaggtggttggggaaaccagtgacgccaagattctgatgaagaacaaggcgaatagggaaagtggtgatgataaggcaccgaagaactgtacggtgaatctagaaactagcgctggcaagattttgtccagaaacactaaggaagatttgaaaaccagcgatgtctgtagacaagataaggagaaaagcgatgcaattgatgtgtcccaaaaacagggtgcagatggtgagaagagaatcacagaaaaactagtctcccccatcctattgaggaaaagtgacccaagtgtagtgggaatttctttgggccagaaaatgaagcagcaaaattcaaaggcgcaactgaagatatcctcactaggccaacgtcagccttcacttaatttgaaagatgagaagaataagaaaaaaagattgcttgatcataaaatgtcaccagaaaatttgtccaagaaagcaaaaccaaatgccattgatcaggatacatctcgtccttctcttgagaagcatggaataaagaaggaaaggaaagggcctcgttacacaatgaagcagaagctcaggggtcagataaaggacattcttttaaacaatggatggaaaattgatctaaggcgcaggaaaaacaaagattatgaagattctgtctatgtttctccacaaggaaatggctattggtcaatcactaaggcttatgctgtgttccaagagcagtctaaaagtgggaagcatacaggtaaatcatctaagcataaagcaggtgttgcagatgctgcctgtaatgccatatcagaaaatgatttagcaatgctacagaggaatgtggtgaaaaggaggaccaagaaagaacttggtgcttctaaaaagaagtatgaggacagcagcagcaggaactccaaagacaacaatgctggtagaagttctggaaacaagcatcaaagcagtggagttaggggatgtgcgcttcttgtccgtggtagtactcatagcatggaaggcaatgtggacggctattttccttatcgatggaagcggacagttttatcatggatgatagatatgggggttgtttctgaagatgcaaaggtcaaatatatgaataagaagggcacacgggcaaggttggagggtagaattactagggatggcattcactgcggatgttgctctaagattctcacagttgctaagtttgaacttcatgctggttcaaaagagcagcagccctatgaaaacatctttctggaagatggtggggctacgttgtcacaatgcttagttgatgcgtggaagaagcaatcacaatctgaaaagaaagggttttacaaggtagatcctggtgatgatccggatgatgatacttgtggcatttgtggtgatggtggcgatttgctctgctgcgataactgcccttcaacttttcacttggcttgcttaggaatcaagatgccttctggtgattggcattgcagtagctgtatatgtaggttctgtggttctacccaagaaataacaacatcgtctgctgagttactttcttgtttacagtgttcaaggaaatatcatcaagtttgtgcacctggaaccatgaaagactctgttaaagctgaatccaattcctcaactgattgtttttgcagcccaggatgtagaaagatttataaacatctgagaaaactacttggggtaaagaacgctattgaggctggattttcctggagcctggttcgctgttttcctgataaactagctgcacctcccaaagggaaagctcatttgatacattgcaattccaagacagctgttgctttctcagttatggatgagtgctttctgccacgtattgatgagagaagtgggattaatataatccacaatgtcatatataactgtgggtcagatttcaatcgtttaaattttagtaagttctatacatttattctggagcggggtgatgaagttatatctgcagcagctgtcaggattcatggaactgacttagcagaaatgccattcataggaacaaggggcatatataggcgccaagggatgtgccatcggctactcaatgcaattgaatcggccctttcctccctgaatgttcgaagactagtaatacctgccatacctgaattgcaaaatacctggactactgtttttggttttaaacctgttgaaccttccaagagacaaaaaatcaagtctctgaatatcttgattatccatggcactggtcttctagagaagcggttgcttgcaacaggcactattaaccaagagaacactactgttaatgatatgatggatgctcaaacacatgttgaagcaaccggatcccggacacctgttcatttttcctgtgaattaccagtgggtggtgatcctgatattaagcatcatgatgactctcatcctttagttgggaactccaaaggcttgacacttaatctgccttgtgttcctgaagaaaaaactgcagaattgacatctccagtattagatgttgttcagtgcatgcctgaatctgaaaatactcaagaaatgaaaaatggagaaacagatgcgacactgacttctgaggacataattgcagaacagaagtatgaagataaatctaattccagtcttacagattcatctgctattcccatgacagtggatccaggctcatgttcatccaatgagactgtgaaaggagaacatcacacatctagtgaaccttctgttgaagctattctagtaagagacaaacctgaaccttccatctcttgcaacgttaccaaccaagaagacaaaaactcttccatggttcctgttgatacgacagttcatttagccactatagttgggaatcatgatattcagaattcagtggaagtcaaaggtatggaacataatacagctaaggatcaaacttttgttagtgctgtagctaataatgttgctactactgaagatcccagtgattctgtagctgactgtgaagtgccaatagtgaggtctattcagcagaaggatgaggttatcgcagacaaaaatgcttgcgcaactatagatcaaactgctgttgacgatgtagctaataattttgttgctaccactgaaaatgacactgattctacagctgaacttggagtgtcaatggagagatgtatccagcaaaaggttgaggttatcaaagacaaaagtgattcaccattgagaacttctataagcaaagttatgttggagaaatcggatcaaatgaagtctactgaaagtgatagtgttaaaatgaaggacatggcgattgaggtgaaagtcacagttgagaacttcagtgaagcaggtaaaccagcttcagcgcttgtcatgtcaaatgacattaatggtgaagttatggctaagcctaatctaacttgtggggatgatcaacttcatggaggggatgggacatacaaaaatagcatggaagatgacctagcttccagagaacctgttaatgcatgactttgcatttcctgctacaaaatgtttaagtgagcagagcaatgggagggacgatctagttttctgcaagtagctgcctcagctcgttctccatggctacaacgaagtgtttagagttgcattttgcagcaatgaaatgctgatgtttcagaattttggtagtctgtcgatcatgggggctttttgttggtttagtaggcataagtagttcacaccgtaggacctcttatacaaaccccaaaaagtgggccaaatttttggtgtaaatacatgtgggaaattgctgttggcattttggtgcacctgaaatgttgtctgaagattgtcgatgaaaacagacttgcaggtagtgcctgtacagatataaaaatccatcctcatctgtttgactgttaaaaaaaaaaaaaaa

SEQ ID NO: 32211 - DNA, 4176 bp, Oryza sativa
  Clone ID: PAT_MRT4530_36442C.1
atgtcggctcttgtgggtggtcagtcctgcacgccacaccggcgtgggcgacagcattcgccgtcccctcctcgcactcgcggccagcagcttgtcgtgcagcgggtagtcaaggaagggggctctgtcacctaccccacgcttactcgttccaattactctgattgggcggtgttgatgcgagtgaacctgcaggctcagggtctgtgggaagctgtcgacaccggcgacgtgccctttcatgaagatcgtcaggttctttcggccatcctgcgagctgtgccggctgagatgcgccaaggacacctgggatgcgctcaagtccatgcgagtgggcgcggatcgcatgaaagaatcccatgcgcagaagctacgccaagcgtgggagtccatgcgatgcaagcccggcgaatcagtcgaggacttcacttcggcttcagggggttgtcagcgacctccgtcttcttggtgatgacatcaccgaggagaaaatcgttcgcaagttactttgtgttgttccccgcagaaccacagcaggctggtggtgatgaggagcccacgttgctgatggctcaggtctgcaagcttgctcccgtcgatgaacccgagctgaccaatggcgaggcggtcggccccggctgggccgctgtggcatcaccaggcggcggcggcggcggcgccggtaggcggcgacggggaggaggcggcgcttccgtgctactggggtgggccgcgccaaccgggatctccgggtctgacggggaggagaaggcgcctgcactcgcgctggcggggttgccggcagcttccccccctcgcttcggtgcgcaacttccgctcccccccccacgcgggccgcgcacgaggcccaccaccacacccacaggctgccgacgcgccccgccgccaccgcccccggccgaccccccgtcgccatctcgttcgccgggtccctatcctggtggcggtgtgccatgtgttgcgggggagacgctaggggctggggattgggcctttttctgcggtcctctgcctaccgtgcgcagaggtacgtgtgcgagttttctttgtcttccttagttgcttcagttcagccgaggggttcttgcgcaggtctggtgcgcccagagctgtggggcttcagtgccatgcgcctcgcgggggaaggccccgtgctcctctgtgccccctgtacttcctttacagcggtacaggctcctgcgccctccgcgctccgggttacccctcacccaagaggaactcgcgtggacgcgaggtacttgggaacgccatctgtgtcgtacggtgttcgctttgggcgccgtctccactgatccctgaaatgaacatgagaagattatcccacgtggtggtggtgccactggaatgccatcctcgacatgtccttcgtcaacgttcgtcgccggcagccaacacaatgggtcagcccaggacgaccacaccacaattgatgacaggcttcggtggcaggcgatgcgatgccctctggattgtgctttttttttggtaccgagtgtatatgtgtttgtaacgatggtatccctgtcacgggtaactccaacgacaagtctggcctcgtcaccaccgtgaacggttcagtccagttctatgatacctatacggatcgagggacgcagcaccgtgctgttcgcctgcaagaacggcgactattgtgtgctcaccggcgtttactacatccccaagttccacaacaacatggccagtcttggccaactcgacgaggttgggtgcaagatggtgatcgaggacggaatcctcacccttcatgaccaacggcggcgtccgttgtgtcgcgttcgtcgcggaacgtggcgcctatatgtgctccaggtcgacctcgcccagccggtgtccctcgcggcaaggagttctaaagacgcgtggatctggcatgctcgattcgggcatcttaactttgatgcactgcgcatgctctccacccgtggcatggcgcgcgggttgccggagctggagcatgtcaggcaagtctgcgatgaatgcctcatcggcaagcagcgtcgagcgccgttccccgtaatggcgatgttccgggccacgagtcggctcgacctcgttcacggcgacatctgcggccctatttcgtcttccacccatggcggtaaaaagtacttcttgttgctaatcggtgacatgtctcgctatatgtggctgtttccgctgacatgcaaaagtgaggcttcggcgacaatcaagcgcttcaaagcgggggtggagatggagactggctgcaagctgcgtgtcctccgcactgatcgtgggggagagttcacctccatcgagttcagcttgtactgcgcgaatgagggcgtcactcggcaactgacggcgccgtactctccccagcaaaatggcgtcgtcgagcgccataaccaaacagttatggccatggcgaggtgcatgatgaaggcgaagcaaatgcccgggaagttctggggggaggcggtgacgaccgccgtcttcatcctcaaccggtcgcccacgaaggccgtaccagataagactccctacgaagcgtggcacggacgaacacctgacatgcactacttcaggacattcgggtgcgtcgtccacgtcaaggaggtgaagccgcatctcaagaaacttgacgatcgcaacaaggtgatggtttttctcggctatgagccaggaacgaagggctaccgtgtcttcgacccggaggccaaccgcgtcgccgtcacgcgcgacgccgtgttcgatgaagcagcgtcgtggccatggggagaacctgtcgaacaaggagaggcgtcctcagacgactcgttcaccggcgcgccgcgtcgctaccggagcatggcgaacatcctcgacacgacggcgctggtggagctcgattcggacgagctctacctggcagtcgcgaaggagccggcgaacctcactgaagcagagcaggatgaacattggcggcaagcgatgcaagatgaaatcaaatccattgaggagaacagcacttggatactcactgagctcccggccggcaagtgtccaatcgacctcaagtgggtgttcaagttgaacaagaacgagaccggcgccgtgatctggcacgaggcgcggctcatggcaaaaggctatgtccagtgccatggaatcaactttgatgaagtcttcgccccggttgcgcagatggaatccatgcggcttctcctcgctgtcgctgctcatctcgagtggactgtgcatcacatggacgtcaaatcggcgttcctcaatagggagctggaggaggagaatgcaaagctagacacctgtctacatgagctgggcttcaaacggagcaccaccgagcacgcggtgtacactcgtggcgaggggaccaagcgtctgatcgttggtgtctacgtcgatgacctcatcatcaccggtgcacacgctgaagaaattcggcacttcaagggagagatgcactctctcttctgcatcagcgacctcggattgctcagctactacctcggcattgaggtacatcaaagcgacgacgacatcactattaatcagtcagcctatgcacagaagctactaaagatcggtgggttggcggattgcaattcgacttgcatccccatggagcctagactgaagctgaccaagaacagtgacaggatggccgtcgactccactctgtatcgcagcctggtgggcagcctacggtacctcgtgcacgcgcggccaaacatcgccttcgccgtcagctatgtgagccgattcatggagacaccacatgataatcatatggcagcagtgaagcacatcctacagtatgtagcaggagcggcttgcctcggtatgtggcttgcacgattgctggctgaagtgctgggcaccgaaccggagatggccatcctcaaggttgacaacaagtcggcgatttctgtgtgcaagaatcctgtgttccatgatcgaagcaaacatatcgacactcgatatcactttatcaggcagtgcatagaggagaaaaaagttgaggttgagttcatctccacggacgaacaggtggcagacattctgaccaagccactcgcgcgcatcaagtttcaagaatttcgcaacaaggcgggcgtggtccagattgtcactcggcgtcaggattaa

SEQ ID NO: 32212 - DNA, 2812 bp, Oryza sativa
  unsure (1)..(2812): unsure at all n locations
  Clone ID: PAT_MRT4530_36443C.1
gcaagagttcttgtaaaaatgccaggacaggtgatggaagctgcgctgcagcagctgccggcgtccatggcgtcgggatcgctcctgctgcctcccgcctgcctccagcatccgcttccggcggcggcggcggcgtcaggcggcgtgggagggagtagcagggagcagtgcccgcggtgcgcgtcgcacgacaccaagttctgctactacaacaactacaacacgtcgcagccgcgccacttctgccgcgcctgccgccgctactggacgctcggcggctccctccgcaacgtccccatcggcggctccacccgcaagcgcccccgcccccccgtgcgccgcccgcccgtccacttcaccgccgccgccgccgccgccgncgncgntgcaccgnctcatcaccatcatcatcatcacggcgggccgctcacgccgccgccggcgacctcttcttcctcgcagcaggcgggcctgctcggctcgctgttcgcgctcggcgcggcgcagcttccgcaccgccgcctcgccatcgccattcccctcgcttccctcctcctcccgacaagcgccgccatgctccagcctccgattccccagaccaagaaacgggaggatggtgggggtgcggaggagggcgtccggattcgaggccttccctcccctacctggtaaggtgttcgtcgaggaggcaattggagctgaatatggggaaggttttgagacatttaggatggatggaccactcaaggtcgatgtggattatctgaacgaaaaattgcaagaatgcttccttcaaaggataagacatgctatgaagccagatgaagcatgtgggcttattttctcatgggacaacgtaattgctgatacagactcactaaagttggatgcctggagacagcttgctttggaagaagattctcagtggtatattgtctgcaaggtttgtgtttacctcactgccagggatgctaccttgatattgctaataaatttatttcatgcagggaaggatatcccaaatgctggtcatgtccaaaagagtattcttcatggtgctgccgaccatgtgcttagaaaggttttatgttgggcaaaagatgaaagtcaaatggaaagactgaaggcacggcttatagagttatactacgaaaatctcttcaaacttgatacaccagtaaatggattgcgggaatggttggatgctgtccagacagcaggcatcccttgtgctgtcgcatcgtccctggataggagatgcatgattgaagctttggatcgaatggaactaagcaaatacttcaaggcaattgtgactgacgaggatgatatggagtcaatagcacataggttcctctcagctgctatgaaggcatgcttctgctccgcttcaaaatatttagctgttttcaggatatactgctcacatgtttgtcaaacgtttctcttagaggcgtaaccgctgctcacaactgataccatgatggcagttgcactcattggtgctcatcctgcgtatgagctggtacaggctgatctcgccatcgcaaaagtacagggagctctcggtcatcacatcgcaaaatacagtgagctctcggttatcaatctcagaaggttgtttgcacataaggggttaagtttcatggacttgcagaagcagatcatcgagagatataggcaagagctggaacttgctgaacagcttgagcaaatattccagaggtcgcctcctagcaggctagtctttttgcaatgggagatttgctctggtccagcaaaaagtatctcgagacggcggattcggcgagatgtggagatcgaatctgtcgccgacgactctgccaattctgtccagaacatcaggctggtgattgacatcggcgacaggacgatccaggtccctctcaatggccacaccgtcgcgcagaacatcggccgtcaggctgccgccgccgtcgccggcgattcgtcagccggcggtgtcagtgagaaagccggtggcggcggcgaggagtggctgcaagaacaggacggcttgttgagcatgcgcgggtggctgatggcggtggccacgctgttcgccgccatggcgttccaggcggcgctgcagccgccggggtggatgccgaggccgcgcgactggttcgcggcgctgctcgccgccgacccggcggcggccgccgtcacgagggaccaggccgggaaggcgatgctgtacctgatcgtcaacacctgcaccttcgccacgtcgctcgccgtgctcctgatgctgctcgccgtgggcgacgccggcggcggcggcggcggatgcgcgtcgaggagggtcaccgcgaggctgatcgccaacatgatgacggccgtggcgctgttcgccgcggcgacgttcgcgctctgcgccgccgacgactaccggctcatggcgttcgtcggcaccgtcgtcgccgtgtacgccgccgtcaccgtcgtgttcgtcaggtgcaaccttgctctgccgttccggagaggcggcggcggcggcggccatggttgttgtagctgggtgtcaagattgtaagtcacctcccaagaggaagctgacagtagacaccatcttctaatgaattctttacctcccaatactgaaaaagagagaaaagaaaatagcaccatgcatcctccctactgtgctgtgtatatagcattccatgttggttagattacatagaaagctgatgttagatgatctgttgttgcatacctccattctggatgtactagatgtaaactgatgtttaaccattttaatcatgataaatactaccagtctacc

SEQ ID NO: 32213 - DNA, 3942 bp, Oryza sativa
  Clone ID: PAT_MRT4530_36444C.1
tgcgagtgaacctgcaggctcagggtctgtgggaagctgttgacaccggcgacgtgccctttcatgaagatcgtcaggctctttcggccatcctgcgagccgtgccggctgagatgctccggccgctcgcggagaaggacaatgccaaggacgcctgggatgcgctcaagtccatgcgagtgggcacggatcgcgtgagagaatcctgtgcgcagaagctacgccaagcgtttgagtccatgcaattcaagcccgacgaatcggtcgaggatttcagtcttcatcttcagtgggttgtcagcgacctccgtcttcttggtgacgacatcaccgaggaaaaaatcatgtgcaagtttctgcgtgttgtgccccgcaggtatcgtcagatggctctttcaattgaaaccttgattgacctcacaactctctccattgaggacctcactggccggcttctcaccgttgatgatcaccctgattccgacagtgaggacgcgggtcaggcactgttcggcaagaaggaggagcaggcgcgggccaacaaggggttaggccagtcctcatcccgtggcagcggtaccgggactggctcatcggagcggcgacaacgcggccgtggtgggtgcggtcgtgacggtgctggcggcaagcacaaacctggcgccaatcagggtggaggccgtgacgtgtccaaggacaagtgtcgctactgcggcgaattgggccattgggccaaagactgccgcaaggctaaacgcgaccgcgacaagcttgcgcatgcccatttgcttggggatgacgagcccacactgctgatggcccaggtgtgcgagctcgttcccactacggagcctgagcttatcaacggcgaggtgaatttgaataaggagcgcgcgcttgtctctctccgcgaagaaggggagccggtcgaccccgactggatcctggacatggccgcctccaaccacatgactgggcttgacaccaccatgcgtggtacggtcaagttcggcgacacctctgcggatcgagggacgcggcactatgctgttcgcctgcaagaacggtgactactgcgggcttattggtgtctacttcatccccaagcttcgcagcaacatggtcagcctcgggcagctcaacaaggtcgggtgcaagacggtgatcgaggatggcgctctaaccctgcgtgacccacggtggcgcttgttgtgccgtgttcgccgtgggagagagcgcctgtatgtgcttcaggtggagctggcccagctggtgtctctcgcagcaaggagctccgaagacgcgtggctctagcatgccaggtttgggcatctcaacttcgactccctgcgcacactctacgcccatggcttggcgcatgggttgccgaagctggagcgtgtcaggcaagtctgcgacgggtgtctcatcagcaagcagcgtcgagtgccgttccccacagcggcgacgttccgagccacgagtcggctcgaccttgttcatggcaacatctgcgttcccatctcgcctcccacgcacggtggtaaaaagtattttttgttgctgattgatgacatgtctcgctatatgtggctatttctgctgacatccaaaagtgaggctccggcaaccatcaagcggttcaaagcgggagtggaggtggagactgcctgcaagctgcgcgttctccgcactaatcgtgggggggagttcacctccattgagttcggcttgtattgcgcgaacgagggcgtggctcggcaactaacggcgccgtactcgcctcaacaaaatggcgtcatcaagcgccgcaaccaaacggttgtgtccatggcaagatgcatgatgaaggcgaagcacatgcccaggaagttctggggagaagcggtgaggaccgccgtcttcatcctcaaccggtcgcccacgaaagctgtccccaacaagaccccttacaaggcgtggcacggacgaacgcctgccgtgccattacttcaagacctttggctgcgtcgttcacatcaaggaggtgaagcctcatctcaagaagcttgaagaccgcagcaagatgatggtttttctcggctatgagccgggaaccaagggctaccgtgtctatgacccggatgccaaccgtgtcgtcatcacacgcgacgccgtctttgatgaagtaacgtcgtggccatggggggaacccgttgaacatggagaggcatccacagacgactcgttcaccgtctactatgaggtggcctcaagcatcgtggcggcaagtcggcctcctagcgtcgaggccatgtcacccacaccctccgcgcagctcgcaacgcctccagacacaccctctgtggagttcgtgtcgccgccgagctcgacgccagacgtcgacgacgaccagggcgcgccgcgtcgctaccggagcatggcgaacatcctcgacacgacggcgccggtggagctcgattcggacgagctctacctggcagccgcggaggagccggcgaacctctctgaagcagagcaggatgaacactggcggcaagcgatgcttgatgaaatcaaatccattgaggagaacagcccttggatactcactgagctcccggccggccagcgtccaatcggcctcaagcgggtgttcaagttgaacaacaacgagaccggccccgtgatccggcacgaggcccggctcgtggcaaagggctacgtccagcgccatggaatcgactttgatgaagtcttcgccccggttgcgcggatggaatccgtgcgacttctcctcgccgtcgcagcttatctcgggtggactgtgcatcacatggacatcaaatcggcgttccttaacagagagctggaggaggaggtatacgtctcgcagccgccgggcttcattgacgacaagcatccaagtcaggtcttgcacctgaaccgagctctgtatggccttcgtcaagcccgacgaacctggaacgcgtagctggacactcgccttcatgaactaggcttcaagcggagcgccaccgagcacgcggtgtacacacgtggcgagggatccaagcggctaatcattggcgtcgatctcggattgctcagctactacctcaggatcgaggtgcgtcaaggcagtgacgacatcaccatcaactagtcagcatacgcacagaagctactcaagatcggtgggctggtggactgcaactcaacttgtgtccccatggagcctagactgaagctgatgaagaacagcgataggccggccatcgacgccactctgtatcgcagcctcgtgggtagcctgcgttaccttgtgcacacgtggcctgactttgcctttgccgtcggctctgtgagccgattcatggaatcgccacgcgatgatcatctgttggtggtgaagcacatcctgcggtatgtagctggtactcagaactttggatgttgtttggcaagatcaggggaaacgggaatttgtctgctgggtttttcagacagtgatttggggggagacattgatgatcggaagagcacctcaggggctttgttctttctcggctccagtccaattgcttggcaatctcagaagcagaaggtggtggccctttcctcttgtgaagcagaatacattgccgccacaggagcggcttgcctcggcatttggctagcgcgtttgctggctgaagtgctgggcactgaaccagagatggccatcctcaaggtcgacaacaagtcggtgatctcactgtgcaagaatcctgtgttccacgatagaagcaaacatatcgacactcgatatcacttatcaggcagtgcatagaggagaagaaagatgatgttgagttcatccccacggacgaacaggtggcggacattctgaccaagccactcgtgtgcatcaagttccaagaatttcgcaacaaggcgggcgtggtccagattgtcacttgg

SEQ ID NO: 32214 - DNA, 1329 bp, Oryza sativa
  Clone ID: PAT_MRT4530_36445C.1
atggcgttaggactcgacgttcagagaagatcgatggatagacggcggattcggccagatgtggagatcgaatctgtcgccgacgactctgccaattatgtccagaacatcaggttggtgattgacatcggcgacaggacgatccaggtccctctcaatggccacaccgtcgtgcagaacatcggccgtcaggctgccgcctccgtcgccggtgattcgtcgtcagccggcggcgttagtgagaaagccggtggcggcggcgaggagtggctgcaagaacaggacggcttgctgtgcatgcgcgggtggctgatggcggcggccacgctgttcgccgccatggcgttccaggcggcgctgcagccgccggcgtggatgccgaggccgcgtgactggttcgcggcgctgctcgccgccgacccggcggcggccgccgtcacgagggaccaggccgggaaggcgatgctgtatctgatcgtcagcacctgcaccttcgccacgtcgctcgccgtgctcctgatgctgctcgccgtgggcggcggcggcggctgcgcgtcgaggagggtcaccgcgaggctgatctccaacatgatgacggccgtcgcgctcttcgccgcggcgacgttcgcgctctgcgtcgctgacgactaccggctcatggcgttcgtcggcaccgtcgtcgccgtgtacgccgccgtcacggtcgtcttcgtcagtggggtgaagatgatgagaattagaattgcagagcagttcatcaggctggtgatcgacatcggcgacaggacgatccaggtccctctcaatggccacaccgtcgttcagaacatcggacgtcaggctgccgctgccgtcgccggcggtgtcagtgagaaagccggtagtgctggtggtagcggcgaggagtggctgcaacagcagggcggcttcggcttgttgtgcatgcgcggatggctggatggtggtggtggccacgctgttcgccgccatggcgttccaggcggcgctacagccgccgggtggatgccgaggcccagggactggttagcggtgctgctcgccgtgggcgatggcggcagcggatgcgcgtcgaggagggtcaccgcgaggctgatcaccaacatgatgacggccgtcgcgcagttcgccgcggatacgttcgcgctctgcgccgccgacgactaccgcctaccggctcatggcgttcgtcggcaccgtcgtggccgtgtacgccgccatcaccgtcgtgttcgttcaggtgcaatcttgctatgccgtctcggagaggcgacgccggccatggttgtagctgggattccaagattgtaa

SEQ ID NO: 32215 - DNA, 1002 bp, Oryza sativa
  Clone ID: PAT_MRT4530_36446C.1
tttttgtttttttttttttttttttttttttctctacaagataaaattcgttggttcattcattattccgcggacaaacacttcacataacatatggaaggaataaaaaaccacatacacacaacagcaaactggaaaataattgatcatctattcaggactgatgatatataataccaccagagaaggccacacattatccttgaactgatcagacagagaaaggcggtaggaaagaacattgataacaccatatcttgacgctgcagtagtggtgagacgccacaatattatttccatcaattcttttcatggcagacgagtagcatttgcgaccgatgctgtaccacgagcagcttgtggattatctgcagtatagattgcacgaatattaagttctcgaacagcatcctcgctggtagagcttgggtccgttgtgaactttatactgccatgggccattgaaaattctccagttccaccaataacagaccactcaccactgcttgcagcaataatccccatcacctgaagtgtggatcccttaaacctgtcatcctggaacacaatgttgtgggaagtgtaccacatgttagcattgctttggccagcctggacatgcatgccttgtacacgtgcaacgatattatcattgggattggttgtagctgttaaataccagtcatcaacgagtgttgtaccgaatccattaggatagctcgaggctatcacaaattcttcattgcggtttgggtgatttgctccagcaacaaactggtgcaggtacaagtgcatggtaacctcattttggtcagggcaaccacactccacaggacatatatcatagtaggtgctggcagccatgctcaggaatgttggaagcaagaagaggatgaaaagtgcagagctactgtaagtagccatgggaagtatagcaaattgttgatgagcagctagcaaggagagggagagagagcttgaatgccaactggagctagtttc

SEQ ID NO: 32216 - DNA, 183 bp, Oryza sativa
  Clone ID: PAT_MRT4530_36447C.1
atggcgagagatcaatcggcgactcggcatccacgggtccatgcgagcgtggcgcaacccatcggcaagcctgaggcgacgacgcgatccatcggctcgctgaaatcatacggcaacggcatcaagtggagacataacagcattgcctacagcagcggcaacggcaagttcccctccaactga

SEQ ID NO: 32217 - DNA, 663 bp, Oryza sativa
  Clone ID: PAT_MRT4530_36448C.1
cgaatgggtacgggccccccctcgagttttttttttttttttttttttttttttttttttttttttttttttttttctgggtaacgtgcaatcacaatttatgctttacaagatggagacaaaatcatacatgcgtggtgataactgaaagttactaacgctgctaattaagcagattacacatacatggctgaaacataaacaagaaacagagtgatcacagcggcagcagccatatttctggagttccgtacacctgctgaatgcagcaattctggcagctttgatgcaacttgtgaaccagcgctcgatccagcgtctcccggcgccgtcacgggggcagcaggagaatcgtcggctggcaccggcggtgcttctgacgcctccggttcagccggcgccgcagacggtgtcatcgccggcgtgtccggtgcagcggccggtgccagtgccgccggcgtcgcggagcgcggctcagagcttttcgcggccacatcatcgcaggggttgctgggcaggttgcacacgttggggacgatggcctgcgcctggccgaggaacaggccgaacggcccggggggcggagaacctggacgcggcgcagaggcacggaccctgggaccgtaagaacgcccggagctcggagcagcacgacgacagcgt

SEQ ID NO: 32218 - DNA, 204 bp, Oryza sativa
  unsure (1)..(204): unsure at all n locations
  Clone ID: PAT_MRT4530_36449C.1
cccggattcccgnntcacccacgtccgctcacgcgtccgcggacgcgtgggcggagactcacgcgtggccggtgctggacgaccacccggtggtggacagctgccgctgcttctgcgaggacgcggtgcctatctttgacgtcagggcactctacccctccgtcatctttttcttgtatccttattctttatcttcttttacct

SEQ ID NO: 32219 - DNA, 407 bp, Oryza sativa
  Clone ID: PAT_MRT4530_3644C.1
catcgatctccaccacctcacctgcaagtaagcaacccacccacccacacacacacactcgtacggcgctgtactgtacggtacggatcgggctaggagatcgagcagcaatggcgcctctgtactgcggcggcagggtggcggcggcggcggtgctcctggcgctcctcgtggcggtcgaggcgccgccggcgacgacgtgcgcggacgcggcgcgggtgctgctcggcggcgagctgcgggcggcggcggcggcgacgcgagtagaggagcaggatgtgaagacgacgactacgcaagcagcagcagcagctccgccggcgccgcgtcgttcgcgcggtgggtgactggccgtcggcaatgctgcgggggtgaggatcctcggctccgtgccgagccctgggatc

SEQ ID NO: 32220 - DNA, 251 bp, Oryza sativa
  Clone ID: PAT_MRT4530_36450C.1
atggtcagcgctgtcaatagcgtcaccctccgatctctttggtcgcatttggccacgtccggcatcgtcttcgggtcacgtgccgacatcgccagtctgatcgtgagtgagaccggatctggtggcctggagctcgtggatggcaaagaggtggtcgatgatgacattggagtggagggtggaggaggaggtggccggatctcgagggaggcagagaggtggccattggtgaccttggggccgagggcagc

SEQ ID NO: 32221 - DNA, 379 bp, Oryza sativa
  Clone ID: PAT_MRT4530_36451C.1
ctgaagataatagtgggaagtaaactgaatgtaaagaaagtgaatccgagctgcttgttcgtgggagctattcccagttatgaaccaagtaatatgttcaaagatagtctatagaggggtaacttgtatgaggttgacgccaaagatatgaattatgagaagttctggaactgaagtcccattgtcaagtgccacaacccagtcgaagacagctagaggtgcaaccaaggacaagtcaggtgaagagaagattccatctgcaagaggagatcgagccaagcagtccagagtggagaagtttagctaggcaagtttgttatagaagacggagcggaagaagtcagacaagaagagaagaccgcccaacctatcttcttgc

SEQ ID NO: 32222 - DNA, 379 bp, Oryza sativa
  Clone ID: PAT_MRT4530_36452C.1
atgaagagaatagtgggaagtaaactgaatgtaaagaaagtgaatccgagctgtctgttcgtgggagctattcccagttatgaaccaagtgatatgttcgaagatagtcttgaagtgggtaacttgtatgaggttgacgccaaagatatgaattatgagaagttctggaactgaagtcccatcttcaagtgccacaatccaatcgaagtcagctagaggtgcaaccagggaaaagtcaggtgaagagaagattccatctgcaacaggagattgagccaagcagtccagagtggagaagttttgctaggcaagtttgttataaaagatgcgacggaagaagtcggacaagaagagaagaccgcccaacctatcttcttgc

SEQ ID NO: 32223 - DNA, 1286 bp, Oryza sativa
  Clone ID: PAT_MRT4530_36453C.1
ctacttagacacggtgtctaggtagttaattttcggtgtttgctccgcatcccacagtaggtgtgaggtaggtgtagaggtggtgacagccctcacgatgctgaagtcacctctgtccgggtgtgtagtagagtgatatctgggagcagcgagctgtccagtgcctgttgacggctttacccctgctatcctcgagaagcaatcatgtaaactcttctcaaccgatggagccgtcatcattcttccaactctctgctccatggggcaaatcttacgagccacctccttcatcgcagccaatttttacaactggctacgagattcgccccgaattaataatcatggttaaggaaaatcctttctctggtctagaccatgaaaatccttaccatcatcagcgggaatttgaacagctctgtttgtgccttaagattcgaggcatgaagcaaaatacttcggtggaaattgtttccgttctctctttaagagagagtaaagcaatggtacacatctaccgtcaaatgtgcgaacggtgaatgggaaaagttgcgagatagattttgtcttgccttctttccggtaacccgtatcactattctgcgggtagaaatcctgagtttccagcagatggaaaaagaatcaatcggtgtagcctggtccaggttcactaatctagtgcaatctggcccaactttgtccatacccgatcatgtgctattgcatcatttccattcaggtttagataaagaatctgcattctatctagatgtaactgtcagaggatcattcttgcacaaaactccgcctaaagcaaaggtgattctagatcgaattctggaaaacacctcctttatgggtcagctcgatgagcccccccccccccccacgaggcatctgtgtctagaatagaggagcctctggtttccgaatctgagcctgaagtttctgcctctcccgattcaagcagagaacttcttcccgagccatcgcccgttgtgaccgaagaaattcgaactccgggatgtactcccttgttcaggaatggattcaatgaagactacggaaacactctgatctattttagcaagagaaaaccatctgctcccttgccacctcccgatccaataaagtatcaattactaaaggaaacagtccgggagatgactctttaggaccgtatagacagcctgcagcacgccgaacgcgatggcgatgatggcaagcacagaagcgacggcgacgcaggggttgcggcagtgctcgcgcagcatccacgctgtccattg

SEQ ID NO: 32224 - DNA, 256 bp, Oryza sativa
  Clone ID: PAT_MRT4530_36454C.1
acgaactaaattaaaatgaggtctggctgagcactggagtaaacagtaatttcttttaaaaaaagacggcttaaaggtacttgcttgggcgaaagaaaagagaccaagcataaggaatgcatggatgattaaagaagttgattggggaccaaaccaagaccttctctaagtctacttctacctcaccacgtcactttcggtctatagaaaacaatagataaagttctacacgttttggattcagattcaggtctcc

SEQ ID NO: 32225 - DNA, 378 bp, Oryza sativa
  Clone ID: PAT_MRT4530_36455C.1
ctgaagataataatgggaagtaaactgaatgtaaagaaagtgaatccgagctgcttgttcgtgagagccattcccagttatagaaccagtgatatgttcgaagatagtctatagaggtcagacttgtccgaggttgactccgaagatatgaatcatgagaagttctggaacggaagcatcactgaactaccgcaacctagtctgagtcagccaaaaggtgcaaccagggataagtcaggtgaagagaagattccatctgcaataggagatcgagccaagcagtccagagtggagaagttttgctaggcaagtttgttataaaagacgcgacggaagaagtcagacaagaagagaagaccgcccaacccatcctcgaat

SEQ ID NO: 32226 - DNA, 144 bp, Oryza sativa
  Clone ID: PAT_MRT4530_36456C.1
tcagatgagataactgccatcatcactatcttgctgcagccggccggtgatatctcgctggtttccggcatcggaggatttccaacgccggcgtacgtccgtgggaggagaccatccaacggcaatgagatggtcgtcggccat

SEQ ID NO: 32227 - DNA, 380 bp, Oryza sativa
  Clone ID: PAT_MRT4530_36457C.1
atgaagagaatagcggaaagtaaactgaacataaagaaagtgaatctgagttgcttgttcgtgggagctattcccagttatgaaccaagtgatatgttcgaagatagtctacagacgggtaacttgtatgaggttgactccaaagatatgaactatgcgaagttctggaactgaagccccatcttcaagtgccgcaacccagtcgaagtcagctaaaggttcaaccctggttcgagtcaggtgaaaagaagattccacctgcaacaggagatcgagccaagcagtccagagtggagaagctttgttaggcaagtttgttatagaaagcggagcggaagaagtcagacaagaagagaagaccgcccaacctatcttcatgc

SEQ ID NO: 32228 - DNA, 379 bp, Oryza sativa
  Clone ID: PAT_MRT4530_36458C.1
atgaagagaatagcggaaagtaaactgaacataaagaaagtgaatctgagttgcttgttcgtgggagctattcccagttatgaaccaagtgatatgttcgaagatagtctacagaggggtaacttgtatgaggttgacgccaaagatatgaactatgagaagttctggaactgaagtcccatcttcaagtgccgcaacccagtcgaagtcagctaaaggttcaaccagggataagtcaggtgcaaagaagattccatctgcaataggagatcgagccaagcagtccagagtggagaagctttgttaggcaagtttgttatagaagacggaacggaagaagtcaggcaagaagagaagaccgcccaacctatcttcttgc

SEQ ID NO: 32229 - DNA, 583 bp, Oryza sativa
  Clone ID: PAT_MRT4530_36459C.1
ttgccagttctccatagtaatacgaagatttgatgcccctggaactatgtgagactagaatctatccttaaaaaaaactacgtgagactagagttataaacatggagtaccaaattctcaaacgaaatggctatggggtctattcgattcagctggactgtggttgtacagccacagcgctgcatccctcctagtataaattgtttactgagtctttgtttacgcgaaaaacagtcttgtagatgcagcgctgctgctgtcacagtgagctattctgaacgcactcatgatttaatgggtacgatccatttccaactcaactaatacacagacataactgttgttttcctagatctacatggagagaagctgagcgcaaggattggtgaatgagacgcggtcgaatgctaatcgtacgacatgtatatatatgtatggtaggactcattctcaaatatcaccatgtattaggtagtttgtaaattatcgatattccgttagctagatttattttaattgtctaaaagctagattttcttaaaataatcacatagtgttacatttaagtaaaaaaaaaaaaaaa

SEQ ID NO: 32230 - DNA, 791 bp, Oryza sativa
  Clone ID: PAT_MRT4530_3645C.1
ttttggccaattgaaaatttgccaaattttggttggctccgaatggaattctgaatttctctgcttgtcacgaaaaaaaattatgtgttaactaagggtgagatttacatggccgaatctcttgtgacccgtgaggttgcaaattaattacatcgctctcaactccggcgaactcgccgccggcgccgccgcctacaagagggacaacggcgtgggttgggggaagaggtcggcgaatcgctggagggcctcgcgcatccaccagtgcgggcaccggtccatggcctgctgcggggagacccagctgcggcgcctggccgccatctccggccaccggtcgagctcgtcggtgacccggagcgggaagacgaagccctcgtaggtggcgtcgtagcggcggctccggtagcaccaccgccccagcgaggcgccgatctcgccgagcaccccggcctcctccagggcctcccgccgcgccgcctcgtccacggactcgtccagctcccacccgcccttggggaacatcaccacgtcgccggcggcggcgcccttcttctgcgagctgatcacgagcacctccaccccgccgccgtcgcccctcaccctgtacgggatgcaccccaccaccatcctcccccccgtgttgtcgctgtacctctgcagctccctcccctgcctcgccaccatcaccgccgccatcgctggaatcgaatcgaatgcgaccttctttgctttgcctttggagtttggattggatcagttggatcgatggatgaatctttgcttgagaa

SEQ ID NO: 32231 - DNA, 1116 bp, Oryza sativa
  Clone ID: PAT_MRT4530_36460C.1
atggcggctcccagttgtcctcctcgagacgataacaccacctctagtcctcgggacgatgatgccgcttctcctagggcacccctccccagcctttccttgcacaccttcttcctcctggcaatgccccctccctccctccctttcccctctttggcttatcaatttgttttagtcctttggccaaatctagctaaccccaacattgaggaggaggcgcccgccatctcggtggtggactacgagctgaccgacgacgacgagagcggcgacgaggccgacgagccgacgaaggcgagggacggcgaggcgccggcggccagaggcgagctgccgctggtcccggcgccgttcgtcccggaaggggagttcctcggcccggcgcggttcgccaccgccgggtgcgccgccggcttcatgcgtgtcgccgtcgtcgagggcgacggcggcggcggcggccaggagatcgtggtgctctaccgctacacccgctactcggggacgtggagcgggcgaaagggcgtggaggtgtcgaggaggacgaagctgaaccgcctccggttcgtcgtctcccccgccgccggcatggcgagctcgctggcgtgggccggctcgtcgctggcgccgctgatctacccctacttcttcaggcgggagctcctggagctttggtcgagcctgatcatggcggcgccggcgagcatcgtcccgccgggagccacgcgcgtggaggtgctcgtcgccgtcggcatcctccggccgttcgacaagaggccggaccggatggagtacatgcggcgcgagctggaggccgaggcggcggcggcgtggtcgtggccggggcaccacgtcggcctggacctcaacctgccggagccggtgctgtgcgacaggggcgccaccgccggcgaagtgttgtcggaggaggagggcgacggggcgccgccgccggcgaagaagaggaggagggcggtggctggggtcgccggagaggagtgtcccgtttgcttcttccagcttgagaccgacctcgtcgcgtggcccgggtgctccgtgcgccatgtcttccatggcgagtgcttggagttcactctcgagaggagtgacaagtgctag

SEQ ID NO: 32232 - DNA, 226 bp, Oryza sativa
  Clone ID: PAT_MRT4530_36461C.1
tgttttcccgtctccaccgatcggcacgcaagtcgtcgtcgccgtcgccgcaccgaggtagtaggcgccgtcgccgtaccgaggtaggtgcgccagtggggaaggggaagtagtactggagggagaagggagatgtagtatggccatgggtgggataaaaaaacaagatggaagacggtttggtgaggttgacatatgagagcgatttgctatggacttgcaatgg

SEQ ID NO: 32233 - DNA, 368 bp, Oryza sativa
  unsure (1)..(368): unsure at all n locations
  Clone ID: PAT_MRT4530_36462C.1
gaaagggacatgtatcaatccctattaaaaaagttgagcaaatgacccaatatccgcgacaacaggttcgaacacacaaaaacctgggtacacacaacaaccaaaggagaaaggatagaggagtatcagctccctgatctctgtccccaattgggagaaactacaaaagaagtctcgatgaacatgaaattaacgaagtcttggataaatgtaaaactgtcctagcttgccaccacagtgtagtcactgtaacactgatcctggaggaaataccatattttagagcaatgatnatgttataggatcagaaatacaatgtgcacatgggtgtataaaagaaaggttgattgggtgattggttgtttatt

SEQ ID NO: 32234 - DNA, 195 bp, Oryza sativa
  Clone ID: PAT_MRT4530_36463C.1
acactatagaagcgctgtcacgtcatacacacgcgcgcgtgcgcttatcctctatagcgcgcgccccctttttttttttttttttttttttttttgggcttggcaataacaaattgaataattattagctggtcagtgaacattgttttaaaaactaaccaaaaaataattccgtagttccaatttcttcattat

SEQ ID NO: 32235 - DNA, 238 bp, Oryza sativa
  Clone ID: PAT_MRT4530_36464C.1
ccgaacggtcgaccactcgggaccgtgtcaccttcaactcacttcggatccaaaccacgcccccccgcgaccgggcgggctctcacgcctcccaccctctctcgtcccgacaccaatatccgtcggagaaggggccataaaacccgttcatcaagactttaaaattatctgactaccgcttggaagctctgtggtaaactaatccaagctaagagcgtctgattcgctgattactgtc

SEQ ID NO: 32236 - DNA, 332 bp, Oryza sativa
  unsure (1)..(332): unsure at all n locations
  Clone ID: PAT_MRT4530_36465C.1
gattgatcatcaatggctagcagggtcgtcttcttcgcggcggcgctcatggcggccatggtggccatctgcggcgcgcagctgagcgagtcggagatgaggttcagggacaggcagtgccagcgggaggtgcaggacagcccgctggacgcgtgccggcaggtgctcgaccggcagctcaccgtgcgggagaggtccagccgatgtccgcgcccgggccgctcngctgggatgcatgtgcagcactgaggagtagccggagtgcgctggccgcatccgcgatgggaggactaccagagagcatgcgatgccctgagcacgctgtcgcgtcg

SEQ ID NO: 32237 - DNA, 342 bp, Oryza sativa
  Clone ID: PAT_MRT4530_36466C.1
ttatggagcatcttggaagctcaagcattgcgcgtgggagaggcaagaacaagaggatttggacgaactttgattgttcaagttcgctttagatccaagctggaaatcagaaggagatttcaaaaatggatactgcaagttctagagaatgtacttgctaagaagttgtcaagttctagccttactactgttccgcacattgagtcgagaggtaagtcatcaaacaaagtatataattatatggagtacaaaatttatttattgattcataagtcgctattggcggactgcggccgcctgccgctaccaattagccgctattgcagcagtggggcgaggtga

SEQ ID NO: 32238 - DNA, 224 bp, Oryza sativa
  Clone ID: PAT_MRT4530_36467C.1
gggaaaatgggcaatcccgggccccgacttcgagcagtttttttttaaaaaaaataaattatgtttgcaagttcatagcatgtttgctttacactgcaactccacagatacaaacacttttacacagagtttgcttttcaattttgggggaagccccttaaatgacgaaaatttaaccgcaaaagttacacattgattcggaacagatcacaggttgcgcgagc

SEQ ID NO: 32239 - DNA, 369 bp, Oryza sativa
  Clone ID: PAT_MRT4530_36468C.1
atggccaagcctggagaagagcacgccatctgcagcaactatggcaaaaatcatcacacgctaatgtttcacgtgtgcatgcatgctactatgcacacagtgacaagcaaaccaacaaaatggcttattgctaagctatactcatttggccatgaggatgtgtatcgttatacactaatttctcaagtgcaattacactggcacgccatggagcgcaggaccaggaaccgggtaatccgtttttgcaaggtccagtggagcaaccacgccgaagaagaagctacctgggagcgcgaagacgagctgaaggcagcccatccagatctcttcgccagttcttccgaatctcggggtcgagattccgtttaa

SEQ ID NO: 32240 - DNA, 156 bp, Oryza sativa
  Clone ID: PAT_MRT4530_36469C.1
caccatgcatactttaaatttttacattcattattacaaaagccatactttttgttttaaagaaccaactgggtcagagaccacgctcgtacagaacttcacatcaccaaaatctggtgtaagcttgggggtacataccgcgctcatacagcggag

SEQ ID NO: 32241 - DNA, 219 bp, Oryza sativa
  Clone ID: PAT_MRT4530_3646C.1
ggagcaacagcattattatgcgggattcacttattaataaacagggcacaaaacttaaggacccccaaattatgaaactacaggtaagcttttattaacattattcacgctgggaaccttttcctgtaccaagccaaaagcttaaacacgctgacacttattcaatccacactgggttcaactgaacgaaccaacagcattaatgaaattcgttctttt

SEQ ID NO: 32242 - DNA, 2017 bp, Oryza sativa
  Clone ID: PAT_MRT4530_36470C.1
tttctctttgtctccagcgcacgcacgcacgaccacctcgcctcctcctctcctctcccctcccctcccccacctcgcctcgcctccacgcgcgcgacgcggccggcgacggcgagccgcacggcgcgtgggcgtgcctctcctcagccggcggctagccctctcctcgcgcggcggcggcggcggcggcggttgctggcctcattccaccgccatccctcctccgtgtctcgtgctcgactcggtggtgaaggtcaggtgctgatgcaagatataggttgttctatgagaaggatagctgtgcacatcaagacccaaatataatctcacttggttgtactatagtggtggttgaacactaagatatagcttattctgttgtttcaaaaacatgggttcgaggtttccatcgcatcagcttagcaatggcctgtatgtgtctggccgacctgagcaaccgaaggagaaggccccaaccatttgttccactgccatgccatacactggtggtgatataaaaaaatctggagagcttgggaagatgtttgagctccacgctgtcaagtcaagaaaatctggtccactgagcaatgcaccttcgaggaatgcgtcatttggaggtgctgcatcaaactctggacctgtccctaatgccggggatcggtccaactactctggttctctatcatcttcagttcctggtgctagtggatcagcaagagcaaaatctagctccggacctctcaataagcatggagaaccagtaaagagatcatcaggtcctcagtctggaggagtgaccccaatggcgcggcagaattctggccctctccctcctatgcttcctacaactggacttatcacatctgggcctatcacatcggggccactgaattcgtctggtgctcaaaggaaagtatctggacctcttgattctgctgcatccaagaagacgcgggccacatccttttctcataaccaggctgttactaaaatcaccacagaagacagttactcaatcacaggaagcctttcgaagctaatactcggggcagtgggtgtgctctttgtgttggggctcatagcaggcatcttgattcttagtgctgttcacaatgcaattcttctgatagttgttctggtgctgtttggttttgttgctgcacttttcatttggaatgcttgctgggcaaggagaggtgtgattgggtttgtggatcgctattctgatgctgatctaagaactgctaaagatggacagtatatcaaggttacaggggttgttacttgtggaaatttccctctcgagtcctcgtatcaaagggttccaagatgtgtgtacacttcaactaccttacatgaatataggggttgggactcaaaagctgccaacacccagcatcaccggtttacctggggattacggtcaatggagcaacacgcagtggatttctacatctcagattttcaatctgggctccgggcattggtgaaagcaggatatggtgctcgagtgaccccattcgtggatgaatctgtcattattgacattgatcctgacaacaaagacatgtcccctgaatttcgaagatggctgcgggaaaggaatctctcaagtgatgatcggataatgcgcctaaaagaaggatacattaaggaaggcagcaccgtgagtgtgatgggggttgttcaaaagaatgacaacgtgttgatgattgttcctccaccagagcccatctctactggttgccagtgggccaaaattgagaaaaatgtacaaatgttggggatgattaagtatttcagaagaagaaaatcttttaatgatgtggttattgccatcgaagagaagcaaacctatggtgatcttggtgccgaggggatatcttacagggccctagctgccgcacaacagatccagaatttcagaacagattatgaacttggaattgcagaggccatgaacaattgcagacggtccccaaggaggccaggaccaaagataccgatttactga

SEQ ID NO: 32243 - DNA, 2239 bp, Oryza sativa
  Clone ID: PAT_MRT4530_36471C.1
atggctaaggctctcgcggtcgtgtccgctttctgccttcttgtggcgccggccgccgcggcgcgtagcctcgtcgacgtcatcggcggggcgttcggtggccggaaggactactacacgcccggtcctactggccagcaccactcttctagtcccagtcgttcgtacattacccagtctcttccatatcttatcttgctactgctcggttacgtcaactggtcaaacggaggtggtggaggctacaacccaccctcgccgtccattggaacctctccgacaacgccgggaggaggtggaggctacacgccgacgccgagcgacacgccaccctctccgtccagtgacacctcgccgagcactccgggtggcggctgctcgtcctcacccacgccgtgcgacgcaccgccctcaccgtccagtgacacgtccccgacaacgccggggggaggtggaggctactcgccgacaccgagtgacactccgccctcgccgtccagtgacacctctccgacaacgccgggtggaggtggaggctacacgccgacgccgagcgacgcgccgccctcgccttctagtgacacctctccgacaacgccaggtggaggtggaggctacacgccgacgccgagcgacgcgccgccttcgccgtccagtgacacctctccgacaacgccgggtggaggtggaggctacacgccgacgccgagcgacacgccgccctcgccgtccagtggcagctccccgacaacgccgggtggaggtggaggctacacgccgacaccgagcgacacgccgccctcgccgtccagtggcagctctcgcactacaccgggtggatgctccactcccacgccgtgcggcacgccgcccgcgccgtcgagtggcacctctccgaccacaccgggtggaagctactacccgcccacgccgtccattggcgacgtgccaccctcgccgtccagcgacacctctccgaccacaccgggcggaggctccccgtccacgccatgcgacacgccgccctcgccgtccagtggcacgtccccgaccacgccaggtggaggctactacccgcccacgccatccgtcggcgacgtgcctccctcgccggccagtggcacctccccatccacgccaggtagtggaggctactctccgtccacgccatgcagtgcgccgccgtcgccttcaagtggcacctccccaaccacgccgggtggaggctattctccttccacgccgtgcaatgcgccgccctccccttcaagtgacacctccccgacaacacctggtggcggcaactacccgcccgcgcccaccattggcaacgtcccgccatcgccatccagcggcacctccccgagcacaccgggtggtggctgctcatcctcacccacgccatgcgacgcgccgccctcgccatccagtgacacttccccgacaacaccgggtggagggtactacccgcccacgccgtccatcggcacctcgccatccacaccgggcaccggcggaggctactaccctccctccccttccaccggcggctacacgccgactccggacgttccgatcagcaccccgtcgagcccctactccccgctggtgcccacgccgccgtcgagcaccaccccgatgcccttcgaccccaacacggcacccttcccgtgctcatactggctgtcgcacccgggcgtgatatggggcctgttcgggttctggtgcccgatggcgcggctgttcgggccgaccgccgcggcgccgttcggacacgacctgaccgtgccggaggcgctggcgaacacgcgcgccgacggcgtgggcgagctctaccgcgagggcacggcgtcgcttctcaactccatggtgaacagcaggttccccttcaccacgcagcaggtgaaggacgcgttcagcgccgcgctcagctcaggaggcgaccacgccgccgcggctcaggcgcagctcttcaagaaggccaacgaaggccacgtcatgcgttaggctaggcggcctctcgatcctctgtacttgaacgtactcgccacgtgaggcggattcgatgcgatgtacacgcgagcatgcgtgcaggttcatgtcggggtggggtttggagtaatccggcgtgtttgcaactttgcattatgtttgatctagagcggatggcctctggaataactataggagagttaagtacgtatgttttgttatccttttagagtccatggccgcacgg

SEQ ID NO: 32244 - DNA, 623 bp, Oryza sativa
  unsure (1)..(623): unsure at all n locations
  Clone ID: PAT_MRT4530_36472C.1
atcagatgngggcagtcgcgaaatggtgccgatggctaaggctctcgcggtcgtgtccgctttctgccttcttgtggcgccggccgccgcggcgcgtagcctcgtcgacgtcatcggcggggcgttcggtggccggaaggactactacacgcccggtcctactggccagcaccactcttctagtcccagtcattcgcacaaggctccgccctgcgcgccgacgccgccacagggaggtggtggaggctacaacccaccctcgccgtccattggaacctctccgacaacgccgggaggaggtggaggctacacgccgacgccgagcgacacgccaccctctccgtccagtgacacctcgccgagcactccgggtggcggctgctcgtcctcacccacgccgtgcgacgcaccgccctcaccgtccagtgacacgtccccgacaacgccggggggaggtggaggctactcgccgacaccgagtgacactccgccctcgccgtccagtgacacctgttcgacaacgccgggtggaggtggaggctacacgccgacgccgagcgacgcgccgtcctagccttctagtgacacctttacgacaacgctcagtggaggtggaggctaca

SEQ ID NO: 32245 - DNA, 381 bp, Oryza sativa
  Clone ID: PAT_MRT4530_36473C.1
atggcgatgctgacggaggaaggagcaggggcagtgccaatggcggtttcggcttcagcagccatgctatggcgggtcttcatcatgggaggagaggacaaggagatggtgcacatgacgcgacggcggtggctgagcctgaggtcgtgggaaggaagtgacgagcccaccaccgtctcgagctccctcgcgacattttctcgaccttgtcctccaccccaaccaccgctgccccttgcatcctcccctgaggccggcagccatcgcatgtctcgtcctcaacctctgccacttctcctcgtcctccctgacctcagcggccatggcgtcgccccaccttgcctcgtcggccatggcagacaagggaggccacccggctag

SEQ ID NO: 32246 - DNA, 697 bp, Oryza sativa
  Clone ID: PAT_MRT4530_36474C.1
ccggccgggaaagcaagaaaaaagaaaaaaaactgcatatactcttctcctttttgttggtctcctaagcaaagccacagccaccatttcgcctctcctttctccgcaggcgaagcaagacgccgtacactcaaatcaaaagatcatcggaagcaaattagacttgggctcttcttcttcttctccgtctccggggagcaccaaccatggggtcctgctgctgcatggggtgcaacgacgacgacggcggcagcggcggcggcgacggcggtctggacccgaaagggttcttgctggccctgatgatcgcgctggtgctcttcatgatctgccaccggccgcagccgcgccggaacaactacgtcgtctaccggtgctactgatcgatcgccgccggtggatcgtcgccggccggcgaacagccggccggcgtgccatgtttgaccgtggaccgtcgtgtgtggagtggatgatgcaaacatgaaggtcgccttcctttcctcctctctggattcatcaatccttttgaaatagtagcaatcttgctgggtttttccagggttcgatcatatgatatatagagttggtagatgatcttttattcttctagaaaaaaaaaagagagagagatggtaatcttggtataggagaaatgggtgagtaaaaaagtggggtttactgtttgatttccgatgta

SEQ ID NO: 32247 - DNA, 603 bp, Oryza sativa
  Clone ID: PAT_MRT4530_36475C.1
atgtggatctcaggttcagcagtttcagcaccaattgcaggtttatggtatcatcttgacgccatatcccaatgcccgaatttcaagatgatagcaccagcttttgttttgattgttcgaccatggccccacatggcagccacttttcacacctacaagaaacctctcacatccttaactacagtactacagtacggctactcttctacacaagggaggctatctctattccatgatggatctagaaatggtgttcaaagaaatgcttcagttcaggaggcattgatggatgaacggatggatgtggcatgtgggtgccatttccttcctttggctagacatgaaagtgcacctacattatcattaggctcttcacattgccaaaaaccggtgccatgtaatcgtacccagttcagttcagatccactcagagcaatcagcaatgcaaatgggctggctgatctgatcatctccatggtgttcttggcagcaagaaaacgagaaccaaaccaagaacaacatggcagcagcaatggtgttccatggatggcattgcaaatcgatctccacaatggcagcagcaaccttttgactagtccagaa

SEQ ID NO: 32248 - DNA, 376 bp, Oryza sativa
  Clone ID: PAT_MRT4530_36476C.1
tcgagtaaggcctcgctataccgacaaaagaggggacgattaaaagtaactggggcgatccaactaatctccagcacatatcgtatgacggtccttgaaacacttgtctcaggacaagatgcgtgcgcacatgaaacacctcacatactagagagcaaagctgaacctcgcctcattcgtatagcgtcagcggatgcccttttcattctaacatcctacccagtaaatactagcactcacaacactagatagcaacactcacggcataatctgtaacaaacctcgttctcctagagggaaaaaacggtggcagcatcatcggcaactgccagacaaagcgtgcaaacacgacttatcccagatgcatacaactcca

SEQ ID NO: 32249 - DNA, 1039 bp, Oryza sativa
  Clone ID: PAT_MRT4530_36477C.1
acgaggcccaaattcctctcctaaattgcaggggatcagagcaaagatccgaaccctagctcaatccggtgtcctcaccggcgcgccgatggcgggctcgccgccggcgagccatcaccttgtcctcacgtccttttggcttttcttcatcaagcagtctcttctcaacgtcagtggcaagcagctaagcagtcagatgcagcaagtgtccaaatccaagcagcagcaagcaaccattacaaagtccaaatccaacaaggcagcacgagaagtagcagccgccggcagtaacttacctcatcctcagctcgtcgtagtccatcctcgtctctgctgccggtcgacccgtcgtcatcacctccgcgccggttgctgtcagatccgtgctcgccgtcggtgagccatcgtcgtcgtcttccgatctagtctgttgttggtcgcctcccgccgctggtcacgccggcacactgcccatcgcaagccgtcattctccgtcgtcaatcgtgggaggctgccactggccccatcgccagtctgtgccactcctcccgccggcttttgtccttgtgcccgccgcccgtcgcggcgccccatccaggctgtcgtcgtgacaatttgtccccatgtctgcatctgcgtgtgtggatgttctgctcatgctgctgcaccggacgaggccatcttcaagcagtaaccattttttggacttccatcgagcttgctgcagtggtatgagttgtcgttcagcaaagctagcagcagacattccggtttgtcttttggtctatcatagtgtcagatcgatgtatcattccggtttgtcttttggtctatcatactaccatcatttctgcttgctgcattgatgtgcttattgctgatgcctatccatattccatagtacaatgtgatgtctctgtttgttcatcaaatccatccttttgattttagtctgccaagttgtgtcattatatcatctctgttgtgctatcatcttagtcaggtttatcatcacagtgcgacttttgctaggtgtctg

SEQ ID NO: 32250 - DNA, 335 bp, Oryza sativa
  unsure (1)..(335): unsure at all n locations
  Clone ID: PAT_MRT4530_36478C.1
gagataaattgatttgagggaaatgataaatctagctacctgggatgacacatacgcnaccctcatatagatatgattatgcccataatgccccataaatancccaaataataaganaagctcccacgagaacccttgattggtgtncnaatgattaaagaatggaaggatcatccccttaataccctacgtattaaggaatggcgtggactgaaggaagtaggatccctcttgggatgggcgaatatatgcgatttgggaaaataatgtggaaaaattggaagaaccnctcccccccaaattaaaaaggaatttaaaaaaaaaaaaaaaaaaaa

SEQ ID NO: 32251 - DNA, 720 bp, Oryza sativa
  Clone ID: PAT_MRT4530_36479C.1
atggtaacagggaggcttccggcaattggtaggattttggatccaacgtcccagatcagcgcgcgtcccacacccccctctctgccgcaatcaccgcgcctcctccgcattcgcgcgaccgcgcgcctctctcgagcacctcccgatccgatccgatccagaccggatcgcttcccctccccctggcaaatcaccgccccctccacccggatccctcgcttccgcgtcgccggtctgcattcgcgccgcccccggtcagcccgtatcgccggtccccatcatcggcggtgccgcccccggtcagcccgcatcgccggtccccatcatcggcggcgccgcccccgatccccctcgatctgcactgctcccgacgagtttaacccttgcgcggctctgctggagtgtgagtgcaagaacagcgccgccgccgagaacacgctgctccgggcgggctacggtgggtggctgctctactcggcggcgtcggcgggggacatggcgttcgtgcaggagcttatggacagggatcccttgctggtgtttggcgagggcgagcatggcgtgatggacatgttctacgccgccgcgaggggcgggaacgccgaggtgttcaagctgctgctggaccacgccatgtcgccgaggtgctcgacgaattgtcccaacggggaaggcgcaggagcggtggtggctgctcctcggtgttctggctggaaatga

SEQ ID NO: 32252 - DNA, 155 bp, Oryza sativa
  Clone ID: PAT_MRT4530_3647C.1
atggagttgggggtgccgaagccgtggaggacgatgccagcgatgactcggatggagcaggggtggaaggcgggacgcggtgccagggacgtcgtcttccatgtcgtgcctgccgacgcggccaccgtggcaatgacgatggacgagggcgtggg

SEQ ID NO: 32253 - DNA, 921 bp, Oryza sativa
  Clone ID: PAT_MRT4530_36480C.1
atggggcgggacaaggtgcaagcgctgcatctcaaggtcatcatcattttctgcatcctcaccgggaccgccgtcggggcggcgttgccttccctgggcggcatgttcccggcgatccagccggagtcggacgtgttcatctacgtcaagaccttcgccaccggcgtcatcctcgccgcgggcccttgtgcacatcttgcccacggccttcgaggctctcagctgttgggctgtcaccacctgccgcctacctctgacaaatccgtgggatacacaataaacaaaggaacttccttctctatccggagtcctagtactagagcacttagtataaatactaacccggagcagggtgtaccgacagctccggtgttaacggtcataaattatgatttaaggactgtcaacacttacactttcacaataagagtcatcctgaccgcgtacaactttaacgattattacatctgtttcattatctacccgaactacggcaccgtgacaatcttggacccccttgattatcatcacatgacgtacaaacaatttctaacaatcttataatatgcatacaactactacaagaagaagggtggagagtagattcaaacaagggagaagctgttagtatatacatattggccgtgtcacaagcaatctagaggcacggtcctctgcgggtattatgcatgcaaattcctcagggttaatggaagatacatggttaatgcagaggatttgcctagaatagaacttcgaacaagctttgacgatacatgcattataaatgtgcagtgtgacctctaccacttcatccaccatgagtgctatcatgtcaaaggacgattcttcgacgcagagagcattctggctacaagcgaagcttacaagaatcttcaggagtggaacaaccgaacaacg

SEQ ID NO: 32254 - DNA, 390 bp, Oryza sativa
  Clone ID: PAT_MRT4530_36481C.1
atggcgaagggtatggcatgtggcgaaacctcttcgcccgctgcccctgacgccgtgccatattggcactatggcgaagggcgtgggttggcgaaacctgttcgtccgcagcccttgacgccgtgccttattggcactatgtcgaagggcgtgggtggacgtaacctcttcgcctgcaaggccatgcgccataccttattggtactatggcgcagggcatgggttggcgatacccgttcgcccgcagcccttgacgccgtgccttattggcgctatggcgaagggcgtgggtggacgaaacctctttacccgcaacccttgacgctgtacctcattggtttgatggtgaagggcgtgggtgggcgaaacctcctcgcccgcaacccttga

SEQ ID NO: 32255 - DNA, 684 bp, Oryza sativa
  Clone ID: PAT_MRT4530_36482C.1
cccctcaagacccacgaagaatggtgctacgagtgtggagatcggccaccgtcttcttcactccggttgccgtcgccattgtcgtttccgcctcctccggcaaagaaaactctggatttttctggtgcgtgtgaggattgctttggcaagagctttgtttatgaatccaaccatccttttgcttgatgagccaacaaaccatcttgatatggcatgacggaagacgtggatgtggctctggcggtcgattgggtggcaacgaggatgaaccacagctgcgactgcgcccatgcacaaccacaaccaactagctaaggtacaactacaagtcctgcgagcaactaaccaccatgacgcaattccgtttgggcggtgctccatgtggctttccagtagatttgatccccaaattgatatgatgtagcatcaaatgctgtgaatacactttgtgagttttgcctttgatcaagacgaactcctgattatagcgtcctaagccccacatggtgcgtgtcggcatccctttgtcaatttttaggccaaaaattggtgaaaggtttgtcaagtggtctacttttgattggaagcgtggctacttaattacttatatcaatgttgtttatgtatgactgatgctctacagatacagtttgtgttatctaatataactattttttttctttt

SEQ ID NO: 32256 - DNA, 328 bp, Oryza sativa
  Clone ID: PAT_MRT4530_36483C.1
tgctgcgcctgctggtaccgccgcggcattctcggcgggacctatgcgtccgtgctttcggcgtcgccgcccttgggggtcgccatgacgactgaggttcaagaagaaccggatgaaactcgggcgcgtgtcgaccggtcacggtcggatcggtaagtatcggcaggaccctcgagggcgcgggaaccccggtggtatgcaccaccaccacgtcctgttcgacaagtaccaccagcgctacctaggcaaggtcgggatgtgctacttacacaggctcagtaacaggttccactgtcgccgcgttaacgtcgagcgcctctggtccatg

SEQ ID NO: 32257 - DNA, 481 bp, Oryza sativa
  Clone ID: PAT_MRT4530_36484C.1
ttttgatttaaacgtggccaatatggacaacttcttcgcccccgttttcaccatgggcaaatattatacgcaaggcgacaaggtgctgatgccgctggcgattcagaaattcgatgataagctgtcaaacatgagaattggtcgacggcccgggcggccgcaaggggttcgcgttggccgattcattaatgcagctggcacgacaggtttcccgactggaaagcgggcaagattagatgcaacttcatcttgtgcctccaagcggcgtaatgtgtcccatcagattgaggagcacgcccggaaggcacggagacgaagttatgggggggaatgcgataaaattcaaatagacccggaacttcctggtaaggaactccggaacttccggcctgccaggcccggaacttccggagaggagatccttcacaaacttacccgggacatccacaatatacaacggattctcgcgggcgacacctaa

SEQ ID NO: 32258 - DNA, 507 bp, Oryza sativa
  Clone ID: PAT_MRT4530_36485C.1
atggagacccgccacctcttcttctcccccattgtcttccttgctgataatgcccccataagctgtggccgacgacactatggtggagccatggaggcaaggttggggacggagacccgcaccacctcttcttccctaccgtcgcatgcgatgactccacgctcagagacggacatcgccggtgcggtggctccggcgccggcgccggcgggagcgctccccaccgtgaaaaccctagcgctcctgcgtccagtccccagcggtccgcgagaagccatcgacgcgacgcggagcctgatggtgatggacccgtcgtcgcttcctcggtcgccccgatttcctcccccgcggcaccgctgccgggttccggtccccggtggcgacgctcccggattggcttatacatccggaggccaatcctgcacgggatgccctgtaccaccatctcgtcctccgcttcaccgtctcggcgacacgctcggtgccactaactccctgtttccctaa

SEQ ID NO: 32259 - DNA, 587 bp, Oryza sativa
  Clone ID: PAT_MRT4530_36486C.1
cccacgcgtccggatcagcgaccaggcagttccctggatggccgccggctggcatgcaagaggaaaaatatagaaggagttaatgggcagtgctcggcaggtgctagcactagtttttcccacaggaacgatagtattttccataacattgcttcttcgagtcataatccctctcctagtacaaatttaccctctcctaattgtctgttggttccaagcactcttgatgaacaactcccgcgttatggagctactacagctggattgtcatctagtagctatgatcctagtggaggcaataacaattcaggaggctcacaaagaagttttcggccaagaactagcctggctcaacatattggcccctatggtgtgtggccatcttcaagtactatcagacattccaattcatggaatcatcagccacctccctttcagagttcatttgatgaaccaccggaggtaattccagtggtcagtagcctgaactttcaataccagcatccaatgaatgtcgttcctggcattccacagatgtcacaccggtttactggtccaggggcctcatcatcaaaaacaggcaattt

SEQ ID NO: 32260 - DNA, 540 bp, Oryza sativa
  Clone ID: PAT_MRT4530_36487C.1
atggccaaccgggagagccaggccagcccggaggccgcggtcgcggcggtcgcggcggtcgcggcggccgtggacgcggcggaccaggcggcgccggaggctacggcggcgacgggggatacggcggcgacgggggctgcggcggcgacgtgggcttcgtcggctacgtcggctacggcggcgacggcggtaacgggggcgacggcgccgatggcggcgcatggggctacggcggcgacggcggcgccgggggcgacgtcggtgacgaccggcctccacgagtaccacgcgccgggaatggtggcgacggcgggcgcgccggccccggcgggtacggcggacaaggtggccccgctggggacgccggccccggcggtatccccggccgcggcgggaacggcgggtacggcggcctcggcggtggccacggcggggacggcggctgcggcggggacggcggccgtgggggccgtgccggtcgtcgcggtcgtggtggccgtggcggccggggcggccgcggtggccgtggccggggtgtga

SEQ ID NO: 32261 - DNA, 177 bp, Oryza sativa
  Clone ID: PAT_MRT4530_36488C.1
tcgtacactcttgggggggcaggcagccagagccatgtcaaccatcctcgccgtggtcgtcatggccaccttacaggctccgacgaccctcccggggcccctggctcctacgctaccggttcgccggaacgacatttcgatcgtctgtctccttcaggggcgtgcgttgtgaaggtt

SEQ ID NO: 32262 - DNA, 237 bp, Oryza sativa
  Clone ID: PAT_MRT4530_36489C.1
tgtgtttttttttttttgggtttatcattttttaacacactctcatcgtatcacgctgttattgctagtaattataaaacaacaacctattgcagtatggatcggttcgataaacatcaaccaatactcatctataaaacaagaaaaaacctaccacaaaacgggacaggttgccgccttactggtgataccttgcctcaggcgatcccataccacctatgcggctattgcgaactg

SEQ ID NO: 32263 - DNA, 3645 bp, Oryza sativa
  Clone ID: PAT_MRT4530_3648C.1
atggttttctctactgcttcttctgctgtgttattgaatggggtgccagggaattctttcaaatgcagaagaggagtcagacaaggggatcctctctcacctctgctttttgtgttggggggagagctgttgcaaagagtaatcaacaaagcttttcatcaaggccttctgtcaaaaccaattaatgaaagcagtggggatggtttcccaatcattcagtatgctgatgataccttgatcttgttaaaagcatctcagaaagaagtcttctgtttcaaggctattttgaatatgtttgctcaatccacaggcctcaaggttaactataataaatcaagtctgtacccacttaatatgcctcaggacaaagctgtcttactatctggcattttgggatgtaagatcggttctcttccattcacttatttggggctacctttgggaaccaccaggcctagagtggtagactttgctccgttggtagacagggttgaaaggaggctgacagcaagctccatttttttacctcaaggaggaagattaactttgatcaactcagtcctgtcttctatcccaacctactacatgtcctcattgcagctaccagttactgtcatcaaggccattgacacagctcgtaagaattgtctgtggagagggaataacccttcttctacaaggaaatctctagcttcctgggatagggtgtgcatgcctaaggagaaaggaggcttaggagtgatcaatctgagagttcaaaacacagcccttcttctaaagcatatggtcaagttctataatggtgctgatttaccatgggtgaaattaatctcacaatcatattatgagtataaagttccacacttgatgatgaataaggtcaaggccatgtgttcaagacccttagaagactcttttgcactacccctctcagatgaggcttattcggaattcttgcagcttcagggggttctggacagtttgactttacaatcagggatgggggatgcttggaattttatctgggactcagataagtacacagctaagaaattctataagctaaattattctgcattgcaactccccaggcccatgatttggctatggaaaacaaaatgtgtcatgaagatcaaagtctttgcctggctaatgttctgtgataggctcaatacaagagatatgctggatagaagatattgtgccaaagaagatgatgatctcacgatcaaatcaactggcacgatagcatacccgaaggcgagttttggacctgcactggagttaagcagatctcccaggcctcgtgtttttacgtcaacacgcttttggcacgcccggtgggacagatcagaagtcagaatcacaacagcaattttcctcatggccgagaaaccgccagcatcgccgtcttcggctggtaaagatggttctgctaagtcgaagttcccgaggcttggtctatctgagattaatgatgacaacatcgtacccgtcactccggataagttgacacctgagcagcagatggatcttgaggcaatgatggagcaagcacggaaccaattcttgaactcattcatggagacccgaaagggaacgcttgttcagaaatataaagtaaagatgactctcagggggttcaaggtgatggctctcaaggggttcaaggtgttggctcttagggggttcaaggtgatggttctcagggatttcaagtcgattgttgatggcacaatagctgaataccaggctacaggaccggtttatttgccaggaggtgttttcccgaattatcggcccttaatcaccgataatcagccagctgttaagtcagttcctctcaatgcaccatcggctcagccgacggcaccagtatcagctcctgcacctgctgtaccatcatcggcaccaggtcaattagttaatcctcagttgttggtgagagaacagccacaacatagtggacagaatgtgaatcggctaactcaagaccaagttgcagttatgttcttaccacctcagcctactgctgacccaatacaacaacagccgattcaacagacaccaccaagccagcaggctttgcagtcaacgcaacagacgccaccaaggcagctggttgtgcaaccgatccagcaaacgccattaaggcagcaggttgttcaactgattcagcagcaagccaaactttcaaaattaccagggggcaatttgaattatcagtatcagtctccttcaccgcaagttcaatatcaacagggaggaccggctcaatcccagtttgtttctcaatacaatcaattcgagcccatgccacaacaagctcaaggagtgcctcagcaacgaccatgggctgatatgattgcagatgtaatgagagacagtttggactcaagccgaaggatgctgggaatatgtatcggcacccataccctgaatggtttgaaaggttgggccgatttggagaagcaattccacagttatttttatagtggggttcaggagatgaaattgtccgatttgacggcaatcaagcaaaggcatgatgagcccgtgaaacattatattcagaggttcagggagatgaggaataagtgctacagcttgagcttgactgatgcccagttagccgatttggcttttcagggtatgatagctccgatcagagagaagttctcatctcaagactttgatagtttgtcacatcttgcacagaaggtaaccttgcatgaacagagatttgcagaagccaggaagaactttaaaaaggttaatcatgtttgtcattacatatatggatcggacgatgatgatgaggatgacaccaaaatagcggtagccgaatgggttagaagcaagaaagttataccatgccaatgggtgaagagttctggaaaagaagaaaggtatgactttgatattaccaagactgataagatttttgatttgctacttcgagagaaacagattcaacttcctgctggtcatacaattccatcggctgaagaattgggcaagaggaggtattgcaagtggcataattctgggtctcattctaccaatgattgcaaagttttcagacagcagatccagtcagctattgagggaggcaaaattaaatttgatgattccaagaggccgatgaaggttgatggcaatcattttcctgtcaatatggtgcacacatctggccgaacaaccgatggaggaagagctagaggctttcaggtgaattcggctaagattatcaataagtaccagaagaactacttcaagcaacatgagaggcgttataaggaagataatggtggttttgatcctcattgggaaaaaaagttctttagattttgctggaatgagggtatgaggctgccatctattgaagactgtcctgggtgtggtgatattgcggaaagttcaagacgatcgtataatagaagcaatcggctaaggcagactagggttcctgttcatcagaggttgggcccagtaaaccaggatcatgacaaaggagatgatgaggataggaagactcagtggtgttcttttggtatttttacaaagaatcaaaagagaagggttcagaagttgaggaatagagaacgctttcaggagttgagcaagagatcaaccatcggttga

SEQ ID NO: 32264 - DNA, 324 bp, Oryza sativa
  Clone ID: PAT_MRT4530_36490C.1
atggagtggggaccatgttttcatggggttcccatgtccaatttgggtacccagagcctcgtgaagagggtggggcggcggctgcaaagctcgtcactagcaccggcgaggaaccggtggctacgatgccgacgaggaagccacggtcaacctcgcatcgtgtccgaaaagccgccgcatccgacagttctacccgacgccatcgctgctctgcccgccgccgttgccgccgcttggatcaccccgccgccgctccaaccgaggctccactcggtgccatctaaaccgatggggaaaagggctttggatctagttggcaactga

SEQ ID NO: 32265 - DNA, 402 bp, Oryza sativa
  Clone ID: PAT_MRT4530_36491C.1
tcactcatcacccattgcaagctccagtgcataatcatccctttccttatcttttagttcagcagatattccaagtgcttcaggttgtcttatttgtccatggcggcacgcgaagggcagcgtgatgtcctgcgcctccgcggtgtgcagaatgtactggtcctgtgggacgacgaactcgtggacgacacctctctggcggtcgtggacggtgaccttgtgggtgggagcgggcgaggaggacgagtacgccctctccgacacggggccctccacctgccgcagcccggacgcccgcgccttcgtcgtcgtcgtcgcgccccgggcgggtcggcgagccgtcgtcgcggcgaacggcggcgccccaatgcgagttgtggtcgcggcggggcacggagccat

SEQ ID NO: 32266 - DNA, 459 bp, Oryza sativa
  Clone ID: PAT_MRT4530_36492C.1
agcaagcaagcaactttgctggatgatgattggcaacaagttacagatctggagtacacaccggcgtcatggttagtttctctgtacaaatcgatctccgccatggccgcgagcaggtacggaattatgttcagctgcacggcagcggagacgggaggttgccggggatggccgggacggtgccttggtcggtgccttcaagtcaaaataatgtatcgctccatctttgtcaaaactcaaatgaagtcgagatcctactgtccaaaacagacgcttagcctttgttcaggtggagaaaaggaatctgaaccaggaattgtcaaagagaagaattcctatgttttgtatgtcttgactgactggatctaccatagctagctttgcatgttaccaatcatgttctctttgcagtccttggtggtaatataatttggaagatcagcagtccggtgatctaaa

SEQ ID NO: 32267 - DNA, 705 bp, Oryza sativa
  Clone ID: PAT_MRT4530_36493C.1
atgccgccggtgagggcaaaaaggggaaacactgggggaggagacaggggacggggcaccgggtcgctgcaatgcgtagtctcgagggagtgtctccggaaaaagggagctgaggagctagaggcacgcattccccacgtgggggtctcgcctctctccagggacacgcgcagcggacggacggcgaacggcgtgagcggggagacgacccaggggtacccattgtggatggcctcagtatcaagcgcggagcagcctccggccgacctcgaaggagacgtaggcgtcgatgcagtgtaccagatctactcgttggagaggcagaaggcgtcccagcggctcatggccggcctgtatgagctccgggcagcccagcctctgcgccgcgagggtgcgaaggtcggcggtgttccccgcggggaggctgtggtcgtcgctcagccgctcggcgtccttgtccacgctgacaccgacgaagcagtccgcggcgccggcgaggaagcggcggagggagcccgggatgtagtcggcgtggaggaacgggaagatgaggcacctgcggtcgacccagagctgcagcagcgcgacagggttctgcgcgacggtggtggactggtggcggcgcggccgccgtggcaggggcacgggcggggcgaggagaaaatttatcaacagatgtatatcaaaattgaaatatcagggtga

SEQ ID NO: 32268 - DNA, 545 bp, Oryza sativa
  unsure (1)..(545): unsure at all n locations
  Clone ID: PAT_MRT4530_36494C.1
atatggaatccctccatttgctgttaactataccgcaatgacaaattaattgcaacaaccctcacatgcatataaatctctctctctcctttgttatactatagctctagctagctagcaacaaggggaaaagaacacattagttaatctcccctgattaaagaagtgtgaccaataatagtactatggctttaacgtgtcatcgactcaagccgtcgtttgtggaagtggacgtacgatcgatccacggatgataagtttgctgtcccatctttatcccacgagcacgccgcagctatgtcgtctgtatgcacgtactcgagatcgcgactactcttctctcatggcgtcatgcagaccgggaaattgatctaccacagcgtgcatgctccggcggcgccgtcgaggttccacaggctgccccaggtggcgccgtcgtcctcgctggagccgtagtcctcgctggtagaggcgcagcagctgcccgccgccgncgntcanntgatggccggcgacggcggcccccgtggaggatgaggtggtag

SEQ ID NO: 32269 - DNA, 1334 bp, Oryza sativa
  Clone ID: PAT_MRT4530_36495C.1
atgccgccggtgagggcaaaaaggggaaacactgggggaggagacaggggacggggcaccgggtcgctgcaatgcgtagtctcgagggagtgtctccggaaaaagggagctgaggagctagaggcacgcattccccacgtgggggtctcgcctctctccagggacacgcgcagcggacggacggcgaacggcgtgagcggggagacgacccaggggtacccattgtggatggcctcagtatcaagcgcggagcagcctccggccgacctcgaaggagacgtaggcgtcgatgcaggcgtaccggatttgctcgttggagaggcaggaggcgtcccagcggctcatggtcaccctctgcggcttgacgaggtcggcgcccatgacggcgcgcaccacggcctgcaggccggcctggctgagctccgggcggcccagcctctgcgccgcgagggggcgaaggtcggcggtgttcgccacggtgaggccgtggtcgtcgctcagccgctcggcgtccttgtccacgccgacaccgacgaagcagtccgcggccgccggcgaggaagcggcggagggagcccgggatgtagtcggcgtggaggaacgggaagatgaggcacctgcggtcgacccagagctgcagcagcgcgacagggttctgcgcgacggtggtggactggtggcggcgcggccgccgtggcaggggcacgggcggggcgaggagaaaatttatcaacagatgtatatcaaaattgaaatatcagggtgaggctatagccgagggaggcaaaatggaccacggcggccgtcgggtcccacacggccggcgcgatcgctcgccgcggctcgtggggacgggccgtcaatggcgcctgcattcgcgcctacaacccccccccccaccccaacccacgcgcgtgccaacgatcctctgcctcctcgccgccggcttccaccggtggctccgcgtggagcccgccaccacgggcggggccgctctgctctccgaccggcgccgtcgccagcagccatgcttctcgaggaacgtggaatagctcatacttgctcaagaatcttcggcctggttgattcatgtcagatactccattgaagagataggcttgccggatgatcggaaagaataagctgcatgctatgcttgagcggattccttttggtagacagcctaacatgacctgctggctgagtccctctgccttgaattgtaggcagaagtgagatagcacttgctgctttatgttctcagacagaagatttgccattgacatttttgctgttaagtggagaaacttacaaattcctggtgcggctggtcc

SEQ ID NO: 32270 - DNA, 737 bp, Oryza sativa
  Clone ID: PAT_MRT4530_36496C.1
tttttttttttttttttttgaatgaaaaacatatgcatcttttcctgattgcactttcttgcactactgatttatggtcagagaatgctagatacagccatgcatgtaactaactgaagccaatgaagattggaagtaattgcacttggcctacctaaactgtaccctatcttcttcagattcatagcacagtcacaaaacgttatactacatctttcagtttcttccctacaatatatgctaaatctctgaaaaaaagacgagcaaatccaatcttgaaactgtagatttactttgtcagaagggcatgtcgaacgtcagtagcattgttcaacagtacagactttgttgctcttgcaatgtgtcggcaaggtaacctctgaaagtgagcagcggctgatcgagattgctgtcagcaattccccctcacaatgagcaattccccctcacaatgatcatgaatcctttgagctaccatggtcatgatcatggtggcggcaccgactcgcgccattgctcaaatccaagaacccatcaatggttgtaaacatcgccgatccgtatcgcctatcagcgtcgaattgctcgatcttcggatgttcatcatcatcatactgaattactgatcatgggctgttcttgaaccttgtactggtgccatcttgtggcaatgccattggatggtcaatgacctccttgtcctttgcccatggcgtgctgctcatggttgctgcctc

SEQ ID NO: 32271 - DNA, 254 bp, Oryza sativa
  Clone ID: PAT_MRT4530_36497C.1
atcatatacacgtgacatacatggcttctgtgcgcgtgtttttaatgcatatatgggatctaaaacatcaggaattattaaggtttaggttttacctattagaattgatgtatatgtttggtgatctatatctatcctgtaatctgaatctgatcattttgtacgctttattaacctcaaacactaggaggatgctaccgataaccttatctccatgaacaagcttagcaccaagaatctcggggctctgtcct

SEQ ID NO: 32272 - DNA, 630 bp, Oryza sativa
  Clone ID: PAT_MRT4530_36498C.1
aaaaaaaaacactgcatttcaacacaagctccagggcaaacaacagcacgaacactacattctgatgaaacagaaaaattctcaataaaaggagcatttttttccatcccagatgacagaggtaaaagtatgtaattaccacttttaaatggacctaaggcacgttacagtatacacccccatcactcaaaatttaggggtggagactggagacataataatcaaaaaatatgtagtactaaggtgaacattgtttgtttggttgtaaaacaatatctatgggcttctccacagagcccttgccaagatatgtatgagcagctcgccaattctgaacatttgcacacctccaaaatatgcttcaaaagacaaaaaggctgtaggcagtatgaacagattaactgctcaagtccacttgtgaaaaatctctttgactgagtagacaaatggtaacaaggccaactggactcaatcaaagaaacaaaatggacttgatggatagtaattagtatgaagactaactgagcctctgattttccaaaaaatgacgtttcttatctattgcttgccatttgaacatgccctgatagagactgattgatgttgctggatggcagacataattttctt

SEQ ID NO: 32273 - DNA, 318 bp, Oryza sativa
  Clone ID: PAT_MRT4530_36499C.1
atgagggcggagaccggatttgcttcaaggtggagcgcttcagctagtggtggcggcaccatcctcaggtcggcgctggatctggtggtggggaggtcagtggagggaagggacgacggcggtggatccagtggtgtggaggacgcgacggtggattcggcggtgagctcggcaacggtggacccggcgggctgtccctctcccacgcggatcccaccgcctcggcttcctacgcgcatggatacaacgcttgactctgacagcaaggagtgctttggcgacggcgaggacgaagcccgggcacaagaatggtggtga

SEQ ID NO: 32274 - DNA, 351 bp, Oryza sativa
  Clone ID: PAT_MRT4530_3649C.1
atggtcgttgctgaggcactccttgagcttgttgtggcatgggctcgaattgattgtattgagaaacaaactgggattgagccggtcctccctgttgatattgaacttgcggtgaaggagactgatactgataattcaaattgccccctgccgatgcatttatcacaccttgctgctgaatcagttgaacaacctgctgccttaatggcgtttgctggatcggttgcacaaccagctgccttggtggcgtctgttgcgttgactgcaaagcctgctggcttggtggtgtctgttgaatcggctgttgttgtattggcaggtgcaggagctgatactggtgccgtcggctga

SEQ ID NO: 32275 - DNA, 141 bp, Oryza sativa
  unsure (1)..(141): unsure at all n locations
  Clone ID: PAT_MRT4530_364C.1
ctttaatgtaggccccaaccttaattaggcgtccttgcgtacatgcaatatccacaagcccagcactcctctgaaaattggntaagaaaagaaattctttttgagaaagattacactaccatagctagggaaccttctttt

SEQ ID NO: 32276 - DNA, 884 bp, Oryza sativa
  Clone ID: PAT_MRT4530_36500C.1
acacgctctctcactctcactctcactctcactcagctcgagccacagccgagagagagccatccatggcggtgagcaacaacatcacggcgtgcgtcaacttcctggcgctggtgtgcgccgtcccggtggtggccacgggcgtctggttcgcctccaagcagggcgacgactgcgcccgcgtcgcgcgctggccgctcgctatcctcggcgccgccctcctcctcgtcgccctcgccggcttcgccggcgcctactggaaccgccggggcctcctcgccgcctacctcttcgccatggccgcgctcatcaccctcctcctcgccctcctcgtcttcgccttcgccgtcacccgcccctccggcgcctaccccgccttcgcccgcgcctacgacgactaccgcctcgacggctactccacctggctgcgggaccgcgtcgccggcgaccctcgccggtgggaggggatcagggcttgcctcgccgcctccgacacctgcaggaagctggcgcaggagagcgtcttcttcatcacccccgagcagttctaccaatcacacctcaccccgctccagtcgggctgctgcaagccgccgacggtgtgcgggtacgcgtacgtgagcccgacggtgtgggtgaacccggcgaacccggctgcggacgcggactgcgccgcgtgggggaacgacccgtcgcagctctgctacgagtgcagctcctgcaaggccgggatgctgggcaccctgcgggagcagtggcgcagggccaacgtcgccctcgtcatcgccaccgtcgcgctcatcttcttctacgtcatcggctgcagcgccttcaagaacgcgcagaccgaggacctcttccgccgctacaagtggcgcaactga

SEQ ID NO: 32277 - DNA, 179 bp, Oryza sativa
  Clone ID: PAT_MRT4530_36501C.1
accgataaagaacaacatataacttgtgaaccatttatagcacaaaaggttgttgtttaggctgtgaacagacagagcatacggcactattcaaaaggaaacttaccccctcttctcaatagttacaaccattcctcactttattttggaaatactaggaatgagtaacacaataatcc

SEQ ID NO: 32278 - DNA, 2026 bp, Oryza sativa
  unsure (1)..(2026): unsure at all n locations
  Clone ID: PAT_MRT4530_36502C.1
atggccacctttgcgcgccaccgcgtcctcctctgccgcctcgccgcggcgctcctcctcgctccggtggcggcggcccagccgtggcagttctgcgggcagggcggcaactactcggcgaacggcacctaccagtccaacctcgccgggctctccgccaccctccccaagaacgcctccgcgtcccggacgctcttcgccaaggacagcctcggcgccgtcccggacatcgtctacgcgctcgcgctctgccgcggcgacgtcgccaacgccaccgcctgcgagtcctgcgtcgccacggcgttccaggacgcgcagcagctgtgcccctacgacaaggacgcgttcatcgtctacgacctctgctacctcgccttctccaacaggaacatcctcgccgccgccgccgacgacgacgggagccccaggttcctgatgaacacgcagaacgcgagcgcgccggcggaggtgttcgacgccgccgtcgccaccctcctcaacgccaccagcagctacgcggcggagaactcgtccaggcggttcgccacgggggaggaggccttcgatgccgccgccgctactccgaccatctacgggctgtcccagtgcacgccggacatgtcgccggacgactgccggagctgcctcgggcgcataatcgcgctgatccctcggtacctcagccggaggaagggcgggagggctatcgggatgcgctgcaatttcaggtacgaggtgggtcctttcttcgccggaggctcgatgctgcggctcccggcgccggcgaactcgacgccgacggcgccaaccggaggaagaaagaaaaataaaagtggcacagctctagccattgcattgcccctagttgttatattgttggctacggttgtcatttgtctttctgttcagaggtggagaaaaagatcaaggtcaaaacagcaatcttcatattcaattcaaatggcggaggacattgaaagcacggattcactttttatcgatctatcaacactgcgtgctgcaacgggtaacttttctgagagcaataggattggtgaaggaggatttggttcagtttataagggcgtccttcctagtggtgaagagatagctgtaaagaggctctctatgagttcaggacaaggaatagaagagctaaaaaatgagcttgttttggttgctaaacttcagcagaagaatcttgttaggcttgttggtgtctgcttgcaagaacatgagaaattgcttgtgtatgaatacatgcccaatagaagtatcgacaccattctatttgatcttgagaaaaggaaggagttagactggggaaaaagatttaggataataaatggaattgctcgcgcattacagtatcttcatgaagattctcaactgagaataattcaccgagacctcaaagcaagcaatgttttattagactccgattataaccctaagatttcagactttggcttggcaagactatttgagggtgatcaaacaagggaagtcacaagccgtgtggtaggaacatatggatatatggcaccagagtacgcgatgcgtggccactattctgtaaaatcagacgtctttagctttggcatattgatgatagaaattgtgacaggaagaagaagcagtggttcatatagctttgatcaatcatatgatctcctaagccgtgtatgggagcactggaccatgggaacaattttggagatgatggatccctctcttacaagccatgctcctcgagaccagatgctcaagtgtattcacattgggctactgtgtgttcaaggataacccagcagatcgancctatggtgtcaacagtgaatatcatgcttagcagcaacacaagtgtctctttcaatccccatccaagccatcttttttcattcccaagagtggtacagactcaaatatatactcggaatcatacccacaaacttcccaaccgacccataggtctgggatgatgtcagttaatgatgtgtctgttacagagcttgaaccaagataa

SEQ ID NO: 32279 - DNA, 371 bp, Oryza sativa
  Clone ID: PAT_MRT4530_36503C.1
agctaagctaccattctcctcctcggcggcggcggtggcttttgctgctgagatgcagatggtgctgaccaccatcaccaccgactgctcccaggcggttgtgccgacttaccacccttacccgtacgcccacctgtacccgcacgcgcacccggactccgaccaccccatggcgcatgcgcggtgggtacttctggcttagcctgctgctgcgcctgccatggtggtcggtccggcgaccccggcggcgtatcacggccagtacttcgcggtgggggcagcccccgtcccggcggccggtcggctcacgccacccgggcccgcccccgtcgaatctcggggggaccgttgcgacgtaaacaagaacattg

SEQ ID NO: 32280 - DNA, 503 bp, Oryza sativa
  Clone ID: PAT_MRT4530_36504C.1
gcacgagggagagagagaactagtcttgagttttttttttttttttttttttaatcaagaaaatgggtctaaataatttattattctagcagttcaagtagtgaacaagcctttcaccctgaattgagcaatgcaaccctgaaggcctgatacatgcaaatctatgaacttctctgtaaacccagaatataaactagtctatacacgaacactggttccatcctcctcactatattccccattgcccctaatcaacaaatacctgaaattaccatgatactccacaattcagaacatgcagagatcgaccaacaatccaaagcatctagcaagtactacttaatccatgcgactgaataaactgttactagctcgtggtactttctgaatcttcctcataccctttgatagtggagcatttcgtcctgcttgccttgcttgcccattgcccaagtgtctacacctataatttctaaacagctctacgcaagaaagagctccct

SEQ ID NO: 32281 - DNA, 702 bp, Oryza sativa
  Clone ID: PAT_MRT4530_36505C.1
atgcgtcagtgccacaccatcgcgctgacgtcgttgcaagcctccatcttaggggtaaatgtccatccccgagcatctggacggtatcggttgaggtcacaacaacattccgcgttgcctctccagcaacaacacatccacggatgtacatctgccaccttgcatcctacctcaacatcctcctcattccgcctccacaggggcggcgctaggttgtggtgtcgccacacccttgccgcgccgctcccctgctccacccagacagaagcgccgtcagggcaccagattttggctccgcctccacgtgccaccatgcactctccatgcccgctcccctgcggaaatgccacccgggtgccgtatcaggcctcgccttcatggggacgatgcctggaatgcttctatgtgccatcgcgccctttccatgcctgctcccctgctccacctagctgggaagctgttgtgccaccattgcgctcgtcccgtcactgccgcgccatctccatccccaccttgcaccatctgctccccatgctagagctaggaggcagcccgagcccccgccgctgccatccttgctcgtcgtgcggtttccgacgattcactttggcggtggcgaggcggagaaggagagagtttggtggtggtgggttcgggatgccccccccgcatcgcctgtgcaggggtgatgcgagaggctga

SEQ ID NO: 32282 - DNA, 547 bp, Oryza sativa
  Clone ID: PAT_MRT4530_36506C.1
cacaaccatgcactatacatgctggaaactttacatttaatggtgtcactaagaaaaatttcagatttacaagcttttcaaattgaaatggcagatcataccaagttggcgtatcactcaatcttagctacacgctccgagaccacaagaactatttgcggaccaagtggcagcaggagatggcatatggccaagcaagtagcatgcttaagtattttcaagacaaaattgccgattgcccatcattccaatatgcattgcaaatggatggtgaagaactaatagctaacatattatgggttgatgctaaaatgatcgcagattacgcacgttttggtgatgttgttagttttgatactacttttggaacaagcaatgagagtggagagaagaatgaggagaacaatgaagacacaagtattttgtcagattttaatgcatgcatgtatgagtacgaagacatggtagaatttgaacaaaaatttgacatcatgagatgcacactagccaaaaatagttggctcgattcattgagccatcaagccga

SEQ ID NO: 32283 - DNA, 270 bp, Oryza sativa
  Clone ID: PAT_MRT4530_36507C.1
atggacctggaatcaacagagccatcattagattggattgatccatgcatgcccaaggttcagagtcatgactaccatgtcctcttgcagtttgaaggctgcgagggacggtggaaagcgattgttgcagctgccttcctctgtcagtggcccgccgcgcaacccgccgtcaccgtcggcgtgggctgggaacgcccacgcggcaacccgccgtcaccgtcggcgtcggcgtgggctgggaaagcccacgctcctggccgcggcgtgtga

SEQ ID NO: 32284 - DNA, 633 bp, Oryza sativa
  Clone ID: PAT_MRT4530_36508C.1
atggagagcggcggttgtccgtacatccacttcaggctgtacgaggattgccagcgaatgacaagttcgtatgtgcagatggttagtgacatcaagagacatgtcagtcacttggcggcggcggagaaccagggcgtggtccccatcatcagcgccggtcagatcttcccaggcccagctgctggtgaggcttactgcaagtacaagactctggtgcttcccagtgtgccgaaccacaacatgcacttcgtggtggtcttgcacacccctcctaactgggctggaggcacacgcgagccgcagccgaaggcaacaaagcggagcatgctgagaacagttgtcagcatatcggaggccgtccgtttccgggagcttctgacgcggatcgtcatgggttttgcagctggactctatggtcccactctgcagccatgggtgatgctctggccatccctggtgcccaatacgcccacgcctcgcatcttcaccactgccttcgacgacgaccacttcaagaactgggacgtgtactgcaagcttgctcgggcaggggcacaaggcttcgctccagggacgagaggattcgccacctacgagagcctcattgcctttctgggggcgtgccttcattga

SEQ ID NO: 32285 - DNA, 646 bp, Oryza sativa
  Clone ID: PAT_MRT4530_36509C.1
agatgtgttatatttggctaaacccagggcgtttagtttgagaatatgtggaattagatgatccttgaaaataatattttctctatgtcaggattagctccatccttaagaaaattgagaagagggggaggtgtggtcatgccggcggctggggagacggtgcgggaggcggcggcgctgtgccggctggcgtgcccgatcgcgctgacggcgctgatgctctactcgcggtcggcgctgtcgatgctgttcctcggctccctcggcgacctcccgctggcggcgggctcgctcgccgtcgcgttcgccaacattaccggctactcggggctctccggcttgtcgctcggcatggacccgttttgtttccaggcgttcggcgcgcggcagccgcgcctgcttgggctcaccctctaccggtccgtccttttactcctctggtgctccctcccgctcttcgcgctctggctcaacatggccaagatactccttttcctcggtcaggaccgcgacatttccttccatggcgcaggaatatctctcttttttttcctccccgtactcttttttttttttcctggtacatccgtttctaggcgtgttaacgtgcacacccttcgcgcaccctgtttgtttctttcccgtc

SEQ ID NO: 32286 - DNA, 1521 bp, Oryza sativa
  Clone ID: PAT_MRT4530_3650C.1
atgaatgctgaatccaagttgctctctctgaggcagaaaattgaagatagtggttgccaggcagtttggtctttagatcctggtttcgatgatcttgccaagtgcatttctttcaaattgaaagtgcttaggaaaaagctccttgcttggagtaagaatctgtcaaagttgatgggattgctaaaaaactgcaacaaagtggtggactttctggatttagtcgaagaaaacagaatgctatcagtctatgagtggaatttcagagaaacagttaagcatatgggttttcctccaaaatggattgagtgggtacagatggttttctctactgcttcttctgctgtgttattgaatggggtgccagggaattctttcaaatgcagaagaggagtcagacaaggggatcctctctcacctctgctttttgtgttgggggcagagctgttgcaaagaataatcaacaaagcttttcatcaaggccttctgtcaaaaccaattgatgaaagcagtggggatggtttcccaatcattcagtatgctgatgacaccttgatattgttaaaagcatctcagaaagaagtcttctatttcaaggctattttgaatatgtttgctcaatccacaggcctcaaggtaaactataataaatcaactctgtacccacttaatatgcctcaggacaaagttgtcttactatctagcattttgggatgtaagatcggttctcttccattcacttatttggggttacctttgggaaccaccaggcctagagtggtagactttgctccgttggtagacagggttgaaaggaggctgacatcaagctccatttgtttacctcaaggaggaagattaactttgatcaactcagtcttgtcttctatcccaacctactacatgtcctcagtgcagctaccagttacagtcatcaaggccattgacacagctcgtaagaattgtttgtggagagggaataaccattcttctacaaggaaatctctagctttctgggatagggtttgcatgcctaaggagaaaggaggcttaggagtgatcaatctgagagttcaaaacacagcccttcttctaaagcatatggtcaagttctataatggtgctgatttaccatgggtgaaattaatctcacaatcatattatgattctaaagttccacacttgatgatgaataagggttcattttggtggagggacatcacatctcttgcagacatatttagggggatagcaaaatgcgaaatcaggacaggaagaacttcccttttctggaatgatctatggaatgatgattttaagtgcactagctaccccaatctctttgctgtgactatgtataagtctgactcagtaaaggccatgtgttcaagacccctagaagactcatttgcccttcccctatcagatgaggcttattcggaattcttgcatcttcaggagggacagtttgactttacaatcagggatgggggatgcttggaattttatctggggctcagataa

SEQ ID NO: 32287 - DNA, 2031 bp, Oryza sativa
  Clone ID: PAT_MRT4530_36510C.1
cccccggcccttcgtttctctccctcgattcacggcaacctctcggagcgtggtcgcagcaacggccgcggcgttggtggcaatggaacgcccaatctccatgcttcttcttgctgtcgaacaccagatcgcaggagacaagaatcagtgagcatgcatcatgtcgtccaacatgttcggcaagaaagggtgggactcgaatgggatggatacatctggttctgtctgcagaagttcttcagatatcaattacattaatcaacgggcaagattgaagagtgcgagcctaaactgtgtgggttcgccgccaaggaagaacaacaatgctacacagtaccggatgtttgttgccacatggaatgtgggaggaagaactcctaataaacgacttaaccttcaagactttctgcaggttgaagaatctcctgacatctacgtcttagggtttcaggagattgtccccctgaccgccggcaatgtgctcgtcctcgaagacaacgagccggcggcgaggtggctggcgctgatccaccaggcgctgaacatgccccaagaaccggccgacggcgacgagccatcgcctttgacgccgccgccgtcgtcgtcgacgacgacgtcggagtcgtcgaacggcgcccggacccggcggcgcgacgccgtgtcgaggtcagccagcggcaacctcttcttccacacgccgtcgctcaagatgctcagcaacagctaccgcgtcgacagcgcgctagtcaagacgtgcaactgctcgccggagcactcctccgtgcgccgccgtgccgcggaggtgcgcgagtccgtgtacctcgccgacgcacccgcgccagccggcgagacggcggcgccagctgccgacgaagacgacgcgccgacgacggaggcgcagtgcgaggcaggatgcggcggcggcggcggcatgagctactgcctgatcgcgagcaagcagatggtggggctcttcctgtcggtgtgggtgaggaaggagctcgtcgagcacgtcggccatctccgggtggactgcgtcgggcgcggcatcatggggtggctcggcaacaagggctgcatcgccatcagcatgacgctgcaccacaccagcctctgcttcgtctgcagccacctcgcctccggcgagaaggaaggcgacgagctgcggcgcaacgccgacgtcgccgagatcctcaagagcgcgcacttcccgcgcgcctgccgcccggcgcccgccgccgcccgccgcgtccccgagaggattcttgaccacgaccgaatgatctggctcggcgatctgaactaccgcatgtcgttaagctacgacgagacaagaacactactggaggacaacgactgggacgctctactggagaaagatcagctgttgatcgagagagaagcggggagagtgttcagaggctggaacgaaggaaagatctgcttcgcgccgacgtacaagtacacgcacaactccgacgcgtacgccggcgagacggccaagtccaagaagaagcggaggacgcccgcatggtgcgaccggatactgtggcagggagacggcatcgagcagcttcagtacctgcgcggagagtcgaggttctccgaccaccggccggtctgcggcgtgttcgccgtcgaggtggacggcggcgatggcgacggcggcggcgccgccggcaagatcatgaagggttactactccctcaacgcccggatcggcggtgacagatcgcagtgtcaccagggtgacgtgtcgtgaactgattatatatttcatccccttttgcaagtttgcaatgatagggtcttgtgtataagaaggtttattaccaagaacagaggatattgtagatactagtatctgacaagaatcccatgactgaaattagtacgagtactgactaattaagaatacagtaattttcgtaatttgtagaacctgtctagctgtatggttatttttgtccacttatatgaaccccttgggcagagaaagttgtctcgtatatatgtatagacaaattatgt

SEQ ID NO: 32288 - DNA, 682 bp, Oryza sativa
  Clone ID: PAT_MRT4530_36511C.1
aactttgatgctaacaggtacaagaatatgctgcttctttggatctgggtcaaaatttccccgttactccctctaccgccatagatattggttctaccggccaaattttatctacccactactctttcataactaaatttatgtgtttgcccatgattatggattaaaaggacaagagattcagttcaccacttgtgaagcatataatgattcaaaggtgtcagcaaaatttttggattatttggttaaccatcatagtcaataccgaaagtaagattacagcaattgtttttattctgagctttatcctcagattttatttggggggtttgcgattgttgtagaaattccattatcgctatgagaatccattttaaatactagacgcatattgtcatcgatctctctattgtctttttagcattcttcctataactagctaatcgattagtttcttatgttttgattttgaggccatatactcttgtaatattgtaagacgtttggatttgtgctgcgtcaaacttcttcaacttaatttcatcacattcatcatggaatgtatattgagaatatatttattttttgttggaaatgttgctatgtttttctataaacttcttgaagcagtttttggcttagtacagaccaaaaacatcttattgtatgcatccgggggagt

SEQ ID NO: 32289 - DNA, 440 bp, Oryza sativa
  Clone ID: PAT_MRT4530_36512C.1
attgggggcttttccaacacgggggggggtacatatattatttgtttccaagaaaaaacaaaagacaaaacggccccacagtgttgaataaagatccttgacaaaatccgactgaaaaaagaaactacaggcccccccctaaatgtcattcggtgggcagaaaacttgaaaagcccaatgtccctggccttgaaatatggggggggcttgaatcctttgaagccaactaaacaacttcctctaacctcattgaatttgcccctgaaatttcaccatgaaagccttcggcatcttgctgaactcaggcttgtgctcacccttgacagtgaccaagcagaccacccatgcgggttaaaagcgaacaattggtccaaacaggcttaaccttttaaaatgcattatgggacctccatcttcctgcacagggctggaagccacac

SEQ ID NO: 32290 - DNA, 335 bp, Oryza sativa
  Clone ID: PAT_MRT4530_36513C.1
ggataatcgttatgaagataatggaaacaccctgaattatttcaacaaaaagaagcctcatcccaagtatgagccgttcgagcaggcgatcccaaggcccagctgccccctccacacccccaagaccctaggaggtcccccccacctccccctagccgtcatttggtaccctggggcgcccacctccccctctggtcgacctcccccatgcctgccctactgcagacctgggaagaagaagaagggaaggagaagaaagggagagaaggaagcggacggaatcgaggtgaagaaggaaatgaggggtttgattgccgcttcccaaggaggcctag

SEQ ID NO: 32291 - DNA, 1605 bp, Oryza sativa
  Clone ID: PAT_MRT4530_36514C.1
atggcgcgcgccctgcggtggccggacctcgtcgggctcggcctcggcggcatggtgggcgccggggtgttcgtcaccacggggcgcgccacgcgcctctacgcgggcccggccgtcgtcgtgtcgtacgccattgccggcctctgcgcgctcctctccgccttctgctacaccgagttcgccgtcgacatgcccgtcgccggcggcgccttcagctacctccgcgtcaccttcggggagttagcggcgttcttgacaggggcgaacctgatcatggagtacgtcttctccaacgccgccgtggcgaggagcttcacggcgtacctcggcacagcggtgggcgtcgacgcgccgagcaagtggcggatcgccgtgccaggcctccccaagggcttcaacgaggttgacctcgtcgccgtcggcgtcatcctcctcatcaccgtctgcatctgctacagcacgaaggagagctcgtcggtgaacatggtgctgacggcagtgcacgtgttgttcatcatgttcgtcattgtgatgggattctggcgcggtgacacccggaatctgacgcgccccgccgacccggagcacaaccccggcgggttcttcccgcacggcgctgccggggtgttcaacggcgccgccatggtgtacctgagctacatcgggtacgacgcggtgtccaccatggccgaggaggtggagcggccgtcacgcgacatccccatcggcgtctccggctccgtcgtgctcgtcacactgctctactgcctcatggccgcttccatgtccatgcttcttccctacgacgcgattgacacggaggcgccgttctctggggcgttcaaggggagctctgggtggggatgggtgtccaacgtgatcggcgccggcgctagccttggcatcctaacgtcgctgatggtagcgatgctgggacaagctaggtatctctgcgtcatcggccgatccggtgtcatgccggcctggctcgccagggtgaaccctcgcactgccacccccgtcaatgcctccgccttcctcggggtgttcacggcggcgctggcgctgttcacggagctcgacatcctcctcaacctcgtctgcatcggcacgctcttcgtcttctacatggtggccaacgccgtcgtctaccgccgctacgtcgccgccgccgaggacgacgaggaggggcggcggcgcggggcggtgccgacgctggcgttcctgctggccttctccctggtggcgctctgcttcacgctggacggggctgctggtggcgtgcggcgcggcggccgccccgccgtcgcggcgttccgggcgctggtgccgcaggcgcggcggccggagctgtggggcgtcccggccatgccgtgggtgcccgcggcgtcggtgttcctcaacgtcttcctcctcggctcgctcgaccgcccctcctacgtccgcttcggcttcttcaccgccgccgccgcgctcgtctacgtgctctacagcgtgcacgccagctacgacgccgacgaggccgccgccgcgctcgacggtgccaaggtgctcgacgagggctgcaaggagtggatgggagagggagaagagcggacacagtga

SEQ ID NO: 32292 - DNA, 184 bp, Oryza sativa
  Clone ID: PAT_MRT4530_36515C.1
acctcccaagaacccttgaaggatcacctaggatagaatcccccccaaccacctccttcccctgctaagtgctataagggatggcacccaacgtgaagggatactttccatggtccctgcttgataacttcgagtggtcgacacggcaacaccaagttcgatttgggaataaacttcgtagata

SEQ ID NO: 32293 - DNA, 1626 bp, Oryza sativa
  Clone ID: PAT_MRT4530_36516C.1
atggcgcggaggctgcggtggcacgacctcgtcgggctcgggctcggcggcatggtgggcgccggggtgttcgtcaccacggggcgcgccacgcgcctctacgccgggcccggcgtcgtcgtgtcgtacgccattgccggcctctgcgcgctcctctccgccttctgctacaccgagttcgccgtcgacatgcccgtcgccggcggcgccttcagctacctccgcgtcaccttcggggagttggcggcgttcttgaccggggcgaacctgatcatggagtatgtcttctccaacgccgccgtggcgaggagcttcacggcgtacctcggcacggcggtgggcgtcgacgcgccgagcaagtggcggattgccgtgccgggcctccccaagggcttcaacgaggttgaccttatcgctgtcggcgtcatcctcctcatctccgtctgcatctgctacagcaccaaggagagctcggtggtgaacatggtgctaacggcggtgcacgtggcgttcatcctgttcatcatagtgatggggttctggcgcggcgacacccggaacctgacgcggcccgtcgacctggcgcacaacccgggcgggttctttcctcacggcgcagccggcgtgttcaacggagccgccatggtgtacctgagctacatcgggtacgacgccgtgtccaccatggccgaggaggtggagcggccgtcacgcgacattcccgtcggcgtctccggctccgtcgtgctcgtcacactcctctactgcctcatggccgcctccatgtccatgctcctcccctacgacgcgatagacacggaggcgccattctcaggggcgttcaaggggagctccggatgggggtgggtgtcgaacgtgatcggcgccggcgccagcctcggcatcctgacgtcactcatggtggcgatgctaggtcaggccaggtacctctgcgtcatcggccgctccggcgtcatgccagcgtggctcgccaaggtgcacccctgcaccgccacccccgtcaacgcctccgccttcctcggtgtgttcacggcggcgctggcgctgttcacggagctcgacgtgctgctcaacctcgtctccatcggcacgctcttcgtcttctacatggtcgccaacgccgtcgtctaccgccgctacgtcgccgccgacgacgacgacgccgaccaccgccgcgcgtggccgacgctcgtgttcctcgccgccttctcgctcgtggcgctctgcttcacgctgctgtggcagttcgcgccggcggggcgcgccaggacggggctcctcgcggcgtgcggcgcggccgccgtggcgacggtcggcgcgttccgggcgctggtggcggaggcgcggcggccggagctgtggggcgtcccggccatgccgtgggtgcccgcggcgtcggtgttcctcaacgtcttcctcctcggctccctcgaccgcccctcctacgtccgcttcggcttcttcaccgccgccgccgtgctcgtctacgtgctctacagcgtgcacgccagctacgacgccgaggagggcggtggcgccggcgccggcgccgccgcgctcgacggcgccaaggtgcaggacgaggctgcagacttcaaggtgtag

SEQ ID NO: 32294 - DNA, 1623 bp, Oryza sativa
  Clone ID: PAT_MRT4530_36517C.1
atggcgcgcgccctgcggtggccggacctcgtcgggctcggcctcggcggcatggtgggcgccggggtgttcgtcaccacggggcgcgccacgcgcctctacgcgggcccggccgtcgtcgtgtcgtacgccattgccggcctctgcgcgctcctctccgccttctgctacaccgagttcgccgtcgacatgcccgtcgccggcggcgccttcagctacctccgcgtcaccttcggggagttagcggcgttcttgacaggggcgaacctgatcatggagtacgtcttctccaacgccgccgtggcgaggagcttcacggcgtacctcggcacagcggtgggcgtcgacgcgccgagcaagtggcggatcgccgtgccaggcctccccaagggcttcaacgaggttgacctcgtcgccgtcggcgtcatcctcctcatcaccgtctgcatctgctacagcacgaaggagagctcgtcggtgaacatggtgctgacggcagtgcacgtgttgttcatcatgttcgtcattgtgatgggattctggcgcggtgacacccggaatctgacgcgccccgccgacccggagcacaaccccggcgggttcttcccgcacggcgctgccggggtgttcaacggcgccgccatggtgtacctgagctacatcgggtacgacgcggtgtccaccatggccgaggaggtggagcggccgtcacgcgacatccccatcggcgtctccggctccgtcgtgctcgtcacactgctctactgcctcatggccgcttccatgtccatgcttcttccctacgacgcgattgacacggaggcgccgttctctggggcgttcaaggggagctctgggtggggatgggtgtccaacgtgatcggcgccggcgctagccttggcatcctaacgtcgctgatggtagcgatgctgggacaagctaggtatctctgcgtcatcggccgatccggtgtcatgccggcctggctcgccagggtgaaccctcgcactgccacccccgtcaatgcctccgccttcctcggggtgttcacggcggcgctggcgctgttcacggagctcgacatcctcctcaacctcgtctgcatcggcacgctcttcgtcttctacatggtggccaacgccgtcgtctaccgccgctacgtcgccgccgccgaggacgacgaggaggggcggcggcgcggggcggtgccgacgctggcgttcctgctggccttctccctggtggcgctctgcttcacgctggtgtggaagctggcgccgcgcggcggggccaggacggggctgctggtggcgtgcggcgcggcggccgccgccgccgtcgcggcgttccgggcgctggtgccgcaggcgcggcggccggagctgtggggcgtcccggccatgccgtgggtgcccgcggcgtcggtgttcctcaacgtcttcctcctcggctcgctcgaccgcccctcctacgtccgcttcggcttcttcaccgccgccgccgcgctcgtctacgtgctctacagcgtgcacgccagctacgacgccgacgaggccgccgccgcgctcgacggtgccaaggtgctcgacgagggctgcaagctttttttcaggctaaagtag

SEQ ID NO: 32295 - DNA, 150 bp, Oryza sativa
  Clone ID: PAT_MRT4530_36518C.1
atggctctgacccgttgggtgcgtgttgcgagggatggagcttgtgattaccgtggaagtggaggagatgctggcgcctggcggagccggtccacaaacctgtacttctcaacctgggattcagaaaaccggttgctaaatacggagtaa

SEQ ID NO: 32296 - DNA, 258 bp, Oryza sativa
  Clone ID: PAT_MRT4530_36519C.1
atggaggggaggacgctacctagcagggaagtcggaagctgtggcggcaaagagggccttggagagttgtgcatggatgagagacgacgtggtgaggagctggaggaggttcgctttgatggtgatgtagttgaagggcgagaggttgatggcgttgtcaccaggagaaggcaactagggtttggtggaacaaaggagatcaagagaggtgctggagctcccgcaagagagggaggtgagactaagagaagggagtag

SEQ ID NO: 32297 - DNA, 1910 bp, Oryza sativa
  unsure (1)..(1910): unsure at all n locations
  Clone ID: PAT_MRT4530_3651C.1
tacaaacagcaggtcctagtgatgccaaaacaatcatgacttaagccaatatgcgtttctttngtttatatcgattttatattttttccaaaccgtatggttccaaccctggaggatgtttgcgctgcaatcagatgttcgttttccagtatactttgctccttgttcaacacaaagattatatatgctttcctacagagaagtaaaaaagatgtaacatcacatctttcaagtcttcctgggacttgactaactcttcgagctaagatgctacaggattcatttgccattctgttactaatcctcaagaaaaaaaaaaagaacatgtaccgtacaggaaaaatttgaagattgaatccaacaaaacttagtcaatgtggttagactgactgtgtcggaatcctttcctcaaatactctgtccctagccttttcagccatctttctccagtttgtcattgcagtaatgatagatagaagagtgacctgtgtcgctccaccagctaccatgcccatccaaaaacccattcctcctagatgcattgcaaacccaaaaaagagagcaacaggaactccgacaagatagaatgcacctaggttaacataggcccctagatgctgccatccacagcccctggaaacacctgagaggacaccctgaaggctgtctgtaataactgagatggaaagaacaggtaccattcttgttacataatttatgacttcttcctcattgctgaaagcaattccgatgaaatgacgcaacgctagaagtgttacactcactaggactgctgaacaaagtataacagataaagcaacccctactaccaagcgggcaccttctggattccctgcacctagttcatttgagacacggacacttgcagctgttccaataccatgagggagattgtacaccaacacaacagtagaaatgcaaatcatgagggccgatggtacagccaacctcaagaaacttccaatcccactaaatgcttcccatgtgagtggagcacgagttttttcacaagaaggtgagagaacaatgtaaagaccaagaacagtcacttcgacccaatcacagatactgactgataaagcagctccagcattacccatcccaactttataaaccatgaaccaacacaaaggaatgaagagtgctagtgttattgatgagcttagaaccataggaaatattaggctttgagtctggaggaactttgataagcattgagcaacagtgaaggcaaataaaccagggattagccacaatgcatacttcccaacttcacttgctatttctggttgctgacctatgagaggaagtacctctgggatgaaaacccatatgatggcgattggtacactcacaacaagaagcacaattatggaccagcggtgcaaaaccacatggcggattgtcgtgcggggcatttccacaagcacctcgctggcggctgcgcgagatgccaaccaccacacggccacagccacagggcacgaagtgaatcccattctatccctagaaggcgtggtctcacgcacagaagggtaaaaaaagatgatcgaagggaaaagggcactcacgaggacgctgaagccggagacgttggtgagggagttggcgatagcggcgccggcgagcgcgacctcgccgaggtgccccaccatgacggtggagatgagctgcatcatcagctgcagcagcgcgaccgcgatcatcggcgcggccagcgacgccagcctcccggcctccgcagtcgcctcccgccaccaccctccttccccatcgccgccgcagcagccccgcaccttccccgccgccgcgtattcctcctcctcctcctccttgcggtggctccccctcgggagcagcagcggcgcctgggagtcggaggagcccat

SEQ ID NO: 32298 - DNA, 274 bp, Oryza sativa
  Clone ID: PAT_MRT4530_36520C.1
gattcaatcatccaggcattttgttgtattacacacagaataccagtatagctttaagaaaaatagagcacctttacaacctagttaactttacaaacagcaatttttgaaaactatagctgacatttcaaaagcaccaaatgcgcctcatagtcactgaaagaatgatggcagagcttgttgaggtataggcagtaatggaagagggacataggctgttgatgtgaccattgtgtcttaaagattatatagaatttagaacaagaagaaagca

SEQ ID NO: 32299 - DNA, 456 bp, Oryza sativa
  Clone ID: PAT_MRT4530_36521C.1
gtgttttttttttttttttttttttttttttttttttttttttttattttttttttttttttttttttttttttttaaataatcaatattgggttggaacacaatctcggggcaggcaaaaaaaaaacggggggaacccactagctatgggggagggcgggtaagcctagtactgggcggggggaaaaaagctgcactgggggggctcaacccggcaaaaagacgggaggggggcccggtactggctcgccctgggaagcctaacgcggggaaaccccgggtggtggtggtgctcgccgaaaaagcccttcttcgacgaccccttggcggagtacccctggtccgacgaagaccccttgccgggggagtactccgacgacgacaaaaaccaagcttggtccaggggcatcgggatgctctcatcggaggcccccaccatccggggggggggggggc

SEQ ID NO: 32300 - DNA, 258 bp, Oryza sativa
  Clone ID: PAT_MRT4530_36522C.1
atggccattgtcgggcacgacatcgcggtgtgcacatattgcggcacgggcctcgccatgccactgctggccgccaggggcgaggttgccgacgaggtacaccatgctggcggctcactgatgttccagtcctccggccacggcaagcagaagctggaactgagcggcgacgtggtggacggcctcgacgaggcgatctgcccggtggcgacgtcgagcagaacggcaggatcatcaaccacgagatcaacgagctag

SEQ ID NO: 32301 - DNA, 520 bp, Oryza sativa
  Clone ID: PAT_MRT4530_36523C.1
ccacgcgtccgggcatttcgtccccttccccacgatagagacgcggagcgtgtgccccccctctcgatcttgccgccgctcgtaatccccgcctgatgccggagaacctgcatttttttttgagccattccaggcttacgttctaatgcgacgctgctagcgatagaaaacccagtggggggtctgtgagaatcatggcttgatctccgatctatcctgttaaccattcctgtgaggttaggaggtttctggtttaggggcctgagtgaggaggagggtactcaaacggctggacctgcaatcgatctgctaacttggctaactttgataaaagtgtcccttccaacattgccatttggagctctatgggttggttgaccaaattttttagaggttcaacccacaaaatctcggaagggcaataccacagcaaacccgcggaggagacgatttggaatggaccctctaattccgcagttgtgacggatgtcccgtcagaatttggcaatgaagatatcgc

SEQ ID NO: 32302 - DNA, 426 bp, Oryza sativa
  Clone ID: PAT_MRT4530_36524C.1
atggcggctgggctagggccgcgcctcgccatgcagcagcagtcgacagtcttcgtgccgcctccaccgtcgcagcagggttcggcttcaacgggtccgggaatgaagcggcgctggcgccacgggagatggggatggtggcgaggccgcgtcagccgtgcagtagcagccaactctcgcgccgacgccggcaccgccgttgctgcagcaaaatctggagtggcgacggtgtccccttcgccacgggggatgacgatggtggtggcgccgtcgaaggcgtcgcgcggccaagcaagaggagctcaggagggcatggcggctagagatccagagctccgaatcggccatgacgggcggctagaggacgagttgcggcagcagggcggcaacggcagcctgatgtggtcgcagcagcagagacggtaa

SEQ ID NO: 32303 - DNA, 692 bp, Oryza sativa
  unsure (1)..(692): unsure at all n locations
  Clone ID: PAT_MRT4530_36525C.1
cctcttttaatgccntgttaatccaacggaggtggggtccaatttaggttctactgccttctggtctcattgcctggatgaagtattctgacaatatagcaagggtgtactcacntgcacatgccatgctgttnaacaatggggtattgtctgggaagatcctgttccaaggtgagacacaccttgcagcgtttgcctaggcatgngtgcatnctgcataatgtcccncagatggtatttttatgcctggtgaaacatggctgtgttgaatttgcccacaagcacattgccagtnacttcaaaagtagggtacatgccagtggatgcccacctggtttgttttaaacctgtttggatgcacgtgtggacggtctttctgatttaacagaaaagtaagttgatgattgtatagctgcagcttttgtggagtaaatccccatgggaatccgggagctgcaancgcccacacnatatgttgtaccagtgtcattttcagaataaccgtgaaagaagagtggaccaaaccatggggtttactggcttacacttttgcccaatttttttgccaaaagtgaaacatcctgaaaagaatccagaacctaacatcttatacttaatggttatcactgtatctaatttcgacatcagggnacaaactggtgagtgatcatgaaaaaaaaaaaaaaaaaaaa

SEQ ID NO: 32304 - DNA, 538 bp, Oryza sativa
  Clone ID: PAT_MRT4530_36526C.1
cccgggctggagggaggaggcccactccctcgctgctccgaagtgtcccgcacttctcgtcttcctcctcgccgtcgtcttccacaaccaccaccgcgccgccgcctaccaatccatccagaccttctcctcccccgccgatgcacacaaatcgccggtgacgtcacgccggtgaagcagcagcactaggagaaggaggagcatatggcctgtgtactccgcctcgcctcccgctcccgctcccgctccggcctccggcccaccctcgccgccccgcggccgtctccggttccgcctccgccgccgcgggtgggacccacacccgtcgccccctcgccggcgcctctccgcggtctcctcctccccctatccccgctccgcctcgcttcccctgatgccttctcatcgtcgtcgccgtcgcccgcgtggctcctcgacggcctaaattggcggcgggcgggggtcgggaggaggtggttcgcgaccgaggcgtccgcggcgtcgacggcggctgagctggtggacgtgcccctggcgc

SEQ ID NO: 32305 - DNA, 108 bp, Oryza sativa
  Clone ID: PAT_MRT4530_36527C.1
atggcaataattaccgcgcgtgaggctctcctggatgcatgtggcgcagtggcgtactggagttgggggaaccaagtctgtgaggacgaccacaaggctcttgtatga

SEQ ID NO: 32306 - DNA, 1734 bp, Oryza sativa
  Clone ID: PAT_MRT4530_36528C.1
ttttttttttcttttggggaacaattccctgctttattccaggggggtagaattattttacacagtggtgccattgcactggtcagctcactacattcatataaatatttacttgacagattctttgtccagcaaaaagatttcataggcttacagtacgaaatctccatgcgatcatgccagattgcctgtgttttcaggctttcagagcacctgtgcaaatggtctgccctcgcctgcatcagatatccaattggatcatcgcatatgcagcaatagccgttctggcttctccacaaggcttttccactcattacagaaccttgcaacggtggcgccgtcaacaactcggtgatcagctccaacagtcacattgattattgaggaaggataaacattttcatcatcatcaaagcgaggaagtttttgaatgcgtccgagtgcaataatggcaacttcaggcaagttgagaagcggagagccaaacttgccaccaatggcgcctatgttgcttagtgttatggttccaccagcaatatcttctgtgctcagcctgttgtgcgatgccatctcatgtagacgtgacaattcttttgtgatctccaatattgaaagcgattgaacattcttgatgtttggaaccactaatccatgttctgtagccatagctaccccaatgttatgggatcctttgaaaataacttcattggtttcctcaacaaaacaactgttcaacaaagggtatttactcagtgccttagaaagagactttatgaggaatggtaggaaggtgtgcttgatagtatgatctttattcgcattttgaaaggatgccttaagttccacaagagcatcacagtttatttcctccagataatgaaaatgtggtacttttgcagccagggtcattgatttgaccattgacctctggtagcccctgagagaaattcttctatcttcataagagttagcatcgggtaatgatccccttccctccagtaactccacttgatcaatgttctcttccaaagctgatgtcggttctttgcaaagacccttgctggcagcataactcagaacatcttctttcaaaactctaccatcttttcctgttccctgaatatcacttatgttgagcccatactgctttgctagatgcctaactgctggtgtggagagtgtgccactaggaacactgccttcaccagaaggatttgcagcatccactccatgtaaattgtaaaagaatgccacagcaaccttcacaatgtcaccaggaccaaagtgaatctgatgtacttttcctttgaaacgacttgttatttcgatagttgccttgtcactctgtacttcacagagcctctggaattcatctacttgatcaccctcagtgacgaaccagcgcagcagctcgcactcggcgatgccttccccggtctgcgccaggggcacgtccaccagctcagccgccgtcgacgccgcggacgcctcggtcgcgaaccacctcctcccgatccccgcccgccgccactgcaccgtgtgaaaaaaatccaaatccgccatcgacgacgatgagaaggcatcaggggaagcgaggcggagcggggatagggggaggaggagaccgcggagaggcgccggcgaggggcggcgggggtgggtcccacccgcggcggcggaggcggaaccggagacggccgcggggcggcgagggtgggccgagccacctcgtgc

SEQ ID NO: 32307 - DNA, 516 bp, Oryza sativa
  Clone ID: PAT_MRT4530_36529C.1
atggcctcccacatccacgccgcggcggcgggggacctccccctcaccgggatgcacgacctccgcctgcgcccgcggcttctccgccgggtgctcgccgagtgcctcccgctcccggatccggccgcggacctccagcccacgcgcagccccgccgacctcgcccgcgcgctctccgccgtccgcgagcagggactcctcgccgtcgagggcgcggcggacccggggctgctcgaggagtggagcgccgccgtggacgcctgggtcgaccgcctcgtcgcgctcctcgcgagcgacagggtgcatgttgattgtgaagagctgagtgttctccgtatcaagctgcttagtcttttcttcaagcttcatggtgttcttcagcatggtgccctggattccagttgttgggtgggcacttcttttcttggtttgacatttgaagagtgcagtgaggaccgctttgcaaactcatactctttctggtttgagaagattatgaaaaaaattaagttctaa

SEQ ID NO: 32308 - DNA, 757 bp, Oryza sativa
  Clone ID: PAT_MRT4530_3652C.1
gctcggtttgcatcctcgctgccaatggtaccatctcaaatgttgtattgaaccagcctggctcgtctggtagcaccttctcctacgagggctgctttgagattcttcaactgactggctcctttacaattgcggaggaaggcgttcggaggagaaccggcgggctcagtgtctcgcttgccggccctgatggccgtgttgtcggcggtgtagtagctgggatgctgcgagccgccagccctattcaggtgattgtggggagcttcttgcccaacaacctgaagcagcatcagagaagaatgggcctacatccacaaccatctgctgctccggcatttccagcaccgatggctcctcttcatcctcctcctgtgctcacagctgcgatgcccatttctcaggcagctcctggcaacaatggctgccgttcgccgcaggtttcgatctcatccatgcctccacaagcacatgcccggtgtggagcagagtagaggcgccatgaacctgaattcatcgagctccagtactggtttcgccatggttgggtggcctgcagctgcaagctcgcagtccatggtgcacaggccttcacctgacatcaatgtctgcttgactcctcaagagtaggatcaatttgtcctatttttttgttgccctcgtgcctgacatgcgttgttgtggcatggctgtcacgtgacatgtgtttgggttcaattctatctaatcacgtgtcttgagtaaaaaaaaaaaaaaaaaa

SEQ ID NO: 32309 - DNA, 876 bp, Oryza sativa
  unsure (1)..(876): unsure at all n locations
  Clone ID: PAT_MRT4530_36530C.1
gggacacgacccaaccacggggcgcctcgcccccccccaactaacaagtttagtacactccaaccagaccgcctccgggcccacgacgatnatggatggattggngagncactnacccgcttggancctcgcccngacgaccctccgacacacacaccagcacnncccgnacagactcgttatattccatcgagcatgccaccgccttgaccttggcacacttagacntaaccctagntccacccgaaccccacccttggctgggggcccaccaaccaagcccttgncccccctngaacagattgagcgccatgagcccaggtgggctcccccccgccgggcccctaaacgttgacacagtcacccgatcaaagccctgcacgcagagaccaacgcgaangcatccaaacccacaanaccttggaagncctttgggtncacaccttacaaagccctcgacccagatttagaggcccccggggggtttttggggcataggcttgccttttcggcccgttttcctcgccacagcaccgcgcggacccccacctcccactagacagnggccccacagcctatgggggggacagggcaacgcccccccaaacccgccattcaaagcccaaggacccaacgacaaacaacctatgacatgggatatctctggcgggccttggacacccaaagagcctcattcgacattanaacagccctagctgaactaatggtagcaatgctgccncacggaaggaggccttaaagggcctccatttccccccaaacttccccttggggcaaagggcccccctgggataaacccatggccgccccagggacacgggaagcccacctaaaaaaccgttctcagagcataga

SEQ ID NO: 32310 - DNA, 542 bp, Oryza sativa
  Clone ID: PAT_MRT4530_36531C.1
cgggctgcaggaatcggcacgaggtgccaatatcacgtcgcctttgcagctgctcgtttgtttatgtaaggatgttttttgcagtatttcttttaatccgtttagatctttccctgtcaggtttatggttttgtactcgtttattatgagttcaacaatgtgatagagaccttctttttctggttttcagaggaactgatgctagatgtttatgaactgttttctatccaggtactgttagtacgtaggagtaaattaagaaactgttgctgttacgcatgtgctcatccttctctgatttgttaatttgatactccctcttgtcagataagttagttcttgatttcatgctactagcaaactgcagcctctcagactaagttctgttgacatgattcattttaaagcttgtcgatccgtcattagttattcagattttacagtcgcataatttttctagtgtttacatgcatggtgtggctgaaaagaagtgtagttcagtaatatctgattacattcttcaggtatatctgatgtgatat

SEQ ID NO: 32311 - DNA, 333 bp, Oryza sativa
  Clone ID: PAT_MRT4530_36532C.1
ggttgctaacaacaccgtgcgggttctattataaaactggacacacacatactcacatattacatatggccacatcacgtagtctaatactatcaacttcctatattttaaaactacacacatatgtaatccactaacacatactaactcagtatcacactctcacaaactcacaccaactctaaatccaaggttccaaaatactactatataacatgcaagagatcctacgaaattgaaacaccggatacttattatttttacttcctatcaaacttatcaatctctctgacactaggaaagttaactatacccctatgcccacaaacacct

SEQ ID NO: 32312 - DNA, 121 bp, Oryza sativa
  Clone ID: PAT_MRT4530_36533C.1
ctctctccctactgcacctttcgcctgccaggtagtgggctagggttacgcactcccagtgtgcctgactcctgcggaacaggaaccctaacgctaacctggcctagtgctgccaccatgg

SEQ ID NO: 32313 - DNA, 901 bp, Oryza sativa
  Clone ID: PAT_MRT4530_36534C.1
atggatttgggtaaatccactatcgacaccaccgggatgaagaagctgcaggtggagggctcgatccctggacgccaaaacctggagcgctcagaaggaggtactgaaccccaacccgccctagggcaagtcgtagttttagaagatttcgtccgttgtggttttttgcctcctccttccgaattcctcctcttgatcttgaacttttatggcctcagccttctacacttgaatcctagctccattgccttcttgagcatttttgcttatctttgcgaggcctacatcggtgtagtgcctttccttgatctttttcgttattattacgaactctgatggatggagccccatagaatctcaggatgctgtgggttccgcgtccgagatgggatgaaggcggaatatatccccttcaactgcccttcttctcagagcagctagaggtcaaagtggttctaccttcatgtagacgagctcgatcctgttctcgttgtcctagaagatcagcctgagcggtcttctgactagacttcaaaaccatccttgattccatccctccaggcttttttagacatagttagcgacctctgaaaacaagggttggccgggtatgaagttgctgtagactttatacgccgtcgtattcaaccgctctaagctcgtgctcaccctgtgtacgagtacatgggggatgaagacgtgacgcgcgtttctcagtggggtttgaatgacgacatcgtgaaggcaagggtcgggcaagtcctgataagccctccctcaggttccacgcagctgccaacccccgtctgcgacctccccgtcgccgacaaagatgcagccatcaatgtaagtatcttctgcatgtctaaagtgatatcggttgctactttttgttaggtgg

SEQ ID NO: 32314 - DNA, 445 bp, Oryza sativa
  Clone ID: PAT_MRT4530_36535C.1
atggttacggataaggtatatctcctatcctacgatttatggaatatatggatacgagtccatagtcaccgagttttacttggagactaaggtgattcatgttataaaagacacaccccttaaggggtccagatcatcgaatcatagcaccaacaccaccaccatagcctacaatccggaggacgtgaagcctactcgctagaagatctcgtcgaaaccatctcgacaaggatctcgctgatcctcgtaccaacataccctataccctattcttccagtgtgctagtatcccccgtcgacacggagacaagaaatatactggttcagcgctaggagaaggccacagtaccagtagtggcttaggtggcaaagttggtccctgcaggctgtagcagcctggtgacccttgtaccaacaccagattgagaagaaaaggcatggagat

SEQ ID NO: 32315 - DNA, 497 bp, Oryza sativa
  Clone ID: PAT_MRT4530_36536C.1
tcttaaagacaagattgctttcctagagcttctgtaactgaggattctgaatacaagcaaagatggcccgtacaaagcagaccgcccgtaagagtactggaggcaaggccccaaggaagcagctggccacgaaggctgctcgtaaatcggctcccacgactggtggagtcaagaagccccacagataccgcccaggaactgttgcccttcgtgagatcaggaagtatcagaagtcgactgagctgctcatccgcaagcttcctttccagaggcttgttagggagatcgctcaagatttcaagaccgatcttcgcttccagagccacgcagtccttgcccttcaagaagccttagaggcatacctcgtcggtctctttgaagacacttacttgtgcgcaatccatgccaagcgggttacgattatgccccaagacatccagctggccaggcgcattcgtggcgagcgtgcttagatagttgagcaagattttttttaa

SEQ ID NO: 32316 - DNA, 864 bp, Oryza sativa
  Clone ID: PAT_MRT4530_36537C.1
atggccaatactcgcgtcttcgtcctcctcctcctcgccgtcgccgtcgccgtcgtctacagcgccgacgcggcgaccatcacggtggtgaaccgctgccgctacacggtgtggccgggcgcgctgcccggcggcggcgtgcggctcgacccaggcaagtcgtggacgctcaacgtcgccgccggcaccaaggccgccaggatctggccccgcaccggctgcgacttcgacggcgccggccgcggccgctgcctcaccggcgactgccgcaacgcgctctcctgcgccgtctccggcgcgccgccgaccacgctggccgagtacacgctcggcaccccgggcgccgccggcggcgacgccaccgactacttcgacctgtcactgatcgacgggttcaacgtgccgatgagcttccagccgacgagcaacgcggcgcggtgcggcgcccggcggcgcgggccgagctgcggcgtggacatcacggcgcagtgcctccccgagctgaaggtggccggaggctgcgacagcgcgtgcggcaagttcggcggcgacgcctactgctgccgggggaagtacgagcacgagtgcccgccgacgaaatactccaagttcttcaaggacaagtgccccgacgcgtacagctacgccaaggatgatcggagcagcactttcacctgccctgccggaacaaattaccagatcgtcatgtgcccttaattaataattaagctaatataagatgtgataataaggggtagtgatcttgtgtgttgatcactaccattaccatgcatgcgtgcatgcgtacgtgttgttcaatatataataaatgaataaaaactcttatcttcaattctgatgaaa

SEQ ID NO: 32317 - DNA, 348 bp, Oryza sativa
  Clone ID: PAT_MRT4530_36538C.1
aaatcccaaaaaggagaggggggcctcgatgcttatcggcgctaaattaaaaggggggcccggctaaacccatgaaacaccccttgttttaaaaaccgattcccaacccctgggtggtcactttacaccccccacaagccggggggggggcctttgttgaaacaaaacgaccaggggggaacttaatttttttgaaaaagggggaaccataacccgggggaacccatcatcatggccaattggtttataaacgccttccaaccattatcccccaacaatgggtggtcgaacccccttgatatcacccgttgctcctgaaggagcccagggctttttagggccccgccc

SEQ ID NO: 32318 - DNA, 527 bp, Oryza sativa
  Clone ID: PAT_MRT4530_36539C.1
aatgggtattcacagggagtggtcccccaaaggtgctgaagttcacgtgtttaagaaagtcagcatctagccataggagaatcaccgtatgaggagggaccgccaataggaggagctgctgacctcttctgggtgtcacaagtttgctggagatgccccttgcaaggaggggtctcaagggtgtttggggaacacaaggtgtggtgttgagggatgatggagtgaaaactgtgtttgcaatgtggtgtgatgctgtgcaaggttagcagcttgagtgcaatgatgtgtgccatggattgtgcacaagtgcaactgattgctgagagcaataatgttgggaattgcattggctttgaggcagttttgtgtatgctactgttggatggattgcaagactgcatgtttgcttaagcgcttgggaattttgacatgggttggcaaccttttgggatatatgactgccatggctgatgcagtggctggtggaaccaaggatgcactgcttaagcttgaaaaaaaaaaaaaaa

SEQ ID NO: 32319 - DNA, 177 bp, Oryza sativa
  Clone ID: PAT_MRT4530_3653C.1
tcaccagccgtcccttcccacccaccgctgccacgcaggggcaattccgtcaatccacccaccctgggcgcctataagaagccccctctccatttcttcaaactttaggccgatgaagatctccacgaggcttctgtggagcaccagcttcttccgccacaagatcgccgccaccat

SEQ ID NO: 32320 - DNA, 213 bp, Oryza sativa
  Clone ID: PAT_MRT4530_36540C.1
atggcggcgctggcgacaacgataggtggtggggcaaccgacgtgggagcgacggatccaaccccggcgatgactgcggacggcagggacgatggatccggtgccggcgacgacgccccgacgatgagtgcgggcggtgggggcggacgatccgacgtcggcgacaactacaggcgatgggggtgtggcagatttgacgctccgacggcgtga

SEQ ID NO: 32321 - DNA, 1081 bp, Oryza sativa
  Clone ID: PAT_MRT4530_36541C.1
tttcattgggagcataacatggaataaattaatggtcaaagtatgttattgaacaccgtgtaaaaaatatatcccttaaaaaatacatgccttcagtaataataggttcaaagtatgttattgaacaccgtgtaaaaaatatatcccttaaaaaatacatgccttaagtaataataggttcaaagtatgttattgaacaccgtgtaaaaaatatatcccttaaaaaatacatgccttcagtaataatagcagtcaagcaacatgctttggggttgttctccatttaagaaattgaggtggtctataacttgggcagtgtaaatattgaagcatcaatgacagatatgcgcaatggaacaccaccacatcagttttcttccgttgctttgtataccctataccatttctgaagatcactataataccaaaccaactgctaacattttctttatgaaacaagcaaccatgcggtcggtggaaaacaattagaggtgcagtgtggagtggtttgtaatccagctagcaagcttatgcgcactcaagatgaaggaaggggatgatgcaatttggagcacctctttctgaccagatggactcagttttcacgggcccaggaactaatgaaaaattggttcatatgtatgttgtgcaggcaatagctctcttgaaaggttctcacagccttacagatcagtagatcacaatgggcaagggcaagattggaaggaagtgagaacataacatgcatctgatgaaggattgacagcaggatagactgagaataagccggtccttttcttttccctttgtttggacataatattgaagaagtgggtatacatttttcagaagaatgtgagcataaatgttgatttatacagtactgaaaaacaattacatagagttgattcatttgttagtacgaaattagtagtgcatacctgaattctgaacatgagcggtctcgacaataaaaacttgagatcctaacaccattttggtcaattgtttaaattttatattagaagtgtattgatatattcaaatttaatttaaaatgagcccattgtcccgtgcgccc

SEQ ID NO: 32322 - DNA, 1025 bp, Oryza sativa
  Clone ID: PAT_MRT4530_36542C.1
aatatagttgaaaaaattgaatgcgttctttacagtttttgggcggaacacagaagacacatggaataggcctttgtcccagaacctccttatcttgattcaaattacagatggttcatgtcacaaataacgggggagcattacatgaccatagggcttgattgctaactatatcccatatttatatcattacgtattaacaccataaaccccattcttgccaggacctttggaacctggcattacgtagtaacaccataaaccccaagcttgccaggacctttggaacactctgaatcagttttgacccattttgcaccatcatcgtctagatcacgcagtgcatcctccaggcactcattgatttctgtctcatctggcttccagtccaaatgcctcttagcaactagcgtggaagaattttgcgggtgtattttcttctgcaatattgccttgagcaacttctccattcttgattgaggaaatgtgttccttggttctggaactacggaggtaaagccacccttacacatgaataacttgagcaacgaagcgactgatctcggcttgagtgtatttcctttctttcctaacgaattctttgatttacttacaatgatccttttgttgatcaactgtctaatatgcttctcattgtcttccccatcggcacgcttttgtaaacctacttggtcatcatcatgcgagcgttgagcttctgcttgatctttgattgctagtagcgtttcgaattctttccgtatcttgtctacttcttcctctgtaaatttgacggtatcttgcactgactgcacattgtcggatgaattctccacctgagctacctcctcaatctgcttatttccaaatgtcccaatagcaagcaatgattggggccaatcactgaattcatcctttcgacaatctgacacgttagcacggtaaggcgcagaagaatttgcgggaaaccgatttgcttcttgcttcccactgatcttgttggctacccagctgaaaatcttcat

SEQ ID NO: 32323 - DNA, 170 bp, Oryza sativa
  Clone ID: PAT_MRT4530_36543C.1
aggagcaatctcaacctttttttggcactttcaaatccgaataaattcaaaattctgggggctttcaaatatccagctaaagggtaaaaaagtgctcaaaaccactgtgctttggggttacaggtctttacacagactcccaaacgaggttatttcaaccttgaattgaa

SEQ ID NO: 32324 - DNA, 288 bp, Oryza sativa
  unsure (1)..(288): unsure at all n locations
  Clone ID: PAT_MRT4530_36544C.1
gggggagggaancaaacaaactgtttttccccttttccaaattcatttcatttatacaantaaaangcactcaaatcaaccaccacatgggcgggggcatgttccattatttattcatctacacatacaaaaaacagtcattcacttacaaacaaaaaatctactttaaaaaatactggaggtctatcacttaaaagaagaaataggcccaaagaacccctgaaattccccctaaaaaaaaaccccctgtaaactttgcccaaccttccgcggtctacaacttttctg

SEQ ID NO: 32325 - DNA, 621 bp, Oryza sativa
  Clone ID: PAT_MRT4530_36545C.1
atggcaatttcccccgcaaggtcgggtcccctgcgggtacccgcccctacggggccggggtcgggtgtactttctaccccgcggggagtcggggccggggccccgcaattagacggtgcgcccctccccagcgccggcggcgcgcccctccatctcgcattcttctccgtccctccagtcctcccatctccctctcgcctgtctcccaagtcccaacccctcctgtcttcacgcggtggtggacgggcggtggccgagcggcatggcgagcagcgcgtgagcggcggactgtcagcgcgacgggcggcacgaggacggcacacgggcacggcgagccagcgactgggcagcacacgcaagcctcctgccacgcgcccctcttcctcctttctccacgcggcggcgagcagggcagcgatgcgcgggcgtggcgagccggcgaccaggcggcgcacgtcctcctgctacgcacccctctccctcctttctccacgcgacggcgagcagggcagcggtgcgcgggcgcagcgagctagcggcgcacaccctcctgccacgcgctcctccctccctttctccacacaacggcgagcagggcagcggtgcacgggtgtggcgagc

SEQ ID NO: 32326 - DNA, 1238 bp, Oryza sativa
  Clone ID: PAT_MRT4530_36546C.1
ctcgggccggccgggatacgactaccactagtaccctttcttccccaaaccccctcccgatttctcgtttttgctctccaatttctcgcgagaagccgaagaggaagagagcgagagagagagagagagagagagagagaggagaggaggagttggttgagatggatctgttggagaagaagaacattaagaaggggggagaagtggaggaggaggtggcgcgcaagggagaggagaggaaggaggaagaggtggtggtggaggagaagagccatcagcagcagcagcagcaaggggaggaggagctcgtcggcctctcgctcgccggcggcaggcccaaagtatttccaatgtcgagccctccacctaatccttcgcaacttacaattttctatggtggatcagtatgtgtttatgactcagtgccgccagagaaggctcaagcaatcatgcttattgccgcagcagctgctgcagcggcgtctgccaccaaaagcaatgctgccattgctgttaagccccctgtgatgcctgcagccaatgctacccaagcagcagtctctcctgtgctcacaagatcgctctcattgcagagcacttctgtagcaactggacaacctcaagttgccgctgaccctagctcaatttgcaagctccaggctgatctccccattgccaggaggcactcccttcagcgcttcctagagaaacgccgtgacaggttggtgagcaaagctccatatcccacaaaatcctccgagggcatggaagcatcagggatggaagtaactgctgagggcaaggcccagtaactgtcaacttcgaatggtggaggctgacgtttggagggggaaggaaggaaaggcgtcgcgttcattgtttagatggtgtcgcaccctagaaccttactaataatcgaacctatgcccttattatcgttgtactgttccttatgtgctagtctattctgtcatgaatttgtttactcgaacagcaaactgctatgatagtagtatatcattgtacatcatgcatatcattgcctgacaatgttatcgtgttcgtctagtaatgatatcatccaggttaattgttactagtaaaaaaaaaaaaaaacatatactagaacagcaaactactacgatagtagtatatcattgtccaacatggatattatggccttataatgttgacatgatcgaggagtattgatatcaaccaagttaaatgatacaaaa

SEQ ID NO: 32327 - DNA, 420 bp, Oryza sativa
  Clone ID: PAT_MRT4530_36547C.1
cttccgttcttggggatcccccgaaaagaattcccgccggagaaaaaaaaaaaaaaaaaggccttcttcgccgcttaatttaaaaggaacccttggaccccagggaaacttgattcccaccacccaaaaggcccatccttttgcttcattacctgcggtttttttgccagtgcggttcccataaccttgtcctaaaagggccccagggaaataatattgaaccaggaccaggccaacctggcagcctcctttatcgacagctttgccaatggtggtgattccggaaaggaaccaatttttgctggccaccctaaagtacctgttgttcaagtcaaggtgaaaacccttgttgcccaccctgttgaaattgctggtcctagtgagggggtcacggtaacccccaaggggagggaaggacca

SEQ ID NO: 32328 - DNA, 441 bp, Oryza sativa
  Clone ID: PAT_MRT4530_36548C.1
atggcgcatcccgcatgctaccaccttgactgcgacgagccggacgaagagagcgcggtgagcgtcgagcgccacgatcttggcagccgcgcgctctgctcacgcggctttcttccacttccaccagcgcgatcgagtgtgcatcccggggtgatcggtgcccccgcgcgcgtggcgcgcatggagcagtttttcgcttcgacgaccgcgggcgcggcacctgtcgcgcgcgcgcccgccacgccgtgcgtccaagtcggcgcaggcaaaattcccttcgctttctgcggcatcctgccgaggccttgcatgcatcggctccggtccggcgcgagatcctcggccaccgccggcgtcattggtcatccccacttccccagcacaccagttacaccacaggcgcacaagttccggctcgccgcggcgaccgccgtctactga

SEQ ID NO: 32329 - DNA, 390 bp, Oryza sativa
  Clone ID: PAT_MRT4530_36549C.1
gctgctgctgcggtggtggcggctggcaacggcgccggtggcccgcccaagatgtaccagcgacccatctaccgcccccaggcgcccgccgccaagcgccgccgcggcgggaggtcgtcctgccgcttcagctgctgctgctgcttcttctacgcggtactcgtcgtgctcctcctcgccttcgtcgccgccgtcgccggcggcgcgttctacctcctttaccggccgcaccgtccggtgttcaccctctgcgttgcccgcgtcgacaagctcagcctttgctactgcgacaccgcgccctctatcaccgacttcatggacgttacgcttaccgtcatgatccccaacaagatggcttgtttacctttacgactacttttgtcgttaccg

SEQ ID NO: 32330 - DNA, 323 bp, Oryza sativa
  Clone ID: PAT_MRT4530_3654C.1
cgcgggcggacgcgaggggtccaagtggcaagttccaacaacaaccttcagtcggatcgccattgaacgaactccttgccgccgggcacagctctgacagcgatggtggttcattgcacggcggcctggggcagtgcctcaacgaccacagccggctgcgccatgcgcaagctgctggcgcgggtggtggtctcaccgccgaccggggacagctacctatgaagggttaacactaaccccggtccaagccgcggccccagccactgggcagcggcgcgcagatgatccccatgaagatcgtacggcggatttaattagcgacc

SEQ ID NO: 32331 - DNA, 1764 bp, Oryza sativa
  Clone ID: PAT_MRT4530_36550C.1
atgacagcagcaagagacagcggccgggcgggcggtgtgcgacgttttgtgctcgatcccgttaagactacttggagcggactctgcgtgcaatggaagttgacgatggcgttggcgcggcggcgcgaggaaaagccatgcatgcatgctcgcatggcgccgagcgcgcgcgcggcgcccatgtttccgcgactgccaccgcgcgagtacaggtacgttgtgcatgaggcagacgatcgggcgcgcgcttggcgtagaagagaccgttcagtagacggcggtcgccgcggcgagccggaacttgtgcgcctgtggtgtaactggtgtgctggggaagtggggatgaccaatgacgccggcggtggccgaggatctcgcgccggaccggagccgatgcatgcaaggcctcggcaggatgccgcagaaagcgaagggaattttgcctgcgccgacttggacgcacggcgtggcgggcgcgcgcgcgacaggtgccgcgcccgcggtcgtcgactgcacctttggagcttgcatgatcgcatgcgcgggatccgttattccttgccagctacttaccctcgaaaaactgctccatgcgcgccacgcgcgcgggggcaccgatcaccccgggatgcacactcgatcgcgctggtggaagtggaagaaagccgcaagcgcagcgtgtgccgtggccggcgctaccgtgaaccgcagtttcgtccgcttggatcctgccgtggcgcctcctcctcctccccggcctcgtctctccgatccgttccgcttccagatcaaccaagaggcaagaagcgaagcccgacgccgacgtttcacgcgttcgccgccgcgtcgcaccggcccggcgcgtgccgtgtcatgacgtgcacggccctccttgttccgcgagtacatggcctccgtcgtgtcgacgccctcgccgccggccactggatggactcgcatggctctgccgtcgaagaaattggtcgagtttcatttgtgttcgacattgtatcattgtttatcgacctcgcaccactgaattcaaagtatgtgacatcctattcttatgttttttattattattcccgcattttagaaatcatgtggttcgaaagaagccctaaaatgaagagcttggttttccagagggagcagttcagcattgtggtggaagccagcatgaataagcacactgtagtgatgcatagcatggattgcttgagcgaggccaagttcaatctagaagagtatggcctgactattctaaaggattgtgcgatagtattgcgggataccgaggttcttgtgttggtattgcgaagattggaaacagccgtgaaatatcagtcacccttttctgtcttctctggagccatgctgaacatggtgctggtgtttcacctgttgttcgtcgttaacaccgaagagcacaagtctactctctttgttagcgtggctggatttgttttggatacggtgtatctgttcctcctgggactccggaagagttctcaaaaatttcgttgcgtgggattatttctgatggttatctcgatgttcctgttctttgtgtgctcccccattcttatctatctgatagatctacattttcacgtcagtaaggaacaacccttgggtgcgctaatgtacgtcatgacagttttgactgttattacagcaggctgtagttctctggtggatccgagagaaggatattttttacccggcatctacatccggttagcttatcgaataggtttaaag

SEQ ID NO: 32332 - DNA, 1586 bp, Oryza sativa
  Clone ID: PAT_MRT4530_36551C.1
ctagacgccgggcacgggcacgcggagtatggggcgaatgatgaggtcagccttccggcgaacaccgatgccgaacgcctcagtcatgtcgagcttggtcgggtcggccattccgggcacctcccagtcaaagtggaagagcaagctggcgagagggagctccacgttggcgagcccgaacgccaacccggggcacatccgccggccggcgccgaacggcagaagctcgtagtcggtgcccttgaaatccaacgcggcggctggctcgccgtcgccgaaccgctccggccggaactcctcgggcgagccgccaggccagtaccgcgggtcgcggccgatcgcccagacgttgaccagcacctgtgtgccgcgcggcacgtcgtagccgagcaccttgcactgctcccggcactcgcgcggcagcagcagtggccccggtgggtggagacggagcgtctccttgatgacgaggtgcaggtatcggagctcactgagcgcggcctctgacacaacgccggccgctgcgaaggcttgcctcacctcggccgtcgccttcttcatcgccatcgggttccggattagctcagcgatcgcccaccccagcgtcgtcgccgacgtctcgctgccggcgccaaagacattatggatgacagacttgatgacgtccatgtcaaacgggaactggagcccaccctccttctgtatccttagcaaaacatcgatgaggtcctcgtcggtggctccagcgccgccgccgctgctgccattcttctggaggtgctcctggatggtgctttcgaggacgctggacatcgtgtcccagcatttcttggcctggcgtatggtgccggtgagacagccggcgaggcgcgacgatggccacaagtccgccgggttgaacccggccgtgagctcgatggagcggtcgagctcgcggaggaacacgtcgcggtgggggaaccggtcgcccatcacggcgcgcacggtggagtcggacacgagcgccgccaacagcggccgtatctcgacggcgcacccggccgccgcgtagccgcccacggcgcgcagcatggcggcgacctcctcctcgcggatggcgcggaaggaggcgacgcggcgcgcgctgaggagctccgtcacggtgatcttccggagctggcgccagtagtccccgtacggggcgaacacgatgtccctgccgccgttgctgaacacgcgcgtggtggagctcagcggccgcgtcgcgaacgacacgtcgtgggtcttggtcacctcgcgcgccgcctccggcgacgacaccaccagcgtgggcacctcgcccaggcggagcatcatgaccggcccgtggcgacgcgccaggtcgcgcatcgcttggtgcgggagcttgccgacgaggtggtgcaggctgcctatgaccggtagctgccatggccccggcggcagccgcagcgcgccagagccatgcgccgccgacgagcgcctacgcctggcgagttgcacggcgagcagggaaacgagcgccaggccaaggtacagataggtgtgaagatctgccatttttttgtgtggtgtacgacgatgcttcc

SEQ ID NO: 32333 - DNA, 297 bp, Oryza sativa
  Clone ID: PAT_MRT4530_36552C.1
atgggatctgcaggaagcaacccgcgcgcattggacatcctgccggcgaaaggaatcagggaccaaaccaagcagcaaaagggaaccgaattccgtggactccgtatcgagaacacagaatccccgcctccgcgagaatcttcgttagaatcttcgttcgaggctgcgcctctctcgccatctcgcggcgcaaaaaaggtggttggagtccaacagatgttgcgccgacgtacgtcgaggagtcaaaacttgggtgtgccactgccggccagttttgcaagcggtggcgtggggccg

SEQ ID NO: 32334 - DNA, 168 bp, Oryza sativa
  Clone ID: PAT_MRT4530_36553C.1
tcagctttgactctcaggtcccttgtcaccccccatagcaccctcaggtcccttgtcttctggaggaaacctcttcgcggcagcaacaaacttctcaatcagtgatggaaacacaacccgcttctggaactcgccatgggttgatgggcgcaggccaaaagacgccat

SEQ ID NO: 32335 - DNA, 885 bp, Oryza sativa
  Clone ID: PAT_MRT4530_36554C.1
atggcattgactggggggggcggtctgcggtggaccgtgtccacggcccggggaaggagcggcgcaccacgaggtgcacacgtggcggccacgtggcagccgcgcgggcagcggggttggacagccctgatctacccgagggtaggtcggacggtggcgggagcgcatggccggcgcgcacgggcggctcaagccggcccagcagccatggcacacggcggtgcggctcgacgcagcagcagcgcaaggcggcgacaagcggcgaccggccggcggcggagggcggcggctaggcagcgacgcggacggcgacagcggcggctaagcggctaggcggcggtgcggcggctaagcggcgcaggagagagggaggaagaggaggaggggcctcaccgacgacgattgacgacggtgagcgacggagggtgatggcgacagctggacgagctccgggatcacctaaggaatcaaaagggggaagttagagagggagagggaaaccatggatggctagggcgccaaccgaaggcgccggccatggtgaagctcaccggcgcgcggtgcgaacggggttctcgcggcggaaagcagcggcggagaggcggacagcgtggccctcgggcttgcgaacccgacggcagcgacggcgcggctcggcgcggtggctagcggctaccggagcggcggtggcggcggcggagaggagggtgacggcgctagggcgatagagggcatgggagagctcgacgaaatggagaaaaagagagaggggagagcggggatgcttatataggggtgaggggtctcggacgtggccgggagcggcccgatttcaccggagtagtggggagggggagatagggcgtggctggcgggattcaaaat

SEQ ID NO: 32336 - DNA, 715 bp, Oryza sativa
  Clone ID: PAT_MRT4530_36555C.1
acccgcaaattcaccttgagtccgctccaaatccaaatctcaccttgaattcttctccttctcctcctccttctcctctctttctccttcggtgagagatggcccgcacaaagcagacggcgaagaagtccaccgccagcaatgtgccgaggaagctgctggtgatgaaggtggcacgcaagtcagcaccgacgatggcagggctgaagaagccacaccgcttcaagccagggaccgtcgcactccgagagatccgcacataccagaagagcacagagctgctaatccgcaagctccccttccagcggctggtgcaggagatcgcgcaggacgttaggtcctatgttcgcttccagagctctgccgtggttgcgctccaggaggctgccgagacctaccttgtggggctcttcaaggacaccaacctctgtgttatccatgccaaacgcgtcaccatcatgcccaaggacatccagctcgcgcgccgcatcaggggcgagaaggcctaggtttgggggcatcgtcttgtccgatcgcgcttcttctgtctgtgttcttggctactagcacatttttaaattcatgtccgtaggttaggaagatgtttttggtcagggtttgatgggtgaactggctttttattttatcctgtgatgctgtaatcgttatggtttgctaatcttatggaaagcctatggtcgtttgggatttctac

SEQ ID NO: 32337 - DNA, 241 bp, Oryza sativa
  Clone ID: PAT_MRT4530_36556C.1
ataaagcaccgtggtgtctccgggtttagaaacctccgtgggagcccaaggagaaaccccatgacagggttccgagagggcgtttttattacaaggccccgggcggcatttttgattggggggttacaaaggaaaaacagccctttctttttttttacaaacaagcgcagatccttaccggaaaaaaataattgattcaggtactaaaaacatccaaattatgccggatacaaagttttca

SEQ ID NO: 32338 - DNA, 355 bp, Oryza sativa
  Clone ID: PAT_MRT4530_36557C.1
cccacgcgtccgggaaaagaagatgtacatctgatattagtgtgaactgctctcgtagctcttaggatgccaggctaagctctgctaagctctatctgatttaactcctgcacaattgggcagctacttttgcttctccctctggctttggtgttggaaattcttctgttccgttcctgccacaccaaccaccaaggttcttgcattcatcttccttttccttccatactttggctctaaatctcattaggtcttgttcttctgtttcctagttgcctccaaaaatgtaaatgtgaagaaatagagcatttgtatccaatcttcagatgcttactaattgatttccctttaaaaa

SEQ ID NO: 32339 - DNA, 1951 bp, Oryza sativa
  Clone ID: PAT_MRT4530_36558C.1
tttcctctcgaatccacgggtcaaaaattgcctccactcgcgcccattttcccaaaccctagccggacccggctcgccgccgcccgccgcccgccggctgcctacctcggcctgtcgggatccgtgcgcggaacatgcgggatcccggaccatggcgaccggacccgatctgaccccacccgccgccgccgcctccgccgaagcgccgtcggcgtcggcggccaagaaggaccgccacatcgtgagttggagcaccgaggaggatgatgtgcttcgtactcaaattgcgcttcatggaactgataagtatgaattcttcccacttcccatctcaattgactttttttttctagatttaatcaccatattttacactgtttttccttttcctttcggtagctggacaattatagcggcacaattcaaggacaagacggccagacagtgcaggagaagatggtacaattatttgaactcggagtgcaagaaaggagggtggtccagagaagaggacttgctattgtgtgagatttctgaattggcaaatatgcggtcggttacttcctcagtgagacaacaggccaggcatattgctatgcccatggaattgagcatgtacgctcaaaaagttcttgggaacaaatggactgaaatagcaaaggttgtctcaggcagaactgataatgcagtgaagaatcggttttctactctatgcaaaaggcgggccaaggatgacgagctattcaaggaaaatggatcattatgttccagtacaagttcaaagagggcattggtacaaactgggtgtctcacatctggtgcaagtggctctgcaccacctattaagcagatgaggccatgtaattctgatttcaaagagaatatgacaccaaatatgagattagttggacaagacaagagcacacaagattctcgacagcctcttgcaattgtttatcaaaacaatcaagataatatgaatacaatggatacccaaaatcttgttgctaaaactgcagcaaaacaattatttgcgggggaacagaattgcgttaagcatgagggtaattttttgaacaaggatgatccaaaaattgctactttattgcagcgagccgacttgctttgctccctagcaacgaaaataaatactgaaaatacaagccaaagcatggacgaagcctggcagcaactacagcatcatttggataagaaagatgataatgacatgtcagagagcagtatgtcgggaatggcttcactcctagaggatcttgacgatttaattgtagacccctatgagaatgaagaggaagaagaccaggatttaagggagcagaccgaacagattgatgtggagaacaagcaaaattcttcacaaactagcatggaagttacatcacaaatggttcctgacaataaaatggaggactgcccaaatgataagagcacagaagacaataatatggaaccgtgccctggtgaagacataccaacatctgaaaacttgactgaggctgctatcgaagatagcttgcttcaatgtgtggaatacagctctcctgtacacacagttattcaagctaaaacagatgcagaaatagcagcatcggagaatcttagcgaggttctcgaacataacaggcttcagtgtattcaattagcctcccctgctcagacaactaccccagttgaagcaaatgcagaaacaccagcttctgagaagttacgcgaggttgtcaaatgtaacaatccttcatgtatcgaattcacttcgcctgctcatacagtcccaacattcctgccgtacgcagatgacatgccgactccaaaatttactgctagtgagaggaattttttgctgtctgtgcttgagttgacctcgccagggtcgaggccagacacttctcagcagccttcttgcaaaagggctctccttaatagcctatga

SEQ ID NO: 32340 - DNA, 126 bp, Oryza sativa
  Clone ID: PAT_MRT4530_36559C.1
atggaggccattgtctactaccttcaacgacactggcgatgcagcggcagaggcggccgccctctgtccatggagagcagaggtggccagtcccgagctcgggacaaccagatccacgcgcggtag

SEQ ID NO: 32341 - DNA, 594 bp, Oryza sativa
  Clone ID: PAT_MRT4530_3655C.1
atgcctcctccctccccatcacgtgcaccacctgtcctgcaaagccccaaccgatgccatatgccattgccaactcgacgagcagcaatagatgcatgcggcgtcaacggcgacctcgccgtcgcgcggctcgctgcagcagcggcgcatgcatgcgacacggttgcaacgcttcgctactgtgcccctacaccgttactgctgctccgatccgctagcttccgctactgtgctgctccccctggcccctgctggcctgctccgtcgattggtttgataccttgcctgctcggtgaaacggcgcgagggaggctgcgagagaaaacttttggccgtctgtgcatcacagtgcatggggagcaaaaacaaatccagcttcgtgttcagggaaacgcacgtttccaagagaaagaaaacgaattactcgatgcggtggcgcggcgactctggcaagggctcgcgcggcgcgggtcgtcgtcacggcgactcccacatggattcggccagaaaaagtcgcgccgctcgcggttccgcgtgacgtcgtcgtcgtgctcgtctccgtggcccggcatctctacggtggaagcacgttaa

SEQ ID NO: 32342 - DNA, 2037 bp, Oryza sativa
  unsure (1)..(2037): unsure at all n locations
  Clone ID: PAT_MRT4530_36560C.1
atggtgatgatgagctgcaagaggaggaaggtttcaccagccagtggtgcaacggtagtgctgccagaagagatgatgattgaggtgctccaatggctacccgtcgaatccgtcctacgttttcgagccgtttgcaggtcctgggccacggctctctcttccgaccaattccgcggtttccacacggccaagaacaagatcaagccgttgccacccaagctgttcttcgtctcgcagaccgcgggattcggctccacatcggtgcacacatcctcgccgctgtcgcggtcagtccccggcggtgacattcatcgtgatctgctacttccatctggacaatgtgcgcggcgatttcatgnccatgacgcctacaccgtgccatggcctcacctatctgcacgatgctatgggactagagtactacgttctcaatgcggcaacagggtcgatcagccgtctgccacctgccaaaccgtgccatctggatctgctggactgggattcgatgcccggacaggggagtacaaggtggttaggctgtttcgagagataatttctggagaaccgcataccaagtgtcagatatacactctagggggcaagcatggtgactcatggaggccagctagtggaggtgtacctttcaaattccgcactgctggaacttattctatttcagcttcacaacaacataaacttcttccagtgtttgtggatgggtttcttcactggcttactggctctttgttctctttcttgaggccacatgctgccatcttatccttctctgtgacagaagagacattcagattggtcaggtcaccgccctttcaggtttcaggagtgcacttggtggatctctctggtaacctgtgcatggtccgggaccttcgtcgcatgtcgtctacgctggagatttggaagctgaatgatctttactccagtgattggtcattggagcatcgcatcgatttgtcgacggagcatgttgcccgagatttaatgaaaccagattttatcagagttattggttctgctggcagtagtggtatgtcagggaagaagaatgtaatcattgctacatccaatcgcaaggcgatcgcctatgatcctacatctgaaacactagaaacaatccttgagatcaagggaactcctttgccttaccaaactgcacgttctgctcttggactgatcagtttgtttgaagacagtcttgctcctgtgtgtaaaaccaatgaagagatagcattgtcatctccccttgccaaggtgataaaggaggccctactacggcttccgggtgattatgccgtgcagttcaaacttgtctctaagcagtggcatagatttattgaaagttggagcttcgctcgtggataccacatgtataacaacagggacaggaggccaaagatcaggcttgtgggcatgggcacagtacccgaggggctcttgtctacattccaaatagaatacctagtgatagatttcgtcacgatcatgcttttactaccgccgcctctgcctgtgaatgacatgcctccggcttacttggctggatttctgtactggatgagtgagccaaggttgagccagagtaagacaagcgccattctctcgttcgagatcgcgaccaagacatttgttgtcatccagtgcccttcgtgtgctctaacaagacacaacagaagcccttgcgaatcatttgtggtagagcttgaaggaatgctttgcgttgttctcgctaatccgtttgaagaggaattggatatttggaagatggagcatggtcaatgggatagagcatacagagtgtgtctgaaaggttggcctggttattcccttggagctaatgtcgtggttccgatggctgttgatccgaaggatggaaggattctgctcaacacagggagtaaattgggtctctatgatccaacgaagcgggttatcgaaaacctgtatgatcttgatgaggtgctgcgtgtcaaacagacagatgagacgctgcatgtcgaagataaagaaaaatcttag

SEQ ID NO: 32343 - DNA, 345 bp, Oryza sativa
  Clone ID: PAT_MRT4530_36561C.1
atgtcgtgcgtgcgggcgaacgcggcggcggggccgcggtacgtgtgcaaggtgtggacgcaggcgccgccggacgcggagacgggggtcaaggacaccatcatgatggaggccaacgtgcggagcttctccgtccccggcgaggtcgccatggacgacggcacggtgctgtgcgtgccgccgaggatgctccacggcgcgtccatggagatgcccctccgcgtccgcatcgacaagctcggcgccggcaccaccaaccgatccgccattgcagcccagacaaagaaggcgatgcataaaagacaagctaaaagatattcaaatgttcgatatgacatggtgtaa

SEQ ID NO: 32344 - DNA, 142 bp, Oryza sativa
  unsure (1)..(142): unsure at all n locations
  Clone ID: PAT_MRT4530_36562C.1
atagtntancnttgtnaagaggtgttanggggattaaggagcaaaataccttttgattcaacagaaagagatccaatttatgatgttttggggtcccaaatttaggacatggaaagcaaaagggcgaaattttttagtttta

SEQ ID NO: 32345 - DNA, 633 bp, Oryza sativa
  Clone ID: PAT_MRT4530_36563C.1
atggacgacgtcggcgaaggtcctccggtcagtgccactgccccatctcagaccggcccccaaatcgggtgggaatccgacacttcttggtgcttcaaggattcaaaagtggttttcgggagctcaaaggcgaacttgcatacgctcggtcgctccgcctccgggggtgacgcgggcggcgaaacaggccgcgccgcccccgaccccctcctcccctcccccacctcgccgccgcccgagccaccgccggcaaagccaggcggctgcaaggacggcggcggcggggctctctcttccctcgctcgcagtcaagctggtcggggcgccggcaagacggagctcagggcaaggcgccggcgccgaggagaaaccgacggcggcgtccagatccagcgccgggatgcatggatacggccccctcatggctggatttgttgctctgggcggcagagagccggggacggcgagttggcggcgtcggcggctggagtggtggcggggcggaggaggcggcggcatggccatgtctgcagtggcaagcggcggccgtggccagatctggccggtcggctggcgccggaggtggctgcggtggcggcgtctgcggtggcgggtgacgacggcgacagctga

SEQ ID NO: 32346 - DNA, 771 bp, Oryza sativa
  Clone ID: PAT_MRT4530_36564C.1
atgaaggagagtggtggcaccggcgttggtggtgggggccagccggtgagccgggcggcggtggcgacgcaggagggggtggagcgcgtgcccaagggaggggagcgaagtggtggtagcgacatgattgaggggagagggaagaagaaattaggcggaggcaccgagcgtggggaggcgagcggcggcggggtgcggcggaggagagtggcgacggaggtggaggccgaccgggcgcggggggacgcgcagcgggcggcgggctcctcctccgcgtggtgggacaccgccgccaccgcgggctcctcctcctcgtcgtgggcgcgcggtgtccggcggcgcgcggggactaggcgctgcctccgccgccgcctcgcctcgccgccgcggctgcctcctccgccgcacaccgccggcgctcgcctcctccttcgccgctgcctcctccgccgcaccccgccgccgctcgcctcctcctccgccgccgcctcgcctcgtctcgagcagcgcgagctcccgccgccgctcgcctccccgtgctcactgcctccgccgccgccttgcctcactgccgccgctgcctcctccgccgcaccccgccggcgctcgcctactctgtcgccgctcgcctcccggcgctcgctgcctccgccgccgcctcgcctcgccgccgccactgcctcctccgtcgccaacagccctcgccgaccgtcctcgcgggtgaaaaatgtccggttttatggttcaaggggtaattcctactttttctaa

SEQ ID NO: 32347 - DNA, 561 bp, Oryza sativa
  Clone ID: PAT_MRT4530_36565C.1
atgtgggacgaagaccaagtcaacaacgccacgccaaatcccaaaggcaaactgcttctcttggtggtcatctccttcctctccgtgttgccatggcacacgctagcaagcggcagcggcaagcccctcgtcactgccatcaccaaggacggcgccaccaagctctacaccatcgccgtcaaggatggccaccccctcgccctcgacctctccggcgagctcgtctggtcgacctgcgatgcctcccactccaccgtcctcccctatgagcgcgagtgcgtggaaatcatcctctcttcatctttatggggcccacataaagcaaggagacggggaggaggaggaagggcggggtcgagccatgggtggtccatcaaattcggtatccgccgccccaatctcttcctccactggctcctccggtcttcctcacgcaccgatttgtgtcgccaccgccggccaactctcgagttcatcgtcttggctacggctggcgtggccgaggaagaggaggagacgacgaagccggcagtggcctcactgagactcggcgacgtctag

SEQ ID NO: 32348 - DNA, 343 bp, Oryza sativa
  Clone ID: PAT_MRT4530_36566C.1
ggggttcccaaaggaaagaagcagtagatgattgcatgcatgatataccaggtgtatatatcgatcgatctatacatttttcatcctaccagaatccagagtttgactcatagttaatggctatgattcttttcttttttcttcttcttcttctctacttttgattttctgatgaatgttcaggccttcagggttttgtctcttttgtttgtctgatgaatgttcagggtctgatactctctgatcccgctcgtcttttttgtaatgccattggatttggcgtctgtttgatactacttgattttagctgccgaagaacatactgaaaaaaaaaaaaaaaaaa

SEQ ID NO: 32349 - DNA, 381 bp, Oryza sativa
  Clone ID: PAT_MRT4530_36567C.1
atgtggagagagaaatttaacaaaagacaagtttgcccctacctgctccttctccacctgaccacggcgcagcgagatggagctcccatgctcaccgggcacaatggaggcacggatggggacaatgaagctggcggtggcctcgtcagtgctttgggagcgacgacggcgggcaggcaaggtccggcggtggcggcgagagggcgaggacagagcggccacggcgacgggagggcgatggcgccggccgccgacagcacccctccctcctccctcggcgcgctgcaaccattgctgtccagtcgtgctgccgctcctccacacgcaactgccatcgccaaacctctcctgctgtcggggcacgccgctggccagcgctga

SEQ ID NO: 32350 - DNA, 264 bp, Oryza sativa
  Clone ID: PAT_MRT4530_36568C.1
cccacgcgtccgcccacgcgtccgatccataacaccttcttcttctttcttcttactccatctccatccaaacctctcttcttcttcttcttttgctgtgcttgtctcgccgccgccgtccaacccaagagagaagccaagagcgacaagcaaacctgcaagtctaacaagccaagaaatccgagagaaatcgatccaaggaggagggcggtgagccatggtgcggagcaaggaggtgcacaagaagcccaaggacccgctgat

SEQ ID NO: 32351 - DNA, 1154 bp, Oryza sativa
  Clone ID: PAT_MRT4530_36569C.1
atggcatcggtgcactattatgtgcaatcacacatacagatgaatgaatatcgagatcgtgttgtactgccgaaagcctctaagatgttcgggaaacagattaacacttgcctaaaggttatggatatgacggggctgaagctttctgccttgaaccaaataaagatgttatctacgataacagccatcgatgaccttaactatcctgagaaaacagagacctatttcattgtcaatgctccatatgttttttcagcatgttggaaggttgtgaagcctcttctacaagaaagaacaaaaaggaaaattaaagtcctgtacggctcaggaagagatgaattactaaaggttatggactatgaggcactcccaaacttttgcaagcgagaaggatcaggctcgtcgaatgattcgtcggatggagttgattgctactcctatgatcacccttttcaccaggagctgtataattacatcaaacagcaagccctgaatgaagacttcatcggtcccataaagcaaggctcaatgcatgtggatgtgcccacacctgatctggaagaggccaagatcatggagacgatcgaatcggagctccacaaattcagtggagctaatggcctctcgcattcattcaacaagatcaagattgaaggtccgtgatgttgcccgtgatcatatctcgtgacggagacgacgatctgcggagatattatgcttatccatctccagccccagggaacctacggtggggttatagcactccttgcttgcaatctctagctgcaggcttgactaggatccacgagtagaaagaggttagtaattgtgatgcgattctaataaccgaatccgtattatctgaaagtgtagccagttctttttctaattaacctagcgactgtatcatctgcgacacgttactatttcagtgcttatggcaactgggaaggaaatgtgatgtttccagtccttccgagtaagttgctgccctaaatatatatgtaacagtgtatgtatagcctctagctgccttttgattgcagtggtatatatcaagtgctgtactcactgctaagaatgaatcatctgcatgtttcatttcactggatgctgtgacccctggtaaatcgttatatcaatgtttgatgttt

SEQ ID NO: 32352 - DNA, 732 bp, Oryza sativa
  Clone ID: PAT_MRT4530_3656C.1
atgaagcacagattaaagatacaaccacttatccaggtgcttcctgttcttctccgaatttcaggtgacaagcaagtcagtctaatggacatgcaaccgggtcattaccagcagaggaggatggttgcttcgagcaaggccatcaaggtcgggccgtggggaggcaccgccgggagcccgtgggacgacggcgcgcaccgcggcgtccggagcatcgccctgacgtacgggcggttcctcgagtcgatgagggtggagtacgacaggaacggccaccctgtccacggcgagaagcacggcggcggcggcgacggcagaacaagccgcactgccgaggtgaagctggactacccgtacgagttcctgaccggcgtcggcggccggtgcggcccggtggcgcacggcggatcgacggtggttcggtcgctgacgttccggacgagcacgggggcggtgcacgggccgttcggggacgcgtcgggggacggggtgccgttcgagtacccgatggagggcggcgtggtggtcgggttcagcgggaggagcgggtggtggcacctcgacgccgtcggcctgcacgtcgcggcgctgcgcccggagacgctctgcgacgtggtccaggagcgcggcgccatggcgtaccggtctttcgtctacgggaacggcggcagcagctcgggagcgcatcagctgcagcagaagaggaagccgttcgagtggtgctacaaataa

SEQ ID NO: 32353 - DNA, 285 bp, Oryza sativa
  Clone ID: PAT_MRT4530_36570C.1
atggccctctcgacgaaggcaacatcggcaaaggtggcattctatgttgattttgtgatcatgttcttgggtgatgggcatgacggtgatctcagtggtgatggggagccggctttatttttgcattccaagaacctcaaagaatcacatggacaagccagatttggtggccaagagcttaccgccacaagatcatcaggccctgaattcgcagcaaataaatcgaacctttccatgccattgggaggaggaggggaggttgatgaggatatggtgcagtactag

SEQ ID NO: 32354 - DNA, 1796 bp, Oryza sativa
  Clone ID: PAT_MRT4530_36571C.1
ccccggctgctggcttccggcacggggctcgaccggacctccacggaccgcatacgcgcgacacgagcacacgaccacgcaatacgcagcagcagcggcagctacccagcagatcgatccgaccgacggaggaagaagataaaagggcagaagagaaggggtgtgtgtggaaaaggcgagtaaagactccagctttctccccgtttgacctcgccctgctcaccgcgaaggctcgcccccctccctcttccctccccgccgccgtcaccggcggcaggcagcaatggcggccgcttcggaggaggccatcaagcagttctccgcgctgatggagctgctggatgagccgctcaagaccacattccagcatgtccatcaaggatacgcaagaggaactctggtgcgttttctaaaggccagagaatggaatgttccgaaagcacataaaatgttaatggattgcttaaattggaggatacaaaatgggattgacagcgttctggctaaacctatagtcccttctgatttatacagaactattcgggatacgctgctggttggattgacaggatactccaagcagggacaacctgtctatgcattcggtgttgggctcagtacccttgacaaggcatcggtgcactattatgtgcaatcacacatacagatgaatgaatatcgagatcgtgttgtactgccgaaagcctctaagatgttcgggaaacagattaacacttgcctaaaggttatggatatgacggggctgaagctttctgccttgaaccaaataaagatatgcaagataactgacagtgggcttattttgtatgtgatgttatctacgataacagccatcgatgaccttaactatcctgagaaaacagagacctatttcattgtcaatgctccatatgttttttcagcatgttggaaggttgtgaagcctcttctacaagaaagaacaaaaaggaaaattaaagtcctgtacggctcaggaagagatgaattactaaaggttatggactatgaggcactcccaaacttttgcaagcgagaaggatcaggctcgtcgaatgattcgtcggatggagttgattgctactcctatgatcacccttttcaccaggagctgtataattacatcaaacagcaagccctgaatgaagacttcatcggtcccataaagcaaggctcaatgcatgtggatgtgcccacacctgatctggaagaggccaagatcatggagacgatcgaatcggagctccacaaattcagtggagctaatggcctctcgcattcattcaacaagatcaagattgaaggtccgtgatgttgcccgtgatcatatctcgtgacggagacgacgatctgcggagatattatgcttatccatctccagccccagggaacctacggtggggttatagcactccttgcttgcaatctctagctgcaggcttgactaggatccacgagtagaaagaggttagtaattgtgatgcgattctaataaccgaatccgtattatctgaaagtgtagccagttctttttctaattaacctagcgactgtatcatctgcgacacgttactatttcagtgcttatggcaactgggaaggaaatgtgatgtttccagtccttccgagtaagttgctgccctaaatatatatgtaacagtgtatgtatagcctctagctgccttttgattgcagtggtatatatcaagtgctgtactcactgctcaatggatggctgttatgctcatcttattttctaactcgagactagttctctc

SEQ ID NO: 32355 - DNA, 559 bp, Oryza sativa
  Clone ID: PAT_MRT4530_36572C.1
aaggattgcggccggaaaaacttctcggcggcaagaacagagcagcgcgggggcggtggtgctcggcttggtgcggcgagggcagcagaggctgtgagaggccggccaagatcactttgagtggcgggaggccacgtttgaatacttaccggcgaaggattggcttgaccgcgtgtgaaatcggctggcgacgtgtcggcgccaatccggacgcgacgcgcggcagcggcgagggtgaaaacaaccgactcgggggtgaatgcaagaattggcgtgatttatcccgggtagaagcgaaatcacactcggcggcggctttggacgagcgcgcacggcgtcgagcggcgatttcttgcagcggtcgtcgtcccggctttgtcgtcgtcaagattggtgcggtgatgacggtctgagggcgtcggacgagtgatagcgcgccaaggcgatcgggcacgcgcaagcggccccgaggtcgacgcgcggcgacacggcgcgcggcaaagtcggacgaccgggcggcgcgcgtgaaggggaggaagaggcaaagaaatccacggtt

SEQ ID NO: 32356 - DNA, 633 bp, Oryza sativa
  Clone ID: PAT_MRT4530_36573C.1
atggagataaaggacatcgacacggccattgggccgcctgcgaaaatcctctggacgaacaaaaaaaaatcgcgccccaccggccgcgcgcctcgccgccgccaccctcccccggcctccctccggccggatctaggaggggaggggagtggagatgcgccgagagccgacgtcgttgccccgcacgtcgcgctgtggccggccccgcgactcgccgccgccgtcctcccctggcctccctccggccggatctgggagggcaggggagccgcgccgggagccgaagctgccaccccgcgccgtggcctgccccgcgccttgccgccgccgccctcccccggcctccccatggctggatctgggagggaaggggaggggagccacactgggagccgccgccgccgccctgcgtcgtggcttgctcagtgcctcgctagaagccgggagccaccgcccgccgccgcctccggccagcggccggggagaggaggagaggggaggggagaggacactggcggaggtccgcctataaaaatgaagggtatttttgcaggcggacctcttaaatggtccgccaacaaaaatggattttcgcagacggacagcaagcttcacccagtttgcattttgtag

SEQ ID NO: 32357 - DNA, 219 bp, Oryza sativa
  Clone ID: PAT_MRT4530_36574C.1
ttccaccctcgcgagccaagctaccattctcctcctcggcggcggcggcggtggtggtgtcggcaatgcatatggtggcgaccaccaccaccaccgactcctaccaggcggccgtgccgcctgaccaccctaacattaacgcccacccgtactcgtacgcgcacccgtaccctgaccaccttatggcgcaggttcggtggttcgttctgtgttacacaa

SEQ ID NO: 32358 - DNA, 369 bp, Oryza sativa
  Clone ID: PAT_MRT4530_36575C.1
ttcgggttttaggcatactccgcggtgttcgacgcgtgttctaggtggacacccggtggtgccctggtgaatatcggcctggcacccgttcgtgtccccggtggagctgaggcccctcgaaatgcttggcctaccccaccgtccatccgtcactctccctgctatgaaccgaggagcctgagatccggcctgacttcgatataataaggtaggagccctacctctgtattttgcactttcggccctcgtagtaaggacccgctcactttaacttgcacgctatctgtaccaatggactggagaagaacccgtatattctctaattgtactaactcctaattttctaaatccacccgtgtttttgttccc

SEQ ID NO: 32359 - DNA, 372 bp, Oryza sativa
  Clone ID: PAT_MRT4530_36576C.1
atgcagcgggcctacgtggacacccggaagcttagcccaggcgacaaccaacgcaccctccctgacgagcttcggactgaccgcggattaatgctcaagcgctgcggcaagctgctgagcagcatccaggcgttcacggccggcgacgactagtggctgtgtcttccgccgagcgtgtgctactgctaccgcgccacccccgacgcgcccttgttccgccatggagccgctgtccaccgcgccacaccgtcgcccgtcgccggccgtcgcggctatgttttgccgcgaagctacctagcttccaccgcgctgctgtgccgcatggaatcatcctacgcagcagagggggaggtcttcactcttcagcggtaa

SEQ ID NO: 32360 - DNA, 530 bp, Oryza sativa
  Clone ID: PAT_MRT4530_36577C.1
gcacgaggagaacttgaagagcatagaagacgtgctcatcttgttggcgaggaaggttatgcagaggagtttagcattgaagctattgaagctggagctattgatccctcactagtacttgaacaaattgaagctcacattgcaacagtgaaagaggaagcttttagccggaaggatattcttgagaaagttgaaagatggcaaaatgcttggggaagaggaagcctggctggaagattacaacaaagatgataatcgttacaatgctgggaggggagcacatctaacactaaagagggctgaaaaggctcgtactttggtcaacaagattcctggaatggtagatgttttgagaacaaaaattgctgcatggaaaaatgaacgaggaaaggaggatttcacatatgatggtgttagcctttcgtcaatgcttgatgaatatatgttcgttcgtcaggagaaagagcaagagaagaagagaccaagggatcagaagaagctccaggatcagctcaaagcggagcaggaag

SEQ ID NO: 32361 - DNA, 1639 bp, Oryza sativa
  Clone ID: PAT_MRT4530_36578C.1
gggcaagctggtgagggtgacgcacaaggtgcacgtgacgtgccccatcgtcgtcgacgccaagaagacgaagcccatcaagttctccaagaaggcctgcgccaccaccaccaccgttcgtccgctcgccgcgtcgacgagctcctcctccgcttcgcgcttcgtgtcagggtttggagtggagtggagggggaaggaaaagggggagggatgatgcacgcgaagtcggagtcggacgtgacgagcctggcgccgtcgtcgccgccgcggtcgccgaagaggggcggcggcgtgggcgtgggcggcgcgaactactacgtgcagagcccgtcgcgggagtcgcacgacggcgggtacaagtcgtcgtcgatgcaggcgacgccggtgtacaacagcccgaacgagtcgccgtcgcacccttcctacggccgccactcccgctcctcctccgtcagccgcttctccggcaccctccgcgacggctcccgcaaggccggcggcgagcgcaaggcgctcaacgacaagggctggcccgagtgcaacgtcatcgaggaggagggcccctacgaggacctcgccggcgacaccggcctctcccgccgctgccagatcgtcctcggcttcctctgcttcgtcctcctcttcaccgtcttctgcctcatcatctggggcgccgctcgcccctacgagcccgacgtcgtcgtcaagagcttgacgatggatgatttctacgctggtgagggcacagaccacagtggggttccaaccaaattggttacactgaactgctctctgcacatagctgtatacaaccctgcttcaatgtttggaatccatgtcacgacgggtcctattcgccttctctattcagagatctctatcggggttggacaggttcgcaggtactaccagccgaggaagagccaccggttggtgacggcggtggtccacggcaacaaggtgcccctctacggcgccggcggcgggctgatgctgtcgagctccggcggcgcggtgccattgacgctggacttcgacctcacctcccggggatacgtcatcggcaagctggtgagggtgacgcacaaggtgcacgtgacgtgccccatcgtcgtcgacgccaagaagacgaagcccatcaagttctccaagaaggcctgcgccgtctacaagatctgagaggccatcgtcgccgccgccgtcgccggtcgtcgtccatcacgccggcggcgggcgtcgcctgcagtgatcgatcggcgacggagccgttcttctgttcttgcagttgttgtatgtattatgcttgtgaagaacaataagcgtttatatggtcacttgttaattttacttgagcttcgattttgttgataaatcagtaaatcactttgtatggtagtagtgttttattttctctgctttctttctttcctgaggaaactatgtaccgaagtgtggtactagagtcagtctagatggttttacgttaaagatcaccatgtttacagtttcgcatggacaatcactgcattttgttttgaacagagcatattaaacagcaagcaaaaatcgtgtttcttttcacctcaagaaatggtacaaacctgtctttcaaggattaaaaaaaaaaaaaaaaaaaaaa

SEQ ID NO: 32362 - DNA, 495 bp, Oryza sativa
  Clone ID: PAT_MRT4530_36579C.1
caacgctcacatattcatggcatcagcttcagacacagctcgtcctctaggccatcgtgctcgacgacctcgccgacgaggtggcagaggcgtcaggctaccgtgacgctggtgagtactgccgcgtggcgaaggcggtgtaccagaacccggccccgtcgagccatgactacatcgcgcggtggtgcgccgacgccatgcgccgcatgagactgccgcagcaaacgacccggagttgctgtagccgttctaccgggagctcgccgtcgtgccgatgcacatccggggcgacgcgctgagcgtgctcctgcgcgccgtggtcacggagagaagccgaccagactctgcgggatgatctccgagcacacgccaccaccgtgcgactccgcgcgatcgccgggattgcgagcgcactgacggactaccgccggagcaacctgcaagacactgccgggtcctttgcctgcctcatgtcatgcggccgcatggattaga

SEQ ID NO: 32363 - DNA, 1281 bp, Oryza sativa
  Clone ID: PAT_MRT4530_3657C.1
atgcattgtgctaaaaaggcaaaggtggaatcacaatcagctgagagtttagatagactcagcagcctacctccagagctaaaagtcgccatcctctcgaagttgaatgtcgtagatgctattagagccagcatcctatcaagtgcttggaggaatgtggcaacttattctgttcgatacgtatcgcatctcaggcacattacggtccaaatttactacactgacagtgacataaataatctgatctcctcatgccctcggctgaatacattgcgtttgaaatattttaagggtatcaatcgtctccgaattcaagctcaggcagtacaggttttagaggttaaagggtcctttgaagactttcatctgcatgcacctaacctgtccaatgtgtatgttacactcaacaaaacaaaagttgcagacaggagtaaaaactatatgatgcaagcttttgtgagcctaactggaatagaagcacttgttatgaaaagatgtatggttgcgttgcctcagacgtttgaaggtttcaagcggctatctgtcttgaatctgaaatatatatactcaacagacgctgacatagcaaatctgatctcctcatgcccatggctgaaaacactgcatttgaaatattttgagggtatcagttgtctccgtattcaagctccggcactgcagcatttagaggttcaagggaatttcgaagacttgcatctgcatgcacctaatctgttgtatcttacactcgacaaaacagaaacagaacaatgtgatgctgttgcgggtgacaagaaaaattatcccaaggaagcttttgtcagcctaactagtatagaactttctataaatggcccttccttgacgtatctatcggaagggtgcttgttgaccaaacccccaggcgtgcttgatcgtctgaggaaggtcttgggtgcttgttcaatttttcggaatgcccctatgttgagagaactcgagatacagagcttctctcgaccggacgattcttggagtcagccaatatgggatcatgatcagacggagatcaaagagcctaccttgcatcacctcctgacggcgacgatcaccggtttcgtggggctggaatacgaggttgatctcgttaggctgctcctgagatggtcacctgcattggaggaactgaaggtggtcagggacgacgaggatgtcctgaacgatgcgtgcatgtgcgagtctcttaccaagttactggctctcccgagggcttctaccaaagccaagatcattgccatctga

SEQ ID NO: 32364 - DNA, 195 bp, Oryza sativa
  Clone ID: PAT_MRT4530_36580C.1
gttcatatcatccatgaatgggtttgggcaggtacccccaacgaaggtgcagcttggctctgccttcagaggctagctgatacttggcacagaatactgctgatccctgtgacaggaggcgttgttgttggaatgatgcatgggttgcttgagatatttgatcagctgaaactcgtgaaaccgcctcagaagcaa

SEQ ID NO: 32365 - DNA, 604 bp, Oryza sativa
  Clone ID: PAT_MRT4530_36581C.1
ttatagatagcttggtccaaaggtactgagcttgtacactttcttggacctgtacagtttactccttacattttcaatgaaattggcggcccgctccccaagtgcaaacgcagcggcgtcgaaggtcttgcacagcccggttccagtcttgaaggtgaccttctccggcgaggcctcggcgacgtagacctcgacgacgctgagccagagcagcagctccttggtcttcacgccggtgatcttcttcagcttccccttctcgacgaacgccgtgacctcgccggcgtaggacacggtctgcttgatcttcttgaaggtgtgctcgatcttcttcttcctctgcaccagccacatgaatcctgtttccttgttgtagccgaactcctcgatgtcctccaatggcaggaggcccttggggaggccgagctcttccagcagctcgatggacttcttcctgcagacgccgtctccggtgacgatctccgcgccggcacggtggctctcgatctgtgacgccatcatcttagctataaatctctctagctcggtcgaaatgcaatcccactgaagagtagctttagtttgcaggaagtcgagagctcgt

SEQ ID NO: 32366 - DNA, 189 bp, Oryza sativa
  Clone ID: PAT_MRT4530_36582C.1
atgtccaccatggtgtatgactgtatggtgcacaagcaaagtgaagaatcctctgaaatgcatgtgagaatgcgtcctctgatccgaatgcggcagcaccgccccgacgtcgcaggcagccgcagcggcggaggtcgcggccaccagcataggacgccgccgaacaggagcttgccgggattgtgctag

SEQ ID NO: 32367 - DNA, 429 bp, Oryza sativa
  Clone ID: PAT_MRT4530_36583C.1
ttactccccaagcgcaaaagcagcggcatcgaaggtgtcagagagcccggttcccgtcttgaaggtgaccttctccggcgaggcctcggcgacgtagacctcgacgacgctgagccagagcagcagctccttggtcttcacgccggtgatcttcttcagcttccccttctcgacgaacgccgtgacctcaccggcgtaggacacggtctgcttgatcttcttgaaggtgtgctcgatcttcttcttcctctgcaccagccacatgaacccagtgtcccggttgtagccgaactcctcgatgtcctccaatggcaggaggcccttggggaggccgagctctcccagcagctcaatggacttcttcctgcagatggcatctccattgacgatctccgcgccggagcggtggctctcaatttgtgatgccat

SEQ ID NO: 32368 - DNA, 265 bp, Oryza sativa
  Clone ID: PAT_MRT4530_36584C.1
atgtaacatgcgggagtataggtttaacaaaagggatccatcccgaccacaaccattatttttttaagtattgatttaatcactgtacacatgggcacagccccaggaaaagacactatttttggggcagggaaattatgaccgctcattgttccttcaacgagacagatatgaagagagagcgatgacacactggatggcatatcatgatgaaaattttatttatgagaactacacggacggatagcctaccatgggcttaaat

SEQ ID NO: 32369 - DNA, 609 bp, Oryza sativa
  Clone ID: PAT_MRT4530_36585C.1
tagtggatccccgggctgcaggccgaattttctccgaacacctcgacgaccatcgagagcaagcagcggctggttgattttgatcgatcgatcgatcgatcaccggtgatggcggcggaggcggcggcgacgagcaggttcgcggcggcgtgcggcgcgctgagccagtacgtgagggcggcggataacgtccacagggcgcggacggcggcggcggcggcggcggtgcggccactcccgctcatgccgggggccgacgtcgccggagacgagcgggaggaggaaggaggcggcgccgcggcatcgtcggcggcggcgcagatgaccatcttctacggcgggcgggtgctggtgctcgacgagtgccccgcggacagggcggcggcgctgctgcggctcgccgcctcgtccaggggcgtgccccgcgacgatctcgccagcactgccgccgccgccggcgagtcggcggacctgccggtggcgaggaaggcgtcgctgcagcggttcatggagaagaggaagggcaggctcgccgcccgcggccagccgtaccggcgccacgacgccgcggcggcggcgcgcggcgaccacctcgcgctcgcgctctga

SEQ ID NO: 32370 - DNA, 336 bp, Oryza sativa
  unsure (1)..(336): unsure at all n locations
  Clone ID: PAT_MRT4530_36586C.1
gtgaaaccttgccacacngacagccagctcataccggagttcattagtgaacacacaacatttcgtggaacggtggggagaactttgccatcaagcngtgtttttttgtantcctgtcggctgttctgcgggggggtctggtggtttttggtctcgccggggttccctgcttgcctctccggtgagtgcttcctgtgtnaacctcttcctggttgctcttctctctctcttctggcttgtccgtgctctttgtttggtctctgtgctttcggggcgctctgtgtttcctgtcttttgtttctttgtttcgtctgtgttcgttggtgttttcccccc

SEQ ID NO: 32371 - DNA, 493 bp, Oryza sativa
  Clone ID: PAT_MRT4530_36587C.1
cattagtcgcccactgatgtttttttttaaaagagtaaattacatccacggtacatcaacttggtaggtgggtataatttggtgcaataacttaagaaatgagcgttctagtgcaacaacttgagaggtaggtgcaatttagtataagaactttataagtgatcgtataaatacgacaacttacaaggtaggtacgattttgatacaataaattaaaaatttatgcgacaacttaattatttggagcatatttttatataaatttaatttttaagtacttattttgacaatatactagtgcagatttgtataagtatatttatatttttatcctaataaataataactataagtcaattaaactggatgtagaaattattatatttcagttgatattttagaaagtgaagaaaacaaaaaaattcaatatatgttgtggtaattggatgtaaattgtactagaacgcacccatttgttaagttattgcactcg

SEQ ID NO: 32372 - DNA, 114 bp, Oryza sativa
  Clone ID: PAT_MRT4530_36588C.1
atcaagatcgtcggcatcactcagcgcaaagtgggtacctcgcttgtaaccgagcacgggtcgcctctggtgaagtcctccagtcagacgcacacggaatatcatgtaagctag

SEQ ID NO: 32373 - DNA, 640 bp, Oryza sativa
  unsure (1)..(640): unsure at all n locations
  Clone ID: PAT_MRT4530_36589C.1
catcgtcgccctccgcactccgcacacgatggcaatggaagccggagcaccgcggggagccgccgccaccaccagcggcggtggcgggggcgcgccggaggcgggggcggagctggggagcagtggcgcgccggtgacgtgggggcgggtgtggagggcggggcaggaggcggcggcgcacgcgctgctgctctgctttttttttctcctcgccctcnngctcgacggcctcttccgcggctcgtggtgggtgctttttccccctctttggttgttccttgctgttnttgctcgntgtngtttttngtttcctgctcctttctcnccncnnngttgtcngttggcttnctgcctttcctttgttgttccncctttgctttttgtttttgntctgcttctttgttctttttctgttgtttctgnttggcctttttgttgttttctgcgttgttttgtttngtgttttttttttttttgtgttttccttgtttttcctttttttttttttttttttttttttncgtctttttttttctgttgttttttttttttttttttgtttttgttttcttttttttctttgcttcttctttttttttctctttttttgtttcttttctttttttcctttttttttttt

SEQ ID NO: 32374 - DNA, 2901 bp, Oryza sativa
  Clone ID: PAT_MRT4530_3658C.1
atggtgtccgcggcggacgcggtgataccggcgtgcgcggcggtcggcatcgcgttcgcggtctggcagtggctcctcgtgtcgagggtgaaggtgtccccttactccgccgccgcggcggccgcccggaacggcggcgccgggcgggccgtgttccggccggagggcgaggtcgacgacgacgacggcgggtgcggggacgacgaggaggccgacggcgacggcggcgtggccgcgatggcgagcgggatcggtggtggcgacgctgcggaggtggtggcaaaggcgttgagccaccccgccgcaactccctccctgcctcgccgcactaggaaggcaacgacggcggcgctgggcgggcagatcgaggacgacggcgtggacgggcagatcaaggaggaggagccgctgcggggaaagggaggggagggcagagcggttgccgttgtcagcactgccgttggtgggtgcgccggcctcggcgccccacaccagttgcgtggaggcggcggaggtcgcacgacgacggcgtggacggcggcagaggtcgtctggcgaagcggacggcggcagaggtcgtctggcgacggcgtggacaatggcggtggtcgcggctggcgacggcgcggacgacagcggccatcgcggctgacgacggcgccggcggcgctgggggctataaagtcacttggagaggttgttggagatgctctaaggcgagagatgaggcgtgcgagcggcgctgagaccggcaagacgtcgagcggcaacacgaccagcagctttgtgcacacaacaatggcagtgccatgtggagaccaagattcaatcagaaaagttatgactattttaggaggagcaaactcgttcttgttcacgcaatacaagtacctggccgccttcacggcggtcttcgccgtggtcatcttcctcttcctggggtccgtacaccggttcagcaccgaaagccagccctgccagtacaccagaggcaaggcctgcaagccggcgctggccaacgccgtgttcagcaccatagccttcctcctcggcgccgccacctccgtcgcgtcgggcttcctcggcatgcggatcgccacggccgcgaacgcgaggaccacggtagaggcgaggaggggcatcggcccggcgttcgccgccgcgttccggtccggcgccgtcatggggttcctcctggcgtccctgggcctcctggtgctctacgtcgccatcaaggtgtttggtctctactatggcgatgactgggaagggctgtacgagtcgatcaccggctatgggctcggtggatcgtccatggcgctgtttgggagggttggtggtgggatttacaccaaggccgcggatgtcggcgccgatcttgtcggcaaggttgagaggaacatccctgaggatgacccgagaaaccccgcggtgatcgctgacaatgtgggtgacaacgtcggcgacattgccgggatgggctccgacctgttcggctcctacgccgagtccacctgcgcggcgctgttcgtcgggtccatctcgtcgttcggcgctgaccacaacttcgcggcagtgtcgtaccctctgctgataagctcggccggcctcattgtctgcctgatcaccacgctcttcgccactgacctctacagggtcaagaccgtcgacggcgtcgcgccggcgctgaagctgcagctgctcatctccaccgtgctgatgaccgtcggcgtcctcgtcgtcaccttcacagccctcccccacgagttcaccatgttcgactttggagaggtgaagcgagtcaagaactggcatctgttcttctgcgtcacaatcgggctttgggcaggtctcgcgatcgggttcaccaccgagtacttcaccagcaatgcttacagtccggtgagggacgtcgccgactcctgcaggaccggagcggcgacgaacgtcatcttcgggctcgccctcgggtacaagtccgtcatcgtgccagtgttcgccatcgccgtgtccatctacgtcagcttcacgcttgcctccatctacggcattgctgtcgctgcgctgggaatgctcagcacggtcgccaccgggctcgccatcgacgcctacgggccgatcagcgacaacgccggtgggatcgcggagatggccggcatgagccaccggatccggcaaagaaccgacgccctcgacgccgccggtaacaccaccgccgcaatcggcaagggattcgccatcggatcggcagcgctggtgtcgctggcgctgttcggcgcgttcgtgagccgggcggggatggcggtgatcaacgtgctgagccccaaggtgttcgtggggctcgtcgtgggggcgatgctgccctactggttctcggcgatgacgatgaagagcgtcggcagcgcggcgctgaagatggtggaggaggtgcggcggcagttcgccgccatcccggggctgatggaggggcgcgccacgccggactacgccagctgcgtcaggatctccaccgacgcgtcgctcagggagatgatgccccccggggcgctggtgctgctcgcgccgctggtcgccggcaccttcttcggcgtccagacgctcgccggcctcctcgccggcgcgctcgtttccggcgtgcaggttgccatatctgcttccaacagtgggggagcctgggacaatgccaagaaatatatcgaggcaggtgcatccgaccatgcaaaggcacttggtcccaagggttcggacgctcacaaggcggcggtgatcggcgataccattggcgacccgctcaaggacacatccgggccgtcgctcaacatcttgatcaagctcatggccgtcgaatctctcgtcttcgcgccattctttgccgcccatggaggattgatattcaagtga

SEQ ID NO: 32375 - DNA, 527 bp, Oryza sativa
  Clone ID: PAT_MRT4530_36590C.1
gggccttctggtggtcgcaacagccacaatgcaagaagagctcaaatcgggcatggttcgtcggcagtcaacggaacctcagcaatgccttcaagtatgctgaagtccgggatgatggcgatcaaataaacgccttgctgtgtttgcgcgcatgctcttgaggagctgctgcaagttggcggtgcgatccctgccaacactccctcgcaacctctcaagtctcattttacgtcggttttggcacttgtttggtggagtgttagtctcacttgcagcggcaactcggcgccgtctattggtagacgcacttgatacacggggtacattttggcttgggcttgtggcgttaggagactttggtgttgtgtgttttcttgtctgttcttggttctttctttgggctgggttattttcttttgcttctcagtataatacccacacagcatccttttcctggctactcaaccacagtagaccgagagttggcctcgtgtatatcgtataacttttagaaaaaaaaaaaaaaa

SEQ ID NO: 32376 - DNA, 756 bp, Oryza sativa
  Clone ID: PAT_MRT4530_36591C.1
ttatctcggcgggtacaccatctcttcattccgcattccttgtcgatatccaccaaccgttctcgagtaatcgagaaggcgcagagtctgcgacggagccttgtcaacatttgtcgtactcgccttagtcgaacttggtgtagaaccatagagacatggaaccttcgataatgtcgaatagaattttcctcgaccatctgaggttgcggtgcgagagattgctacgtactggttcgaggaccagtgaacgagtagaattatctctcgaacaccaatggatgttgcggtgcaggagattgctacgtactggttcgagaaccagcgagcgagtagaatcatctctcgaacaccagtggaggttgcggtgcgagagattgctacgtactggttcgaaaaccagcgagcgagtagaattatctcttggacaccaatggaagttgcggtgcgagagattgctacatacttttctcgagtagtccagccatggccggtgctatgagataggtcatcggtcttcgttggtaggttaggtgcgacgactctgcatttgtcgagatcgttctcgacaatacggtgtacttgaccacaacctactcgagtgctcaatggttcctttgtaaatacatgtcggatgtatcttgttgcgcactcgttcgacatcatacgatctaacatcttttggtacgctgcgaagcttgaggcttggatgatctcgatagaccaagttgtcgatgacgacgatagttccgatctcat

SEQ ID NO: 32377 - DNA, 448 bp, Oryza sativa
  Clone ID: PAT_MRT4530_36592C.1
gctcttctccttgtcgctcgcttcgcccgcataagattagtcactaagctggctcggccatcgccgccgacggcgtttgcttacaccgggcgatgcatgacgcggatctagagattccgcgtggagagcccgcacgtgcggtacggcacggaggaaagcgagttggactaccattacgaccatgcatgaatgtttcgcgacggtatgaccacaaaccagaaaggcaacagaggcccccaggttgatgaggaagagccatcatatgatcgagtgcgcccgcatgcttggagtgacacttgcagggcggatactgatcaacggatcatcgctcacagcggggataatcttgaacaggaagggaaatcaatggccgaccaaggacatggtgcagcatgtgaagtactctggttcaatcacctaggagatcaagatcagggtcgtgagctac

SEQ ID NO: 32378 - DNA, 1820 bp, Oryza sativa
  Clone ID: PAT_MRT4530_36593C.1
agaaattttatctcggcgggtacaccatcttttcattccgtattccttgtcgagatccaccaaccgttctcgagtaatcgagctggcgtagagtctgcgacggagccttgtcgacatttatcgtactcgtcttagtcgatcttggtgtagaaccatagagacatggagccttcgataatgtcgaatagaattttcctgacatcaactttgttgaggtagaggtaatgggagaatcgctacacctctgatcaagaaccaggtagtagtcgtaacttaaacacttttctcgagtagtccagccatggccggtgctatgagataggtcgtcggtcttcgttggtaggttgggcgcgacgactctgcatttgtcgagaccgttctcgataatgcaatgtacttgaccacaacctactcgagtgctcaattgttcctgaaaaatattttctttgtagctacatgccggatgtatcctattgcgtactcgttcgacatcatatgatctgacatcctttggtacgccgcgtatcttgaggcttggatgatctcgatagaccaagttgtcgatgacgatgatggttccgatctagtcggaagatgtactggcgtgccactgtcgacgtttgatgtcgcgattccggtatttgcatagtatggggatcgttggtactaggatatacgcgagacctacatcctgttggccaaagccggtattgctcttattcataataatcacaccagtacaatatttggggtagcctatctaactgttgtcgacatggcggtctgaagatctgactcgtagtcgacaacagggtagccttcctactcgaatccgcgtgttcctcccggctcttgccccatagcacgttgtagaggccggcgacgagcagcaggctgccgataatgcttcctaggctgacgtcctcgccgagcaggaacgaggcgatggccatggtgaagacgaggctgagcggcatcgacatggacaggaacacggggcccttcttctcgatcacccatatctgcaggtagtacgagatcgccgccaccacgatgccggtgaagaggacgccgacgaggctgacgacgccggggaggatccaccgggagaagtccctctcgaggacgagcgcgatcaccagcgactgcacgctcgcgaacacgcactgcagcgtcgtgttcatcagcttcgacgggtactccagcagcaacggcccctgcttcaccgtccagaacgaccatatcacgacggaggtggtcatcaggaagatccccagcgcccagttcttcttggaatgcgccgcggcggcggcggcggcgctcgcatggtggaggagctggtggtggttcaaggacttgaactccgggccttggtacagagccagcacgatgacgccgccgatgcagaggagtatccccgatgctttcgccatgccatgggtgctcttcaggttcagagtctccatcctgaacatgacagccaagatgaaggcgaccaccggcacgatgttgaagatggccgacgacgaggtggccgacgcgtaattcaggccaatgctgtacaggtttatcgttccggccatcccatagaatccatggacgaagatcttggcagacagccgaaacgtcagcggcggcgcctgcttcttctcgaggaagtaggcgaagggtagcaagaagatggcggcgacggcgtggcggtagaacacgaacaccgtggtgctggcgccctcgttgaaggaggccttggtgagtatgtgcatcccggcgtatatcagcctgatgagcaccaccgtcgcgtacaccttgccgttccccat

SEQ ID NO: 32379 - DNA, 902 bp, Oryza sativa
  Clone ID: PAT_MRT4530_36594C.1
tctcggcgggtacaccatttcttcatttcgtattccttgtcgagatccaccaaccgttctcgagcgatcgagaaggcgtagaatctgcaccgaagccttgtcaacatttgtcgtactcgccttagtcgatcttggtgtagaaccatagagacatggagccttagataatgtcgaatagaattttcctgatatcaactttgttgaagtagaggtaatgggagaatcactacacctctggtcaagaaccaggtagtagacgtaactcaaccacttttctcgagtagtccagccatggccggtgctatgagataggtagtcggtctttgttggtaggttgggcgcgacgactctgcattcgtcgagatcgttctcgataatgtagtgtacttgaccacaacctactcgagtgctcaattgttcttgaaaaatattttctagaaggcaagacatatagtagataatgtcgagtatgtattcgaaaaaggctgagtcgatgtccgccgcagcggtagcgacgtcttgaagctatctatctcgaaggaccgaattttcggttatgcttccgatctcgtcggaagacatactggcgcgccactgtcgatgtttgatgtcgcgattctggtatttacatagtatggggatcattggtactaggatatacgcgagacctacatcctgttggccgaagccggtattgctcttattcaccataatcacaccagtacagtatttggggtagcctatctaactgttgtcgatttggcgatctgtaagtatgtggtatccataaccctgacagtagcccccccgacttcaatgcaaatgaacgaattcatattctcaaccgcagaccttggagtaactgttatcgagctcacgcgaccgttctcggtgagtttaga

SEQ ID NO: 32380 - DNA, 476 bp, Oryza sativa
  Clone ID: PAT_MRT4530_36595C.1
aaaaaaaaatttttttttggggggaatttcacccaaaaaccgggcaacaaaaagggcccccataatgggcacaaagcggggcactaaaaaaagggccaaaaaaggggggccccaaagcaaacagggggggacaaaacaccaaacattaaggggggagacacccgggcaaaatttccccgttttggaaaacaaccaacggggttaacggggagggcaggcttcagaaaaaaggggaacggggggggaaaaaaagggccccaagcggacgggggcaaagaaaaagttcccaaccacggggaacccccaaccgggggtccaccatgaacagggagggcccacgcattcaactgggaaccaaaagggaggggcatgggaaaaaaccccccctccttttccattcggggggggggggttccaggtggggaggccaaaaggggggcccccccaaccggggggggggacgggggaaaccccgg

SEQ ID NO: 32381 - DNA, 710 bp, Oryza sativa
  Clone ID: PAT_MRT4530_36596C.1
atcatgaataagagcaataccggtttcggccaacaggatgtaggtctcgcgtatatcctagtaccaacgatccccatgccatgcaaatactgtagtcgagacatcaaacgtcgacagtggcgcgccaggcatatatctacacaggtatttaatattttatctgtaatttatcgtatctattcagatcatacagcattgtcagatccatgatttattatgtttacctagagcatattttttatacaatatctattgtgcaagtgtccccgattcttgtcttctagaaaatatttttcaggaacaattgagcactcgagtaggttatggtcgagtacaccgcattatcgagaacgatctcgacgaatgcagagtcgtcgcgcccaacctaccaacaaagatcgacgacctatctcatagcaccggccatggctggactactcgagaaaagtggttgagttacgactactacccggttcttgaccagaggtgtagcgattctcccattacctctacttcaacaatattgattccaggaaaattctattcgacattgtcgaagacttcatggctctatggttctacaccaagatcgactaaggcgagtacgacaaatgttgacaaggctctgtcgcagactctgcgccttctcgagaacggttggtggatatcgacaaggaatacggaatgaagagatggtgtacccgccgaga

SEQ ID NO: 32382 - DNA, 205 bp, Oryza sativa
  Clone ID: PAT_MRT4530_36597C.1
gcctgcagccagactttggctgattacagtggcatggagaatacaggggccctaacattattccgagcagtcccgaacctctaacaagtcacttttgcgtgcggcactaatcgcttctggcagaaaaatgaagtcgaaacctcccttgtaaggtacacactacacaaaggatgatcctggaatcaactatcccctcgtgccggag

SEQ ID NO: 32383 - DNA, 752 bp, Oryza sativa
  Clone ID: PAT_MRT4530_36598C.1
atggctaggttcgcgggatcccttcagctgtactgcctctccgtcctgctcgtgatcctcacccagcttggaggaggctctgccatggggctcccccggccgccacccaacgtgaacttcaccatcggcgtcgagggcgctgtctggtgcaagacctgccgctacgccggctacgtcaagtccaaggacgcctcgcccctcccaaatgcggcggcgctgctgcggtgcaggcgggggaagtgggcgctgtcggtgtggggcgcgacgacgcgcgcggctacttcctgatccagacggggacgcaggtggcggcgttcacgagcaaggactgcagggtgtacgtgccgcggtcgccgtcgcgtgcggcgtgcggcgtggcgctccagcctgggcggaagacgggttcgccgctcaagttccgcaggttcgtggcgctccccgacgggctgcaagggcgctactccgccggcaacttcgtcttcggcccgcgagaccccaagaaatgctgactttctgattagcggtaacgtgtttgggactttggggctgggggtggtgtggctgtgcacttcgaattctacaacttggtcacagtttgtgtgtggcgtgtgcccggtggatcgacgtggacgtgcatttccgcatccagcaaataatgatgataaaaaagtgttggacgtagccccagacctagtgtgttgtgtttagttcctttcaaacttccaaaatttcatcgtaaaaaaaaaaaaaaa

SEQ ID NO: 32384 - DNA, 180 bp, Oryza sativa
  Clone ID: PAT_MRT4530_36599C.1
atggggaggaagaagctgaaggcaaaacaggacattgccccattgatgatcacgcacgctggtatggcggacgccgacgttgattggacctcacctgacagcgggccggtgcaagcgggctttaggcagctccacaactctactccagactcaactcctgaagctaaatttaggagttag

SEQ ID NO: 32385 - DNA, 216 bp, Oryza sativa
  unsure (1)..(216): unsure at all n locations
  Clone ID: PAT_MRT4530_3659C.1
atcccgttatgttttgttcttagtttccgatagtctgcgttgatntttttctttggtctggtaatgtccattcagaattcagtgccttntngggtatttcattaatttaggtttattcataatgcaacagccgatactttgccagtgattcanncntaaanaaaaaaaaaaataaacaaanaaaaaaaaaaaaaaaaanaaaatannanaaaaaaa

SEQ ID NO: 32386 - DNA, 471 bp, Oryza sativa
  Clone ID: PAT_MRT4530_365C.1
atgtcggcctcgagcaccttcagcgagtccctgaacgacctgcccatcgacgaactccgccgccgccgtgaccatccaccaaacccaaaacctccccccgaaccctacctcccgatctcgcagcgtcacctcgccggcttcctcctcctcctccggtggtgtacggctcggctcggggtcaggtcagctcaagcggcggcggtcagtggggcgaggcaatttaaagcgggggatgggtgccttgcgtgcacgggagggaggccgtactacggagtcgatgacatgtggggacagccaccccgggcccacgcgtcggtgacggcgggggcggtggggacagccgcgtggggccggacgtcagtgagtgtgggtagggtggcgatgagacatggcccggtgggaggggaggggtggggcccagggaaggttgccacgttcgcttctggaaggtgcgatgagctcgctagctaa

SEQ ID NO: 32387 - DNA, 276 bp, Oryza sativa
  Clone ID: PAT_MRT4530_36600C.1
ttccaaagcactacccgaagtaacaaaccggcgcgtttttgcagatagatcgatcccaccgaccaagtgcaagccgaccacgtaagccagaggggtgtgagacctaaacctcgactgctccgacgcgaagcgcgatgaatctgagctggcattcgatagatgaggtatggtgggagccggagcgagaagcccggttgcatgatcggaacacgactatgtgttggaatcggaatgcgactggatggtgctgaacatcggtgatggtgatagtgatgg

SEQ ID NO: 32388 - DNA, 704 bp, Oryza sativa
  Clone ID: PAT_MRT4530_36601C.1
atgctgacgtcgcaatgacggccggctcgggttggagagctcgccggagctagagaggtcggccgcggaatcggagggcatctacgcgtagagggcatcgagacgaacccgatggtactcaccactacgagaaacgatgcacgacggcggccggcgacgagaagaagcggcgcggcggctcgggtcgacggcggcggaggggctccggtggtcggcggcgaaagaggaggggcagccgaggttcctctcaccacggcgcacctaacggcgatgacggcaagcggcggcgacggcggagacggcgcggcgacgtgaccgaagacggccggcggcggcggcggacttggagcgcgtcgcggcggcgctaggaggcacgggagagctcgggagagggggcaaacggaataggacgacgaggggaagctttatatagcattggattgaagagatcgagctccaaacgagaggaatcgattcgggaagaaatcaaactcgattttagggataaaatcaaaacgaattcgattcggagagaatactcaacgattcgctttgatttttgggggaaaagaaagaggagaacgagaggaacaaaacccctcaaaaacccggaggaatcggggtcggattgaggcggatttgagaggagaaaggaggcggctcgggcggcttgcgaggcggcggccggaggttgaagacggccc

SEQ ID NO: 32389 - DNA, 108 bp, Oryza sativa
  Clone ID: PAT_MRT4530_36602C.1
tggagaaaactctttcgttctgaggaagaatgcaagctggacgcgctggtggaaaggatgagatcggtggtgttgagtctaagacctccaagagttggtgttggttag

SEQ ID NO: 32390 - DNA, 531 bp, Oryza sativa
  Clone ID: PAT_MRT4530_36603C.1
atggcggcggcgcagcagccttcgctgccgtggcaggatctctcggcgcatctgcgagggctcatcctcctccacctcccgtccctccccaaccacgtccgcatccgcgccatctgccgctccacgccaccaccgccggcactgacgacgatgaggaggatggcggcgacgcagcagccttcgctgtcgtggcaggatctctcggcggatctgcgagggctcgctctctcggcggacctgctaggcctcgtgttcctccacctcccgtccctccccgaccacatccgcctccgcgccagttacctcgccgtcaacaacatcgccggcagctataaaacttttgtgatttggggtgagaggcggcggcaccacagcgaggatcgacaaagcgacacggtggtggtggccgtgctcagctttcgacaattgaggactgaaacaatgggtcatggagggcgggagggtgctcaaggcgagggaggtgacataagcagtggtggtggggctgctctgttgttgctgcagaggtga

SEQ ID NO: 32391 - DNA, 311 bp, Oryza sativa
  Clone ID: PAT_MRT4530_36604C.1
aaaatatactcacgttttattaaattgctggggatataaacaaacagatggtacaatgaaattttttttcatcatataaaaagctgtacgtgaaattaaatgccgcaaaaagacacatttataaaaaaaaatatacggtttcccaaaaaattgataaactatagatggatccatataggataaagacattttataaaaaaaaaaacctaaattgttcaaaaattgatccaaaacaacatattcttaaaaaaggcatttagtttggtaaggacgcaaacatcccgcataaggctgaaaattttatttttttt

SEQ ID NO: 32392 - DNA, 446 bp, Oryza sativa
  unsure (1)..(446): unsure at all n locations
  Clone ID: PAT_MRT4530_36605C.1
ttccccgtcacgagcaaggcgcgagcccggccgcgagcgtcgagcaagcagcgctccaccatcgtctcccctccgcccgccgttgtctcgatcccctctgctcgtcgcatgccgctgtaccaaacaaaccaccatctgtcaccgtctcttctcctccccgcttcaccaatcaatccaaaccctagagcaataccccttgctggaatcgctcgcaccctagagctccagttcccaccccagccacggcggatcaggggcagtctggtctgctgccgcagcgatatcgtgcgccccggatttgagagttccaatgccgatttcgtacgtggtcgtggtccctgggtggattattgnacagtgagattcttctctactgactttgatttggtttctttgattntgcttcccgatgatgtggatgtggttcgtgttcaggaacctttgcg

SEQ ID NO: 32393 - DNA, 187 bp, Oryza sativa
  Clone ID: PAT_MRT4530_36606C.1
atggtagagatgtacaaaatcctaaagacaaaaaggcttactgttactgccgtgccaggagtccctgaagctggatctaaggaattgcttattggtaaaccgatgatctcgtcttgtgacctgcatgggaaaccaaaagatacttctgagacactggctgttgatgagcactccatgggggtctacg

SEQ ID NO: 32394 - DNA, 2011 bp, Oryza sativa
  Clone ID: PAT_MRT4530_36607C.1
tgatattgctgaggaggtagtcaagttagagaagcaaatccagcaagttataaagcttaaagagcagtggttgcacccttcccagctcaatcccaaccagcttgctgagactggcagaccacggtctcacgacaacttcccatatcttgtcaaagatgaagatcttgtggggattgaagaccacaagagattgctggctggatggttgtactctgatgagccagatagagcagtgataacagtatctggtataggtgggttgggaaaaaccacattagtcacaaatgtttatgagcgtgaaaaggtcaactttgctgctcatgcatggattgttgtctcccagacctacaatgtggaggctctattaagaaagctccttagaaagattgggtctactgaactgtcacttgatagcttgaacaatatggatgcacatgacctgaaagaagaaattaagaaaaagattgaagatagcaaatgtttgattgtgctggatgatgtctgggacaaaaaagtgtactttcagatgcaagatgcattccagaatcttcaagcaactcgagtcatcatcacaactcgagagaatgatgttgcagcccttgctacctcaacacgccgtctcaacctccagcctttgaatggcgctgatgcatttgaactcttctgtagaagggctttctataacaagggccacaaatgccccaaggagctagagaaggttgctaattctatagtggataggtgtcatggcctaccactagcaattgtaacgataggaagccttctgtcttcaagaccagcagcagaatttgtttggaataaaatatacaaacagcttcggactgagctagcaaacaatgatcatgtccgagcaattctaaatttgagctaccatgacctatcaggagacctcagaaattgcttcttgtactgtagcttgttccctgaagactacacaatgacacgggagagccttctgaggttgtgggttgcagaaggctttgtgctaggcaaagaaaagaacacgctagaggatgtcgcagagggaaaccttatggaactgatccaccggaatatgctggaagttgtggacaatgatgagattggcagggtaaactcctgtaagatgcatgacattgtgcgtgtattggctctttctattgctaaagaggagaggtttggttcagccaatgatcttggcacaatgttgcttatggataaggaagttcgtcgcttgtcaacatgtggatggagtgatgatactgtatcaacagttaaattcatgcgccttcggaccctgatctcactttcgacaacctcattgccccttgagatgttatcctcaattttgtgtggatctagctaccttacagttcttgagctgcaagactcagagattactgaagtgccgacttctattgggaatatgtttaatctacgttacattggcttacgacgcaccaaagtcaaatcacttccggagtctattggaaagttatctaacctccacacgcttgacatcaagcaaaccaaaattgagaagctaccacgaagtattgttaagatcaagaagctaagacaccttatagccgatagatacgttgatgagaggcagtcagatttccggtactttgttggaatgcatgcccctaaagaactttccaacttgcaagagctgcagactctagaaactgtggagtctagcaaagacctggctgagcaactgaagaaattgatgcaactaagaagttcttttccccacctgaagacacttgtcttaaagcacatgcccaatgtgaaccagctaaagatcatggatggggcacttccatccattgaaggtttgtacgttgtgtcactctcaaagctggatatagtccctgagggcattgagtcccttcggaccctgaagaagctctggcttctgtacctgcacagggacttcaaaactcaatggcacaaaaacagaatgcatcagaagatgcagcatgttccagagattcgtgtttag

SEQ ID NO: 32395 - DNA, 376 bp, Oryza sativa
  Clone ID: PAT_MRT4530_36608C.1
gatcataaggcaaagctgcgagcgccagggcaaacgcttactccaggttcctgataatgtgcttcaaaatacaggaagtggttggcagaaggtaacccactcgttatttacaacccgacacacacaccggccactaaacggtggaccgtgcgtacttgacgtgaccacaatggggcattactactccgtaagcgacgacacctcagctatacagggatccagcccgcggatgatccagtcatacagacggtggctgagttaatggactcacaaatagactctaggacagaatagtggccctgtgcttaagcttcgctgcttccttgatctggggaccaccatcctccgcattgtgagacgtccagagagtccgatt

SEQ ID NO: 32396 - DNA, 3134 bp, Oryza sativa
  Clone ID: PAT_MRT4530_36609C.1
caaggaccaagctgcaggcagctggctcaagagctccgggcgggtcaaggtctcctcctctctcgtcggcgacctcccttgcgattgattcatcagggttctgcacattgaccgtacagcacctgcgctccagccctgttctctggtcttccagcagaacaaatggctgaggcagtgctcctttctgtcaaaaaggttggcaacgtgttagcagatgaagctgccaacgctgtcattgccaaggtgtctgaaaaggttactaatttgaaggagatgccagagaaggtcgaggaaataaggaagcaactgacaatcatgaacagtgttatactacagataggcacctcatacctcactggtatagttgtaaagaattggattgcagaggtgagaaagttagcctaccatgttgaggacgtaatggacaagtactcatatcatgctattcaacttgaggaagaaggtttcttgaagaagtacttcgttaaaggttctcataaagtcgtggtatttagtgatattgctgaggaggtagtcaagttagagaagcaaatccagcaagttataaagcttaaagagcagtggttgcacccttcccagctcaatcccaaccagcttgctgagactggcagaccacggtctcacgacaacttcccatatcttgtcaaagatgaagatcttgtggggattgaagaccacaagagattgctggctggatggttgtactctgatgagccagatagagcagtgataacagtatctggtataggtgggttgggaaaaaccacattagtcacaaatgtttatgagcgtgaaaaggtcaactttgctgctcatgcatggattgttgtctcccagacctacaatgtggaggctctattaagaaagctccttagaaagattgggtctactgaactgtcacttgatagcttgaacaatatggatgcacatgacctgaaagaagaaattaataaaaagattgaagatagcaaatgtttgattgtgctggatgatgtctgggacaaaaaagtgtactttcagatgcaagatgcattccagaatcttcaagcaactcgagtcatcatcacaactcgagagaatgatgttgcagcccttgctacctcaacacgccgtctcaacctccagcctttgaatggcgctgatgcatttgaactcttctgtagaagggctttctataacaagggccacaaatgccccaaggagctagagaaggttgctaattctatagtggataggtgtcatggcctaccactagcaattgtaacgataggaagccttctgtcttcaagaccagcagcagaatttgtttggaataaaatatacaaacagcttcggactgagctagcaaacaatgatcatgtccgagcaattctaaatttgagctaccatgacctatcaggagacctcagaaattgcttcttgtactgtagcttgttccctgaagactacacaatgacacgggagagccttctgaggttgtgggttgcagaaggctttgtgctaggcaaagaaaagaacacgctagaggatgtcgcagagggaaaccttatggaactgatccaccggaatatgctggaagttgtggacaatgatgagattggcagggtaaactcctgtaagatgcatgacattgtgcgtgtattggctctttctattgctaaagaggagaggtttggttcagccaatgatcttggcacaatgttgcttatggataaggaagttcgtcgcttgtcaacatgtggatggagtgatgatactgtatcaacagttaaattcatgcgccttcggaccctgatctcactttcgacaacctcattgccccttgagatgttatcctcaattttgtgtggatctagctaccttacagttcttgagctgcaagactcagagattactgaagtgccgacttctattgggaatatgtttaatctacgttacattggcttacgacgcaccaaagtcaaatcacttccggagtctattggaaagttatctaacctccacacgcttgacatcaagcaaaccaaaattgagaagctaccacgaagtattgttaagatcaagaagctaagacaccttatagccgatagatacgttgatgagaggcagtcagatttccggtactttgttggaatgcatgcccctaaagaactttccaacttgcaagagctgcagactctagaaactgtggagtctagcaaagacctggctgagcaactgaagaaattgatgcaactaagaagtgtgtggattgacaacataagttctgctgattgtgcaaatattttcgcttttctttccagcttgcttctttctgcaaaagatgaaaatgaggaactctgcttcgaggctcttaggccaaggtcaacagaactccacagactaatcatcagagggcgatgggctaagggtacacttgattgcccaatatttcacgggaacggcacaaatcttaaatatctagctctaagttggtgtcatcttggtgaagatccactagggatgctcgcttcgcatttgccgaacctcacttatttgagactgaacaacatgcatagtgcaaacattttggttctttctcagtcttttccccacctgaagacacttgtcttaaagcacatgcccaatgtgaaccagctaaagatcatggatggggcacttccatccattgaaggtttgtacgttgtgtcactctcaaagctggatatagtccctgagggcattgagtcccttcggaccctgaagaagctctggcttctgtacctgcacagggacttcaaaactcaatggcacaaaaacagaatgcatcagaagatgcagcatgttccagagattcgtgtttagaactttagatgcggctggctggtgccgtttgtagtttttttccccctctgtttgcagcaggtgtcgatttccgatgagttgcctatcattcctagcttttttgcgttcgcggtgcctctgtacattatgtgtagtttcatttactttgatattcattgtatgtaagagcacatccatttttttataagaccttatttgcatgtactgttgccaatatattaatctctctgtttggagataaaaaaaaaaaaaaaaaaaaaaaaaaaaaa

SEQ ID NO: 32397 - DNA, 219 bp, Oryza sativa
  Clone ID: PAT_MRT4530_3660C.1
atgacgacagccccgcgcgtcaaggaaggacagcagcatggcggtggggagcgcaagggagggcgaggtggccgggcggtggtgaagaagacgagcccgcgccttgagggaggacatgagcgggtggtccgctgcggcgcgcgggtggcggaggatccgcgaacttttggggagcaaagagacacgtggcagatttttggggaggaaaagcttctctaa

SEQ ID NO: 32398 - DNA, 150 bp, Oryza sativa
  Clone ID: PAT_MRT4530_36610C.1
atggagacctacaatatctacatcttcaaggtgcagaagcaggcactggaatatcacgaattcggctctggcttcctccagattgtttctcaatgtggatttgtctacggcttctcaatgtggccctccttgaacacagtggccatgtga

SEQ ID NO: 32399 - DNA, 1365 bp, Oryza sativa
  Clone ID: PAT_MRT4530_36611C.1
atggcacctgctcatcatcaggcagcggcggccaccaccgtcaccactcaagatatccggcgagcacagcgcgccgatggcccggccaccgtgctcgccatcgccacggctaacccggagactcgcagatcgcaggatgaatatgccgacttctacttccgcgtcaccaagagcgagcatctccctcagctcaaggagaagctcgagaggatctatgtagacaagttctatattaacactgtagagctctacgcaatgtacaactttatactagaaagtcattacaagctcttgtatctattttgggattctttacaaagttcaaactttgaaaatttcttgcaaattcgcaagccccatcaaggtaagaaatccggcatcgaaaatcggtacacgtacgtgaacgacgaggtcatgaaggcccatccagagttctccgatcgcaagcttccatccctcgatgcgagggtagagatcgcttccaacgccgtgccggagctcgccgcggccgccgcgtcgatggccatcgcagaatgggggcgcccggccaccgacatcacccacctcattttcagcacatactctgacttgaaggccccgagcagcgaccgccggctggcgtcgctcctcgggctccgccataccgtctgccgcaccatccttagcctccacggctgctacggcggctgcagggcactccagctcgccaaggaactcgccgagaacaaccgcggtgcgcgcgtcctcgtcgcctgctccgagatcagcctcatcgcgttctacggcccggaggagggctacacagacacagacaccttggttgcccatgcgctgttcggcgacggctcgggcgccgtcatcgtcggcgccgacccggtcgacgccgtggagcgcccgctgttcgagatggcattcgcgtcgcagaccaccgtccccgacagcgagggcgccatcacagtccagcacaagaagggcggtatggagtaccacatcgccagaggcttgccggagatgctcgccggcaacatcaagcggtgcctggccgacgcgttcggcgccatcggcgtcgccgccaggtggaaggacctcttctgggccgtccaccctggcggccgcaggatcctggacctcatcgaggaggcgctcgggctggacaacggcgccatggcggcgagccggcaggtgctgcgcgagtacggcaacatgagcggcaccacggtgatcttcgtgctcaacgagctgcgccgccggttcgccgccgacggcgccgagggcgccgactggggcgcgttgatggcgttcgggccggggatcaccgccgagacgatcttgctccgcgtcgcaagtggcctcaagggaaattaa

SEQ ID NO: 32400 - DNA, 372 bp, Oryza sativa
  unsure (1)..(372): unsure at all n locations
  Clone ID: PAT_MRT4530_36612C.1
ttttttttttttttttttttttttttttttttttttttttttttttttttttttttaaagcaaaaagcatctttagttctcatttttggagcagccaataaaacaattcgaacccccgacggaagttcaaattacccaccccagaggaaacgaaaaaacgacgagacataaaattttttttcccgaaccgactttggatcaaaacaacgccaaaacccacaacgggggaaaccccccccccaacaaaaaaganaagacaacnaaaanncttttcacgccccaaaaacaaaaaaaaataaggccggtggagttaaaacaacggtgccaccttaaagggctttggggccattttgccgtttattggaattaggg

SEQ ID NO: 32401 - DNA, 196 bp, Oryza sativa
  Clone ID: PAT_MRT4530_36613C.1
ggcacgaggttgttgatgggatcgatctgagctgcgttcgcttgccttgatctgaaatcggagtcggtcggggatactctagacttggggatatatacatggaccgtaatcgtggtgccggcgcggcggcgcggcggattgctacgagcaggaggaggatatccggtcaccgtccacatcagcggggactcagcgc

SEQ ID NO: 32402 - DNA, 224 bp, Oryza sativa
  Clone ID: PAT_MRT4530_36614C.1
atgaaaaataggattataaagtatattagttaattaagtaatattggatccctattacatatcccgtatagtctatttatagtttcactgtcctagatttacaattctaggttttttttatgccaatgaatttacatgaccgcctttataacagggaggttttaaaggggaaaaaagttacaccgaaggtcctcttcaactttgtccatcaagtttacaaaaac

SEQ ID NO: 32403 - DNA, 210 bp, Oryza sativa
  Clone ID: PAT_MRT4530_36615C.1
atgtcccgttacgccgtcttgacaaggcctccgaggaacctaagggatcttcagctggggacgcccagagccgataaggccttgtcggatcctgtagagacgaaagaccatctgggggctaggatcagtgcttgttcaaccgaggcaggtcaaaggtccaagagccttatcttccgagaagaattctccgatgacaaggctgggggctag

SEQ ID NO: 32404 - DNA, 359 bp, Oryza sativa
  Clone ID: PAT_MRT4530_36616C.1
acctaccccaggaagatgaggaggtggggtggccatgactgatgggtcacaagtatctagaccaccgtatgcagctggacccataactgatgcttgtactagaacggttaagaattcaacatgtgagatatgccattggattgccttgcattgacctgtgactattccaacttttaggaaaaagcatgaatcatattgaactcttgagctgtcgcatgaatatgtactatccatgtttactattcgatgattaagcattgttcattaccactcaaaataactttgcttactacatctttcttcttttttatgcatgcatacacattatcaaagtcctttttgtattgacatacctggct

SEQ ID NO: 32405 - DNA, 753 bp, Oryza sativa
  Clone ID: PAT_MRT4530_36617C.1
atggagatggggttcagtgcttggacgggggccatgggctctcttctccggaagctcgattcgccgccacaggctggtgatggtggtcacatggaagcggcctacgacgggatccactcgttcagagacgacatcgaagagagccatggattcctccgcaagctgtcgcagctggaggagacgaccatggcggacaagtgctggatgaaggaggtgcgcgagctgtcctacgacgtcgacgacttcttggacgagatcgccctcgccgccgccgacaacgccgacgccatactcatcgccggcaaggtatccaagttccgggaacgcgcgcaggaggcgagacagcggcggcggcgcaccaggtacggcctctgccaccatcctacgagcaggcggagcagccgccggagatgctcgtcgacgtccatcaccaccaggcggccgccaccgcggttcggcgccgacgtcgaagtcgcggcgacggatgaggtcgccaggtgggcgacggacgtcggcggcgaggagtgggggctgaaggtggcgggcgtcgtcggagccggtgggaccgaggtacttgcttgggcgaaggaaaagagaccgagcgtaaagaattcatggatgatcaaagaagttgattggggaccatatcaagaccttctccaagtcttctttcatttcaccacgtcacttttggtccatagaagacaagagataaagttccacacgttttggattcggattcgggcctcgtga

SEQ ID NO: 32406 - DNA, 372 bp, Oryza sativa
  Clone ID: PAT_MRT4530_36618C.1
ctctagaatcttcgcataaaatatgagcagtactcaaagcaatacaacaccttcttctgtagggagaagtccttaaccgcccttgctaaaataggccttacttgaacaaaaggatcaacttggatcttcaatgtgaattctaaggcatctttatgacaattcgtgaaaatgtagcaaaagagatattgcaactgagctcgaatcaccatgccttagagagatggaagccgatggcctgctattattactccatacaatgactctgttgtactagatcatgatattacctaggaggaaatcgaagactctgcatgctatatataacgtgatctcactttatgttgcatgatagtgatcgactcaagagcttgg

SEQ ID NO: 32407 - DNA, 152 bp, Oryza sativa
  Clone ID: PAT_MRT4530_36619C.1
atggtcgttcatggacccccgcgtcgaatctctgtgaagtcggagctgctttgctgtggtgcgatgaagcttggcaacgataacacctatggagtcgaagctgctatgtcgctaggcgacaagctcggcaatgataacacttacctcgcgaa

SEQ ID NO: 32408 - DNA, 1540 bp, Oryza sativa
  Clone ID: PAT_MRT4530_3661C.1
atggcgtctctccaagctcctgagttccttgcgtcctgcctcctcctcctcgccaccattctcctcttcaagcagcttctcgcgccgtcgtccaagcagcgcgccgcctcgccgtcgctgccacgcccgaggggcctccctctcatcggcaacctccaccaggtcggcgcgctcccgcaccgctccctcgccgcgctcgccgccaggcatgcggcgccgctcatgctgctccgcctcggctccgtgccgacgctcgtcgtctccaccgccgacgcggcgcgggcgctgttcccgggacaacgaccgcgcgctgtcggggcgcccggcgctgtacgcggccaccaggctctcctacggccagaagagcatctccttcgcgcccgacggcgcgtactggcgcgccgcgcgccgcgcgtgcatgtcggagctcctcggcccgcccgcgggtgccgcgaggctccgtcgaccgcccggtgagcgcgaggccgccgcgctcgtcgcggccgtggcggccgccggcgcctcccccgtcaacctgagcgacatggtcgccgccaccagcagcaggatcgtgcggcgcgtcgccttcggcgacggcgacggcgacgagagcatggacgtcaaggctgtcctcaacgagacccaggctcttcttggtggtctctgggtcgccgactacgtgccgtggctccggtgggtggacaccctcagcggcaagaggtggcggctggagcggcggttccgccagctcgacgcgctctacgagcgcgtcatcgacgaccacctcaacaagcgcaagcatgcatccgacgaagaagacgacttggtcgacgtgctcctccgcctccacggcgatccggctcaccggagcacgttcggcagccgcagccacatcaaaggcattctcacggacatgttcatcgccgggagcgacacgtcggcggtgacggtgcagtgggcgatgacggagctcgtcaggaacccggacgtgctcgccaaggcgcagcacgaggtgcgccgcgtcgtcgccgccggcgacaaggtgcgggaagccgacctcccggagctccactaccttcgcctggtcatcaaggagacactgcggctccacccggcggcgccgctgctggttccacgggagacgacggagccgttccgcacggcgcacggcgtcgagataccggccaggacgcgcgtcgtcgtcaacgcgatggcgatacacacggaccccggcgtctggggcccggacgcggagcggttcgtgcccgagcgccaccgcgacgacgccgacggctgcgcgcagcagcacgacgggttcgcgctggtgccgttcgggatcgggcggaggagatgccccggcgtgcacttcgcggcggcggcggtggagctgctgctggccaacctcctcttctgcttcgactggcgcgcgccgccggggcgcgaggtggacgtggaggaggagaacgggctggcggtgcacaagaagaaccctctcgtgctcatcgccaccaagagcaagaggaacacaggtggccattga

SEQ ID NO: 32409 - DNA, 169 bp, Oryza sativa
  Clone ID: PAT_MRT4530_36620C.1
gcacgaggggagaagcgagcacacacactcactccctgtctcctcctcctcctcctcccttgaggctgtggcgtctcgacgagtgcttggctttgtgtttgtggtgtgtgatcatgacgaaccaggacgtggtggtttcggagatgggcatcgcggcaggcgcggcgct

SEQ ID NO: 32410 - DNA, 1110 bp, Oryza sativa
  Clone ID: PAT_MRT4530_36621C.1
aacttctggagttatatttaggagttggagctgtgccaaacaggcccgtagtatgaatgagatacgtatctggctactatgtggtttagggctcggctggaattggcgggcggcgcggcgcggcgtcaagcggtgggggaggggaaggctcaccggaccgatggcggggtcgacggagatgcggcggcggggtcgacgtcggagcacggcgcggcgacgaggcacagcgcagcggcggggcgcgtcggctcagcggcggcggtggcttccgaagaggcggcgacgccggggacgggaaagagaggggaaagggaggggaggtggtcagggtggtgtgggaagtaatgggcggcaagggggaggggtttatataggtggaaggggcgggcagtgcttaatgacgacggcgacgcggcacggcggcgtggggcgcgacggcgacgggacggcgataggtgacatcgtgcagcggcgcggggctcggggcacggcagcggcacatggcgacggacgagcggcgcgcaacagagagaggcgacggcgacgggcgacagtgacgcgcacggcgcggtaggggcgcggagcacgaggcgggggcgacggcggcagcgcgcgcggaggggaggggctcgagacaacgcaacagacgacggggatgcgatggagtgcggcgcggcgacaggacggcgcgcggcagtggagtcaacgggacggcgatggcgcgcggcggggtggagactcggcgcggcatcggcggcacggggctcgaagcggcgaggggacgggcgcgcgacgacgggatgggcaatgcgacggcgagacggggctcgaggcgatggcggcacgcgcggcgcggcagcgggatggcgacggcgacggcgcggcagcggcggcgcgcagctcggagcggcgacgcgacgggcgggcggcgcggcgcggggctcggcgcggcttggcggggctcggcgcgacttggcggggctcggcgcgacggcgacaggcgacgcgacagcgacgcggcgcgggcgcgaggtggcgatgggacggcgcagtgtggcagaggagggggaagggctaggggaccacatcaagcagatggcgtgcaatgaa

SEQ ID NO: 32411 - DNA, 297 bp, Oryza sativa
  Clone ID: PAT_MRT4530_36622C.1
atgtggaagatggagttagttgcgggcttacaattccagggggtctaccaaagggagacccaattgaggggtttgcttggaattgaagcggaggttgttgagcgtttgacaccaatggctgaggtaatgcactcggcggaggctcagaggaaggaattggtggagcattggcttgggaagtcagctaaatctgcaccgcctgagctaactgctgatgaaacagtagcatttgcttcaatagcccttgaatttatctggttccctaaggtaaacgcacaagagacagatgtgctgtag

SEQ ID NO: 32412 - DNA, 2591 bp, Oryza sativa
  Clone ID: PAT_MRT4530_36623C.1
atggccgcaaaatcgaaaccctccaagatctccattttcggggccaaagctggatttctcatacccaagaacaagctccctggctcactcattgcccgttccagttccaacgccaagaatgaatcacctactgcttcttcttctgctgctgcttcctccaactccaagtccaaggaagacaacaacaacaactctactcaaagaaacactaaatggggcccggatctcaccctggatcctgccgtcagaaaatccagagcttcggcctaccagagtcgactggagcaaattaccaaggagctgatatcgggatccctagagataagtgaaaatgaaggctcgatatctactgcaaggggctcaaactctgatggtgctaacaatgagaaagagaatgtgcagggaatggttgagctcttggaacttgaaagaagagaaattattggtgaaatactccatttaaatccaggatataaggctcctgaagactacaagcctttactcaaggaaacaaaaatccctttgcctacaaaaacatatccagggcataatataattggagttcttatgggacctgagagcaatgcccagaagcgactacaggaagaaaccggagctaaaatacgagtatatgggattaagagaaccaacggagagaagagtgagattcaccaagcagacataggtgaagtgcaaggtgcttatgaagacctgtacataaatgtctcagctgacactcatgacaaagtagatgctgcgactgcactgattgagctgcttcttactcctgtctctataaattcaagggctattgaagcaaatgctactgtttcatcagcagttagctcaggcggtgcagatttagctgacctgcggcaggtgcagaacaacagttctcagccaggttttcttcagtaccaatcacatgatgctcactggctatctacttcccaagccaatgctccaccaattccttcctctgagcctccgccgagtgcattacctaacaattcttttccgcttcagcctcctggcggttctttgagtacgctttcatacacaggaccaccacctcttatgaatatcatgccaagaaacccattgcctattcctggacctcagccattggtgtcaaacgctcaacaacctccgcttcaattccaagcaaacccctcaattgggtctccctttggtagaccccctggaattgtaagcccgcaactaactccatcttccacattgccgcggtctgttagacctcttcaaacaccccatgcatctggaggatggctaaatttttcttctgttccagtgcaatctcagaggccttcaccagcttttatgccagtgagacctcctatttccgtgtctcctcttgtttcaagtccacagctggaaggtgccgctgttccatcgtttcctcgtcaatcaaatatctccacaagctatggcactcagcatcatccatcaggcgcaagctttgcatcttcagcaacaatgccttccatacctcctggtgccccccaattgtcacctcagggtccttcctcaatgccagtgctgtcgtctcctgctgggttaacaacacagccaccttatccgctgccgatgcaaatgcgtcctcccatggcaacacctgctcaaatgagaggcccgccttcacctttccctcagactgggccaactcctggcatgccacctgctggcgggtttggtgtgcctggttctggaaacatgaccgctatgaggccaccacgcccaagcagcggtgattttacctttcggcctcttgtgtcagcttcaccaacaccagagcttggagcatcaggcagtcaagtgccattattccatcctggcaaccagagaccacctatggcgcgagttgaaggtttccaaaggcctattgatatgggtcatcagggccgggcgtatgccactggtccaccgcatccacatcaacatccacatccacatgcacactttggtggtggaggcttcctcccaaggaatccagctgcatctgtgcttcaatcggcagggacaagggggtttgttggagctttccctctcccgccagcggcagttgaagcacaacggccgtttcatgtgttggcacaagcacaacagaagccaatatacgatccatttgtgccgagtggtgcagtaatgtcaggaggacctggaggtggaggaggaagaaaaaggaagacggaggatgacaaggctgagtacgaggatctcatggcgtccgttggtgtcaagtgacatatgcactttctttcttgagaagagttgggatctcttctttctttcttgagaagagttcactcttgctacctagtgtgacctttattagactaccacctagactagaagagtataggatgagtaattttggcattaaaggatagtagaagagaagaatgactgaatgtttgtttgtctgttattgatcacttgtatgttttggtatattgatcgatgatgacaattaaagcatcgtaatgtcttgtttcctcttatgttgtcctgtttggagaaaattaaggaaaatctttgatgcaaaaaaaaaaaaaaaaaaaaaaaaaaaa

SEQ ID NO: 32413 - DNA, 693 bp, Oryza sativa
  Clone ID: PAT_MRT4530_36624C.1
caatgcagccgacatgtggacccacgctcagtgtcgtcatcctcctctcgccagcgcccaatgccgaccgacgccactgcatcccttccaaaatccgatcgattcggtgagagagtcagcgatgcccaatccggtggctacaacgaggcagtgcctctcgtcggccgccgtccctgcccacgacgccatcgtcacctccaccggccaccgcgcccacgcccagaccacctccctccacctcatctcctccctcctcaccgcgacgccctcgcccgcacccacagcgccgccgtctccctcgataggctcccctccgtctccgcctcctcctcctttgcctctatcgccatcctcaatgaccccatcatcagtcgtgtcttccctgaggccggattccgcagcagggacatcaagctcaccatcctccgtccggctccacccatgccactcctcggccgcctccccacgtgcacccacccgccgcctctcttcctctgcagcttcgccaccgtggatgacgttgatgtcccttcgccggccgggaaccttgccggcgttggggaggagaactgctgccacatcaccgagatcctctcccacggccgcaactctcactgccgtcaaggtcgagctgtcccagcttgtcctcgccatcctcgatgaccccatctttgctcgaattttggaagggac

SEQ ID NO: 32414 - DNA, 738 bp, Oryza sativa
  Clone ID: PAT_MRT4530_36625C.1
atggagaaagacggggacgcggtggagtcgctggcggtcgatttggaggcaatggtcgggagcatggagaatgccggtgacggtggcctgcagtggctgaagtctgcgtgcgtctatgctgccttggccgcgctggtcccttccaaaattcgagcaaagatggggtcatcgaggatggcgaggacaagctgggacagctcgaccttgacggcagtgagagttgcggccgtgggagaggatctcggtgatgtggcagcagttctcctccccaacgccggcaaggttcccggccggcgaagggacatcaacgtcatccacggtggcgaagctgcagaggaagagaggcggcgggtgggtgcacgtggggaggcggccgaggagtggcatgggtggagccggacggaggatggtgagcttgatgtccctgctgcggaatccggcctcagggaagacacgactgatgatggggtcattgaggatggcgaggacaagctaggagagctcgaccttgacagcggcgggagtttgggcggtggtggcctggtggtagaagtggaaggtgtccgggttgcggcgctggttggcctgggagtgcttgatggcggccatgagggagttggagacggggggttcatcggcgtagaggcaaaggaggaggaggcggagacggaggggagcctatcgagggagacaacgaagcagaggtcgagggccttgagttggatgcgtggggagtag

SEQ ID NO: 32415 - DNA, 1620 bp, Oryza sativa
  Clone ID: PAT_MRT4530_36626C.1
gcgtggtctttccccaaatcaaaaaccctcccgtcccatcccctccttgtgtagttgtgttgtttgcggcgaaaccctaggattgtctccggcggcggcggcggaaggatcatggagcgggcggcaggcggcgtgtcgtaccagcggttcccgcgggtgcggatccgcgagctgaaggacgactacgccaagttcgagctccgcgacaccgacgccagcatggccaacgccctccgccgcgtcatgatcgccgaggtccccaccgtcgccatcgacctcgtcgagatcgaggtcaactcctccgtcctcaacgacgagttcatcgcccaccgcctcggcctcatccccctcacctccgccgccgccatggccatgcgcttctcccgcgactgcgacgcctgcgacggcgacggctcctgcgagtactgctccgtcgagttccacctcgccgcccgcgccaccgactccgaccagaccctcgaggtcacctaacgacctccgccgacctgccccgtcgctataacgtggggcatactaattctaaagctgcatcggggccaagagctcaggctccgagcaattgctaggaagggaattggcaaggaccatgccaagtggtcccccgccgctactgtgactttcatgtatgagcctgaaatacgtatcaatgaagaactcatggaaacattgacactcgaggaaaaacgaaatttggtggagagtagccctacaaaagtgttcaacattgatcccaacactcaacaggtggtagttgaggatgcagaggcatatacatatgatgatgaggtcatcaagaaagcagatgccatgggaaagcccggattgatagagatcaatgccaaggaggacagctttatcttcactgttgaaacaactggcgctatcacagcttatgagctgatcatgaacgctatcacggtcttgaggcaaaagttagatgctgttcgtctacaagatgacgatgctgaccttggcgagcttggtgcccaccttgttggaggctaagcgcagagctgcttgtcttgtgttacccacaaagtaggtttctctaactatcgtgctagaggcaaaacatgatggtttcttcgtttggatcaatctagtacatgtaatctccctgatctgtgccattaaatctgtgctggaactttgtgtggacgcaccagactactgttcaatttgatggcaaatcgacacaccagccagctcatctctgggacaaatgtggagctgctagtaatactgaatgctgttcacctgagaaaagtctttgggacttgcagcccgtcgttttgattggcctacggtaaatacaaagacatgctgtgttgaatgctgggttttgtgcaggtctccccagattcatatgctcaatgcaatgtggcgtttaatgctgtacatctccaggttaattgctgaatagtggtggtactagatggtttgatggattcgctgagcgagatgcgtggagttaagcgcgcgtgcatgtggatcagtactacgatcttgatggatgtaccaaatgatttggtaatgtactgatattttggacctaccaaaaaaaaaaaaaaaaaaataaaaaaaaaacctgcagcccgg

SEQ ID NO: 32416 - DNA, 944 bp, Oryza sativa
  Clone ID: PAT_MRT4530_36627C.1
acaggtggccaacgcaagtagtaggcaaacgcacagtgaataagctatctacaggttgacgagctcgtggcttttcccttgcatgtgagctgagctctccggccgggcccattgggtgttccaccgctttacgcctttgcctatcaatcgccttggcccccagagtagtacagcgtcgatctctgcagccgtggttagcaacagcaagcgaaggcgagtgaaagaaactcgatcgatcatcagtggcggtgaaagaaacaaaccaggacgttcgaacgatacaggagagatgaagatggagcaggtttcgcagaggaaggcgccgctcctggttctagtaatcttgtgtggccttcttcttcttcttcccctggtttcatctgtgcctctgtccagaagcgtgtccttgaggaaccaccaagcatcagtctctgctctggaggcgcctgttcaggttgtgtcggcggcggctgaagagcgagacctcgacgaagtggcggcgaggatggtgatcgaggtcaacgactaccctggctccggcgccaacaaccgccatgatcctaagagccctggaagagcatgaaacgatctctgatctgatctgatctgcagggccttgttgatcgatacatataggaatattcagtattagcttttgtacgtagtgatcgacatgcatgtgtgatatatgcagtgcttggacaggggcttagttagttaagtcttcaccgattattatcagatcgggtgaagaggttgattagctagctaccactctagtttaaaaaagagaaggaaacttttcaacaagttccttgtgatatatgtatctgcacgtacatgtgtccatgtccaccccatccgcccgttttgtacatcttgtgtactgcttactcaatgacaatagcagataaatatatttctacgaaaaaaaaaaaaaaaaa

SEQ ID NO: 32417 - DNA, 517 bp, Oryza sativa
  unsure (1)..(517): unsure at all n locations
  Clone ID: PAT_MRT4530_36628C.1
agaaggcaactaacacaaatcatattccccttatgatgcagtttttttttcccgttccattggaggagtagtagctttcacttgatgcatttagcactgaatctacagnaaacgggcaagctcgactgcaagtttagcaagcaacttgggagatgcatacacaggattgaagcatccaagatggatcgcccacctaacacggggagctatttgttttccagcggggaaagaaaccacgggcacggggagtcggttcaccggccggccggtcggtgctcagtaccaaaccaaaggtcaggatgatccggtttatccactggcacgtgacctgggcccaagagaatcccgccagccaattgccgcgcgccacgtggcccggtttggccctgactttttcactggtgaatggaacccattgtacttggtagtagtagtacatatccatataaccatattctgttttaggccttggnagtgacaccttggttaaaaccacccatgccccattttggtggtt

SEQ ID NO: 32418 - DNA, 990 bp, Oryza sativa
  Clone ID: PAT_MRT4530_36629C.1
cccggcggtgctttcggcgcgagaaccgcccggtcagaccagcgaagaaatgccagtcaggccggcatgaagccctcggtcagaccggcctcaagcagaaaatgatgtatgaaatgaactcgaacgaagtgacaatgcaagtgacctaatgtggcattttgatcaactctttacctaggtcattacctctcttgatagtacggcaaagctagaaataaacctagcaaaatttgatcacctaacacttcaatcaatttaaaacaaaacgctagatttaccatctttgttccattgctttgtgccattaattttaatccgcggtgatcatccatggcatgtacatcatgtggtcctaactcaaatatatcgcttaaatagaatagttagtccacaattagagcttgtcattaactaccaaaattaacaacgggggctatgatgcttcaatgtgctatatataatatgactgtagtacattgaatattttatttcattgcactcaaatataatcaatgttggcctattttacaaatttattattctggcatatcactacaagatctaagtaatactgacattttgatccatgtctgctttgcagacaatttttgtaaattggtatgagctaagaaattaattatacttgacctcagggtctaaagaaattaagccttaacaacattgtgaaatgcagtgagactgatttgatcttttaacaaataaggatattgtttgttagtggttctagatttggttaccctggccttttctcatgagcgcaattagggccgaacttttgtgtggccttgtcagagtgataaaaaaaaacataggcagtgcatcacttatctgaaaaattggttctgaattttccttctctatatccctcaggaatgatactaaaatctgatttgtgtactgacttatttcagtcatttgaatttgctatgtcaatacagtccatttttaataaaatctggaatacatttt

SEQ ID NO: 32419 - DNA, 759 bp, Oryza sativa
  Clone ID: PAT_MRT4530_3662C.1
atggcatgcggcagcgcggccaccggcgcgggaagcggcggcgcacgcgggctgcggtggcgagcggtgccgaggcacggtggcgacgcacaagcggcggccggtgcggcaaagagaggaaaagaaaggaaggggaggaggagggagatgctcaccgagatgacgatgaccggcacagggaaggacgacgacgaccacggcgatggcggcgccggcccggcaaatggagttccgacgatggaatggggaaatggagtggaggccgagtttgcctgcgcggtggcgaagccagcagtggaggcgacgcagcacggcggcggcaggagcggcggtggcgcgcggctggagaccgccgacgagcgacggagctggggcgcacatggggagagcggggaaaggcgcggggagctcggggaggaggcccgggagggagtggctcgggccgggatgggcggcaaccggcgtcggagtggaggcggcatcgtggggtggggtggaggtggctcgtcgccgattttcgcggggcgtgagggggaagtggtggaggacgtggagggggtcgtgcccgcgccgacagttgcgagcgcgggaggcgggagtggcggattttgcggcgacgtgggcggggtggttcggccggccatggtgatttggatggggaggccagagatattgagctccgaaaattcgcggaaaatttcagagtgttcattagggcacagagaatattacaaaatatttccggccaatgatttttaa

SEQ ID NO: 32420 - DNA, 580 bp, Oryza sativa
  Clone ID: PAT_MRT4530_36630C.1
aaaaaaaaacaaataaaaaagataaaaagctatgaatgaaaaataaaaaaaaacataaaagaaccaaagagggtaaaagcaaaaatatcgacaacgccaaaactggcaaaatacatacaactcccgccagcacggcaggaatcactatcatctaaatggcccacaagttcccctatcctataatctatgccctagatgtactgcgcggggggggcggattaatgatccacaacgctactcctttgtacactttttggaaacatcacacgctccatagtggtcgtgtcatattacgtcaaggatcgtgtcctcgattgtcaagctcgccatacacacacatggtaatagacagttgttcagataggactatgctccgtgcgtggtgcagcgtttctaattagtaccgacaacacctatgttagtcatttaaagaaggcactaacagggaatggatgcgtcatatatatgtcattggaaaagccaaccctgttctccatgcgttagtccacatggccagggaaagaattgcattcttgcgcttcactttgctagacgatgtttgtcatcataatggcatatc

SEQ ID NO: 32421 - DNA, 1676 bp, Oryza sativa
  Clone ID: PAT_MRT4530_36631C.1
gttgcgcgcggtgggcttgagggtggcggcggggtaggaggggagcgggggctgtggtggcgagcggcaatgcggccggcgctcctcctcttcttcatcgtttcgcttagcttttctttcttcttcgtcgtctcggttcactcctccgttcgatcgactttgcttgtttcaagcaagctagatctctcaccaacaggaggtgatcaatggcgagcggcggcgcattatccccggtggaggagaagcccacggtggtgaagacgaccaaggcggagcagcacgaggaggaggcggcggtggcggtgaagagcgcggcggagatgatgaagaagagcagcccgtgctgcccccggtgcaactccatcaagaccaagttctgctactacaacaactacagcatggcgcagccgcgctacttctgccgcgagtgccgccgctactggacccagggcggctccctccgcaacgtccccgtcggcggcggctgccgcaagagcaagcgctcgtcggcctcgtcggcgtcggcgtcggcggcgtctcctcctgctcctgcggtgggcgccgcgccaccggtggtgccggcgctgtcgtcggcgatcagcaagctgctgcagtcggagcccatggcggcgccgtgcgcggacttccccaacgtgctcccgaccttcgtgtccaccgggttcgagctccccgccgccgccggcgaccgcctctcgctggggtcgttcggggcgttcggcaacctgtcggcggcggtggcggctcccggcggtggtggtgggtcgtcgacgaccacgtcgttcatggacatgctgaggggagttggagggcttttcgacggcgtcggcaacagccatcagatgggcggcaatggcggcggcggaggcagctactacgcgcctctcatcaccggcgccggcaatggcatgctgatgccgccgccgccgctgccgccattttctggttctctgatgcagcatgggatgcaggggctgttcgccaatcatgcgatgggaggaggtggtggtggagtgatgaacgccggcgaggacggcagcgtgatggcggggctgggaggaggccagtggccgccggcgcttggtggtgcagacgagcagcagggcggcggcgacggtggcgaagctgtgatgacgaaggacaccggcggcggcgcatcgtcgtcggcgtcgaggccggactacttctacggctggaacagcgccgccggcggcgtcgtcgctggaggcggcatcggcggcaacgccgccgctgccaccggagcaacgccatggcagggcctcatcgacagcagctcggccatgatgtaagctcaatcaaatcaaccatgccaaggttggagagagatctcatccagaagttgttgctagcttcttggaatgatttttcttcagcttcatcgatcgctttagttcgttttttatccgtggatcaaattagttcgctctttggaaaaattcgtcgaaacagttttaaattttgctagacaaatgaatgtcgtcgtcgtcatcgtcgctcgtttacctgtaattagcttggagttggggttgtttgattgacctcatggaaccatgcaaaaggttctcatgtttaaggggagttaattaaatgtacatcattggtcgtgacattgcttaattgccgttggtttgtttctt

SEQ ID NO: 32422 - DNA, 156 bp, Oryza sativa
  Clone ID: PAT_MRT4530_36632C.1
atggaccatgcgggggtgaagggcaagcaagaggctagcgccgacgaaccaaatccggtggtgaagggcgaggtagctcggaagttccgggccctgggccaggaagttccgacccgatatctctgttcgggcgaggagggtgccaggaagttctag

SEQ ID NO: 32423 - DNA, 336 bp, Oryza sativa
  Clone ID: PAT_MRT4530_36633C.1
atggcgtggtggctgccggcgagttttggatacaaggtattaaggaaagtagggcaagagggttcaagagtcgttgccgtcttctttgactccatccgtggcgggagggctcgggaaccgtcgtcatcgctggccttctcccatccgtggcaggagagctcaggaggcaccaccgccatcgtcttcaaccccatccacagcgggagggctcaggaaccgccaacatcgttgtccctcgtattagacgtggaaaatggaggaagagatgggaagaaagaacagggagaatggaggaagatggaactgacatgtggttcccacgtctacggggtctga

SEQ ID NO: 32424 - DNA, 194 bp, Oryza sativa
  Clone ID: PAT_MRT4530_36634C.1
tgtggtgcccggtgcgaagggaggtgatatgtggggaattgaaaggggctttcgcgccgcctccctgctgccagaatctgcgaagcatcctacaagcgactccgtcgttcatgcagtcgcgccggcaatgccggttctccttgttccatacccaaccccgtctgtgctcattaacacctcccaatggggctcaa

SEQ ID NO: 32425 - DNA, 183 bp, Oryza sativa
  Clone ID: PAT_MRT4530_36635C.1
atggggtacggcgagattacaaccagggttcagagcaaacccatgtggttactgattgacagacaaattcgatgtatgtggatgaaggtagacaaatattctcttttcccagctggcaatgtatctatgtttacctacaggctgtgctactgcttcctttgggaaaccgttctgcacaattag

SEQ ID NO: 32426 - DNA, 1816 bp, Oryza sativa
  Clone ID: PAT_MRT4530_36636C.1
cccccgggctgcaggaattcggcacgagggaaacagaaagaagaagaaatggtgtagcttagcctcgcctcggccgtggtgtgatgctgacgcgtcgtcggtgatggcgcggccgctgctgaagatcgggcacggcctcgacaggttcaggtggcggaggtcgacgtcgtcgtcgtcgtcgtcgccgctggcgctgtcgctgtcgtcgtcgtcggcggcggcgttgtccgacgacgacccggggagccccatggacccggagatgccgcccgcggcgaggcgggcgctgtcgaggagctcggggtcgagggggaggctgtcgttcgagctgccaccgctggccggtggcccgtcggataaggaggaggcgccgccgaggacgtcgtcggctccggcgccggcgaggcccgcacccgccgcgctgcatgagggcccaccttcagacgcggagatggtgagggagaagttctcgaagcttctactcggggaggacatgtccggcaccgggaaaggggtgtcctctgctctcgctctctccaacgccatcaccaatcttgcagcttccgtcttcggcgagcagcgccgcctccagccgatggccgccgatcagaaggcgcggtggaggagggagatcgactggctcttgtcagtctccgatcacatcgtcgaatttgtcccgtcaaaacaagtctccgaggatggatccaccatggagatcatgataacccagcagcgtcgggatttacagatgaacatccccgcattgcgcaagcttgatgcgatgctccttgaatatctcgataatttcaaagacaagcaggagttttggtacgtgtcgaaagacgcgagtgaatcagagaagggaaacacgccgaggcaggatgacagatggtggctcccaactgttagagtccctcctggtggtctgtcagatgcatcaagaaagtgggttcaacatcagaaggatctggtcaatcaagtccttaaggcagcaatggccatcaacgctaatgttcttatggaaatggatgttcctgaagcatatatagagtctttacccaagaatggcaagtccacccttggagattcaatgtacaagattataaccgaagatcatttcaatcctgaagaactcttaggaactgtggacatgtcagctgagtacaacatcatagatcttaagaaccgaattgaagcctctgtggtcatttggcagaggaaaatggtgcacaaggaaggtaaattgtcatgggggcatggtgtcaaatttgagaagcgggagaaatttgaagcaagagcagagaatgtcctcctcctcatcaagcacagatttcccggcattgctcagtcagctcttgatataagcaaaattcagtacaacagggatattggcttggccattttggagagctactccaggactcttgaaagtttagctttcacggttatgtctcgaatcgaagatgttcttcatgctgactccctcgcgcaagcttctaatactagaacccaagaatcaatgagaatggccagcttatcaagatatgacactgataaggttgtcattgatgctaaggccgaggtagagagactgggaagaatggaaccagtttcagcgacactatttgactttgtcagtcctcgagatcaagatgttgtggcgacgaagatggactcaaaagaaaagggatgtaggggggatgctcatagtcgaaagttgacaaaggtctcaccgattgcaactaagagaatttacaccgaccctcaaaatgcctttttagtgttaattggaaggtgggctatgcaggggttgtag

SEQ ID NO: 32427 - DNA, 195 bp, Oryza sativa
  Clone ID: PAT_MRT4530_36637C.1
acggcacgaggatcgaactcccccctctaccgacctacctcgtactaccggcgacgcacgccgcaccgcgccgcctccggctgccctccctactgacgtctcgtctcctcctccagagcacagcaggagagctagagccaggaagccaccgatcatggctgatcacgagcaggagcaggagatggaggtggaggc

SEQ ID NO: 32428 - DNA, 192 bp, Oryza sativa
  Clone ID: PAT_MRT4530_36638C.1
atgaggtgcagcttccagggctctaggttgaaagtacctagaggcttccccatcaccttgcgcctcgatgccagcggcgtgctctacctcgtcagcaacaatggcagctacaccaagaacttgacgaaggtcagtgcagctactcaagcccgcgcaggcagcagctacacgctgttcgtcaagaccggttga

SEQ ID NO: 32429 - DNA, 940 bp, Oryza sativa
  Clone ID: PAT_MRT4530_36639C.1
ccggccgggagagagagcagcagcgagagacgaacaaaaaacagaatccatcgccataatcgaaggttcgctcttgcttccaccccgcaatccacatggagaacgaattccaggatggtaagacggaggtgatagaagcatggtacatggatgatagcgaagaggaccagaggcttcctcatcaccgcgaacccaaagaattcattcatgttgataagcttacagaactaggagtaatcagctggcgcctaaatcctgataactgggagaattgcgagaacctgaagagaatccgcgaagccagaggttactcttatgtggacatttgtgatgtgtgcccagagaagctgccaaattatgaaactaagatcaagagtttctttgaagaacacctgcataccgatgaagaaatacgctattgtcttgaagggagtggatactttgatgtgagagaccaaaatgatcagtggattcgtatagcactgaagaaaggaggcatgattgttctgcctgcagggatgtaccaccgctttacgttggacaccgacaactatatcaaggcaatgcgactgtttgttggcgatcctgtttggacaccctacaaccgtccccatgaccatcttcctgcaagaaaggagtttttggctaaacttctcaagtcagaaggtgaaaatcaagcagttgaaggcttctgagggttttgttgggctcctgcactgcggttctatattcaacctgaataagatgtgctatagcaatgtaaatttagcacagtggctatggtcgccactcaccaacttgaagtgaaagatttaatgatttttgttaattcttatgtatcaatcggcatatagcatttccgaaatgtgttttcaataaacagaaagtaagagtcatgaagctgaaaatgaacaaaatttctcaaaaaaaaaaaaaaaaa

SEQ ID NO: 32430 - DNA, 467 bp, Oryza sativa
  Clone ID: PAT_MRT4530_3663C.1
ctaagttttccttacactgcaacagttgtcgaccaccaatagttcaaattctacatacatatatatgtacagtttggtcaacttgttatttattaggtgctttgctagatttgtttattactttattaaatttaaaacccccttctctttactttatcatgttacgtccacatgtactaacactgttaagccaaacccgtataagctatttaacttgcccatctattgttcatttgctcttgcacatctagttccgaacaaatattatcctgttgcatctaaatgcagattccggaagcctacagtcaaatcatttgtcttggactgtgaaattgttgcttatgaccgtgaaaagaagaaaatattaccttttcagatacttagcacacgggcccgcaagggtgttaccataagtgatatcaaagtgtcagtctgtacttttggctttgatattctttacatcaatg

SEQ ID NO: 32431 - DNA, 357 bp, Oryza sativa
  Clone ID: PAT_MRT4530_36640C.1
tcgaagtcgccggccaagcctcccccactcagccgccacccaggcaccggcaacgtcgtgtcccccatgacaccacaccaccgaggtcaccggccacggaaccccttcccgccgccgccgaggccacctgccaccgaggtcgccggcgacgaagcccctccatctcgatgcctccaccgaggacgccagcaacgccgccacggggatcctctccctcgcctaccactaccgaggctgattcgccggcccagccgagctatcgagatcgatcgagcccccctccccctcccgccggcggtggaagcggagagcggcggcgagcctcggtggcaccctcgggcaaagggaacgaactaa

SEQ ID NO: 32432 - DNA, 590 bp, Oryza sativa
  Clone ID: PAT_MRT4530_36641C.1
tttttttttttttttttttgttcagctttccaattattgatttatagttcagtttcaaagcataggagggacagtatggtatagcctccaaacatatgccaattgtaacaatgacaacttacaactccattatgttcaattgttctctccagtcccaaaacaaatgccatttaagctaatggtacaagctgcaactttaacaatgtgctgtgtggtttggcttcatgcaagatcgaaaaccatggctgaatacctactatcatagaagaccatgggttctgcacactttgcttttcaagactgacagaagtcacatatgactcaaaaaaatgaagttccacagcagttaaaagtgcatatgctgaggcatttcagctagaaattactgttgaagatttcctgacaaagtgaagggaataacagcacaaatctactctctcatctcttaagcagataccgaagagaaaagaacccgagcagaatgtttgccaaaaccaacctgtagcatcctcgggtcatacttcttgccaagaaccagcataaacagctcaccaacgtgcaagcagttgctatcacaaagactaaccgga

SEQ ID NO: 32433 - DNA, 178 bp, Oryza sativa
  unsure (1)..(178): unsure at all n locations
  Clone ID: PAT_MRT4530_36642C.1
aatgacaccaacggaaaggaattaactgtggtgtgatgtgttggatgctaaatgatgganaaacgtgcccctgaggaggattngatgaagtgaatgctagcatatttattgtactgtaagagtgttggtacttgaaaagttgaaataatcaaaaggttgaaggaaaaaaaaaaaaaaa

SEQ ID NO: 32434 - DNA, 2691 bp, Oryza sativa
  Clone ID: PAT_MRT4530_36643C.1
atggacgtcgccggcgtcgtgcccgccgccctcccgtcgccggcgacggaggacgagacgatcgcgaggaggcgctcccgccgcgtcagcttcgcggagatcaccgcggtgcacgtgttcgaccgcgacgaggacttcgagacccccccggaggagcgcgccatcgccgtcggctacccgtccccgtccccgaccccctccctctcccccgggaagcccgcggcggaggaaggcgaggagacggagggggaggaggaggagttcctgcgcccgccgttccgcttcctcaacaacggcgatgtcgactcgtcctcccctggcagcgccgccggatccctcgtctccaacgatgatgaggatttttttggtcctgtgtcgagaagctttatacaatctggaagaccatcagattctggaatgtctgaggatggaaaccacgatataactttagattcagagacattctcaatgcattaccgtaacattgctcctccagatgacttttcagtcaattcagttggaagtctaaggacaccaaattcagcatctacagggccattaaaggaacagactgggtctggatatggtgtaaaatcgtgtaatagccatgatgcattgactgacatgagtctgctcgcagataaccctgagcgttatgattatgcaaagctttctccaactctgagcaacctattgcagcaagtcgaagatgtccatgaactaatatctcctaaaaatggcactggtactgtaactcctgatcacagttcagctttggctgcctgcaagaaaaaaaatagggaagaaaaatcatccattgtcaatggtatctcttctagtgagctggacactattggttctcgtaaggaacatgttcccattaggaattcagtacctactagcactgatccaattcaagaggataatgcaatgacagttgatgttaatgagaaatctcaggtcacatcagaagacattctgaatactcctaaagctgtagttcagaccttccaaattccacaagggtctatatcctccctacgctccaaaaggcgacaacttttcagtcctattactcattccgctagtaatgtggtaagccaggatgcttcctctttggggagtgagtttgttaaacatagcaagaggattgtagcactggcagatcgcctgaaattcggtctttatgaatcacctgcaactaagattcaggagatgccatgcaatgcccttatgacagatgaccaacctagccatgaatgcaattctattcaggattcggatttagacaggggtggaagaaagaggagtagtagtgaaaatggtcatgctgcacaaaagcgccctcagaaaatatcaaagccaccaagaagtccagcaacatcactaaaacagcttccttgtgtatccttgtcttctagtatgatggaagaaaaccagagtgttactcatggcaaccaacagtcaataaatgttgattggaacaaggttgcatccatggtatctaatgccacaagtcaagttttctcaacatctataagtaaggttaaaccacaacagcttgacatgattgaagatatgctggggggaattcagagggctagaaactttaagaggctttctactgctgtgaggattcaagattgtggcaacgataagcagaagagattagctgaggcaagatctcttgttgacaagcttttgtatgaaaaggcaaagctgcaaataaatcatgtgaagctggagaaactgcagaatagagcacaggtatgcaaagatggaatccaagagtgccgctatttgaaatccaagatttcagaccagaagggtgttcctcttgattcaacaactttgatcactgccagtgacagacaggaaggacttgctttgataactgaaaagatgcatgcactggagatgattaaaaagaaggtggagagagcaaggagttctcttgaatctttttgcaacactaaaggtgatattagctgcgatgattttatcaaggcagctgaacagcaattggagatgaggaatcaatgtcggatcatcaaccagcaagcacggctatggaagttgaatgaccttgttaaaagggagaataagcgtgatattgttctgaactattgcagtttgttgttccaaaggatcgtgttaaacattagtgatatgtctggcatatttgtgagtaattcattgaatggaaccaaaataggccaggcatttccaaatttgaatgcatctgtggcattcaattttgtattcaaagctgagggaacccaaagagtcagtgacttaagatcattgcagaagatgacaacggaaacaagtttgctcctgggtaatcttattgatgtgctaaaagaaatcaagatggctaaactggagttattgaacctgacggctgcagcttttgatatggcgtcccagacatgtcaacttgccctctctctgtgcttcatgagtttcaagagtgggaagagaatttctttcaccattgacatgacagacttgaatcgcgccgtctatccatctgagctgctgataaatgtgcgcgaagctcagacgacggtagcacaaccaagcctggacgagtttatgtcttctttaagggaccttcagtcaggacgcttgatgatcctaaggctttgccgaatgggctctcagctaatccatgaattgccaagctga

SEQ ID NO: 32435 - DNA, 415 bp, Oryza sativa
  Clone ID: PAT_MRT4530_36644C.1
gtccttttttttttttggtttttttttttttttttttttttttttttttttttttttttttttttttttttttttttaaaaacaaaactttggataggggagattccaaaaaacacggtcgggggaaaagaccccggttgggggggaaccaaacccaaaagggggggggaaaaacaccagccctgccaggacttcgggcaaaagggtctggctataaacccccccagaataagggggggcccagctcatgctggggggaaggcctttttgccgcccctggcggcggggggccccgggggggagaccctcgggacggtgaaccccacaggtttcgacagggggccggcctgggcaaagagacaggggcaccctccttgacccggaatcatggggggaccggagcccgaatggggga

SEQ ID NO: 32436 - DNA, 119 bp, Oryza sativa
  unsure (1)..(119): unsure at all n locations
  Clone ID: PAT_MRT4530_36645C.1
gcaagcgtgacggctcatcgtcatcttccctccattaaatcggcagatcgactcggggtccgcatctctccacttntccaaccaanggcccnattcatcgantctcncatcgnntcgtn

SEQ ID NO: 32437 - DNA, 240 bp, Oryza sativa
  Clone ID: PAT_MRT4530_36646C.1
atgccgtacccacgagctccatacgcgctcagcgtggcgcctggctgcgtctcccatgaaaagctggtgaggcgcggagagagccgcgtcccctaccagagcgacgcgttccatcgcaaggagacgacgccgacggaaaagcgaacagctgtcgctaggggcacgaatgtgaacacgttccaacagaaactcaggatccagcagaaggggaaaccaaatccacaagttgagaccttatga

SEQ ID NO: 32438 - DNA, 637 bp, Oryza sativa
  Clone ID: PAT_MRT4530_36647C.1
aaaccccaaaatttttttagaccattttttaaatttgaccagtaaagaataaggaaggtatttcagatatgactataacaatgggcaatcgctaaccactagcatgaggcgtgaggctaaccatccaagcataaggcagcaggcaaagggcaacctcaaagcattgcctcattttcatgatgaaagtactacttccattgtcagcaccagccatgttgtctgcttatttcaacgatttcaccattgaatgattgatttcaccattgtgttatataatcagataattaacaatttttatgcacaaaaataatattccccgacaacagaaagagtaagccgaaatcatgcccttactctaggagtgtaaaaaaatcagaaaagtttactacaaaaaagattaatacataacaaaagattaatgccactgcaaacggtttattacttatgaactcatggtgttaatccaattagcattcatagcaatctgcagcatgagcacactggcactaattgtgtgcacctagaaagtcctgtgacaaaaggcacagtaactgattgcacttacataactcatactgcattttcttaaatatgaagtggccctggagggtagcgaatatggtaaaggactcataag

SEQ ID NO: 32439 - DNA, 3236 bp, Oryza sativa
  unsure (1)..(3236): unsure at all n locations
  Clone ID: PAT_MRT4530_36648C.1
atggggatggtcaccgccaccgccgccgccgccctcctcgcctcgccgccgcagggtcatcttggaaggcggtgtcacctcgtggtgcccgggctacggctgaggccgccggccagctcatctcctccccacgccgccccgccgctcaggttaagcaattttgtcccaaggtgttacatcacaaatgttgaggttgatgttagtcatacgagtgaacaagaggctctagatgatcacccaccattgttgccagcctgcgccattccagttgtacacctacgagatgttccggatgctagtccttttcccctgcatgagagtgcttcccattctactgattttgaagagctacccgtcttgtctgagggtgagctacatactatagcggccacccctgcccaccctgctggattatatgctctatacgctagctacttatttggtaacttggtggaacaactttggaattttgcttggcctgctgcactggcaattctccatccaagcctattgcctgtggctattgtcggtttcttcacaaagctttcagtctttattggggcaccaatagtagggaaacttatggatcatttccctcgaatacctatgtacacagggttgaatgctgtccaggtagccactcagttgatatcagctgcaatggtcatctatgctatgaagaatgtgacccatgcatctacgtccgccgtagttctcaaaccttggtttatcgcactagtggcagctggagctattgaaaggcttgcaggattggcactaggagttgctatggagcgggactgggttgtgttgttagcaggaactaacaggccagttgcattagctcaagctaacgctgtgcttaatcgacttgatcttgtttgtgagactgttggtgcttcagtttttggccttctgctgtccaaatatcatccagtaacctgtttgaagattgcttgtggtctaatgatatgcagtttccctgtcctggttgtgttgggtcaactgattaacagattctcctgccatgctcttgattcctctagaaccccgagtgaagaatctatctgtgccaatctattggatgttcttcaaaatggcttgagtgctatcagaaatggctggaatgagtataagcagcaaacagttctacctgcaagtgtagctaccgtgtttctaaatttcaatgtagcacttgctcctggtgctataatgactgcgctattgatgcatcgtggtattagtccgtcgattgttggtgcttttagtggattgtgttctatcatgggccttgttgcgacattcatctcctcaagcttggtggaaagagttggaattctaaaggcaggagcagctggattgatagttcaagcttcactcttgtcggtcgctctcgtagtgtattggactggttctatttcacagaggacacctctacttatcttcctggctgctatcgcattatctcggttggggcacatgtcatatgatgttgtgggtacacagattctccaaacaggtgttcctgcatcaaaagcaaatcttattggtggaatggaggtctcaatatcaagccttgcagaactagtcatgcttggtatggccatcatcgcaaacgacgtttctcatttcggtttcttggcaatcctatccgtgtaaggaaatttcgntgtgtngagtttacnttcagtgtttgcaggaccaaagcgccattcatactgctgtgcttttgttgtggattgaactagcaggagagaagaatgcacatgaacttataaatggaacatttcctgtagccaccagtttgatctcactagaaaaaggcagctactttatttgtcctatatattagtgtattgttttttaatcaatgtaaatgatcacttacggagtacatgtatgcattaatcacctaatcgtcctgtaatattttctgtttaattttttccctgcaaaaaaaaaaaaaaaaaaacaaaaacacaaaaaaaaaaaaaaaaaaaaaagccgtaaaactatgcaacaaaaaaagctagtgactctacttaaagctatgcgttattcatacatgaagattaagtgaaaaacaagccactcccaacttaacttttgtttgatggatatgctagatagaaacctaggtgtatgttcttggtctcttaggtcattgtgtcacacaatgttgtttgttgatgagctccctatatatattgttaggtcaattatgttgcccaacaagttttttgtgctaatgtgaggttactaggctcaacagtccttagatatacggattcggtttggttatggtgacagttcggttttggatgattggattgttttattttttcataagcccaacaatatgatataaaataatgttatttaatatgtgaagattagtggccatacagaaacgcgtgccaaaacaacatattttctaaaactgaattgtcctcctatgaattacattcaatttctcttccttacacgtggggttttatgtgtgctcagtgactaccccgtagcaaggtatacttgctgatccatatgtatctttgctaaacagtactatgtatggtggtttaattttaatggttgcaaatcttggtttccctgtaagtagctagctagcatgatttttttttcagtcatagtttactcttttaacgggcaacttgtttataaacaaacagctcacgggatgttggccttatgtcattctagagcacttttcagagtttaatatgacacaaaggctttccaaacgatggcgatgcctacggataatcattttcctgctgctcttacatatttatatatattatatattcttttatttacttatttattttgactgataagagctggagactgctatatttcataatgaatattcttcttttatgtttaatccacttagtttggtgctcccactcttcagtcggtgctgctttataacgaaactattatgtgcattatatcgtccgacataagtataaccatttcatgtttgcaggaccaaagctgccattcatactgctgtgcttttgttgtggattgaactagcaggagagaagaatacacatgaacttataaatggaccatttcctgtaggcagctactttatttgtcctgtatattagtgtgttgttttttaatcaatgtaaatgatcactgacggagtacatgtatatgcattaatcacctaatcgttctgtaatattttctgtttaattttt

SEQ ID NO: 32440 - DNA, 453 bp, Oryza sativa
  Clone ID: PAT_MRT4530_36649C.1
atgggttaccttgatgaacagtttaatcagctggaagaactgcaggatgaatcaagccccaattttgttgaggaagttgcggctctgttcttcaaagattcatcaagactgttgacaaatatagaacaagcaattgataaataccctcaggatttctacagattagattctcttgtgcaacaactcaaaggcagcggatccagcattggtgcactgaggatgaagaatgagtgctctgtgttcaaagtaaactgcaatgacaggaatctggaaggatgccgcaggtctcttcagaagatgaagagggagcatgccactctgaagcagaagctggaatcatattttcagcattgctacatggctaaacaacttggttatctcctgttccttctgctgatgcagttactgaggcaagttggtccccgtgattatgcagtgagctcaaggaagtaa

SEQ ID NO: 32441 - DNA, 893 bp, Oryza sativa
  Clone ID: PAT_MRT4530_3664C.1
acgtttcgttcacgatcgttcatgttcgcgttctcgctaagttcacgtttcgttcacctacgttcgttcgttcacttcacttttcgttcacgcacgttcgttcacctacgttcgttcgttcacgttaacgtacgttaagttcacgttcgctcacgttcacgttaggttcacgttcgttcacgttcacgtacttgttaacgtacgttcgttcgttcacgttcacgttcacgttcacgtacgttcgttcgtttacgtccgttcacgttaacgtacgttaagttcactttcgttcacgttcacgttaagttcacgtttgttcacgtccgcgttcatgttcacgtacgttcgttcgttcacgttcacgttaagttcacgttcgttcaacttcacgtacgttcgttcattcacgatcgttcgttcgttcatgtggcggcagcggagtggcagtgtggtggcagcggagcggcggcgtggcggcgcggctgcggcttggcgcggcggcggcgtggcggcacggcgtcggcgtggcacggcggtggcgtgccgcggcggtgtggcgcggcccggcgtcatggcacggcgggcgtgacgcggtccggaggcgttgcggcggcatcattggcactgccggcgcgacgtcgtcggcgatggcggccgcatcgaggtcggggtcggcatcggcgggaggcggagtcgtgttcgaccgcgtcgacgtcggcggcggcgtcggcaacgaggcggccggtggcggtttggggagagagagagatcgaggtcgtcgagagagagagggaggcggatgtaacattttctgtagatgtccgagacgacggcgagatacgacggcggcgtcggtgcgaggatgccctaggcagtggaaacaaggagaagcc

SEQ ID NO: 32442 - DNA, 1298 bp, Oryza sativa
  Clone ID: PAT_MRT4530_36650C.1
gtcattggagacccagccttcctctcgccgccgccgacgccgacgacgaggagaggaggaggtggccatggcgaggcggagggtcgcggcgctcgcgtcccagctcctgcggaggcagctgctcatgcggagacccccgccgcggttcctctcatccgcggcggcggcggcttctggccccctcgaccgcctcaggtcgccgcccttcgcgcgcacggcggcgcggcacgggagccctgctctttccccatggagccgcttcggagggcagaagaggggcatgttcatccagacgcagtcgaccccgaacccgcagtcgctcatgttctatcctggaaagccggttatggaggttgggagctctgatttcccgaatgctcggaccgcgatgacatctcctttggccaaggcgctgtttgcaatcgacggagttaccagagtattctttggatccgattttgtaactgttacaaaatcagaggaaacttcttgggactatcttaagcctgaggtttttgctgtgataatggacttttactcatctgggcaatcactctttctggactcaagtactgcagcttctatggacaccgcaattcatgaggatgattcagaaatagttgcaatgataaaagagttgctggagactcgcattcgaccagctgttcaagatgatggtggtgacattgaatatcgaggatttgatccagaaacagggatagttaagctaaaaatgcaaggtgcctgcagtggatgtccaagttcgtcagtcacattgaagtctgggatagaaaacatgctcatgcattatgtccctgaggtgaaaggagtagagcaagaacttgatggtgacgaggaagctgaactgactggccagttggaatgacttttctttacggccaaatctcaacatcttcacatgtcgagggaaactttgcatcgttgtttgtgaaaatcaatccttcaaaaaccatagtcactttgttttgagatcaggactagttcaaagttttccccccgaatagagagctgtaattttgaccctgatgtatgcaatagcgaagaagcatcctttcatagattgtaaaggcagcgttaactagcctccccaaatatcagttgcactagggcttaaataaattgatacagtgagttgatccctgcttttatctaaccaaaggatatgccgacccttttttttttaaacaaagctgatcagtgtttttttaaggataatgagggtaaaaaaaaaaaaaaaaaaaaaaaaaaaaaaaaaacacaaaaattaaaaaaaacaa

SEQ ID NO: 32443 - DNA, 231 bp, Oryza sativa
  Clone ID: PAT_MRT4530_36651C.1
atgaaagggaagttcgttggtgctattttaaaggaggggagggcgagtgagaggatgactcgtaagctcatgaaggatggtggcgggcaagctcatatgggaggacaccgacagctcaagctcaaggagatcaaatcgtccctccatggcttcacgctaccaaggagggaggctggagcgttgagaactagggcattgcctaggaaagtaggttggggcgtcgagaactag

SEQ ID NO: 32444 - DNA, 546 bp, Oryza sativa
  Clone ID: PAT_MRT4530_36652C.1
tactgttgcttctatggacaccgcaattcatgaggatgattcagaaatagttgcaatgataaaagagttgctggagactcgcattcgaccagctgttcaagatgatggtggcgacattgaatatcgaggatttgatccagaaacagggatagttaagctaaaaatgcaaggtgcctgcagtggatgtccaagttcgtcagtcacattgaagtctgggatagaaaacatgctcatgcattatgtccctgaggtatctcttctgtgctttatttctgtttcctcaaaacctccactccttttggctcattatataaggcgttttatctgataagtaaaatgttgaaagaagttgcaattcctattagtttgttcagactgcttaaagcagtaatttatcctttgatctagcgaaattttaatatttcacacttctttggcaggtgaaaggagtagagcaagaacttgatggtgacgaggaagctgaactgactggccagttggaatgacttttctttcggccaaatctcaacatcttcacatgtcgag

SEQ ID NO: 32445 - DNA, 463 bp, Oryza sativa
  Clone ID: PAT_MRT4530_36653C.1
ttagcaacatgcgtgaggaaccggcgacgcgatggaggtggctataggagcagtggatggcaggcgaaacagtgatgagggcgcgatcggcggggcgaggtcgcgacgacggagaaatcgcgatggagcaaggaatgggtggagaaatcggcggcggtggcggaaggggacgacctcggggatgctgcgacggcggcggcagatggggacgacgtcaactccgatagtgcggcgtcgctggcctgtcgcgaggaggacggaggatgcacacggattgaggaggagcgaggaagcggctgggattcgtgggcagaagtcatcatggcaggcgaggaggcagcgggattcgtggggaggagtcattgcagcggggatttgtgtggcactgcggctgagtcatcgcgtgggagcggaattggtagaatcgctcatcactgatgaatggatggataagatcagatga

SEQ ID NO: 32446 - DNA, 586 bp, Oryza sativa
  Clone ID: PAT_MRT4530_36654C.1
gctgcaggaatcggcacgagcttatttgctcgcgtgcctgacaaaataagtgatgcaagttgtagttcatacagaaccatctgttcattttagctatctccatggtgcaactggatggttctgcagaaactgtataacctttgtcttcataggttgattttgtcaagttgccttttgtcaggttgttaagtattggagtgtggctttgtttatttttctgcagaagcatcttggtcaatcttagttatgttgattttgcattgtccgtccaagtttatcctgatattcatttcagaaagaaatgcaattgttgtatggtagagcggcagctggttagtggtaactagtagccgagccagcaatttctctcaaatccttcagttgatatagcctctgcagatgctgagcgaggcgacacatatcgtcgatgatctctcattctaaatcctccttgttgtcagcctccaactcatcacaaatctgtagctcttcaacagacactacgttgttctttgacgcgtcatcctgtttgcaatagcaattcctgagaaagttcatgctatgtctgatcttaattttgtccttc

SEQ ID NO: 32447 - DNA, 1486 bp, Oryza sativa
  Clone ID: PAT_MRT4530_36655C.1
atggagaggacgaggagctggttcgggaggaggaggaggaggaaggcgcggggagaaggcggcggcggcggaggggaggagggggaggggcagaaggtggtggtggacgggtcggagatacgggagctggtggaggacagggaggcgttcgggatgttcgcggagagcaagttccgggagctcgacgccgacggcgacggcaggctgtccgtgcgtgagctgcagccggcggtggagggcatcggcgccgcgctcgggctgccggcgcgcgggtcttcgcccaacgccgaccacatctactccgaggcaatcagcgagctcactcatgggaagaaagaggaggtgagcaggacagagttccaggaggtcctgtccgatatcctcctcggcatggcggctggcctcaagagggacccgatcgttatactgcgcatcgacggcgaggacctgagggactttgttgacagccccaggtatgagccagaagctgctgccatcttctcaaagataggttctgaagacatgtctctgcgtcagtgcctgctagctgctcttcagctgctgaatgtcgacaacggaatgccaccagcttctgacccttgggttgcagagaacatcatagagccggcattgcagaaactccctgccggccagcttgagcaaccggcctcgcaagatatcttcttagaacagctcaagaagctcctgagcaacatcgctgaaaggcttcaggagcagcctgtgattgtcgcacacaccgagaacacattcgacggtagttgtgtcaagaggctgctggacaacaaattcgagctggacaagttgttggattctgtctggaaagatgtactcatagagcataagaacaaaggatccagggagtgcctgatagccgcactcgataagatggcagatgcagcaggcttaccaccttacggtgccgttaatcaggtggatgccgtggtgaatgaggcgctcaagacagttaatgctgatgaaagaacagcggtagacgaggccgggttcaagaaactactgacagatatccttagggcagtgatgatgcagctgaacagacagccgattttcgtctcgaacagcaccgtagttcacgagccattgttcagttcatccgcaattttatcctcgcctccagtgaaatcatcgccgagtgaataaattaaaccatatatgaatgttaatgtgcttgacagtggtctatctgtaagcagtgcctgtgatgttgcttttttgtctgatcaagcactgcgggggcatgtatagactggctacaacctgacgagatgtaaagaacacttccgtcagtcttgctagcctgattgatgtataagtttggaataaggctttcaagctatacaaattgatcaatggcaaatgcaactattttgcagtttgcattcaaaaagggactgtttattctccaggaactgttcagctctctaatgataaggtttactatttagtt

SEQ ID NO: 32448 - DNA, 192 bp, Oryza sativa
  Clone ID: PAT_MRT4530_36656C.1
atggagcctggaggcaggcaggccggcggccgtcgggattccgattttaggaggctggaggagtcgaggcatayagacgcggtgcgccggacggcggacgccggtggcctggtgggcggtggcgcggtgcgaactgcagcgagcgaggagacgaggagtcgcagagagccggagacaaagcatcacgcgtag

SEQ ID NO: 32449 - DNA, 2117 bp, Oryza sativa
  Clone ID: PAT_MRT4530_36657C.1
atggcgcaggcgagcgacctggagccgctgcggtcgggggcgggggcgctgccgtcgtcggcggacccggactcgccgtcgacgccgaggaggagccgcgtgcgcgagctgctgcggagcctggaccgccggctgtccagccgggggcggcaccaccgccacgcagcggagggcgcggcggcgtcccccaggggcggcggcggcggggagcccgggtccgaggacagcgacgagctcggggacggcgcgccgcccgagtgggcgctgctgctcgtcggctgcctcctcggcctcgccaccggcatctgcgtcgctgcgttcaaccgcggggtgcatatcatacatgaatgggcatgggcaggcacacccacagagggagctgcttggcttcgcctccagagacttgctgatacatggcataggatattgttaattccagtgactggtggagttgttgttggtatgatgcacggattactggagatatttgagcagataaaacaatcattatcatctcaaagggaaggtgttgatttcatggctgcgatttttcctacaatcaaagcaatacaagctgcaattactctagggacgggatgttcattggggccagaagggccaagcgttgatattggtaaatcttgtgcatatggatgtgctgaaatgatggagaacaatagggaacggagaattgctcttgttgctgccggatcagctgctgggattgcttcaggttttaatgctgcggttgctggatgtttttttgctattgaaacagtactgaggccacttcgagcagagaattcaccgccatttaccactgctatgattatattggcatcagttatatcatcaactgtgtccaatgttttgctaggggagaaggcagcttttattgtcccgacgtatgaactaaaatctgctgctgagttaccactctaccttatcctaggcatgctttgtggggtagtgagtgtggcattcagacagttggtggtttggttcacaaagacttttgacttgataaggaagaaattcagcctccctgctgtagtatgccctgcgttagggggtcttggagcaggtttaatagctctaaggtaccctggaatactgtactggggcttcaccaatgttgatgaaattttacatactggaaaaagtgcctcagcccctggaatctggctcttagctcagttggctgctgcaaaagttgtagcaactgcactctgcaagggttctggtcttgttggtggcctttatgctccaagcttgatgattggtgctgctgttggtgctgtatttggaggctcagcagcagaactaataaactctgccatcccgggtaacactgctgttgcacaccctcaagcttatgcactaggagctgttggtttagcaatatgggtgccatctgttgtaatgtctggcaacaaagaggcgtttgaggctacatctcctcggcatggttattcttcactattacctcctacagataggaatgagacagaccggagacgaccagacagagatgacgttgaacttgcaattctagacgatgatccctaccgctatggtattaacaatgaggatatgcttcttgatgatttaaaggcaaattcttctcttgtttcatcatgcctcactagagggtttcagtaccacggcaatgaaagaggactagtgacctgctttccagatacagatctgagcactgctaaggtgctcatggaagtgaaaggtatcaagcaacttccagtggtaaaacggagggctggccgtaggaatgatggaagacgtaaggtccttggccttcttcattatgattcaatagggtggtgcttaagggaagagcttgagcggtggaaagccatttatcaaagagagaatttccagcagtcagctgttaatggccactgagcaaaaagaagtgctgaagttttggttgtacgttttagtgaagagaaataccaaatttataaagtgacatttcaacatgattagggttaacttaaaacctcctcactcaaaaaatatcctcgtcaaaagtaaagtttcttggagttgccacatatgcacatttttgtgcagagaaaatatataagcggtgatggtgt

SEQ ID NO: 32450 - DNA, 330 bp, Oryza sativa
  Clone ID: PAT_MRT4530_36658C.1
atgccattggttgtatgtaaccttatcccattcccaacttttcggctggccagcgtgcgaagggaggagaagcggcggcggctgctgcatgcggaagagcagcggcgctcggagggagcgcggccccagtgcgagaagggaagggcggcggcggcaacggctgctgttgcgcaagcagagggagaaggagcagcagcggttgtcgtgtgcgaaggagtgctggcgctctgtgggacagcggcggctactgcgtgcggtggagtggcgacgcttggagggagcgcagcaccgatgcgcgaagggagggacagcagcggctgctacgcgtga

SEQ ID NO: 32451 - DNA, 2055 bp, Oryza sativa
  Clone ID: PAT_MRT4530_36659C.1
atggcggggctggcggccgcgcgcgagctgcggcgggaaggcctcgacgtgacggtgctcgagcagctcgccggcgtcggcgggcagtggctgtacgacgcggcgaccgacgccggcgacccgctcggcatggccggcgtgcacagcagcgtgttcgcctcgctccgtatcaacggcccgagggagtccatcggcttctccgacttcccgttccgccccaccaacgacgccggcggcgacgcgcggcggtaccccgtccacggcgagctcctcaggtacatcagggacttctgcgacgcgttcggcctcatggacgccgtcaggctcaacaccacggtcacgcgcgtcgccatggcaccgccgcggcgcgacggctcgctgcggtgggcggtgaggagcaagcgccacggcgaggcggagacggaggaggtgttcgacgccgtcgtggtggccatcgggcactactcgcagccaaggctcccgaccttcgacgggatggataggtggaggaggaaacagctccattcccactcgtaccgcgtcccggactccttcgccggcgaggtcgtcgtcatcgttgggtgcagcgtgagcggcgcagagctcgcccttgagctccgccgcgtcgccaaggaggtccacctcagcaccaagtcgacggaggagaccatcacgtcggcgatgtccaaaagtgtcgccaggtacgaaaacctccacctgcgaccacaggtcgaacacctgcgcgaggacgggactgtggtgttcgacgacggctcgttcgtcgtcgccgacgccgtcatctactgcaccgggtacaactactcgttcccgttcctggacacgaacgggaaggtcaccgtcgacgacaaccgcgtcgggccgctgtacgagcacgtgttcccgccggagctggcgccgtcgctgtcgttcgtgggcatcccagccaaggtgcttctgccggtgttcatcgaggtgcaggcgaggtgggtggcgcaggtgctgtccgggcggaggacgctgccgtcgcaggaggagatgcagcgcgccgtcgaggagcacacccgcggcatggaggccgccgggttgccgaagcggtggacgcatgacatgttcttgaacctggaacgctgcgacgactacggcgagcgcatctgcggcttcccgcggatggagcagtggaagaaggagatctttgtgtcatccctctccgacatggtcgacgacatcgagaacttccgcgacggctaccacgacagcgacctcgtccgcgacgccctgcgccggcacgctcgctcccccgccgcgcccctccccgccccccgctctcctcctctccccggtgctgacagcggcggagggcgtgcggcggctaccggtggaggaggcggcggcggctaccgggggccaccggcgctccccttcctcgctccttcccagatctggcctgaggggggcgggggtaggacggtggccacacgtgtggcggtggcggcggcggcggcgggaggttgccagcggagggccgcgactaccgacgggaggcggaggttggcggcgggtggtggcggaggagggcggcggccgctcccggaccctccctccctcccagatctggcccgaggggggcgtggggagggcagtggccggcggcgctcccctccctcgctccctcccagatctggcctaaggggggtggggggagggcggtggccacgtgtgcggcagcggcagcggcgggaggttggcggtggcaggaggaagggggccgtgcgcggcggcgtcagaggaggtggaaccaatggcctggtcggcatctcggcatgcgcaaggaggaggaagcggcggttctgggcaccaatcctctcccttccttcgccccagacgtcggtgccggcggcgcaaacagcaccggccgctcccttcccagatctggacggaagaggggagccggctagcagctacggcaaaggcggcgctcccctcgccctcggacagcagcgccggacggaggtggagagccgtcggccggagggggatgccgacgccggcgggtag

SEQ ID NO: 32452 - DNA, 551 bp, Oryza sativa
  unsure (1)..(551): unsure at all n locations
  Clone ID: PAT_MRT4530_3665C.1
ggcncgagggcngcactctcanacaacccacaaaaaccccctcaaaacttcctgagcgcggaggaggcgaccgaggcggcgaccggggcggaancggacgcggcccccccgggcgagggcgcggaggagacaggggccgaggccggcgccgagggccccgccgcgaggaagaggagaaangggncccagngaccaaactgggccgccaggtgaaggagggaagaatccgaagcctcagaacagatctacctccactcgcgcccgatcaaggagcaccagatcagcgacacgctcgcggggcccaccctcaaggacgaggcgacgaagaacacgccgggccagaagcagacccgggccgggcagaggacccggttcaaggccttcgtncgcgtcggagacaacaacggccacgtcgggcagggcgtgaagtgcagcaaggaagtggcgacagctattcgtggcgcgattattccggcgaagccgtctgttatccccgtgaggagggggcactgggggaacaagatcgggaagccccaccaccgcccgtgcaa

SEQ ID NO: 32453 - DNA, 396 bp, Oryza sativa
  Clone ID: PAT_MRT4530_36660C.1
atgtcgatcattcaatggatcaatgtcgagcttggttatcttccttggatgctcccacatgtgcagtcgaaggtcggttgccgttcgggccagggcaacaaggcccaatggggccgcctcttcttcccctcctctcttcctctctcatccctttccacggcgacggttacggagagcagctgggcacggtgcggcggggtagcagctgggcgcagccgatggccagcgggggaggagctaggcgcggccggcggtcagcgggggaggagcggggcacggccggcgagggtggagatgggcgcggctggcaaccgccggggaaggagctgggcggcggcggcgggggagaagctggacgtggtggttgtcgtcgtcgtcggaggcggcggggactag

SEQ ID NO: 32454 - DNA, 127 bp, Oryza sativa
  Clone ID: PAT_MRT4530_36661C.1
cacactcgtgtcgaccgtcgagtcgagcgtaaagtgcatcgtcatgtaccccgaaatgcaggacaagatgtaggacaaggtgggcccccgcgtcgaacaccacgggggctagcactgcagcgagccc

SEQ ID NO: 32455 - DNA, 691 bp, Oryza sativa
  Clone ID: PAT_MRT4530_36662C.1
tatagcaccaccgggaccggcgagtgcgggcgtatgagatgttgttgaggagattgcagcgacgccctcgaaccagccccgctcggcgatgcgcacggcgatgggtagcttgccgctgagctcctagttctagtccaggctaaggaactgcacgaggtaggaggggcagccgatggcgatgggcatcacagcagctaatgccggagcaggtgaatccatcggtagtgttgtcgccgccggcgccgagcacaggggtggtcgccaccacgctggtgaacatctcgctgaccgggcagaggagcaggtgccgatgatgttggagttctccctggcgagcgtggcctggacgttgcaacgggcgatgggcgtcgggcagcggatgggttcgccgtcaagatcaatgagatccttttgctactcaggtgtcaatttgtctagagtgacaggtacgatattgtcgccagtaatttcagatagaccaagcctcgggaactttgtcttagcagaaccatctttaccagccgaagatggtgatgctggcggtttctctgccatgaggaaaactgttgttgtgattctgacttctaatcggtcccaccgggcgtgccaaaagcgtgttgacagaaaacacgaggcctgggagatctgcttaactccagtgcaggtccaaaacttgcctttggatgtatga

SEQ ID NO: 32456 - DNA, 887 bp, Oryza sativa
  Clone ID: PAT_MRT4530_36663C.1
gttgtgtcctcttgtcaaactggttgggataagataaaggagcggagcccggcaaagccgagcggcagcagagagcacagctcggcaacaccatggcgccggcagcgctagccgctcccatcgcgtccatttcccccagctccgccgggagggtcaccgccgccgccgccggcctccgctctgccaggatggccagctcacctgtagcccagcccattggcgaggcagttgtgttacggcccaaccagatgttcagatcagtgctgcgacagcggaggcgtctggtggtccgaagcagcagctcagatgaaaccaattccaccaccgaagagaagacgccattcggatacacgaggaaggacgtgctgctcatcggcgtcggcgtgacactcttaggctacggcctcaaatacgggctggagctggtcggagtcgatcccttgcaagcaggaaacgccgtccagctgatcatcgtgctcgggatgacggtggggtggatctcgacgtacatgttcagggtggccaacaaggacatgacctacgcccagcagctcagggactatgagaagcaagtcatggagaaacgattggagagcttgacagaggctgaactgcaagttctgctcgagcaagtagaggaagagaagcagcggctgactccagtgagggatcagggtgttaccttcactaggaaaacggaggatcaggcgaatgccagctagaacaccttgattctgtaattagctagctctcctgcactgttagatagcttgaattaagaactagcggtggatgtggatcgtacgtcatacgaatgaccagctaatgtcttccatgtttgtgcatcattctgaaataaaaatagttggtaattctgcttccaaccc

SEQ ID NO: 32457 - DNA, 489 bp, Oryza sativa
  Clone ID: PAT_MRT4530_36664C.1
atgtcgtcgcttcaagccgttgccttcactgccctccaggccggcgccgccctggccttgtctctggccgcccacaccctcccctcactccctccagcgcgcacggcgacagcactggcgactgcaatggtgacgatggcgatgtggtcctcctcaatcggtttagagaaagctagatcagacgatgagtacggttcggcatcgacgtatcatggaatgcctacttactcccctcgcacagcattcgttgaggacttcttttccactgagcctcctcaaggggaactagggatggattactggcacgcagcacctcaggtgacacagccgacgcaggagatgggggccattcaggctcccaatgtgacaccacagcaggcagcaagagagaggcacccccctgataatttgacttatcccactgagcaggttaggcgtaggaagaaggggggacctagcaagcgtgcgaagggcactgatcgtccttga

SEQ ID NO: 32458 - DNA, 442 bp, Oryza sativa
  Clone ID: PAT_MRT4530_36665C.1
aattgaaaaaaaattaaagcctgaacccaactgtgacgaccatgttttgttcacagacgccattcggatacacgaggaaggacgtgctgctcatcggcgtcggcgtgacactcttaggctacggcctcaaatacgggctggaggtgacgtctgttctttctctcttctccatcactactccagttcgctgcttcttggctttgacttcatcatcaagtacacttcactgacgaacatgtatgccttccctttcacatccttgccacaactgaacacagctggtcggagtcgatcccttgcaagcaggaaacgccgtccagctgatcatcgtgctcgggatgacggtggggtggatcttgacgtacatgttcagggtggccaacaaggacatgacctgaagtttcttgctctttgttccagaaacgattggggagcttgacag

SEQ ID NO: 32459 - DNA, 190 bp, Oryza sativa
  Clone ID: PAT_MRT4530_36666C.1
cacgggccacggtcacatcattgcacatccacttaaaacgcatcgtttgccgcatcagcacaccaagcacgccagttggttatcaccagccgctggtgcgtatatttcgtcaagacacgttcgagacagaccagatcatatatgtatggctcatcattggggcaccagggtggttgctatcaaccaaccc

SEQ ID NO: 32460 - DNA, 1446 bp, Oryza sativa
  Clone ID: PAT_MRT4530_36667C.1
atggcggcggcggcggaggcgcgctctttgccaccctgggtggtgctggatcccgtcgtccgtctccacgaaccggacggggaggaggagaacccggggtgggcagccatcaggtgcgagacgacggcctacgtcacgctccgcgcggacgtcgagggcctgcgccgcgacgacgagctgtcgccgttcgacgacgacggcctgaagctgctcgcgctcgtcgccgatcccccccggccctcccgcctgtccatccgcctcgacggcgacccggacgacgacgaggaggagggccgccgcgggttcctcggcggcgtcctgctcgccgaccccgatgacgatgggtatctaccgcaagtcctctgcctgctgccgtcatcggcaccattcgaccgccattgctggggaaccagaaggccaatcttccgctccgagaagccaaagaagttcaatgctcatcaaaccttctcgttccaaggttcatcttactgggtggatcttggacaaggcatcctctcctgcagctgccacgatctcatctctaataccaacgacgacgtgcaattccgttacattgcactacccaccggttgcaatgtggatttcgactcgctctatctcactgctccgccgtcgcaatatcgcgatatccgctgcgttggcaactcgatcagattcgtgtccatcgagggatacaacaccttgcccggatacaacatgctgctgtccatgtgggagttgatgatgccgagctcagggcagtggcgcaaggtcggtagcatccgtgttgggagattgtgggagcaggaggggttcaggaggtcagggctgccgacgaacacttcgccgacccatcccatgctgagcactgaggacgatggtgtcgtttatctcttgatgggtgagttctatgcggaggatgagaaggacaggagcctatatgccttcagcgttgacatgttcgaccaaggaagatgcaacgagatcatctggggactggtagcagtcgcgtccaggaactctttgtcttgcgttggcgtcagcacctccttcaccgcggcttccatggtgtgtcaccacaacttgttggcccgccgcaccgcacgcgccatcttgcacatctccccgccgtctcgtgggcatggaggcgacggcggagagcgtgtggcggctgtgcgcagggaaggttgggaagagcgccgggaggagggtgaggaggatgcaggacgggcgaaggtcggcgccatgctaggagagcatggccacggcgagcggtggatcgttggtgcgcgcgaggaggcaagggacatgtggatcccgccgtatgccacgtcagcaaaaagggccgaccccgtcctgggccggctagcttcatccgcctccgccgcccgctttgcccacctcgccgacccctcatccgccgccgccgctgccttcgacgactga

SEQ ID NO: 32461 - DNA, 107 bp, Oryza sativa
  Clone ID: PAT_MRT4530_36668C.1
ggtcaatccggtgcaatcgactacttcctttacatcgacgcgcgctctttcgcgagagttccttcgacttctcagcgtcttcttccgctgccacagcgcgtcgagtg

SEQ ID NO: 32462 - DNA, 1497 bp, Oryza sativa
  Clone ID: PAT_MRT4530_36669C.1
ccggccgggagctccgcccgcggcagaaagcaacgccaatacgccattgccgtgctcctcgacctgcatgcacctctgttcttggcgttgagatacatagaggcttggggtgggtgtttaagaactaagaccggagttaattagcacccctgtggctaccatcgatctgtctaaagagtgattagatcgagatgaccatcaccattgagcagcctcaccttgatgctatcgccgaccggaaggtcgccggcggcggcggcggcgacaacgcggcggagctcgtgctcgacggcggcttcgtcgtgccggactccaacgccttcggcaacgccttcaggaattatgaggccgagtctgagaggaaggagacggtggaggagttctaccgggtcaaccacatcaaccagacatatgatttcgtgaggcggatgcgggaggagtacggtagggtggacaagacggagatggggatctgggagtgcatcgagctgctcaacgagttcatcgacgacagcgacccggacctcgacatgccgcagatcgagcacctcctccagaccgccgaggccatccgcaaggatttccccgacgaggactggctccacctcactggcctcatccacgatctgggcaaggtgctgctgcatcccagctttggggagctcccacagtggtcagtcgtcggtgacaccttccccgtcggctgcgcattcgacgaatgcaacgtccacttcaagtacttcaaggagaaccctgactacctgaacccaaagctcaacaccaagtttggggcctactccgagggctgtggccttgacaatgttctcatgtcctggggccatgacgactacatgtacctggttgccaaggagaacaagaccactcttccttctgcaggcttgttcatcatcagatatcattcattctaccccctgcacaagcatggagcctacatgcatctgatgaacgatgaggacaaggagaacctcaaatggctgcgtgtgttcaacaaatacgacctgtacagcaagagcaatgagaggatagacgttgagaaggtgaagccctactacatgtcactcatcgaaaagtatttcccggccaagttgagatggtgaagaagagggagagaacatcaaaaaaattggtcgaaattatcctgtaatatgatgtaattgcaggagttcagttggctgtacaagtatgtagtagtacgtgtcccggcgccagatggggagaggcggtcatcgaggccagccagggagccccaggcttggcagagagggcacgggcatggcgccggcgggttggggtggtcgtagaaggggcacaccgccgccgccccctcccgcggatgttcccgcgcccgacgacgacgacccggcaccggagaacatggcggcggcggccgagccgaggaagaagctgtcctgcatggctccagcagcggcggcggcggcccccgccgctgggtcttgggcgcccgacatcatgtga

SEQ ID NO: 32463 - DNA, 425 bp, Oryza sativa
  unsure (1)..(425): unsure at all n locations
  Clone ID: PAT_MRT4530_3666C.1
atccggnacgaggacgatngggtgtcggcnncnggcatgnngggtcnannatccatcagantccnngnatccaatcgattagngtggatgaatcctctnantnggtcggattgtnacaccctatctccattnnngtganagnagaccctnacatncttnangcgancctcctatatnanatgggcganccnncngtnaatnatgacctcncttnccnnacnggttgnnnagtgtncccactccggttnaccagtgggctctnnacatcaaccccangggcnccnaagaaaattcccanncccctcctgtaganatccangannccngntntcctggnccatnagaanngacccgcggggccacctgacactacgagcgcgaagtccctacnacnacnagatcacgtcgcagcctctgccgatccc

SEQ ID NO: 32464 - DNA, 498 bp, Oryza sativa
  Clone ID: PAT_MRT4530_36670C.1
tttagagtttttctggattagaggttttttttgtcagcgatggggtcattgtgctgcgtcgcgtcgaggccccatggggccagcacggctagccgggagtggtcctcgattgggcggagcgatccgctctggcggactaacgctggcttttcgccgccgctgtcgaggaggtgggagtaccgcatcaattctgaggggctgtcgtatggctcccagggtgacagcggggctgctgcgcactacggttcgtcgctatcctcgaatagtaaagagcctagtaggagctgggagaggagtgatgttccaccggatcatcatcgttactccacctcggaaggtgccatttcgtattttaacagtccggatgttaccttccagaaccaccatattatgcttcctatgctgcaggattctggcattgatgaatacatgcgagtctcggtggctgagccaattggtgcattgctattgtcagaggggatatctggacagcaaaac

SEQ ID NO: 32465 - DNA, 155 bp, Oryza sativa
  Clone ID: PAT_MRT4530_36671C.1
acaacaaaaaacttgtttttgtatctattataactgggacacacacttcacataacatatgcatggattaaaaaacggcatacacacaacaccaaaccggacaataacaggacatctattcagatcttagaggaccccatcaatggccgagttgt

SEQ ID NO: 32466 - DNA, 292 bp, Oryza sativa
  Clone ID: PAT_MRT4530_36672C.1
tttgttttcttcaagcttagtaagtgttgcagtgtttttttaacatcgagttgacgctgcacccaattattgtggtgggaacgctctccatgggcatggaggaagtgctcagatagtgctcgaacgtggtcaagatgttgatgattaatcatcagatggagaatagtatgttggtgcagttggtagagatcttcgtaacgagacaggtggcaactctgggtgtgatgcatggggccgcccacaactaggtctaggttggtgtcctcagaacgaacctcttcgtagggtatga

SEQ ID NO: 32467 - DNA, 156 bp, Oryza sativa
  Clone ID: PAT_MRT4530_36673C.1
atgccatcgctgtcgtcctctaggcgggctaccgccgacaccttcattacacactggttggctagtgtagggagaaggttggtgggcgaggcgcacgccgtgttcaacgccggtcggggcagcctaccagagatgcacgagtacccgcttggctag

SEQ ID NO: 32468 - DNA, 177 bp, Oryza sativa
  Clone ID: PAT_MRT4530_36674C.1
atggcgcgccacaccgggagacggtggagagacccatcgaacaagcaagcaagctcgttcatcaagcatggtgtggtcctgttgaatggcctcgcgctcgatcgatcgggtcaagcacgcatggaatgggcaaagatggcgcggcgctactacagccgctgtgctactgtgcagtga

SEQ ID NO: 32469 - DNA, 351 bp, Oryza sativa
  Clone ID: PAT_MRT4530_36675C.1
gaacacgaatagggcctgcggtattataatggcattttctctaagtcccatatatattgatcgagcccccaagagaaacccacacctcagtgtgcccagatttcaaggcggatatgccagctacatactgaaactagatagggaacaggcgacggcgttatgatggcacctgaatgcctcatactcgcatggagagaggatcaaatggcaactcttctcagatatgttggaggagactctgacttgtttgggctcctagccaactcattgatcaagaatttacttggtgtgagatactcaagccttgacatatgcgatgatagcttgtgcttcgtacttgaacagttcaaa

SEQ ID NO: 32470 - DNA, 251 bp, Oryza sativa
  Clone ID: PAT_MRT4530_36676C.1
ttaacactgttatggttaatgctggtgagattcttcagattctcactcctggtggtggtggttttggctctccttgatggctattcttgtggacgatcatctacctcgcttctggcgttaaggtgagaccacaccctgttaagagggtcaatacatgctttgcatgaatgcttagttcaggttctgtcacctctgaatctagtggacacccactttctttggctaggcagcttatttagtggactccactg

SEQ ID NO: 32471 - DNA, 615 bp, Oryza sativa
  Clone ID: PAT_MRT4530_36677C.1
atttcatttcatacattgcagatggatagaagatggatgtataaaagtgaccgatctagcatagagtattgaaggggcgttgctgatttcataaatgttgtagagcaagacaagagcagaacaaacaatgaatggatgacttgtccatactttgatcgtaagaatgagaagatgctttagaatagtgccaaaacacgcatgcatctgatctaccgaggcttcatggatggttactcatgttggactaagcatagagagcaatagctagagaatattggggataaagctggcggtggtctgaacaaggaagaacacaaacatgatatgtttgttcaatcctcgttggctggtgatcgggaggatgtcaataatgagactattccagtaatgttgcgtgatgttgaggacctaacttacaacgagagggaccatgagaagtttactcagctgatgaacgattttgagacacctctgcaagccagatgtacagtaaagcacacgaagttatctgcgaccttgtatctgatgaagcttaaggaagtaatggctggatagacaaaagtttcacacaactacttggtctcacctgggccgttcttggcgttgtcataacgt

SEQ ID NO: 32472 - DNA, 2600 bp, Oryza sativa
  Clone ID: PAT_MRT4530_36678C.1
ccgccgccgcgccgaccacctccaggaggcaaggcgtggtgatcccggtgctgattcacctgctcccgctcgcctccgccgccgtctcacgagtagtcatctgagctagtgaagatggtgcagtacaatttcaaacgaatcactgttgtccctcctgggaaggacttcattgacatcatcttgtcccgcacccagaggcaaacaccaactgttgtccataagggatattctatctcccgcattcgccagttttatatgcgaaaggttaagtatacacagtcaaacttctacgagaagctgtccactgttatcgatgacttcccaaggctggatgacatccatcctttctatggtgatctcctacatgttctgtacaacaaagatcactacaaacttgccttgggccaaatcaacactgccagaaatatcattgcaaagatagctaaggactatttgaggctgctcaagtatggagactcactgtaccggtgcaagtgcctgaaggtggctgccctaggtcgcatgtgtactgtcattaagcggatcagtcctagtttggcatacctggagcagatcaggcagcacatggcgaggcttccatctatagacccaaacaccaggactttattgatttgtggctatccaaatgttgggaagagctctttcatgaacaagatcacaagagcagatgtggatgtccagccttatgctttcacaactaagtctctgtttgttggtcatgctgattacaagtatttgcgctaccaagtgattgacactccagggatccttgatcggccttttgaggacaggaacatcatagaaatgtgcagcatcactgctcttgcccacttgagggctgctgtgctattcttcctggacatctctggttcttgtgggtacagtattgctcagcaagctgcacttttccacagtattaagtccttgttcatgaacaagcctctagtcattgtgtgcaacaagacggacttgcagcctcttgaaaatctgtctgaggaggacatgaagctggtaatggagatgaaagcggaggctatgaagactctaggtcatggtggagaagctaatgaagagggtgttttgttgactatgagtactttgactgaagagggtgtgatggctgtgaaaaatgctgcatgtgagaggcttcttgatcaaagggtggagatcaagatgaaatcaaagaagatcaatgactgcctaaataggtttcatgttgctatgccaaagcctcgtgataacaaggagaggcctgcttgcatccctcaggctgttctggatgctcgagcaagtgctgctgctgcaaaggaaaagaagaagctggaaaggaaactggagaaggacctcgagaatgagaatggaggtgctggggtctattctgctagtctcaagaagcattacttattggctgatgatgaatggaaggaagatattctgcctgagatattggatgggcataatgttgccgattttctggatccagatatactgcagaggtgtgaagagttggagagagaggagggtcttcgcctcgaagaggaagctgcacaggaagctttccagattgatggccatgaactaactgaagagcagcgtgaaatcttgggtcagattagaaagaagaaggcattgctcatccaagagcatagaatgaagaagaggactgcagaaagccgtcctattgttcctagaaagtttgacaaagacaggacattcacaactaatagaatgggtcgtcaactttcatccatgggttttgatcctagggcagctctggaccgagcccgcagccgttctagaggtcgcaagcgtgagaggtcacttagcagagctgctagtgatggtgatgatatggatatagatggccagcaatccagcaagaaattgcgcgcgttgtcgaggtccaggtctaggtcaaaatcaagaccacctgaggaggttgttccaggagaaggattcaaggactctgctcagaagaagaaggcgattaagaaagctaaggattctgtgaggaacaggaacaaggaggctcgtcgcggtgaggcggatcgtgtcattccaactttgaaaccaaagcatctattctctggaaaacgttctattggcaagacgagcaggcgataagtaattcagcactgctgcttagcatcactggtttcaggaagagcagtataattgcagttcggtgttgggattagggtgaaggaaggcctgtttatccaatctttaggacttgttgtgctctgtttattcatactgtctggtggattggtgttgtatcgcgtctcatccttcgactgagacataattttgttagcttatgtttcagctttatgctacattatatatggtttggctagtattaatagagtggtttaatttcgtcgaatggtactcactaccatcaatatcttataattgtgactttgttatacttatattccagtcctgttctactgtaccgatgctctactgtttgagatgcaatgttaaacttgttgagctggaaaaaaaaaaaaaaaaaaaaactcgagactagttctctctctcctcgtgccgaattcctgcagcccggggat

SEQ ID NO: 32473 - DNA, 209 bp, Oryza sativa
  unsure (1)..(209): unsure at all n locations
  Clone ID: PAT_MRT4530_36679C.1
taacaagggcaataagcttgcggtctttcctgcaaacacctggtggctgctgcagccctgttgctggcagctgtgctgtctgtgatgccagcatcctntgtgatgtgtcagatcagccaacatcattccaacattgcagcacacatatatgcacagtgccctgcacagcagtgcagcacacagtgttccccattggttgcacactgtgc

SEQ ID NO: 32474 - DNA, 109 bp, Oryza sativa
  Clone ID: PAT_MRT4530_3667C.1
atgaaaaccagttccatggggtgcaaaattactatccatttaattttgctatatacgtactatccatacgagcttgtagagacgcccagactctactgcggggctagag

SEQ ID NO: 32475 - DNA, 249 bp, Oryza sativa
  Clone ID: PAT_MRT4530_36680C.1
atgctgctaacacagcatgttgaaaccccggtgagcagagtgcaagctgctgggcagaaggtaaagtacaaggtgtacatggttgtgggagcacaagcatcccagcagatcataaacatctatgacagaagaggtctagctgtcaccgctgcccctgatccttcaccatcgctctacatcctagcagcaacaaggccacaaggccagatcctcgactcccaacacctaaaacccaaggtttcctactga

SEQ ID NO: 32476 - DNA, 345 bp, Oryza sativa
  Clone ID: PAT_MRT4530_36681C.1
atgcgtgaagttgaaggagagtatgcagatgcaaatcagagtgtcattttcttacttgcttgttctatcaatgtcgccgacgtggagcagccgctggttgttgctattggcccaggtgaacacctccttgctggttaaggtgttgcccggcgtccggcaacgaggctcgaagcagcgccttcgcctcaaccgccgccggccaccgccatcaaccgccatggtgccgtcgtcctcctccatggtggtgtgtcgccgatctgtgggcttttaggaaaaaagggagaagagggtttctagagtaagagctctcttgctctccagctctttgtagcttcttcatacaca

SEQ ID NO: 32477 - DNA, 519 bp, Oryza sativa
  Clone ID: PAT_MRT4530_36682C.1
atggaagacatacatgggacggccgtcgtccgcctccgctccggccacctcctcctccttgtcggtggagaggcgccgccgctgggatggccagcgtccgcctccactgggacggccggcgtccgcctccactccggccacctcgtcgtcatcgtcggcggcggcgggggcggtcgaggcctcactcctcccgccgtcgcctgctgccaagccgcccgcctgccgccgcgtgagtgcgtgagaggagaggagagaaagttggaggtgaggataaggataaggagaggcttgcggcggctgcccgacgtgcgtcctcggccgacgatggcaatgggaccgatggcgatgaggcagacggagcaatgcagggtcgtcaatgaagatggcttgttcctagcgatagcggcgtcgagggacgtgtcccctgtgcggcgtgcttggccggcgaccggtgagcactgcgcacggaagaggttgggtgagccggtgacctccggatcccagcgacggtggagatga

SEQ ID NO: 32478 - DNA, 370 bp, Oryza sativa
  Clone ID: PAT_MRT4530_36683C.1
ggcgcaatatgattatattggctttgtctagtcccttatataggggttggtcttgccctctacaggccctcctccacgtccaactcggggtagaaaccaaaggaaacccgaaacattccttcccgagcaaggaaacctcgagacccgacgaaacacaatcggattcggacctgccggtcaaaccggccacacaccgccggtctgactggccctcaaccggcggtctgaccgctcaacacacggcggtcagaccggcccttttaaaatctaagttgaaagttttcaaattttgtcttacaaatttaaatttagagttgaaaattttcaaaatttgaattcaaagtttaaatcttaagtcaaaagttttcaa

SEQ ID NO: 32479 - DNA, 344 bp, Oryza sativa
  Clone ID: PAT_MRT4530_36684C.1
gcaaggggccactggagctcaagatgtatctgttgcttaatagatcatattctacttttcttggggttccagcagattgaaattggatgggtggaggctattgtatgaagaacgagcttttttagacggtgacctgattgaggcgacaaatggttctgcatatattcttcaattttgacgccaaagtttactgtatcagaatgctcaaccattgacagattgaaacaacccttctaacaatgcttgctggtggttagactaacaaccatactgcgtggaaaagacttgcgcaattattgatatggacggcctaatggagaaattaagcttgacttttcttgcgt

SEQ ID NO: 32480 - DNA, 1601 bp, Oryza sativa
  Clone ID: PAT_MRT4530_36685C.1
tcagcggtagagtgtcaccttgacgtggtggaagtcatcaattcgagccaaggcgatgatcagtagctggtccgagaggatgatcagccacactgggactgagacacggcccagactcctacgggaggcagcagtggggaattttccgcaatgggcgaaagcctgacggagcaatgccgcgtggaggtggaaggcccacgggtcgtcaacttcttttctcggagaagaaacaatgacggtatggtaggggcagagggaatttccggtggagcggtgaaatgcattgagatcggaaagaacaccaacggcgaaagcactctgctgggccgacactgacactgagagcacaagaaagcataagcaacacaagggattaactcatcactcacttagctaattaaatcttcgaccatgtcggacaagtgcggcaactgcgactgtgctgacaagagccagtgcgtgaagaaaggtaccagctatggcgtcgtcatagttgaagccgagaagaggtaactaactaactcaatatcgatcaaccaaagcatatttctcgtctgaattttacagttttaatttcttcgtctttcctctcaaacacacacacgatactatcgatcctgacgttcgcatacgagacacgtacggcctaatgtattcgctcatgcttatatttatcaggcaaaatttaaattttcaatcttaaatttaaaactgattttaagttttttattaaaatttatttttcaccctctacttttagttgctaaaaatatatatatgaattttatttataaattattttcgtttgcaattatatcgtttgacttattccacgaataagctaaatgatggggtctgtagcatatactacaaccaccataaaaaaacttcatcaaaaatattttaaaattaacagaaaaatagtaagaactttacatacgagattagatagttctcaacaatttttacctgacgccttaattatttgcttgctttgtgcgtgcgtgcagccacttcgaggaggtcgccgccggcgaggagaacggcggctgcaagtgcgggcaaccagctgctcctgcaccgactgcaagtgcggcaagtgaagtcacggaggcaaccgaacactcggccgccggcgagtcacctaccttaattagtccacaataaaaaccacccatatgagtgtggtttgtgtgtgtgctgattattgctgaattaaacccgtgtgttatcgattaattaagcagctggtcgcttcggcgactatgcgtgtatcaacgtatgaatttgtgtgatgtgatgtacccgtgctattctcagtgaaattaatccatcgtgtattcgtgtggtttgcctagtgaaaaaaaaaaaaaaaaagaaaaaaaaaaaaaaaacaaaaaaaaaaaaaaaaaaaaaaatctctgtcactttaaaaaaacaaaacaaaaggtctcctcctttaaagagcacaaatgtggcgaactttgttaaggtacaaagtttattctcgcaggggtgaaaagaattactttctttttaggtgctccaacatcaaataatggggcagatgtctaaaatatcctaactgaaaaaccccgggc

SEQ ID NO: 32481 - DNA, 1958 bp, Oryza sativa
  Clone ID: PAT_MRT4530_36686C.1
tttttttttttttttttttttttttttaaatatagacagcagaacatcactgggattgccattcaaaaactgcaaacaccacatctaaagtaaactgccaactgaagacaccaccttgtagtacaaaattacatatcgggagcataaatagggataattatcataacgtcccaaggaaataatcagatgagaagctataagcctataatgctcctcagcttcaagcatatagtacacttgaaacacgatacaatgtgttcttgttttggaatttgttgtccatcagaaatgagcaggctaaatctgagaaaatgttcaacaatcatgtctacatcgccttgtcggttaagtacaaactatccaaaacagcaaatcctgcagcaacgccaccttcatctgacgatgaaacttttgtccgcatcaagtaaccactctgttcattcataaccaccttatcattgttccgcaagtaagcaccataaattccaagctcagatattgtgagggcctcatggcaaacaccaccacgaaccagattagagagagaggcttttgggaagattctttgcatcagtatgtaggctgcaagcgcatcccctccttccttctggagtctgatcaaagtctctcgtacatcaataccgtatatgttgttccctccgccttcacgttggggcttcaagacaaacaactcgggtttttggattgcggatttcacaatctcttcatcatccaagctccatagtcctgcaaagcatttacggatctttgtgatttcctccttgttttcaagaaacctttcaagaacattaggtcttgctaattcttgttgaatcttcttggtccccactaaatggtatgatatcgaagggcactttacagcagatgattgttccagcaatagccttgcagcccattctgcttctgaaggataatcatttggtgtatagccagctctgaagtacaccacagaaactgtcttgccatctctgacaaagttttcctgatagtcgttatgccatgtgtaatgaattgttaagggagtgtaaattttatgtttggaccaggtagaagataaaaagagcataaaaggatatgattccttcaaatgtttggcgagccagtactggtcatacatatttctttcttcgggctgaacaatcatcataattacagcactgtcaacattaaactcatcccatgctctggccaatgctttagcaaattgactgcttgcctcatttccaggaaccctcttggagtctagacaaaataagtgtccatactgatcaattaaggtcctgtgaagctcacttactaaggaaccaagcccagggaaagatgctgaaatagtgttgagctctatttgaagaagagaattggtctctgaatcaagcatatagtctgaccgatgcaaccccaaccggatattctcctccttatttatttccatcatcttcctatgaatctctaacagcctagaagtgaaatcgtcaacttgctttgttttagacaaagaatcttgcaagaagtccccgtccaagctaacacgatccacaagctcgttaaaaataggagccaactcgcacgcctgcctccaatgagattctggaagatgcgttgggagcagagagaaaggagcatgaaccaaaccaacgccggggactgttccagatcgagggtcggcgcggtcgccgacgacgagcccgtgcagcgcgcaccacgcggtggcctcccgcaccatctcacccgccgccgccgccgccggcggcctcccctccgcggcggcgctcatcgcgggcggtggactggagcccacgcgggcagtgaaaaacaaattatgatttctcgaggggatatttgcaaattgcaatctcagcttcactcttctgcgagattgtcgagtgccgaactgtcgaaccgaagtttatagttgaggtgggagttgcaatttcgag

SEQ ID NO: 32482 - DNA, 669 bp, Oryza sativa
  Clone ID: PAT_MRT4530_36687C.1
atggaggggaccgtgttcacgccatcgctgcaaggcattaagaatgtcaagtcagagagcggtgtgatcctaacgaagccgtttcttgaagtttgcaagcacattcttcctgtgctagataagtttggatcggctatgtcaatcgtgaagaatgacattggtggtaatattacgagattggagacaaaatatgcatccgatccttcaaagtatgagcagctgcacagcatggtgaaagttgagatcagctctaagacagcaaaaagttctagcagttgtaccaatggccttttgtggttgacaagagccatggacttcctggttgcactgttccataatttggtacagcacccagattggcaaatgtcacaagcttgcagcgatgcgtacagtaaaactctcaagaaatggcacggatggctggcgagttcaagcttttcggagtatctaacaatccctgagtttcaggttgccataaagcttgctccagacaggaagaaattcatggagatcattagtggctcaggtgatatcaacgcagacatcgagaagttttgtgcaactttctccccattgctggcagaaaaccataggtttctggtggcagtttataatagatttgtctactttcaggcaagtgtcggtatggatgatctcaaggcatcttga

SEQ ID NO: 32483 - DNA, 463 bp, Oryza sativa
  Clone ID: PAT_MRT4530_36688C.1
atacattaattataagaatctagctactgcccaaatgttgaaatattaaaattacagcagttaacatagatggtgacattcattagaaatatttttgaattatttaatgataaaaaaaaccttatggagttcccatggtggcgcagtcggttaaggaactgaagtagtctccatgagggtgatttttcaatccctgacctcacccagtgggttaaggatccggcgttgccataagctgcggtgcagagtcacagatgcagcttggatctggtgttgccatggctgtggtttaggcctcagctgcagctctgattcgacccctagcctgagaatttccatatgctgcaggtgcagccataaaaagaaaaaaaatccttatgatacataatagtgaggaaaaaagggcaaattatatgattgaatgaccactatgaattttctttgcaatttcccacagggaatg

SEQ ID NO: 32484 - DNA, 553 bp, Oryza sativa
  unsure (1)..(553): unsure at all n locations
  Clone ID: PAT_MRT4530_36689C.1
catgcttttatgttcntacttccattactgacagaacgaaggcgtctgatttaccatatcggttcgccgatacacattttatacatgtccatgtcggttattctcaccatgcttggctggtttctcacactttgcttccactgtcagactggaatgagcttgtggtagaatatatgaagtcacaacaatttcattagaatgtaatactgaggttttgtagagaattggatgctggtctaccagcatggacagaaaaagccctgtgaataatggttttccacgggtttgggaacacaataaaccacctttcccaaaccgtttgtttggtttagaatatgggaatccagnattttgaacctggtttgttaaagaaaggctggtggttttttctttagggttgctccaagctttattttccatgacagactgatttactcagataaccaccaaccagttttttttttcatttgccaccatttatcaatcaagctcatttccagatatgtaatttcttttcatcaaggaagttcaaannttacttaaaaaaaaaaaa

SEQ ID NO: 32485 - DNA, 478 bp, Oryza sativa
  Clone ID: PAT_MRT4530_3668C.1
aatgaacggtgggttatactcgatcctgcaactggaaagatggaatacaagattcgtagaagtgatgcagatgtgaggggaataatagtgtttgattcaacaagcactgtgacgttgacgccaatgaactttcatggactgccgaaatatgatggatgctgtttctatattggaaccccacagaaaaaggaatatattctttgcgcaaaacttctagtgctgcaagagcttgagtgtccactttacatgcttctcagttggtgctacaagctcacaaagaagcagtgaattctttgggtggaaatggtcctaccaaatagggaagagttgctacagttgtggctgcggccaatgcgactgcaatcgaatcatacaaagaggtagaggcagcgatgaaagtatccctgcgggcagctctgtgctcaactacaaataaactcagtcaaggtcacatggatgatctcactataatgatgga

SEQ ID NO: 32486 - DNA, 141 bp, Oryza sativa
  Clone ID: PAT_MRT4530_36690C.1
atggccggctcggctgtgcagggacagtgtgaagctgacagagcacgacaagaaacaattggaagtgctcatcttggcggcacagttgtgaaggaggataggccggggaacgccaccaacgtctttgttggaccacggtga

SEQ ID NO: 32487 - DNA, 421 bp, Oryza sativa
  unsure (1)..(421): unsure at all n locations
  Clone ID: PAT_MRT4530_36691C.1
gaagctcaccactcgagctctgtctgaactctgaagatggaggagcactacaccatgaagaagccgaggttgcttcttctttccttggaggtgatactgattgctcttcttcttcctctccgtggtgcacattgtgagagctctactcaaggtgaaggcggcggtggcggcgccggcgccggcgcggcgaacctgacggtgaccggcacgtgttctgcgacgcctgctcctccagctccttctccaaccacagctacttcttgccaggtgtcaaagtgagaatcgactgcatgatcagcgtgaaatcggcgtccaaggaggagatcaagatcaccgccgagaaggtgaccaacacctttcggcgcgtaccagctcganatcccggcgattgaaggctttcgagtgcggcaacttccgcggc

SEQ ID NO: 32488 - DNA, 120 bp, Oryza sativa
  Clone ID: PAT_MRT4530_36692C.1
atcaattgaacaattacttctgtgcatattaaatgcggagttgaccaaacaaaacaaacttcttacccatcaaatattttattacccacatttggacactttcattaaatcaaaaacact

SEQ ID NO: 32489 - DNA, 2991 bp, Oryza sativa
  Clone ID: PAT_MRT4530_36693C.1
atgtctcgccgccgggacgctgcgccgacggcgcgcgagggcgagagggatctcgtcgtgaaggtaaaattcggtggcactcttaagcggttcactgcttttgtgaatggtccgcactttgatcttaatctggctgctcttcggtcaaagattgcgagtgcttttaagttcaatccagatactgagtttgtactcacctatactgatgaggatggggatgttgtcatactggatgatgatagtgatttatgtgatgctgccattagtcagagactgaaccctcttaggattaatgttgagttgaagagcagcagtgatggggtacatcagacaaaacagcaggtattggattccatatctgtaatgtccactgctctggaagatcaattggctcaggtgaaattagctatcgatgaagctttaaaatttgtaccagaacaagttcccactgtccttgcaaaaatatcacatgacttgcgttctaaagctgcatcatcagcgccatcattggctgatttgctggaccggcttgctaaactgatggcaccaaagagcaaaatgcagtcttccagtggttctgctgatggttcatctggctcctctagtggtaggggacaaactttgggaagtttgaatattaaaaatgacactgagctcatggctgtttcagcttcgaaccctctggatatgcataactctggatcaactaaatcacttggtcttaagggtgtgcttcttgatgacatcaaagctcaagctgaacatgtatcgggatatccttattatgtggataccctttcaggctgggtaaaagttgataacaagggaagtaccaatgcccaaagtaagggcaagtctgttacatcctctgctgtgccacaagttactagcattggtcatggtgcacctactgttcattctgctcctgcttcagattgcggtgaagggttaagaagtgatcttttctggacacaactaggcctttcttctgagtcctttgggcctaatggccagattggtggtgatttgaactcgacatgccctcctccaccactgtttccccgttacccacttcagtctctccgagctgataaaagcagtatcaagggtggttgctcttaccctccgtgcatctgcaaaagtagcacatctaagcctgagaatctctcccattacccagttcagtccctccaagctgacagaagcctaaagggtggtcactatttccctccatgcacctgcaaaagtaacacatccaagccagataatctctcaccagtcggtctttatggaccttattctgaaggcagcagctgtaataggtgcccatacagggatctaagtgataagcacgagagcatggcgcagcacacactgcatagatggatacagtgcgatggctgtggggtcactcctatcgctggttctcgctacaagtcaaatattaaagatgattatgatttatgcaatacctgtttttctcgaatgggcaatgtgaatgaatataccagaatagacagaccatcttttgggagtagacgatgtagagacctcaatcagaaccagatgctctttccacatcttcgacagctacatgattgccgcttcattaaggatgttactgtccctgatggaacagtaatggcaccatcaaccccatttacaaagatttggcgcatacataacaatggatcttccatgtggccatatgggacatgtcttacctgggttggtggacatctatttgcacgcaacagctcagttaaattagggatctcggtggatggtttccctattgatcaagagatcgatgttggtgttgattttgtcacacctgcaaagcctggtgggtacgtgtcgtactggagattggcatcacccactggccagatgtttggtcagcgagtttgggtttttattcaggtggagcacccggtcaaaaccagtagcaacaagcagagtgctgctataaacttgaacatgcccccagaaggaagcaacacagaatggaagcattctgttgatgcaaatattcagtctgcagatattgtgggtaaatactctggaagcaccataactgatcctcttgcacatgcactataccatgaagccaccaaaccgatggaacctgagcttgtttcaagtgccgtaccttctgtacctagagcatttgaatcagtgctagtgccagctactgatctcctcacttcatctgctggagctgaaaaggcttcgaagcctgctgccacgcctggacctgcacctcaagccgttcccctgccaaaacctgttagcattcctgcatctggacctgcgcctgctcctgttagtgcgactaccgctgcacctgtcggagctgctgctgctcctatcagtgagcccactgcacctgctgctgccattggaatgccctctgcaactgctcgcgctgcttcttgcctgcctaccgagccttcatctgatcacatcagtgccgtggaggacaacatgctgagagagctggggcagatgggcttcgggcaagtcgacctgaacaaggaaataattaggcggaacgagtacaacctggagcagtccattgatgaactctgtggcatcctcgaatgggatgcactccatgatgaactgcacgaactgggcatctgatcagaacggagatgaacaaggcgctcaccaaggacggcgaggaagcatgtggccgtgaatcttttttgcccctcctagaagggccagtgatgacctcgtcgtgttcagctattgagcaccttgcagtatccaagatatagaccgtagtatatttataaatagcttacctagttaaaagcggcgttcgtgctgctgtgctacccctactcgccagcaaccttagagggtctggtgtagtgccagtagtggtgtttaaagacttctaatcatcggtgtgtaatcgaaataagtaccgtacctactagttgtttattatgctatatgatgtattaaacttgtgttgct

SEQ ID NO: 32490 - DNA, 1379 bp, Oryza sativa
  Clone ID: PAT_MRT4530_36694C.1
cagagaaagggaggaaggaggaaaaacagaagagaacgggatgtggtggtggctgcaagtgatatgcattattaggtggcggcacagatggtggttggtgataattatttccatgatgtggtggtactgacggcccagaaaaatggggtccaggaggatgaaatggtgcaacaggaggcggcggcggcagcggtggtggtggtggaggtggcagaggaggacagggtggacgtggcaaaggtggtggagatgatggcaatggaggaggagaaggtggtttgtcatcaggtaagggtggaactgaatcaacattttgcttggtcgttgcacacctagcaacagttaaatctggttggcatgaggagatagcttccccttctgcttctgaggatggggctaaatcctccatttcatggtcaccatctacttcttccaggacaagtcgatgcttcgccacatgcatttgagatgcttcttgctcattagcacctgtagcttcatgttcaggggtaacagcttcaaagctcctctcctcagaggagcttccttcctcatcttcaagtagttttgtgccaatcaaatttggaagatgaaaaccagtgttgcttccatactcatcgacaagcattccctcgttatcccgcagaggtttaatgtgatggcgaatgatgtattctgaaagggttttcctgtcaagccagagcttcaaaaccttaagacattgccttcgattctcccatgcagaattcccaggaggtgcagaagcatatagtatccggggtaggactgcttggataagtgaaggaaaggcattgccagaattcccaggaggtgcagaagcatatagtatccggggtaggactgcttggataagtgaaggaaaggcatacaaattagattctttttccaggtgttcgatgatgatatccatttcgacaccagcaatgccttgcttatcacattccagagcaagacgtgttgcacggcctatactttcttttgttcttgttaaggaaccaaggaaagcttcaaaggccctccgtgctggactagcttcatcgtgacctgattcttttgttcttgttaaggaaccaaggaaagcttcaaaggccctccgtgctgaactagcttcatcgtgacctgataatttgttcaagcccttctgttgcatattatcaaaaggaattgcaccactattttgttgagtatgaatcctatctgctgcgaaccttattgtatgattggaaggtgaacattgaccacttgacccttccttgagtgaaggtacattcaccgaaggttcaggaacaccattggagcagagaaaaggaattagtcgcctaccgccctctgggggagggcgatttttaaaaatcgcc

SEQ ID NO: 32491 - DNA, 680 bp, Oryza sativa
  Clone ID: PAT_MRT4530_36695C.1
gtcggggagaagccgccggcggcgaggggagatggaggcgacggtggacgagctgagcgaggcgtaccaggagttcgtggcggcggcggcggcggtggtggaggcgcgggggcagtcggggggagagaagaacgcggccacggacgcggcgctcgaggcgttcaagcagcggtgggagctcttccgcgtcgcctgcgaccacgcggaggagctcgtcgagtcgatccgccagcgaatcggttccgagtgcctcgtcgacgaggccaccggcgcctcctcctcctcctccgcggcgctggccgcccccggcatcaagcccatcagcgccgtccgcctcgagcagatgagcaaggccgtccgctggctcgtcatcgagctccagcacggcgccggaggtgcctccgccgcgggtcccggcggcgggggcggcgccgcggctgcggcttccggcgttgcggggcagcacggccacggcggggtcgacacgcgcttccccgaggacggcgcccagtaggtatttattttgctcaattatcttgtactagtagtattttcttccaaagaaaacaaattactggtggtatctctgtgtaatcgtctaagaattgaagcattagagcttgtgatcgatattctaaaaaaaattgagcttgtgattttctcaaaaaaaaaaaaaaaaa

SEQ ID NO: 32492 - DNA, 713 bp, Oryza sativa
  Clone ID: PAT_MRT4530_36696C.1
atggaggcggagggcggaggcggcgccggcgtgatggaggccgaggacggacgggcgaagatggcgtcggcgcgatggaggtggaaggcggaggcggcgcacgagcgccgagcggccgagcgcgatgcgatggatgggatgggaatgggaggcacgcgcgaagctggtgctgatcatgtccccgaaccagaaccaggcgtgggcaatggccacagtcccgcctccgcctccgcctgggtgggcagcgcgaagcggcagagcgggcagaggcggctgacctgcagccactcgaagatgcagctctcatggaaggcatggcagcacggcatcttcctcatcggcttgtcgctctcctcctcgaaggcctccaggcacacggagcagtccttctccttcgcctcgccggccgacgtctcctccaaggcggcgatggcctcgctgcacgccgggacggagccgaagcgaccgttgctgtacccttccggtggggcagcggcaatcgtcctgcggtcggcctctggaagtgcaggtggggcgccaaaataaagagcgaggccgcggccgctgccgtgggagcctgcagcctcctgtacatgtcgtggggcagcagcaatcgtccggtggtcgccatgctccggcgactaggacaagaatgcgcgcgacgctcgatcggcaccaatgagcagctagccgatcgagaatttgaagattga

SEQ ID NO: 32493 - DNA, 696 bp, Oryza sativa
  Clone ID: PAT_MRT4530_36697C.1
atggagagatcaagatggaaagttttatctaaagcagatgacaatagactcggacctacatatgacgaagagcatgaagaggatgagcacagtcacaaagaacctgtcccggaaattcctccaatgagaaaagcatacactgtcaggctagaaattccctcgcgtgttggcaacggagaccaaaaagatgggtgcgaaacttatgcaagaccgagagccgacggttgcaaatcaggcgcaatgatgctcccaatcatggacccaattcgacgcaagagcactagaacagcacggaacccctacaaggcgatgccgccaaagcacgcggcaaaagaaaaagggggagacgggcaaacctcgagcagcggctgctgctgctgctgctcctccatcgcggatccaccagaggagaccgggagcccgcggatcggaggagcggaggccggcttgagagagcggaggcggtggttgggaaattcgcagggttctctacacttcggaatagaggcggagacggagaagaggagagaatatgtttcgataagaacaggtttaagggaagatgacttgagaagttacgtctggagtggagttgtggagctgtctaaacccagctccacaactccagttcattttgtgagagagcttcacccaactccactcccagttttagtggagctgaaactgtttggctga

SEQ ID NO: 32494 - DNA, 462 bp, Oryza sativa
  Clone ID: PAT_MRT4530_36698C.1
atggcacaacggagcgtggtgttagcgttggcgctatggtgcctggtggccgacggcgaggcggtgtggatggagctatctacaacagcgaccaagtgcttctcggagagaatccaatcaaacgtcgtcgttatcggtgactacgacatcctcttcgatgggtacccaacgcgccccatactctccatccaggttattcttggattgctcctgcaggtgacatcgccttatggaaaagtcttacaccacagggagaaggttatgcagggccagttttcatttaacacagcagaacctggagtttatctggcatgcttctcggtggataccttggataaggagctgggagttgcactggaattaaccaagctagaaacagctgttcaagcagtccatggaaacttgatgtacctcagatccaaagaatcagacatgagagataaattattattcgagatataa

SEQ ID NO: 32495 - DNA, 583 bp, Oryza sativa
  Clone ID: PAT_MRT4530_36699C.1
cggacatcagagcggaaggcaaactctccaatacaatggctccggtgatcatcccagatcattaccttgttcggtggataatgtgcgttggagccaccacctacaagagcaaggatgttgcaacggaacagcatttcaacaatcccaaatccaccactcttcagatccctcctgaaagtctccttaaaagggtcacaattaaagatcctgaagccattgctggttccagcagcgaagcaaccaaagtcctgattccaagaaacagacaacagcctgatatcctggtcatcgctgctaccagcttcagcctggcctgtaggacctgacatttgccatgtgtgaggggactcaaatgtcccaagcttgcttggggagggcaaaccccgtgatgtggagacttgtgagctcatgtgaggggtggacaagccagatcaatcaattgtaaatgtagcgtatacacctcacgggggggtcgggggacggaggaggaggaatcgtggtgcgcaagcgcgcggaaggttccagaagaatcaggacgggatcgggccgagcgcgcgaggtgggatccgaatccccaggggtg

SEQ ID NO: 32496 - DNA, 532 bp, Oryza sativa
  Clone ID: PAT_MRT4530_3669C.1
atgtcgataaccggcgataacaataacactggagacaaggagaaggagcctcctgttaacaccaacggaggcaatactgcctcaaactccagcgaagggccattctcggggtataacgtttcactattaccgttcgttcttcgtttcctatagctgttggtcgcaatattattgcattctcttgtctatattgatgcttattctatattaagtatgctcatgttgtatacatataacaatgtcactagatctactcaaattacaaatattaaaatatatcgaattgtaaccaaatttccaacagcacttggtgctggtttaccaagcgtgcttctacgttgtttcgctgcaaactattgctacagacgttgcgaactatcgccgccaacgagtgctttctacgctttctctctcgccactgccttcctctctcttttccaaaccgttacagaacttgtaacaagaagaggaagattgctctttttagctcctatcctgcttatttgcttctcttctgctattaaatgtaaga

SEQ ID NO: 32497 - DNA, 802 bp, Oryza sativa
  unsure (1)..(802): unsure at all n locations
  Clone ID: PAT_MRT4530_366C.1
ccacgcgtccgaccgtcttcgctgcctcccggtcatggccagcggcggttgaccatggcatatgctccggcaggcaaaagcagagagatggccttcctcccctttctctcccatctctccttagattaatctttctctctctcaggctgccattgttgttcttttcatggataaaattgttagggatcggcaatatttcctattctaattgtgtcttgactgaaaattagttcgattatattcagagcccgtggttaggtgatccgagattggtgcttgctggctggattagtcaattagaaaaaggtagattttgatatgcagtattaatttgatcttgtgatgatcttagttcttgtaccctgccttcccttgaggctacttccggatacccaaggccctagcgcgaagacgtgtgagggggctgcaggtgagtcgggctatcgccgtggagcgaccgtggtgaagcagcagctctacagcggccggatcagtgccgtggtccggtggctttacggttgctagagctgttgctgtttagggtcaactaggaggaagtgtctgtgtggtgattcatcacagttgcggcggtctcgacctacagcatatgtccatgatcgatgcgtgacaagagccgaaaaggatcatccattgntgatgcagtttttcaagcaagtggataagagcagncagtattatgaatttcgctgcanaactagattagtgaaaccatcaatcctccactttcagaacctatacaaggaagggctcttggagcaactgctacagtcaactgctctac

SEQ ID NO: 32498 - DNA, 345 bp, Oryza sativa
  Clone ID: PAT_MRT4530_36700C.1
atggccatgcacggcatcgacagcgtggagtggcgcgcgttagctcaagctgtagccctctggaacgaatttgctattgctcgagcaccgaatgtaggatcaactacttcacaatctccagaactccagaagaagtttatcactgaacacagttcatggacaaactacccgctcacatggctggagaagcgagcatgtcaacttgggaagtgtgctaatgactccatgaaattaaaagatcggaacggtggggacgaagtaattaagcagatggggggctggatggtgcaggtgactgttggctcaattctggagaacgcttttcttggccattcactggcctga

SEQ ID NO: 32499 - DNA, 669 bp, Oryza sativa
  Clone ID: PAT_MRT4530_36701C.1
atggaggtggcgccggcggcggccatgacgagggcggaggaggagagtcgccgtcgcgcggcgacgcgcctccccaggctgctccgcggcgtcgtctccggcatgctcaccggtatattcgccgtcgctgggggcttgacgggggcggtcaccggagcattggccgggagagcctccgacggcggcgttctccggggagctgggctagggacatttgctggtgctgtcctctccattgagatccttgaggcctctcgcgcgtattggtgccaagatcgatcaagctcgcctggttcattgtccatgggtgattttgtaaagcagcttattcatgctcgttttgtgcaagagcagaatgaggcatcaggacatatcacatatcgttggcaggttggtattgcagacgttgtcaatggtgctgtacatgaaatcctaggagatgttccatccggagaagggctttcaaaatattctttaatgaaattgccataccatgtcgtgatagatcataataatggctcaattggggaaagtttgtcttgccctgtttgcctgcaggatgttgtggctggacagacggtgaggagattgccgaaatgctctcacactttccatcagccttgcgtggacaaatggctcgttggccatggctcgtgccctatgtattaa

SEQ ID NO: 32500 - DNA, 313 bp, Oryza sativa
  Clone ID: PAT_MRT4530_36702C.1
cgaatcccggtcgaccacgcgtccgaaataaaaaacaaaaataaaaaataacaaaaaaaaaaaaaaaaaaaaaaaaaaaaaaaaaaagggaaggaactaggggtggggcaccaatacccaaccttatggcgcgcactgttatttccagttttcgtcacctgttttcggctcatggttttcatttttatacctgaaataaatttattggccggatttaaaaaactgggcttgaaaaacctttgcctctcccattttttcttttagcccaaatccttttttttttttgtcttttaaccaaaagagcccccaccgg

SEQ ID NO: 32501 - DNA, 159 bp, Oryza sativa
  Clone ID: PAT_MRT4530_36703C.1
atgggggcctcgccgacggcgagtatctccgtccgtgaggaggtggctcgccgcaaccggagtactccatctggctacctggcctgctactgcaacaccgttaaatggatgatgcccgtgatggacgggacgggtgaggcgcagcaggcggcgggatag

SEQ ID NO: 32502 - DNA, 180 bp, Oryza sativa
  Clone ID: PAT_MRT4530_36704C.1
atggacggcgtcctcgcaacttgcgagaactgcctcctgatgacgacgaagacaatgaggaattatcgtagtcggaggttcagctcctggaccgactacctcatcctcgggccctctagaaagattgctataacagtggtgagagattgctacgatctactggtcgaggacaaggtgtag

SEQ ID NO: 32503 - DNA, 732 bp, Oryza sativa
  Clone ID: PAT_MRT4530_36705C.1
atgaccacactgcttggctgctggaagagcatgtcgacggtgtgcttgcacagagtcgccatcacggacgaggagctgggtttcttcctcgccggctgccttgtgctggagcggctggatctgtccttctgcaattcgataggcgccctcaagatacctagtgcactccggcggctaaggtccctacgggtgcgctcgtgcaggatgctgcggaccatcgagagcggcgcgccgatgctcgccacggtctggtacgacgggtggccgctgctgaggttctggctcggtggcgcgctcgagaggacgcatctggagattgcatatggtatcagatggtacaacgaccagaaccgtgggaatcctgacgatggagcttcatgtagggggcgggaggccagcaaactccgcaatggtggcatcgtcggcaacctgaggaaggtgaccatcaccggtttctgctcggcgaatagcctggtcgagctgacatgccatatcctcgtgatcgcagcgttatcgctcgaacacctgacgcttgacacctcccctggttacgacaggaagtgctcctcctatgatcggtgcaggaagatgagtacagaggctctccgggaggccgagacagccctcgccgctgcaaggaagtacgttgagccgaaagtccctgacagcgttaacctgatggttcttgggccctgcggccggtgtcacctgggcatggaatacggcagttag

SEQ ID NO: 32504 - DNA, 776 bp, Oryza sativa
  Clone ID: PAT_MRT4530_36706C.1
actagtggacccccggccgcgcgcaggcggatgagcagcacgagctagatagcatagcaagaagggccaaggagaaagcggtggttgattcgccatgagcagcgggcgcgagagcaggtgggagctcccggcgacgctgcgtgcgctggcgcgcgacgccggccagcagctgcgggtaccccgcgcggccgcggccgcggccacgccggcggcaacggcggggcggcgcgcggcggacggcggcggcaaggcggacaaggtgatgcacctgctgctttgggggcccaagtgatcgatcgatgggcctccgccgcgccggccggccgccgccggcgggtcatcgtctcatctccgaccagatcacggctgtacaatatatatgtactagtactagctggctgattgctcgcttgctccgttctctttaatttcttatggtgtttttggtccagtatccatgcactgatgatgcttgtttgccgggtcagtctacaggggtttccaccgtttttctgtacatacgaatcaagtggttttcctcgtgaaaatcacatgcgttctaatcggtcctttttttatggagcaaaacttatgtatcatcaatcatgtactactaccttgtaaacttttgccttgagtttggggcaagtaatgatcagatcgtgtaagactgccacttttaattttgaaaaaaaaaaaaaaaaaaaaaatatttagaaaatattaattataggaatatcaaaatgggcgttcccttatgagtattaacactgact

SEQ ID NO: 32505 - DNA, 502 bp, Oryza sativa
  unsure (1)..(502): unsure at all n locations
  Clone ID: PAT_MRT4530_36707C.1
cgagggccgcttttttttttttttttttcatccaatttggtccaggtgcagaacacgtttcctgttactattaattaattaaggacgtgtccagtactgtggactaccgaagtacaatttgtagtgtttagcgacgccatcttcctcgagttcacacaaaattgtcttgaagaatcacagcgatcacacgccgcaatgcggcagcacccgagacgaccccgacgtgagacgcgccggtgattttgaccgatctgtagtactcctgcttcggatcgtcgccgatcaccgtgtcaagggccagtatgctcgccgagttcacaaccccgtcgccatcgccgtactcgactcgcgggtccttgccgaagtcgccgtcccagtacaccagcgtctccgtcgnnggnacgccgncgccgntgacgcacgnngnnggnaccacgggcccctccgaagctgatcgccaccggaagaacccgggtgacggacagngccaccccgaacgcgg

SEQ ID NO: 32506 - DNA, 1839 bp, Oryza sativa
  Clone ID: PAT_MRT4530_36708C.1
atggtggttgtccatgcacccaacggcaagcaggaagagcacgctgagtgccacgaggagcgcagacctagcagcagcagtgggtgccgtagccatggtggtggagaggaggtacgacttgcacttctcggcattcacgtcatccaggcgccactctccccgctgttcgagcactccgagatcctccaagtagaccccagctgtgggccacaccaggcgggttgctggatcaaactgactggcacgccttcatcaaggtttaggacctacaccgctaaggagatctcccagtccttcgtattttttcgcatcaacgcggatctagggagggcgccgaggcgtcatcggagaggggggaggagggggtcatggaggttatcattaaggtgtgtatgcagcaagtttgttacttttcaaatacttccatctaaagagtttttatcaatcgtgagaattattttcaactgttgcaacacacatgatatatggcagcacatacattcccggatgccgatgcgagacgccgctcgtgctgcctgcgtgtcacacaggttcctgcgtttctggagaggctaccccactgtcactatcgatcaagaaaccctgggattaagctcgcaacgattctggatcacgagcgaagacgagagaggcgagtacatcctcaccaaagcgcagaaggttcttgagagccgtctttccggctccaccattgtgcagtcgctcaagcttgatctctccaccttccggaaggctatagttagtgccactgttgccggtggcctcctcgactgctggctccgcgccttcgtgaagcccgggattgtggatatcactgtgttactcccaaagtgcgaggacgacgacgactgttactactactacggtcatgattgtctgcctgagtacacatttccctgctcgcttctctcagacgatgaggacaagataacgtcgcttcagtctctttcactgtcctcctgtggcttccaccctacagaagggatgaccacactgcttggctgctggaagagcatgtcgacggtgtgcttgcacagagtcgccatcacggacgaggagctgggtttcttcctcgccggctgccttgtgctggagcggctggatctgtccttctgcaattcgataggcgccctcaagatacctagtgcactccggcggctaaggtccctacgggtgcgctcgtgcaggatgctgcggaccatcgagagcggcgcgccgatgctcgccacggtctggtacgacgggtggccgctgctgaggttctggctcggtggcgcgctcgagacgacgcatctggaggtgcatgccactcgaatgggggacgttatccagtatgccggctccaagctcccctccgccgcgctgaatctcgaaacgcttgtgctgtcgactgtttacgagattgcatatggtatcagatggtacaacgaccagaaccgtgggaatcctgacgatggagcttcatgtagggggcgggaggccagcaaactccgcaatggtggcatcgtcggcaacctgaggaaggtgaccatcaccggtttctgctcggcgaatagcctggtcgagctgacatgccatatcctcgtgatcgcagcgttatcgctcgaacacctgacgcttgacacctcccctggttacgacaggaagtgctcctcctatgatcggtgcaggaagatgagtacagaggctctccgggaggccgagacagccctcgccgctgcaaggaagtacgttgagccgaaagtccctgacagcgttaacctgatggttcttgggccctgcggccggtgtcacctgggcatggaatacggcagttag

SEQ ID NO: 32507 - DNA, 220 bp, Oryza sativa
  Clone ID: PAT_MRT4530_36709C.1
ataaatacgatccattgatttgcaaactgttttggagttttaaagcaaaacatatttgtaacaagaaataaaagaattgctcagagtgggaagaaccaaaaaaacatagatatttaggcacgacttattaagaataagaaaaactcaacgggtgtctgacactagagatctaccataaatagagcaggctaatagtaaatcgaatagactgacgcgaacg

SEQ ID NO: 32508 - DNA, 117 bp, Oryza sativa
  Clone ID: PAT_MRT4530_3670C.1
atggcgaaatctgagtgtaggtggcacgacatcgagggcaatatcaaggggagaaggaagagtgccatcgacgctagccgacagggaaccacgatcgccgtgatgggcaggcgaagg

SEQ ID NO: 32509 - DNA, 162 bp, Oryza sativa
  Clone ID: PAT_MRT4530_36710C.1
atggcgatgcctacgacgatcgtgcagcaacggagaggagactacaacgacgactcaagaggagtcaaggaagcaaataagggaggtgggatgcatccccgcctcgctcaccatttacaacctcgcatcccgacgttcgtccacgcaactgcatgcacttag

SEQ ID NO: 32510 - DNA, 393 bp, Oryza sativa
  Clone ID: PAT_MRT4530_36711C.1
atgggggtgggggcgcggtcggagagaggcggcagcggggtgaccgtctgctgctcggcgcaaggtcgcgtcgtcgggggccagctcccgcaatccgacggcagttgcggatggcgaggagggacgcatcgtcggggcccggtgtctcgatccagtggtaggcgaggagggagggaggcgtcggcggcgctggggccacgggcggaggggcggcgcaaggggtgggtgtgggcgcgattgcgctgggaatcgggagcgagcgggggcagcagcgaagggagcggggagcgtggttgggaagaggggcgcgatagagggagccaaaaggggagatggcgcgcgtttgaagcgttgattttgcgggaggatcctaaaagcaatcttaccccttga

SEQ ID NO: 32511 - DNA, 1806 bp, Oryza sativa
  Clone ID: PAT_MRT4530_36712C.1
atggcgccgtggtgccccgccgactcgaccaagccggtcttcgtcgggatctacggcgccgtcatcggcgggttcgccgtctccgcgctcttcttcctcctctcctccttctcctcgctcgccgcgcccccgctccccatccctcccgcgtccgccgccgccgccaacctctcgggcgcagtctccggtgtggcgcagccggagaccatgtacaatcggcccatctggaagcccccgccgcggagggagcggatgcccgcgccgcgcgcgttccgcctcacccgcgagatggtgggcgcccgcgcccgcggcggcgccattgtcgtcaccttcggcaaccacgccttcctcgacttcatcctcacctgggtgcgccacctcacggacctcggcgtcgacagcctcctcgtcggcgccatggacaccaagctgctccgggagctctacctcaggggcgtccccgtcttcgacatgggcagcaggatggccaccgaggacgccgtctggggctcgcccaccttccacaagatgggcagggagaaggtgctgctcatcaacgcgctcctgcccttcggctacgagctgctcatgtgcgacacggacatggtgtggctcaagaacccgctgccctacctcgcccgctaccctgacgcggatctcctcacgtccagcgaccaggtcattcccacggtcaccgatgacagcctggagaactggagggaagttactggtgcatacaatatcggtattttccattggcgacccactgaaccagctaagaggctggcaaaagattggaaagacttactcttatctgatgatacgttgtgggaccagaatgcttttaatgaccttatacacaaaaaatttggatacccggttgttggagaagatgaacttgtatattcttatgatgggaaactgaagcttggagtcctaccagcaagtatattctgtagtggtcatacatattttgtgcagggcatgtatcagcagcttcggctagaaccatatgctgtgcatactactttccagtatgcaggtactgtgggaaagcgtcatagattgcgtgaagcaatgcttttctttgatcagccatcatactatgactcaccaggaggtttcctatcatttagacccaacattcctaaaagcttgctgttagatggcgctcatactgttaaatctcattttgcattggtcaattaccagttgaagcaaataagaactgcactcgctattgcttccctattaaagaggaccctggtaatgcctccattatggtgcaggcttgataggatgtggtttggacatcctggagttttggaaggaacaatgaccagacaacctttcctctgtccaatggatcatgtttttgaggtacatgttatgctaaaggacttacctaaggaggagtttggcccacacattgattttagagaatactcgtttcttgagaatccatcattgcctaaacaggtcaaagaatcatttcttgaggttgagctctgcaatgagcatagcaccagatgctcaacaactaatagaaccaataaaggcgcgcctgttctcttaccaaggaatagcacagaacaaacgcttttggatatattcaaaccatataaggatatcaaaatcttacagttctcatctatggttaacgccttcggaggtttttctgatgcactccgtgaaatagggcacatatattatgacatgtactgggatgagaaaccaggctggaagccccttcctccacagaccaaggtggaggaccatccaccttggttggaggtacaggaatga

SEQ ID NO: 32512 - DNA, 445 bp, Oryza sativa
  Clone ID: PAT_MRT4530_36713C.1
gcaatgacggcggcggcggctccccgcgcacgtgggcggcgatgaggcaggcgggaacggctgcggcggctccctgcgcgcgcgaggcaggcggcgacggctccccgcacgcgcgaggcaggcgacgacggtggcgaacgacgagaaaggctactgcaacaccaccgctgccatggtcctctgctatttgggcaaagagagagatggtaggagtggtggggcccatggtttggccagccaaaatgactctccaagtttgaccagtgagtgttgtgatttggtcagccagatggcttaggcaaccgaaatagaaaggctgtcagagggtattttctcttcatatttaccaaaatttagtttggagagttatttggctattctcttgaatatactataagatgtgtgaaatgttggcttgtgttggactactaaaaaaaaaaaaaaa

SEQ ID NO: 32513 - DNA, 200 bp, Oryza sativa
  Clone ID: PAT_MRT4530_36714C.1
ttttacccggacccaacctaccatgaagaaatgaatacaccaaaatatacgcgaaaagaagcaattggtgtacaaccatggcagctgaagctgctacacctattagggacttggggggcaaactttcctaaactagaaacacgaaataatcattttacctgcaacatgcatgaacgtaccatattccttattgtctcaag

SEQ ID NO: 32514 - DNA, 154 bp, Oryza sativa
  Clone ID: PAT_MRT4530_36715C.1
attgcactaaagaacattactaacattataggggggaaggacatggggctacgccaacttcacaaaaatattaacacattggcttatggtacaagctggaacacaacgcaagacttggtgaaagtttactggaaagaggtgaagactaagacac

SEQ ID NO: 32515 - DNA, 458 bp, Oryza sativa
  Clone ID: PAT_MRT4530_36716C.1
atgcggcggacggcggcgtcgctgctgcgccacagcggaatcggcggcggcggcggaggcagcgggggaggcatcccgcaggcgctcgccgacgcgctcgtctgcccactctccaagaagcctctcaggtactgcgaagacagcgggtctctggtcagcgacgccgtcggcgtgtccttcccggtggtgcctagtgacacatcgtgggggctatgccctgcagttatcgagatagtcgatgggattccttatcttgtcccaaaagatggtaagttgctggaccacgaccaggacaaatcagaagattgcggtgcaaaggattcttcccacaggcattgaacaatggctcaaatatctgcatttctgttgtggtaatagttggtaagaataaatcttttgagataaaccaccacctgcgtgctcttctaattgcttgttgcttcaaaaaaaaaaaaaaa

SEQ ID NO: 32516 - DNA, 156 bp, Oryza sativa
  Clone ID: PAT_MRT4530_36717C.1
gtgcttcaggattggggaaatatcaggccccaaagcgtgtaactatgtattatgccactactagaagcctcttattgctctcagcctataataacgaaagaaacttaggccgggaacttataaaaaaaaaaaaaaaagggggcagccgttagcaaa

SEQ ID NO: 32517 - DNA, 533 bp, Oryza sativa
  Clone ID: PAT_MRT4530_36718C.1
taaaatcacaagcaagtacttgaaagatccaatcattattgacctagttggtgatgaggaccagaaattacctgaaggaatctctctttattcaattgcctctgagcactatgggaagccatcaattcttggtccattgatcaaagagcatgctaatggtggaaaatgtattgtgtttactcaaactaaacgagaggcagatagattagcatatgctatgggcaggagctatgcatgtcaggcgcttcatggggatatttcacagaatcagagagaaaggacactatcaggatttcgagatggccgctttaatatcctagtagcaaccgatgttgctgctcgtggattagacatacccaatgttgatcttgttatacattacgaactcccaaacacctcggagttatttgttcacagatctggacgaactgcacgagcagggaagaaaggaagtgcaattttaatatacacaaatgatcaagctagagctgtaaggatcattgagcaagatataggatgcaaattcacagagc

SEQ ID NO: 32518 - DNA, 2688 bp, Oryza sativa
  Clone ID: PAT_MRT4530_36719C.1
atgccggggccctgctgcgccggagccaccgaggcggcgggcgttccatggctcgccgagccccctggggttcaggtccacaccggcgtcgtggtccagcccggaggcgggggcggccgtcggtggggacgacgggctggaggtcgcgaggctggggatctcgccgtggatcgtggagaggctcgccgcacggggcatcaccaggctcttccccatccaggagtagattcacggatgaaatgcttggctccagatgagatgctggcatttttaggtttggaatcgctagaactaggacaggcttgctgtggatctatcatggtagactccataacgccgccttcctcagtagaaactgagagggctgtccttgatccagcaatgcaaggcaaagatatgattggacgtgcaagaactggaactgggaaaacgttggcttttggtattcctatcatggacaggattcttcgtcacaatgagaagaatgggagtggtagaaatcctttagccataattctcgcacctactagagaacttgctagacaagttgagaaggaatttaaggaatctgctcctttggactctctttgtgtctatggaggtgttcccatcagtcatcaaatgagagctcttaattatggtgttgatgttgtggttggaacaccaggtcgaattattgatcttttaagaagaggtgttttaaacctttctgagatccaattcgtggttctggatgaagctgaccagatgttggctgtgggttttgatgaagatgttgaggtgatcatggagaatttgccacagaaccgtcaaagtatgttgttctctgcaacaatgcccagttggattagaaaaatcacaagcaagtacttgaaagatccaatcattattgacctagttggtgatgaggaccagaaattacctgaaggaatctctctttattcaattgcctctgagcactatgggaagccatcaattcttggtccattgatcaaatttgcaccgttaacgactcttttctctacacttccacaggagcatgctaatggtggaaaatgtattgtgtttactcaaactaaacgagaggcagatagattagcatatgctatgggcaggagctatgcatgtcaggcgcttcatggggatatttcacagaatcagagagaaaggacactatcaggatttcgagatggccgctttaatatcctagtagcaaccgatgttgctgctcgtggattagacatacccaatgttgatcttgttatacattacgaactcccaaacacctcggagttatttgttcacagatctggacgaactgcacgagcagggaagaaaggaagtgcaattttaatatacacaaatgatcaagctagagctgtaaggatcattgagcaagatataggatgcaaattcacagagcttccaaagattgaagttgcagatgaggcctcagacatgtttaatgttgtgagagacaatcgctctagattagctggaagcccaagaaccggtggctcctctttcggacgaggaggctatggtggttttggagaaggccgttcccggggctttggtgattttgatggctttggcagttcccctaatcgtggtgggagatcacgcgatgctggttcaagatatggcagtgggtttggagattttagacgaccctccaatgcctttggcaggtctagttccaagcagcctgatggattcggatttggtgactttggagaaggcaatttcagtagaaatggcaacagacgctctaggagttttgatgattcaggttcgacacgcattttcaaagaacttgcatcgggtgcaaaaattcaccaacaagattcatcacaggaagaaatcaccattcaccaaacaaatctctcgcagatacaagacaggaaaatgggaaagaaaataggggatttgcagcagatttccaccatgcacaagatttactccattatgtctcttaatcctgtattttcaatagcgctaggcctccgtccctgcgccggcaagagaaaagtaaactgggcccaaatgccaagtcagcgaagctccgaccccctgggcctccgtcctctccaaaaagcgcagccggaaaagcgcacgacggcgacggccggagtggatggggattcgagcgtggcggcgccggtgcaggtgaaaccgaggatgataatcaaggggatgctggggaggtacgagaggtggaaccccgtgcacccgacggtgggcacgttctgggggatcgggctggggctcgggtgcggggttgggtgggggcctgggttcgggcccgaggtcatcggctacgtcggcgccggctgcggcgtcgggttcagcgtcggcgtcacgctcgccggcgtcggcgtcggcttgccgcagcacggcctcatcaggaaccagtaccacagcggtttcgcaagcaatatccctttcgaatcagctaggttttacacctttaccatcatcagaggcttggtctgggatgccatcagttatgcgagccaggtagcggctgtgaggaaagaatctcgacaaaggctcctaaactttcatgaaaaccctcagatttcaggaggcgttaacctgcccaagttggggaagggcgtgtcaagcagcatccaatccactatggagtgtataaaagccttcaaagatcagcattggcctccataa

SEQ ID NO: 32519 - DNA, 147 bp, Oryza sativa
  Clone ID: PAT_MRT4530_3671C.1
ctattcttctttcagtctagacttggcctggaacgattccctgcgacaaggtactccgtcaaggaccttaatctgactatcacgcataagtggcgtccttggtacacacgctagcatcagtgaggggagctggacatctggttccat

SEQ ID NO: 32520 - DNA, 5954 bp, Oryza sativa
  Clone ID: PAT_MRT4530_36720C.1
atgagctcgggaggcggagccagcagcgcgctcggcggcggcggcggcggcggcggaagcggaggaggaggaggagggccgagcggcggcggcggtggaggaggcgggccgtgcggggcgtgcaagttcctgcggcgcaagtgcgtgagcgggtgcatcttcgcgccctacttcgactcggagcagggcgcggcgcacttcgcggcggtgcacaaggtgttcggcgccagcaacgtgtccaagctgctcctccagatcccggcgcacaagcgccccgacgccgtcgtcaccatctgctacgaggcccaggcccgcctccgcgaccccgtctacggctgcgtcgcccacatcttcgccctccagcagcaggtggtgaatctccaggccgagctgacctacttgcaagcccacctcgccacgctggagctgccgtccccgccgccgctgatgccggcgccgccgcagatgccgatgccggcgccgttctccatctcggacctcccgtcgtcgacgagcgtcccgaccaccgtcgacctctcagctctcttcgacccgccgccgcagccgcaatgggcatcgccgctccagcagcagcagcaccaccaccaccagcaccatcatcaccaacagcagcagcaccagctccggcagccctcatatgccacgctggccagggcgccgtccggcatgacggcggcggcggagagctcgggaggaggaggaggaggcggcggtggagaccttcaggcgctcgcaagggagctcctggatcgccacagagttcgcgacgacgaggaggagagcaagcaacgggattggaacgggccggtgatggcgagcaggctgcaggagaggaaggtgatccagatccacccggcgcggcggcggatccgtcgaggaataatggcttccccggcggcggcgccgccgcctaccccgccggagtccgacccgcggctcgtggaggccttcgtgcccttcctcgagaagctcatcaaaaacgcctcgtggcgcaacaaggcgcactccaagctctcccacactgccaagtccatcctcgaccgcctccagaacccgccgccgccggcggctgcggcgcaggcaccgtccacgcccacctcccccacgacgcccacctcgtcgtcctcgcagccgggcccgctccgcagcctctcgctcgcggactcggagctgctgctcggcccgatcaactccgcgctcggctccggcagcgccaagctcgccgaggccgggctcgagctgctccacaggctgatcgcgcactcctacatccatggcgaggccgacccgtccgccgacccctcggcccagctcgtcgcgtccctcctcgatgccgcctgcaacgcgcttcacctcgacgacgagcacatcgagctcctcctactcaagacgctcctctcggcggtcacctccacgtcggtgcgcctccatggagattgcctgcttcgcgccgtgcgcgcttgctatgatatgtacctgggaagccgcagcgtggtgaaccaggccactgccaaggcgtcactcgtgcaaatgttggtgatcgttttccgccgcatggaggcagactcctccacagtgcccgtgcaacccatcgttgtggctgatgtgatcgagctgcctgaagctgcttctggtgcttcgcctgccgctgatgccaactttgtacagggattcatctcgaagatcattggagacattgatggtgcaatcacacctctggcacggacaacttcttcagcagctgcaggcgcaggtggagcagcggctcatgatggtgcatttgagacaagagcagcagaggaaggggcacatccagcagatttgcttgattcaacagacaaggacatgctagacgccaagtactgggagatcaacatgtacaaatctgctcttgagggtcgtaaggatgagattggtgtggagggggcagtggtgggcgctttggatgatgatgctgatgtgaggattgggaataaactgcgaagagacgctttcttggttttccgggcattgtgcaagctctccatgaagacaccacccaaggatgctccagctgatcccattgtgatgcgtgggaagatccttgctcttgaacttctcaagatattgcttgaaaatgctggggctgttttccggaccagcgagaggatggttaatggtctactaaaaacagcacaagggcctccagcaggcgtgtctaccacattggttccgcctcaggacaccacaatgaaaagtgaagccatgaaatgcttggttgctattctgagatccatgggagattggatgaataagcagctacgcattccagatcctgactctcctaaagtagagtcggagcaaaatgataatgatggaggacacgagatttcccacacagaggataatggagacgaatgtagtgaagcatctgattctcattcagaaatgtcaaatggggtttcagaggctgcatctttggagcagcgccgagcttacaagatggaacttcaggagggtatctctctatttaatcgaaagcccaggaagggaattgagttcctaataaatgccaacaaggtgggggaatcacctgaggaaattgctgctttcttaaaaagttcttctggtttgaacaagactatgattggagattatttaggggagagggaagatttatccctcaaagtcatgcattcatatgtggattcatttgattttcaaggcatggagtttgatgaagccattagagcctttcttcaaggtttcagattgcctggagaagctcaaaagattgatcggattatggaaaaatttgctgagcgttactgcaaatgcaacccaaaggccttttccagtgcagatacagcttatgtccttgcttattcagtcataatgctcaacaccgatgcacataatccaatgatgtcaccagaagatttcattagaaacaatcgaggtattgacgatgggaaagacctgcctgaagaatttatgaggtcagtattctatccagcaacagatgtagtagttttgaaattcatggtcgaggtttgctgggctcctatgcttgctgccttcagtgttccacttgaccagagtgatgatgagattgtcatatcccagtgccttgaaggatttcgcagtgcaatccatgttactgcagctatgtcgatgaagactcaaagggatgcatttgtcacttcacttgctaagtttacatcacttcactcggctgcggatattaagcagaaaaatattgaagccattaagccggacctcgataaatcaaaacaggctaagtcatccattcttcctgttttgaaaaagaagtctccaaatactgttccagcttctaaacgaggttcctatgatagtgctggtgtgggtggcaaagcttctggggttgatcaaatgaacaatgtggtgacaagcctcttagaacaagttgacatggctgaaatgaatcgtgtatttgtaagaagtcaaaaactcaacagtgagggcataattgattttgtaaaggctctctgtaaagtttccatggaggaattgcgatctgcttctgatccacgggtttttagtctgacaaagattgttgagattgcgcactacaatatgaatcgcatcaggcttgtctggtcaagcatatggcatgtcttgtctgatttttttgttacaattggctgctcagagaatctctcaattgcaatatttgctatggattcattgaggcagctggcaatgaagttcctggaacgagaagagctggctaactacaatttccagaatgaatttatgaagccttttgttgttgtaatgaggaagagccgagctgttgagataagagaactaatcatcagatgtgtctctcaaatggtcttggcacgtgttagtcatgtgaaatcagggtggaagagtatgtttatggtctttgcaacagcttcatatgatgaccataaaaatattgtactcctggcgtttgaaattatcgagaagattttgcgggagtactttccctacattactgagaccgagtcgacaactttcactgattgtgtgaactgtcttattgcatttactaacagtaggtttaacaaggatataagcctcaatgcaattggttttcttcgattctgtgcggcaaagctagcggaaggtgacattggatcctcttcaaggttgaaggagaatcctccttctcctcgcttgaccaaggatggaaagcaggaaagtgcagttcttgttgataaggatgatactatacacttttggtttcctttattagcaggattatctgaacttaccttcgacctacgacctgaaatcaggaaaagtgccttgcaggtgttatttgacacattaagaaaccatggtcatctcttctccttgcctttgtgggagaaggtgtttgattcagtgcttttcccaatatttgattacgtacggcatgccattgatccatcaagtggttctccacaaggacagaatgtggaaagtgatccttcagaacttgatcaagatgcatggatgtacgagacatgcactttggccctgcagctagttgtggacctctttgttaagttctatgacacagtaaaccctcttcttagaaaaattctgttgctcttgacaagtttcataaagcgtccccaccagagccttgccggtataggtattgccgcatttgttcgtttgatgagcagtgccggatctgtcttcgttgatgaaaaatggttagaggtggttttatcgttgaaagaagctgccactgagacccttcctgatttttcttatattgcatccggagcttaccttgagaatgtaccaatagaaaatgggggctcttcagaaaagacagaagacgagtctcgaccattggaggatggcactggagaagcttctagatcaaggaacttgtattttgcaattggtgatgccaagtgccgggctgctgtccaactcctattgattcaggctgtgatggagatatataacatgtacagagctcggttatcatcacagaacactgtgatcctctttgaggcattgcacactgttgctactcatgctcataaaataaacagtgataatgacctgcgatccaagttgcaggagttgggctcgatgacccaaatgcaggacccacctttgttacgcctggagaacgagtcgtatcagttgtgcttgactatcctgcagaacatttgcttggacagatctcccaatgagaggagtgtagaggtggaaagccaccttgttggcttatgtaaggaggtccttgaggtgtacctgagcactgcaaacccatctcagctttctggtgctccgcagccacttggtcattggcttattccggtcggttcttcaaagcggagagagcttgcagcccgggcacctcttgttgtctcaaccttgcaagctatcagtggccttggtgactcatctttcgagaagaaccttggccagttcttcccccttcttgctggtctgataagttgcgaacatggttcaagcgaagtgcaggtggcattgagtgatatgtttagcacttgggttggcccggttgttcttcaaacctgctgatgctgagccccatatctgttatatagtatatctccacatgtaagttattatttgctttattgccatttcttgatgttttgccattccccattttgttctgtttatcattctagttactgggggaggttgtctcttgcagagctgagcactgtagttctttttacattaatttcttttagctttggggagtgtatgttacaagatgactgaattctgtacggtagcttagttcaaaattgtgcccgttctgttggccaagttcaaagtagatatgttttgcattatgtaatttatattgttgaaataatggcagcttctgtgctgtttaaaaataaaaaaaaaaaaaaaaaaaaaaaaaaaaaaaaaaa

SEQ ID NO: 32521 - DNA, 5678 bp, Oryza sativa
  Clone ID: PAT_MRT4530_36721C.1
gatccgtcgaggaataatggcttccccggcggcggcgccgccgcctaccccgccggagtccgacccgcggctcgtggaggccttcgtgcccttcctcgagaagctcatcaaaaacgcctcgtggcgcaacaaggcgcactccaagctctcccacactgccaagtccatcctcgaccgcctccagaacccgccgccgccgccggctgcggcgcaggcaccgtccacgcccacctcccccacgacgcccacctcgtcgtcctcgcagccgggcccgctccgcagcctctcgctcgcggactcggagctgctgctcggcccgatcaactccgcgctcggctccggcagcgccaagctcgccgaggccgggctcgagctgctccacaggctgatcgcgcactcctacatccatggcgaggccgacccgtccgccgacccctcggcccagctcgtcgcgtccctcctcgatgccgcctgcaacgcgcttcacctcgacgacgagcacatcgagctcctcctactcaagacgctcctctcggcggtcacctccacgtcggtgcgcctccatggagattgcctgcttcgcgccgtgcgcgcttgctatgatatgtacctgggaagccgcagcgtggtgaaccaggccactgccaaggcgtcactcgtgcaaatgttggtgatcgttttccgccgcatggaggcagacttctccacagtgcccgtgcaacccatcgttgtggctgatgtgatcgagctgcctgaagctgcttctggtgcttcgcctgccgctgatgccaactttgtacagggattcatctcgaagatcattggagacattgatggtgcaatcacacctctggcacggacaacttcttcagcagctgcaggcgcaggtggagcagcggctcatgatggtgcatttgagacaagagcagcagaggaaggggcacatccagcagatttgcttgattcaacagacaaggacatgctagacgccaagtactgggagatcaacatgtacaaatctgctcttgagggtcgtaaggatgagattggtgtggagggggcagtggtgggcgctttggatgatgatgctgatgtgaggattgggaataaactgcgaagagacgctttcttggttttccgggcattgtgcaagctctccatgaagacaccacccaaggatgctccagctgatcccattgtgatgcgtgggaagatccttgctcttgaacttctcaagatattgcttgaaaatgctggggctgttttccggaccagcgagagatttctaggggctatcaagcagtatctatgcctctcgcttttgaagaactgtgcctcggcacatatgatagtctttcagctatcttgttcaatttttattagcttggtttcaagattcagaccgggattgaaggcagaaattggagtattctttcccatgattattctgagagttttggaaaatattgctcaaccaaattatcaagcaaagttgattgttcttcgtttcctggaaaaactctgtgctgattctcaaatcttggtagacatttttctcaattatgattgtgatgtacactcatcaaacatatttgagaggatggttaatggtctactaaaaacagcacaagggcctccagcaggcgtgtctaccacattggttccgcctcaggacaccacaatgaaaagtgaagccatgaaatgcttggttgctattctgagatccatgggagattggatgaataagcagctacgcattccagatcctgactctcctaaagtagagtcggagcaaaatgataatgatggaggacacgagatttcccacacagaggataatggagacgaatgtagtgaagcatctgattctcattcagaaatgtcaaatggggtttcagaggctgcatctttggagcagcgccgagcttacaagatggaacttcaggagggtatctctctatttaatcgaaagcccaggaagggaattgagttcctaataaatgccaacaaggtgggggaatcacctgaggaaattgctgctttcttaaaaagttcttctggtttgaacaagactatgattggagattatttaggggagagggaagatttatccctcaaagtcatgcattcatatgtggattcatttgattttcaaggcatggagtttgatgaagccattagagcctttcttcaaggtttcagattgcctggagaagctcaaaagattgatcggattatggaaaaatttgctgagcgttactgcaaatgcaacccaaaggccttttccagtgcagatacagcttatgtccttgcttattcagtcataatgctcaacaccgatgcacataatccaatggtaaaaaataagatgtcaccagaagatttcattagaaacaatcgaggtattgacgatgggaaagacctgcctgaagaatttatgaggtccttatatgaaaggatttggaaaaaagagattaagatgaaagaagaagaatttgttccccagcagcaaaaatcaacaagctcgaacaaaattcttggattggataacattcttaatattgtcgtacgcaaacgagattcacgtatggaaacaagcgatgatctcattaagcatatgcaggagcaattcaaagaaaaggctcgtatgtccgagtcagtattctatccagcaacagatgtagtagttttgaaattcatggtcgaggtttgctgggctcctatgcttgctgccttcagtgttccacttgaccagagtgatgatgagattgtcatatcccagtgccttgaaggatttcgcagtgcaatccatgttactgcagctatgtcgatgaagactcaaagggatgcatttgtcacttcacttgctaagtttacatcacttcactcggctgcggatattaagcagaaaaatattgaagccattaaggcaattctattaattgcagatgaagatggaaattacttgcaagaagcatgggagcatatattgacctgtgtttctcgttttgaaaatctacatctcgtaggagaaggtgctcctccagatgctactttctttgcactgcaacagccggacctcgataaatcaaaacaggctaagtcatccattcttcctgttttgaaaaagaagtctccaaatactgttccagcttctaaacgaggttcctatgatagtgctggtgtgggtggcaaagcttctggggttgatcaaatgaacaatgtggtgacaagcctcttagaacaagttggcatggctgaaatgaatcgtgtatttgtaagaagtcaaaaactcaacagtgagggcataattgattttgtaaaggctctctgtaaagtttccatggaggaattgcgatctgcttctgatccacgggtttttagtctgacaaagattgttgagattgcgcactacaatatgaatcgcatcaggcttgtctggtcaagcatatggcatgtcttatctgatttttttgttacaattggctgctcagagaatctctcaattgcaatatttgctatggattcattgaggcagctggcaatgaagttcctggaacgagaagagctggctaactacaatttccagaatgaatttatgaagccttttgttgttgtaatgaggaagagccgagctgttgagataagagaactaatcatcagatgtgtctctcaaatggtcttggcacgtgttagtcatgtgaaatcagggtggaagagtatgtttatggtctttgcaacagcatcatatgatgaccataaaaatattgtactcctggcgtttgaaattatcgagaagattttgcgggagtactttccctacattactgagaccgagtcgacaactttcactgattgtgtgaactgtcttattgcatttactaacagtaggtttaacaaggatataagcctcaatgcaattggttttcttcgattctgtgcggcaaagctagcggaaggtgacattggatcctcttcaaggttgaaggagaatcctccttctcctcgcttgaccaaggatggaaagcaggaaagtgcagttcttgttgataaggatgatactatacacttttggtttcctttattagcaggattatctgaacttaccttcgacctacgacctgaaatcaggaaaagtgccttgcaggtgttatttgacacattaagaaaccatggtcatctcttctccttgcctttgtgggagaaggtgtttgattcagtgcttttcccaatatttgattacgtacggcatgccattgatccatcaagtggttctccacaaggacagaatgtggaaagtgatccttcagaacttgatcaagatgcatggatgtacgagacatgcactttggccctgcagctagttgtggacctctttgttaagttctatgacacagtaaaccctcttcttagaaaaattcttttgctcttgacaagtttcataaagcgtccccaccagagccttgccggtataggtattgccgcatttgttcgtttgatgagcagtgccggatctgtcttcgttgatgaaaaatggttagaggtggttttatcgttgaaagaagctgccactgagacccttcctgatttttcttatattgcatccggagcttaccttgagaatgtaccaatagaaaatgggggctcttcagaaaagacagaagacgagtctcgaccattggaggatggcactggagaagcttctagatcaaggaacttgtattttgcaattggtgatgccaagtgccgggctgctgtccaactcctattgattcaggctgtgatggagatatataacatgtacagagctcggctatcatcacagaacactgtgatcctctttgaggcattgcacactgttgctactcatgctcataaaataaacagtgataatgacctgcgatccaagttgcaggagttgggctcgatgacccaaatgcaggacccacctttgttacgcctggagaacgagtcgtatcagttgtgcttgactatcctgcagaacatttgcttggacagatctcccaatgagaggagtgtagaggtggaaagccaccttgttggcttatgtaaggaggtccttgaggtgtacctgagcactgcaaacccatctcagctttctggtgctccgcagccacttggtcattggcttattccggtcggttcttcaaagcggagagagcttgcagcccgggcacctcttgttgtctcaaccttgcaagctatcagtggccttggtgactcatctttcgagaagaaccttggccagttcttcccccttcttgctggtctgataagttgcgaacatggttcaagcgaagtgcaggtggcattgagtgatatgtttagcacttgggttggcccggttgttcttcaaacctgctgatgctgagccccatatctgttatatagtatatctccacatgtaagttattctttgctttattgccatttcttgatgttttgccattccccattttgttctgtttatcattctagttactgggggaggttgtctcttgcagagctgagcactgtagttctttttacattaatttcttttagctttggggagtgtatgttacaagatgactgaattctgtacggtagcttagttcaaaattgtgcccgttctgttggccaagttcaaagtaaaaaaaaaaaaaaaaaaaaaaaaa

SEQ ID NO: 32522 - DNA, 2258 bp, Oryza sativa
  Clone ID: PAT_MRT4530_36722C.1
tttttttttttttttacaaaatgcaaaccgtagccgcagtttttttaccacacaatgaatagaatatccgtagtacgaaatactggttacatgtcgagaatcctcagcgtccagcgctgcatgatactgaagtagtacatctctagtcacctagatggctagccatttactgctacaacaatactacaaacaaaccatttgttcttccatctgcacaaactactcataagttttacactgagaagaaaaaaggaggcatctaccagtcctagtaatcacatccaaatcgtgaaacgtagtcagtatgacgcctacaataatacaacatgggtacaaagagtgggtgcacgataaaatccaccgatcaatgctaactctagttaacctaggtatcattatcataccacccatttgggccgttaatattagtggtatacaaacaattgtgggtgcagtagatgctcttctactttgctcttcctctcgtgcctcggaccacccttttccgtcctcgccgaacgtaggctggttttgggtctacctgcgcaggttcttctgaattcaatcgtgtgccattctccacagaatcaccatctgcggcatcagctttaggatcattaacctcgttattggtgggaggcacaccggtgctcgagttggtgcaactgggattatcattgcccgaagattctacccccgagttggcatttgattgatcccgaaggccattggcagaagtttttttggtcgacccatttaagctcgcatggatgtggggacctgtatcctttgttctcaactctgacgctgagtttatatctgactccatgtgaatttccggttctgcaacaggagctttaacatccccatcacggtcagcatcctttgtaacacttgtggaagatatttggttcccctgtgatatctcctctatatgaactttggatgcagcattgcattctttgacaacattccctatgtcatttgcagggtccacaggatcaacaaacacatgatttttatcagtgataggtgaggagtgcccattagccggttctgctcctgcaaccttatcagaacctttattattttgctcaggtttgtcaactttcttatcagtacccgatgagaatatagatgtatcattctcaaacaatctggaagtagaaccatactgcctgactttagaagcatctggagaacttccagatgatcccaggcgagacctacgagattcctccaaattttcccaaaaattggaaagatattcttccttggtggtgacctttgatgaggggagagaatatttggacttcccttcataatcatacatatgtaacccagcagagggtggtgttttaaacttctggctacctaagaatggagattgccaaggaggcaatgactgcatgtatgattttgctaaatcaactggagaacccatgtcagattcaaacccagagttaagcatatcagtgtttaatgtgcaaggtccatggtcttcaggctttgaacctaatccctgccttttctcttctaaccatttctttgcttccataactgctgcgcttaatagctcgggcgatgcatggagaggagaaccaggagaaaagctaccagatccaatactagagaatggaactggttcagtgccatttctgtggcgactcaaggaacgccaagctcccgtgaaatcatttccaacaacagtattcctggttggaatttctttcggcgttccatactcaggtgcttcaggaagtgcagcatctgtaactcgtgactgtatgagctttaccattttatcacattcatcccttgagaatgtctccttcataaccatttcctcaatggcaagctttgactcattgtatgaaactattgctccatgattgtcttctgtttcatcttcctcgtcgtcgtcctcctcctcctcccctgaggcggcctcctcgggagaggagaacaacaccgaggagatcaccctcctcgctccggacacgatgctggagagccacccggggctactctccgcccccgcccccgccgcggccaccgacgccgacgcctcggccagcgacagcgcgccctcctccggcgacaggcggcggcgggtgacccgcccggacgcggatccgtcctccccctcgccgtcgtcctccggcgatcgccggcggcgagccctgaagagggacgccatgggagggggtagaggatttcgaaccagaaaatctgaggcgatttttcccacgcgtacg

SEQ ID NO: 32523 - DNA, 169 bp, Oryza sativa
  Clone ID: PAT_MRT4530_36723C.1
agaaaatcaagcaagggaatgtaacactcaggggggatcatacaaagaggaggagaacatccggctaatcattgaccacaggcacatatggtaactgccaaaatgaggaatttggtgaactgcgaattatggatgaggcaacatatggaatgcttgaaatggggaaaat

SEQ ID NO: 32524 - DNA, 898 bp, Oryza sativa
  Clone ID: PAT_MRT4530_36724C.1
ggccgacacgggcgagcagacggtgggctccaccgccgtcgtcgccgtcgtgggtccccgccgcatcgtcgtcgccaactgcggcgactcccgcgccgtcctctcccgcggcggcgtggccgtgccgctctcctccgaccacaagccagacagacctgacgagatggagagagtagaagcagcaggtggcagggttatcaattggaatggataccgtatcctcggtgtccttgctacttctaggtcaattggagactattacctcaagccatatgtaatagctgagcctgaggtcacagtcatggacaggacggacaaggacgagttcctcatattggcgagcgacgggctgtgggatgtggtatccaacgatgtggcctgcaagattgcgagaaattgcttaagcgggcgggcagcttccaagtacccagaatccgtctccgggagcaccgcagccgatgctgccgccctgctggtcgagctcgccatctcccgtggcagcaaggacaacatcagcgtcgtcgtggtcgagttgagacggctgaggagtagaacgacggcgagcaaagagaacggtaggtagcgtgtagaagttggagcggctgtcacagcatttgagcatggcgagagaggaagaagctagaggatttgcagctgagtttgctgggatgtttgtaaagagaaggctcaggatattattccgtccatagagctgctccgatgtcgtgaccgatgagcgtgtgctatttgtagctgagatgctgtattgcgttgagttgggttctttagttcttaagctgacatttcggccgaggcagcatgaagcatgtgctgatttcgtctgttctgatcattggttatctctgtctctcgtgtcaaaaaaaaaaaaaaaaaaaaa

SEQ ID NO: 32525 - DNA, 398 bp, Oryza sativa
  Clone ID: PAT_MRT4530_36725C.1
cccccgatggaggagaaggggatggggaagcagcggtgggagaagatgctcctccaggccgccttcgacggcaaccttcgcctcctcaggaagatggcgcgcgggctggtcacgacggggcgcggccgcggcgaggcggacgtcctggcggccgtggcggacggcggcagcgggagccgcgcgctgcacctggcggccaccgaggggaggatggacgtcctcacgtacctcgtcgaggacctccgcctcgacgtcaaccaaaccaacgacagaggttctgatctctgattcctttctgcgttttttgggagaactgcatctacaagatatctgcttgatcatggtgctgatccaatgattgttggtaaatcaggatcacctcttcatgcggctgccgg

SEQ ID NO: 32526 - DNA, 227 bp, Oryza sativa
  unsure (1)..(227): unsure at all n locations
  Clone ID: PAT_MRT4530_36726C.1
tctttctcggacgcgtggattccgatccatgcgcttnccgttgacaccgttaagcgcgagagtggcgccaaccttggcctgtatgatccacatcacctaggggaagctccacatgggcgggggcgggctcaccacggtatacacgcacagcacggagggggcgcaccgcatgagggacggggcgcacacggcaggctccgtggagacggtcatgggcacgatcaccg

SEQ ID NO: 32527 - DNA, 764 bp, Oryza sativa
  unsure (1)..(764): unsure at all n locations
  Clone ID: PAT_MRT4530_36727C.1
attcggctcgagggttccctcaacctcaactcttttttctgcatctttctctctctctcgtgtccaataaataataatatctttctcggtgtagtagcatcatttgtaagagaagggaaaagcgggaaaagagaaaaaaacagagggttttgtttctcttttgcagttgcactcttgcgttgcaggcaggggcatctgtttcccgttctgctccgagcgatcaagtgagtgagtgagtgagtgtcatatatatatacatagtgcgttcgagaaatgcagcagcacctgatgcagatgcagcccatgatggctgcctactaccccaacaacgtcaccactgatcacattcaacagtacctggatgagaacaagtccttgattctgaagattgttgaaagccagaattctggcaagctgagcgagtgtgccgagaaccaatcaaggctgcagagaaatctcatgtacctagctgcaatagctgattctcaaccacaaccatctccattggctggtcagtatccttctagtggacttgtgcagcagggagcacactacatgcaggctcaacaggctcagcagatgtcacaacaacagctaatggcttcgcgctcctcgctcctgtactcccaacagcctttctcagtgcttcaacagcagcaaggcatgcacagccaacttggcatgagctccagtggaagtcaaagcctncacatgctgcaaagtgaagcccactatgttggaggcaatgcaaccataggaacccg

SEQ ID NO: 32528 - DNA, 282 bp, Oryza sativa
  Clone ID: PAT_MRT4530_36728C.1
acacaacagaaacaacggtttacaggaaaatttaataagagcaaccaagaaagcccggtttgtttaaaaacccccaatacgacaagaacatttggaaaatgggtccgaaaaaaaaattttacctaggggggaagtaaaaaaaagagggttaaaaaagccctaagaaaaaccgcgttaaaaacgacgttagattcgtgctgcagctcccgcaaatgggggggcgggcacccagttctgttttgcagggttcaaaaacaagggaggcaccatggggccgccccc

SEQ ID NO: 32529 - DNA, 168 bp, Oryza sativa
  Clone ID: PAT_MRT4530_36729C.1
atgacggttctgtccaccatccattgtgatcccaaggatagcttcccaccattgaatcgtcatggttttctgaggacgtccacattcccgcctctcaagaatcctaccgatggcgacaccactgtagacacccgcctcaaggttctaccaatggctgccccaccgtag

SEQ ID NO: 32530 - DNA, 2037 bp, Oryza sativa
  Clone ID: PAT_MRT4530_3672C.1
acagaaaggggtatggtatgcatggactgcgctgaatggagaaatttcttcaggtagcagaggattaactggggatctacatatatgtacaagctggctgaaatacagaggagcgaggcaggctcactcgacgactacaaaaggtatatacatgtctcggtatagtatcgttcaggtcgttaaattaaatgcaaggaatcgaccgcgtggagcaggcagaaacagaatcgtatggctctcttcttcggcttcggcaagggcaaggcaatcggcgattgcctggatgaacacagctgcttcgcgcgtgccgtgggcccgtggagcagagacgaagacaatgcttgctgttgaaaggtcttcaggcggcaccttcgcacacgtccccacggcacaacgggcagaccctgtgtacttctttgagccacttgtcaacacacagcaagtgaaactcgtgtttgcacgggaggcttcttatctgatctccatcctcatattcagttaagcagatgtgacactgttccatgtcatcactgcattgggctgtctgctttttgtagctcttacatggtaatgaattaaccacagattctggagcctgggcagagaccatggaaagcgaaagtgatgcaggttgccggtgaatttcatccaatacctcaaataatgcctcggttaacatgacaattcttgatatacttgcacgggcactagattcttcagcaatcaagaaggaatcacaggtgcatctgccaatttggtggatccccaaaggacaagcaacggtactttggtcagtaccgctatcaaaaacagcacgccgatgctccctaatccgagatcttgaatactggcttactctgattgaaccatggcgtctccgatgaaagaaccgtgcctcctcaatctcatccgcaaaaagttcatcaccaaggtctagccatctgctgtaaaatcccagatcatcggtatcagaatctaaatatcctcttgaactacgtctggaaaatgtgtcccacagaacccttctatggctcctcctcatttcattgctgcttgaatctctaacacgcgctggaccatcgtttgagaaaatgctcatcatgtcatcatgtaatgtatttccaccaatctcaccttgtgtcccactaaatatggggacatcttctctgctagggactgtatctggaagtgattctccaattgtagatggtgcagttgaagtagcaggcaacacagatgttaagctagattgagaagtatctgatctttcacttgacataatagttgtggatgaagtcccatgagcaatctctccagcctccaagtcagccatgatcctttcagatgccctctgtgaggaggagaaaccagattcagaaacggggccaccaacttctggaatgcaaactgtgtcagtctcagcattgtttgctgcaggttctaaaatatctcgtccaatatgactgattccttctctagacgttatctcagcataagcaacttcattactgaaatttcccctaggcatgacttcctttcctgatgaactctgacgaacacttgtttcagcgatttctgttcccagggcatcttccttgttttcgtgactgtttaagtgattgaacctgagatgatgacttattgtgcttgaagatggatgcactcttggatctgactcacttgatatgcggatatccttagcagcgacagaagcccgaaagtccatctcagcaaccgctcgagctgcttgccaagattccacctcgtgagctcgcgaggaggacgcggcggtcgcgccgccgccgccgccgcctccggtggccgccccagaggatccgccgccgaagcaccccgcgagcccgagcccgaggccgcgcgccgccgcccgccgccgcggcggcgcatcggcgcggctgctgcaggagaccatttggctcgcgcttttctggggttttttttctctctctcccagtttttatccattctactcttgtcggagaacgagagagagaaaaatgagtagcgcggaaagcgtgg

SEQ ID NO: 32531 - DNA, 1742 bp, Oryza sativa
  Clone ID: PAT_MRT4530_36730C.1
ccacgtggtgcgctactcgtcttgcgacagaagcaaaaggcggcgaagagagagagagagagagagagagcgagatcgccggagatggccgacggggaggacgccgccgccgcccgccgccgcgcctccgtgacggagtaccggaagaagctgctcaactgcagggagctcgagtcgcgcgtcagcaccgtgagggaaaacctaaaaaatgctaagaaggactttacaaagaccgaagatgacttaaaatccctgcaaagtgttgggcagatcatcggagaggttctccgccctcttgataatgaacgttttattgttaaggctagcagtggtcccagatatgtggttggttgccggagcaaagtggacaaggagaaattgacttcgggaactcgtgttgttcttgacatgacaacactgacaatcatgcgcacacttccacgtgaggtggaccctgtggtttacaacatgcttcatgaagaccctggtaatgtcagttactctgctgttggtggtctgtctgatcagattagagagctcagggagtccatcgaattgcccttaatgaaccctgagctctttcttcgtgttgggatcaagccccccaagggtgttctactctatggtccaccaggaactggtaagacactattggcgagggctattgccagtaacatcgatgccaactttttgaagattgtttcaagtgctataattgacaagtacattggagagagtgcccgcttgattagggaaatgtttggctatgcacgtgatcatcaaccatgcataatcttcatggacgaaatcgatgccattggtgggcggcggttcagtgaaggaactagtgctgatcgcgagatccagcgcacactgatggaactgctaaatcagttagatggatttgatgaacttggaaaggtgaaaatgatcatggctaccaatagacctgatgttctggaccctgcgctactgcgtcctggacgtctagacaggaagattgagattccgctaccaaatgagcaagcaagaatggaagttcttaaaatccatgctgctggtattgccaagcatggagaaattgattatgaggcagttgttaaactggctgagggcttcaatggggctgatcttcgcaacgtctgcactgaagcgggtatggctgcaattcgtgctgaacgggactacgttgtccatgaggacttcatgaaggctgtcaggaagctgaacgacgccaagaagctggaatccagcgcccactacagtgcagacttcggcaaagagtaaggtgcaagattctgatcctgtattcgatcttctaccatgccgggagttctccgccatggtgcaaaagcaacagagaaatcggtttttcaccgtcaggcttctattctgcactgcaagctgaagccatttgtcatgtgtgcaatcaaagagccatgaatggttgtcaagcttatctctgggactggagaaacataccgagaacttgcaaattttataactgatgcttttgcctctgtttcactccgttttttgagtctcaccttgtgtcagtactactgtgtagtcttagttttgagcagttgcatgtacttttgacaccatgcttggtaaagaatagcaaaatggtatcttgattcagcttccagacccccatctggtgtgggaatgcatctcaattcctgtgaaaaaaaaaaaaaaaaaaaaaaaaaaacctgcagcccgggggatccactagt

SEQ ID NO: 32532 - DNA, 123 bp, Oryza sativa
  Clone ID: PAT_MRT4530_36731C.1
tcgtaccaacctagacaaggaagaaaacctgactggtattctttgttacacgcgccatacagatgatgaacagggaaggggcgcccatttgtcgattttgcgagctgagcaggagtaggtaag

SEQ ID NO: 32533 - DNA, 183 bp, Oryza sativa
  Clone ID: PAT_MRT4530_36732C.1
acgaatgagggttcaccattggggttcggaggaatttgtggatattaaaacttgttataagtcgagatcgggattacaaggcgctataccgaatacgttctggtcgtggggagaccagattagaccagatacttgaaattatgcgagacgattgatacacaacaaaaaaaaaaaaaaaaaaaa

SEQ ID NO: 32534 - DNA, 223 bp, Oryza sativa
  Clone ID: PAT_MRT4530_36733C.1
aattcggcacgagtctttgaacgtctttggtacttctgtcgtcagcggccccacttctgamgccatctccgtcattgcatgccctggtggttattacaaggattcttccagtgtctgtagagcttgccctgatggttgcgatacctgtacctctggtgatcaaaagtgtggcaagaatgttggtgccattgttgggaggtgttctcggtggtgtcgctttgat

SEQ ID NO: 32535 - DNA, 451 bp, Oryza sativa
  Clone ID: PAT_MRT4530_36734C.1
tttgttttttttttttttttggttttttttttttttttttttttttttttttttttttttttttttttttttttttttttttttttttttgggggccccaaaaaaaaaaaggcctttaacaacccaccccacccgtttggaaaatggtacacactggcctttggggcagacttttaatttggggaaataaggggagggcttatccccctgggggggggccccgccaaaaaaaaaaaaggggaaaaagaaaaaaaaaggggggtgaaacaaaaaaaaatttgggggggggttggggggaattacagtttaaattgggcattttttaaaaatggggaagaccgtttaaaatgacccccattggccccggaacatacccctggacatagggggaaaaaacggaaaaaaaaaaaaacttttttacttgacccttttaggatcctgaaggaaacgg

SEQ ID NO: 32536 - DNA, 101 bp, Oryza sativa
  Clone ID: PAT_MRT4530_36735C.1
atgccctcgttgcaatccagcgtcgctgcgccaggagacgaggcgaccacctgtgaagagacgcacttcagaaacgggaacatgttcaggaaacggatcag

SEQ ID NO: 32537 - DNA, 246 bp, Oryza sativa
  Clone ID: PAT_MRT4530_36736C.1
atggcgaaaatgggagtggggaggagaaaggtggtggggcccacggggtttaaggcacagaggaggggcgcgccagctatgctggcgccgtggtccaccgggtgtcatggcgctgccgtacgccgaagggccaccgtcgtctgcctcccgtcgtggtgccgccatctgacgcagccccttcaccggcagccgggcgccagagctccgcaaccaggcaagcgcagccgcacatccctcactgcctag

SEQ ID NO: 32538 - DNA, 239 bp, Oryza sativa
  unsure (1)..(239): unsure at all n locations
  Clone ID: PAT_MRT4530_36737C.1
cattgctgcagttttgagtagcaaagaaaataccaatgattcatggaacactctaggcagaaaatcagttcaatgacttgaattgaaaagagtatcttttgtactgctgtaatcaacttaacancaaccatgcaaaagaaaatatactcaattctagtccccataaaacttaattttgcctcnccatctcacccaaaccataattncatccataagtatattcaaatagcactctcctt

SEQ ID NO: 32539 - DNA, 513 bp, Oryza sativa
  Clone ID: PAT_MRT4530_36738C.1
atgcgtcggcgggtggtgttccggtcggcggtgggcacggcaaggagggtgaactggtcggcggcgagcgacaaggggcgacgggagtggatgggtgcctgtagtcggctacgggcacagctggacgagcatggtttagcgcgtcttctgctggcagcgatcatcgctggcatgagaagttcgtttggttatagtggtaatcagcaaggggcgcggctgggtggccctggtcggtggcgggagcagtggggagggaccgccaccgtcactgatgccgccaccaccgccgtcgctgctttcccggcctgccctgccccccggcggttccttcgccaccaccaccgccagacctggaggaagaaggggaaggaaggggagaagcggctgtggcgaggaggtggcttcgccgacagcggctcgctaccgagctgcactcgtcgccgctggcgacccagctgtgcccgtcgccgccgctcgcaccaccacccacctcccactcctgcgcccccatga

SEQ ID NO: 32540 - DNA, 923 bp, Oryza sativa
  Clone ID: PAT_MRT4530_36739C.1
aggtggcacgggaggcgtcaatctccggccgcccctcccccccatcttcctcctccgcctcgccgccgcctgagcggccgccggcaaagccgcgcggccgcaaggacggcggcggcggggctcctcattttctcgtcaacctcatctcgtccgggcggccgggggagcaacccagggcagtggcgacggtgaccgccagatccgcgccgcctcggccggatctggcggggtggcggctggcggcagggatggagacggcggcgggaagaaattgtggggcacccgtcgcggcggcagcggcggcgacatccgtcggcaggagcttctggaggtggtgctgccggcggcggtggctgccgacggcgcccgcgatctgcaacgtccacggcggctctcggccggatctgggtgcggtcggtggtggtcggctggcgacgcctgttggcgacagcggcggcggtgtggtcgcggcagttggcggcggcggttgctggctgcttggtggtggagggcgacggcgcaacgacggtttgcggaggcggtggttcgcgtcggtggcagcggcgcggcggcccggctgcggtggtggtgccgtggcggtcatcagaggcatggcggcctcagacggcttgccgagggcgtgggagacggttgcatctggccggcgcggcatcgttgggtggaggggtcggagatcagcttggcgcagagaagcgcagccgatggcagcggaggccggctcggcgcgagaggcgcgggcggtggagatggaggccggcttggcgcaggcggcggagatggaggccggcttggcgcgagaggcgcagccgatggagggaggccggattggcgcgaggcgcatccggtggaggaggccggcttggtgcagagaggcgcgaccggcggtggaggaggcgacctag

SEQ ID NO: 32541 - DNA, 403 bp, Oryza sativa
  Clone ID: PAT_MRT4530_3673C.1
cctataggcgaatgggtccctcaagggcggccaggatctcgccgtcactagctcgtcgccgccgaaacccaaaatcttctcttcccgtacgtgagaagcgccaggccgtcgtcgccgccatgcccgtggaggtgtgcgtcaaggtacgacgtcgcccacccggacacgctcagaaactgaccattctcgcacaggacgctgctgactctggactctaacatggtgccctacaagatgaagctcttctacgtccagaactataccgactggtttctgaagatcatcccacaggaggaaggtgcctgtgtttaaccccgctgatcgcaaaaggattcctgattctgatgtgatcacttcacctcattgaggaaaagaacaagagcccgtctcttgccacccctcc

SEQ ID NO: 32542 - DNA, 517 bp, Oryza sativa
  Clone ID: PAT_MRT4530_36740C.1
cggacgcgtgggaaaaaaaaaaaaaataaaaaaaaaaaaaaaaaaaaaaaaaaaaaaaaaaaaaaataaataaaagggaaataaaaaaaaaaaaggaagagggagatgatgaagaagtttagatgttttgcggggtggtgtggttaaaaatccattttttttttatttgcatatcgattgatcatggtggaggtggttttttaaactattaatgctgttatctgatctgtttcctttgattagtgtttctttagtagcgagagaagtaataaactgttccgtggtttttaaaatgatcctttttttggggaggtgtttgtttcaacctcgattattcggtgttttttattagaaaaaattacccttgggggggtcggccaattgaaaaaaggaaaaagtttcgggggggcttttccaaaaaggttcctggttttttttggttttttttcggggcctttttttttttttttcccaatttaggtttaatggtttggttttttttgggccctttttttaa

SEQ ID NO: 32543 - DNA, 1308 bp, Oryza sativa
  Clone ID: PAT_MRT4530_36741C.1
atggcccacatatcagatattaaactgataagaacagatactacacttgatcttagcaaaaaggccgagaaaggtatgagtagctacgttgccttgcccatcgttttataccagcctccgccttatcctccactctcgccaggcgaggtggcacgatcggccgcccacgtggcccttggcggtcggaactgcacgaatcgcgacgcgagatcggacggcacgacggccaccggggaggtcgccgccgatgagccccaccatgagccttctctcgtcgtcctcatcctcgttcttccgccgcaactgccgctcatctgctcgccagttccgtcagctgaggtggcacgggaggcgtcaatctccggccgcccctcccccccatcttcctcctccgcctcgccgccgcctgagcggccgccggcaaagccgcgcggccgcaaggacggcggcggcggggctcctcattttctcgtcaacctcatctcgtccgggcggccgggggagcaacccagggcagtggcgacggtgaccgccagatccgcgccgcctcggccggatctggcggggtggcggctggcggcagggatggagacggcggcgggaagaaattgtggggcacccgtcgcggcggcagcggcggcgacatccgtcggcaggagcttctggaggtggtgctgccggcggcggtggctgccgacggcgcccgcgatctgcaacgtccacggcggctctcggccggatctgggtgcggtcggtggtggtcggctggcgacgcctgttggcgacagcggcggcggtgtggtcgcggcagttggcggcggcggttgctggctgcttggtggtggagggcgacggcgcaacgacggtttgcggaggcggtggttcgcgtcggtggcagcggcgacggcggccgtgactgtggaggcggtggcaacgttggtggcgcggaaggagtcagcggctgcggtggtggtgaccgtggcggtcatcagaggcatggcggcctcagacggcttgccgagggcgtgggagacggttgcatctggccggcgcggcatcgttgggtggaggggtcggagatcagcttggcgcagagaagcgcagccgatggcagcggaggccggctcggcgcgagaggcgcgggcggtggagatggaggccggcttggcgcaggcggcggagatggaggccggcttggcgcgagaggcgcagccgatggagggaggccggattggcgcgaggcgcatccggtggaggaggccggcttggtgcagagaggcgcgaccggcggtggaggaggcgacctag

SEQ ID NO: 32544 - DNA, 1356 bp, Oryza sativa
  Clone ID: PAT_MRT4530_36742C.1
gggggggggatctgaggcgggcactcaatcaactgtaattttttttgaacgactcgcacgagacggtgcgaaattataatgatagagcagaaaaaaattataagattacaaccttggatggtcgtaaccaggaaaaaggaaaaaaatataccaccacccacacatcgacagcgccaacacacaacccgggagaaggctagcaccgaatcggccgccgcttagcgtgaccgaccgccgctagaccaacaaaggaacatagacgaagatcgccccctaggggatgccaaaacgacgccttcaagaagagaagcgacggaaaaccgttgccgccgtccgtcggggctcaaggagccaagactaggcttacgcccggcatcctgcgaatccacggctgacgcaccgatgctccaccaccactcaagctctgccgacatgtgggacccctgcaccggcgtcccccgccggccagccttcgtgcgtcgaagaccgcgctacacccatcggcagctcttcctcacaccgaggtcgcctcgtccaccgccggccgcgcctctcgcgccaagccggcctcctccaccggacacacctctcgcgccaatccggcctccctccatcggctgcgcctctcgcgccaagccggcctccatctccgccgcctgcgccaagccggcctccatctccaccgcccgcgcctctcgcgccgagccggcctccgctgccatcggctgcgcttctctgcgccaagctgatctccgacccctccacccaacgatgccgcgccggccagatgcaaccgtctcccacgccctcggcaagccgtctgaggccgccatgcctctgatgaccgccacggcaccaccaccgcagccgctgctgtcgaacactcagccacctcgccgtcgccatcctcgcctcgcacctgactccttccgcgccaccaacgttgccaccgcctccacagtcacggccgccgcgccgctgccaccgacgcgaaccaccgcctccgcaaaccgtcgttgcgccgtcgccctccaccaccaagcagccagcaaccgccgccgccaactgccgcgaccacaccgccgccgctgtcgccaacaggcgtcgccagccgaccaccaccgaccgcacccagatccggccgagagccgccgtggacgttgcagatcgcgggcgccgtcggcagccaccgccgccggcagcaccacctccagaagctcctgccgacggatgtcgccgccgctgccgccgcgacgggtgcccctgccacaagcttgccctgctgtcatcgccacgttgtcgcgagctccgctgcccccgccacgagctagctcgatccggccgccgggtggctag

SEQ ID NO: 32545 - DNA, 746 bp, Oryza sativa
  Clone ID: PAT_MRT4530_36743C.1
ctggttatttaactgcattgagagcatgtcagtcctaatgtttctatggaggaattggcatgtgcgaaatgaaatcatgcatggtaaagcagccccaccaatagaaccctcaaagaggttcattgtaagttatgttgatgcactgttccagatccgacaaaatcctggtgcagacctgtcaaaaggaaaatgtattgcaagtgctacaaagggtactgtagtcacctcggctctcaggattattcagccaagttgggaaagacatgtactgggatggatgaaacttaacatcgatggttcctttgattgcagcattggggggggggggggggtggtatcggtgcaatcctccgggatagcacggggaaaacaatttttgcgtcatgcaaaccacttgagcgctgtaatggggcgctagaatctgaacttcgtgcatgtgtgatggggctgactgcggcgattcaaaggacgcttcttccgattcttgttgaaacgggctgtatctcggtggttcaacacctgtactgcagagagaaggacttttcactcctatctgcattgttcaggaggctaaggaccttcttctgagagatagggaggttgttatcaggaaagttagccgtagttagaatgccgttagtcatttcttagcaaacaaggctagggtggagttttgcactggtttttggttggaaggaaattgcaatcagatatcacagctagtctgtgagaacttctccaataag

SEQ ID NO: 32546 - DNA, 1070 bp, Oryza sativa
  Clone ID: PAT_MRT4530_36744C.1
atgccgcgccggccagatgcaaccgtctcccacgccctcggcaagccgtttgaggccgccatgcctctgatgaccgccacggtcaccaccaccgcagccgctgctgtcgaacactcagccacctcgccgtcgccatcctcgcctcgcacccgactctttccccgctgccaacgtcgccaccgcctccacagtcacggccgccatcgccgctgccaccgacgtgagccaccgcctccgcaaactgccgctgcaccgtcgccctccaccaccaagcagccagcaaccgccgccgctgtcaccaataggcgtcgccagccgaccacccagatccggccgagagccgccgtggacgctgccgatcgcgggcgccgtcggcagccaccgccgccgacagcaccacctctagaagctcctgccaatggatgttgccgccgctgtcgcgggcctagcaccgctgtcgccaccgcaacgggcgccccttccacgagcttgccctgctgttgccgccacgtcgtcgcgagctccgccgcccccgccacgagctggctcgatccggctgccgggtggctagatccgccgtcggggggccggatccgccttcagcgtggccggatcggcgcctctgccgccgtcgccgccgtcgccatccccgccgccgtcgtcccagcctttgccgtccccgccgccgtcgacccagccgcacctctgccgacgccatcgccttccccgccgccgtgtccatctccgccgccagccgccaccctgccagatcctcccgaggcggcgcggatctggcggtcaccgtcgccactgccctgggctgctcccccggccgcccggacgagacgaggtcgatgagaaaacgaggagccccgccgccgccgtccttgcggccgcgcggctttgccggcggccgctcaggcggcggcgaggcggaggaggaagatggggggagggggcggccggagatcgacccctcccgtgccgccagtgggggagggcgacgcgagaggttaactgaagcctcgagatcaagaattcgaaaagatgtccaagcggcgtcagaatcc

SEQ ID NO: 32547 - DNA, 199 bp, Oryza sativa
  Clone ID: PAT_MRT4530_36745C.1
tttcggtggtcaaccggcgacataccgacggttagacaagtgccatcgcgccggtcgaattgcggaaggacgcgggtcagatcggcgcgggcgacaggcgcggcaggcgacatcgatgttcagaccgggcctgatggaccttgggtgcctgcggggcccgcatacctgatggaccgtgggccggtggggcccggatacg

SEQ ID NO: 32548 - DNA, 363 bp, Oryza sativa
  Clone ID: PAT_MRT4530_36746C.1
atgataaatcttacttcctccgtttcacgattgaatatggataaaaattacaaggtagcattacgtggacgtagagccaactatagtctgttgattgttgtacttccgctaatacttctgcagatcgatccccaatcctcttcgtgctgggcgacggtggcatctccaatcgccctcgcctacatgcgcgtcctcctatcgaggctggcacctcaacaagaaggcagcgcgtgcatcaacggggcgattggggatgctgccgtcgcccagtcctacctcgagagaattggggatcgatctggggagaaggttgaactagagaagaggaaagcaagcgaggggtttacctgtaaatttgggtga

SEQ ID NO: 32549 - DNA, 700 bp, Oryza sativa
  Clone ID: PAT_MRT4530_36747C.1
aaagatgaacttattgacagcttaactataatcccaactgcatgattttacaattgcaccgccgcatctaacaccctcgtgagtttttgcacaagcattaacaattttcccgaacatctacacaaattaaaaaaaatgaaatctccttctcacgttttttttttcctttcaaaatgtcgtgtatttcttcaatctgtatagatatggcacaactatatcagaggttcagatagctccatctcgttggaggtttgatctgcctctgtcggtggcaatcgcacatagttcagccccaaccattgccatggccagcacatatacctatgcccgttgcgattgctcgagtcccttctgttgtctgattcttcgagctgcctattgatctcttccagtctctctcgcagcctggttgatctcatatccgctagtttcaatgatttctctgcggcatcacgtgccgccattgctgcagccgctgtctcttccttgaacttcagtttgttctctagctccagcattgcctgtttagcttcgtctaattccttgtttagggaagatagctgagtttcaaactcttgctcaattgctttaccagcttcagcttcttcctctgctgccatcttccatcttttgatctcctcttcagcagctgttacatccatcatcagaccctcaacactttcatttgccaccctttcct

SEQ ID NO: 32550 - DNA, 598 bp, Oryza sativa
  Clone ID: PAT_MRT4530_36748C.1
atggcggagcggcagcttcgcagaggaggtggacgtggaggccggtggcggcgaagaaagagctcgaactgggggctcccgagctccgcaacggtggaggcgccggcggacagcgtggagagcgcggagacggtgcgtcgcggagacagcgtggagagcgtggagacgcacacgccgcagttcctcgggctgagtgctccgtcgccaccgccgccaccgcaggggaagcggtggtcgtcgtcatcccacggcggctcgggagctggctctggcgtcattgtcggcgtgttcccagaccacctctccttcagcgacgccggcatgccgccgccgccagccaagtggaaggggtgctgcgagcctgcgacttcaatggcaccgtggatgctcaccgttgccgctagcaccatggaccggtcgatacgcacgacggtgcgcttagggaacaacctctacttcgacggcgagtcgttgtaccagccgaacgactcgctgaacaccttctacccactggtctacgccggcgcgagcgggaagccgttcgccgagttctgcggcaatggctcgctcgacggcttcgacgtcaggggcaagatcg

SEQ ID NO: 32551 - DNA, 544 bp, Oryza sativa
  unsure (1)..(544): unsure at all n locations
  Clone ID: PAT_MRT4530_36749C.1
ggtggtctccgggcgagatgcgnccaagtccgaccagagcttcctgcgacgacgaccaggttgccgccggttgggtcactcacctgccacagcttaccccaagtgccgacgtcgtcatgcgagacccncagaggaggacgcacactcnatctgaatcaaatcaagcaagctccaatgatgtgtgatgaaatgctctgcgatccatgctgcccaggcgttgctgtgagtttatgcaattaagaatatgaatgtgcgtgcgtgccctgatggctgatggcagcaaagtgatgtgaccgtgacgtatatggttggagccgagatgaaccaaacacagggcgtgccccgagggttaattgttggttgtttaattgaatggtacgtgtttggctggcaccngcttaatcatatccatatcacattttggtgtcatatatgccanccattcngtgtcatatatactacngtcaaaatacgnaccccaggtattgaaagaccagttaattaataagctatatatcctagttctaaaaaaaaaaaaaaaaaa

SEQ ID NO: 32552 - DNA, 453 bp, Oryza sativa
  Clone ID: PAT_MRT4530_3674C.1
aaaaaaaaaaaaaaaaaaaaaaaggaggggggggaaaaaaaaaaaaaaaaaaaaaaagggaagaaaaaaaaaaaaaaaaaaaattaaaaaaaaaaaaaaaaaaaaaaaaaaaaaccgggaaaaaaaaaaaaaaaaaaaaaaggggcggcccgctttgggggaacccaagctaacgtccccttccttgcggggggggggggtgttttttagggcccccaaaataaaatcaacgggccggggtttcccaccgtcgccacgggaaaacccctggggtcccccacctaaatcgcctgggagcacatccccttttgccccgttggcttaataccaaaaagccccgccccaatcccctttccaaaaagtgccccaccctgattggcaaatggacccccccctgtaggggcccttaaaccccggggggggggggggttccccccaggggaacccttccct

SEQ ID NO: 32553 - DNA, 709 bp, Oryza sativa
  Clone ID: PAT_MRT4530_36750C.1
tccacatttagaagcgcttgaacaaacaagtcaagttgaaaaaagagtaaaaaaaagtttagaaaaattttgttcaactggtttccgatggcaaccgctcggttcaaactgaacttatcatatttactttgcaatctatcaaaacattgttaggatatgttttgccatcgatccagaacaaccctcatacactataactactgtctcagtaacacgtttattacattccaaacacacaaaaaagaagtctcctactacgtttgtcatcttctattttctcttctcatttccaaaatatggattaaaagatattcattgtattattcgatgaattattttagaagctataattctactaggaaatattagttgaatgtatagctataattcctttttttattacataacagatatagataaatatctagctcaaagagatggaccagttgtgtatcccactcaattatagctacacatgggagatctaaaagttgctacagtacaatgccaaattaataactatttgccttctgaatatagctaaagctattcaccaaatgcttattgttttgacgcatatgaaaacttatttgaccatgcaagagatactatggaagtgagctgatgaaggaacagggatcaggaggactggggattgcaactgcaccattaagcatttgtgttaaccttagcatgttaggttctttgc

SEQ ID NO: 32554 - DNA, 542 bp, Oryza sativa
  unsure (1)..(542): unsure at all n locations
  Clone ID: PAT_MRT4530_36751C.1
agtttgtctgtgttgtcttccggtttcagatctttaagatgatgaagattttttttaaaataaatgcttgaattttaatattttattatttctaatgttctaaactgttttatactttgtaatacatgtatcatgggcattgtttgaggaaattagttttgcattcagtgttaaaaagttaactcggttgtttttttttgtcacgttctagatagaaattacttttctagaataaattgcatttgtcagaattgattctagtaagatgctcttatgtttttttttgtcacattctagatagaaattacttttctggaataaattgcatttgtcagtattgattctagtaagatgctcttatgctgcatctgtttatatatcctttaaaggcttatatttgtgcttactaagatgctcttatgctgcgtccgtttgcagagaattctacagtgtgatccctcatgacttcngttttaagaaaatgagtgagcttttaacgctctaactaattgatctttaagtcatgattaaataattagggc

SEQ ID NO: 32555 - DNA, 403 bp, Oryza sativa
  Clone ID: PAT_MRT4530_36752C.1
tttatgatgaatgggggttataatgtcctaaaccaaataaatcaggtaaagcataaatgcctgattttatggggagaggaggatggaatcattagcaacaaacaagcatataggttgcaccaggaactcccagatgcaattttaaggcaggtacgggagtgtggtcatattcctcatgttgaaaagccaagtgaagtgttaaaacatgtccttgattttctcggaacgcacgggcaggccagaaaaggcagagcagggttcttccttaccatcgacagttgggacctgctgaagcagaattggatccttaaggctagggtgtagaatggtacatgtacactgttggctcaatgatgcacatgtgagtcggtcgatatgcttgggaagttgcaatgctctgtcc

SEQ ID NO: 32556 - DNA, 613 bp, Oryza sativa
  unsure (1)..(613): unsure at all n locations
  Clone ID: PAT_MRT4530_36753C.1
ctatacatggggttggaaagaatgtgttccaacaggaagggtcatttctgaccaatcttctggtggaactttggaaaaagatgaaagacagagtgcgattgccgctgaccaagtgagccccaggtcgcaggtgtctaggacaagtagcggacagcatctggtccttctgaaatagaggtactgatgatagcacgaagagacgangttgtcttcaaccaaacatgcacccgaaagttcaacgtccagtgatgaaaacctttcagcacccccttgtgtagtgacatttaatacaggagttaaaataatggcagtagctgctggtggtcgtcatacattagcactatcagatttaggccaagtatggggtttgggctatggaggagaaggcaactaggcctggggttctagaatccggactgtttcctctccacatcctatcccgtgcattgaatcagcattgtacagcaaagatcggccagcagctatgaaaggaaacaaaagtgctgaagtgcagattagcaagtcatgggaaattgcgtgaaggccattgcatgtnggggtcgccacagtgctgtagtaacagattcaggagcactacttacatttggatggg

SEQ ID NO: 32557 - DNA, 3450 bp, Oryza sativa
  Clone ID: PAT_MRT4530_36754C.1
atggagtacggattcaccgccaactacaaggtttggacctatcacggggaattcgccaatccggaagatgacgatgaagagttaagtttcgagatgaatgaggcagagaattttataatcgaagacatgtcgcgtgaaagaatggatgtcgatgtttccaccgatagtgatgatttcgatggtggttttgatttagaggattctgataagggtaagcacgggaagattccttcaatggtgatgtggtacctaccaattaaggaccgcctgaagcgtctgtactcaaacccgactgatgctgagttgatgagatggcatcaagagagccggaaaatagatggtatgattcgacatcccgccgacgctcgccagtggaagacatttgatgcaaaacacccagaatttgctaaggatcctaggaatgtaaggtttgcgttgagcactgatggaatgaacccgtttgtggagaatgacactgccctagtagcaagaggtggtacatacgtgtatgagataacaaagaagattaaggttgtatatggaaagggaaagaagaagacagtaaagaggaagaaagctgatggtgacaacggtactgcgtcgcctttcaagaagcactcaattttcttcaaatacttggattactggaaggacctagagattcgacatgcaattgatgttatgcacctcgagaagaacgtgtttgatagcaccgttggcacattgctggacatcccgagatcaatgatagagggatacacaactgaagaggcagtcgagtgttgtatggactacataaaggatgctaatgccattggcattcctgttcatcgacatgaaggtagattgtctggaaggggtactgttggtaggaagcagttcttcgataatgattacaaaaaggtgtccgcggcacacaacagcgttcttcaacagctcgctatcgttgagccattcattgagcgacacctagaaaaaatcaaagcctgcttcccagggcggtccaatgattggatatcaagagagcacaagcgtcgctttcctctgtggttgaaagatctaaacctgcctgttggtgattatgtggaggaatttactttacaaagactggcatgtggaacttcaagtattgtcaattcatggcaaggttacgacatcaatggatttaccttgagtatgactacgaaggacatgaaaagcaccgcacaaaacagtgggatccgtgtcgaagcgattgacacgagtggagaaaagagatcgtattatgggaccattcaagaaatatgggaactggactatggcctaaacatccagatccctgtgctccgttgtgaatgggttaaagacacaataggggtttccgttgatgactacgggctaacgatagtcgatcacagtaaaacaggccacaaggatgatccatgggttttagcagagcgtgtggctcaagtgttttatgtgaaggacccttcagatgaaagaaaaactattgtcatatccggaaagcaacagatcgtcggcatcgacaacatcgaagaccccaatgattacaaccagttcgacgatgtaccattgtttactgatcttcctatgcgaattaagaaggttgagagaacaatcgatgaagcaaatatgtcgtacgttcgagcagatggtgttgccaagccagacacttctagtgaagaaacgtggcgcacaccaagtgacccgtttccaatggaaataacacaagttgccccccgcgatgatgatccggactacatacctatcgaacaggccatggtagtccgacgccgctcaaaacgtaaagccgggaggaacaggacagagcaagaagttgagatggacaccgctatgtctgcacctgaacgtacggagacatctacaagtgcaggcgggagtgggaaaaaaagacgtggtgagagaagcaagaataaattacccaaggaaacttacaacgtgattgctctcgatcaggatgggaagcccgtcgagccaccgatagtgcgatccaagttcagcaacacctgtggcactctaaagtattttgtgttccctcctggatcagaggctgactgggacacgtttgttgcggatcatacaacagctgaagcattggctttgaggaaaaaaatgtccgagctcgcgaagaagaacagatatccccatagattggggtcgagcggatacgctggtcacgtcgatcaatggcgggagatcgagcaaagatttgccgcggccggtaagcccctgctggtagaccccatggttgaacgtagcaagaactgggtttgggcgcgcagcacaggtcaagtctcggatgagggagacatactattcgagactccagacatagaagaagtgactactaatttgcagcagatagtcgagaaagaaagatcaggacagttcgtcccacggagggagcgagatcagcttactgcggcgttggggacggctgaacactctggacgtgtaagggatttgtcctcaaagacaagttggaaggtcgggtttccacaagacgcaccaagttataagaagagagacaaatacaaagaacaactatcggacaagatctatgcgcaagtgaaggaacacttctactcgttggcagctgaaaacccgacagcctttccaaggaattctgagaagagaaaaaaacttgctcacgtcttgtcagactcccagaagtcagtactagtggcccaagatgaagtgcaatcctggttatctgccgatgtgcctaaaacttatgagtatggcaagccattcttgccaacttatcttatgaacaagctaccatgggaaatgagggtaatgcacgaatgtatgcaattccacgaagctgatagaactggagcaaaggttggatacgtcgatccaacaagaatatgcaaaacacaacacaccgtagagctgagagaggactgcgagcaattggttggcaagaccccggaagaaaaggaagaatatgtgaagacattgcacaagaggaagaagctagaagtagcaacatacttggcaatagcaatgttggcgcacgccgacaaagatgtcttaatggtcccctaccagttcactgcacacaagtactaccgcaaaagaggtggaccagtacatattccatcccagaagaagttatccgtcaggactggctggccgtgctacaaacaaccaccaggaaccaacttgtgtggttattacgtgtgcgagatgctcagagtaaatgggaggtacaaaacaaccagtaaccaaatccccgaaatcccatatattgcacaacgattcaacgacactactatcttgaacgtggccgctgacctctgccaattcatccgtcgcgatgtctgcaacgcaagaggtctcttctacgacaaccagagtgaactcgcaatggacgacaaatttaaacctctcagagagtgggagaaagaacatatgcaataa

SEQ ID NO: 32558 - DNA, 590 bp, Oryza sativa
  Clone ID: PAT_MRT4530_36755C.1
atatggaaaggtcctccttttctttttttccctttcatttaggggtcatgctatgtacaaatttcacgggagcaaaaaacctaaaagttacatccacttgttgaaagaaagaaaaaacaagggtaataagaaaacgcataccaaaggacaaaaaaaaaccaaaataatactatagcatctatttatggtacacaggtaaaatatttgaaagagtaaaaaaggaactaaaaagtcttctttgcctctcagcattcgcaggaaactaacacagcactgtacaattttctttgcgcataccgaaggtctgtttctgtgttctctgtaagaagcccacactgatttctacaagtctccataaaaaaacggagaatataaattacgctgcagcttctctctgctaaaaacttcaccagcaatccagtttagctgaaaaacctaattctgatactatccattttacatgtctagtctgagaccatgtcctccaattcatgcatgtctgaatcagtctcatttgaagaatcccttcccaagggtgtattctcgccgtagtccaaatctttccagtcaaactcaccatcattagcacg

SEQ ID NO: 32559 - DNA, 2694 bp, Oryza sativa
  Clone ID: PAT_MRT4530_36756C.1
atgtcgaacgaaaaggttccatccaacgcaccaatagcgcctcaagaaggtaacgctcctcaaaattccggtagcaataagcagccagacgcttctagtgaagaaacgtggcgcacaccaagtgacccgtttccaatggaaataacacaagtcgccccccgcgatgatgatccggactacatacctatcgaacaggccatggtagtccgacgccgctcgaaacgtaaagccgggaggaacaggacagagcaagaagttgagatggacacccctacgtctgcacctgaacgtacggagacatctacaagtgcaggcgggagtgggaaaaaaagacgtggtgagagaagcaagaataaattacccaaggaaacttacaacgtgattgctctcgatcagtatgggaagcccgtcgagccaccgatagtgcggtccaagttcagcaacgcctgtggcactctagtcaggacacgttgtcccattaatgtcaagttgtgggaaacagtggacgacaacatcaagacacttctctggaatgagttgcagaagtattttgtgttccctcctggatcagagatcagggggagagattacgcacttaaaaagatgggagatcgatggcgacagtggaagtccgatctaaatcgggattatgttcagaagaatctcccaccgtttacggattatggacatatatcgcaggctgactgggacacgtttgttgcagatcatacaacagctgaagcattggctttgaggaaaaaaatgtccgagctcgcgaagaagaacagatatccccatagattggggtcgagcggatacgctggtcacgtcgatcaatggcgggagatcgagcaaagatttgccgcggccggctcagtgcagacaactaccttccctgtggatagtataactggaccaactccgtgcagtctcgtcgtaccaatcggccgcgctggaaagactaaggaggttgcaacgggtttagcgatacccggacgtcaattccacaacacggcaatccctgaggattacgcaagggtacaggtcgccaaggtccatagcgaccacgtttccttggaactagacatacctgcacctgaggggattgaacttctcggtgatgcagtgaatcagtttatcttgtggcaccgcagagacataatcctgagcgcggccgttcctgcagcaggatcttcaaccccatcctcatcgcaggcaatgactgctgccgctcctgccccaccgtcgcctcctgaaccaccgtcacctcgacatccgccgtcaccaccaccgcttaggtcaccgcctcgccaacctacaccaccaccctccccttctcaacaaccgcctctcccggccccgcaaccagttcaagcctctcccacctccccagctaaacagcatgctcccccggctccgccctcagttcaaacctctccacctacaccccaatctgctctggtagaacaagtgcacataccagatggtattacatccgaaccgaagtctaatactttggaactgagtcgtataattccaaagttgatatcgacatacgacccaaaggagattgacaaggataaggagaagttcatgttttcagctttcaggaattctgagaagagaaaagaacttgctcacgtcttgtcagactcccagaagttagtactagcggcccaagatgaagtgcaatcctggttatctgctgatgtgcctgaaacttatgagtatggcaagccattcttgccaacttatcttatgaacaagctaccatgggaaatgagggtaatgcacgaatggtatatgaaggcatctaggaaaggtctcggtttcataagcgtcgccgtcccggaaggcgctttcatgagtggtcctaatggaatattttttatctctttccaagacctttacgccctctacaagctagataaaatggacgttaatctcgttgcggctttctgtcttatgcaattccacgaagctgatagaactggagcaaaggttggatacgtcgatccaacaagaatatgcaaaacacaacacaccgtagagctgagagaggactgcgagcaattggttggcaagaccccggaagaaaaggaagaatatgtaaagacattgcacaagaggaagaagctagaagtagcaacatacttggcaatagcaatgttggcgcacgccgacaaagatgtcttaatggtcccctaccagttcacagaccactacatattattccttgtatatccgaaagaccaattgatcatatcattggaccccgcacactatgacaaggagacatttatggaattcctcactattttgaatttagcacacaagtactaccgcaaaagaggtggaccagtacatattccatcccagaagaagttatccgtcaggactggctggccgtgctacaaacaaccaccaggaaccaacttgtgtggttattacgtgtgcgagatgctcagagtaaatgggaggtacaaaacaaccagtaaccgaatccccgaaatcccatatattgcacaacgattcaacgacactactatcttgaacgtggccgctgacctctgccgattcatccgtcgcgatgtctgcaacgcaagaggtctcttctatgacaaccagagtgaactcgcaatggacgacaaatttaaacctctcagagagtgggagaaagaacatatacaataa

SEQ ID NO: 32560 - DNA, 477 bp, Oryza sativa
  Clone ID: PAT_MRT4530_36757C.1
atggcggcggcgtcagggcgtttgctggctgcttggtggcagagggcgatggcacagaagaggtctgcggaggcggtgactagcgtcggtggcagcggcgacggcagccgtgactgtggaggcggtggcgacgtcggcggcggggaaggagtcgggtgcgaggtgaggatggcaacggcaagatggtgggcgtttgacagcagcagctgcggtgttggtgaccgtgactgcggtcaccggaagcatgacggcctcggacggctagccgagggcgtgggagacggctgcatctggccggtgttggtgtttcttaacgacattactagaaatataattcccagcaatggcgcaaaaatactcctagtatattatggttacagagttcatccgcaagcgcacggatataccattgtagcatttcaccgagagtattccaagggtatcgtatttattttatcccataggatgatcttgtag

SEQ ID NO: 32561 - DNA, 1404 bp, Oryza sativa
  Clone ID: PAT_MRT4530_36758C.1
atggtgatgtggtacctaccaattaaggaccgcctgaagcgtctgtactcaaacccgactgatgctgagttgatgagatggcctcaagagagccggaagatagatggtatgattcgacatcccgccgacgctcgccagtggaagacatttgatgcaaaacacccagaatttgctaaggatcccaggaatgtaaggcagattaaagggaagactggatgtctgatatgtctagagaaaacttcgtacaaatacctgacgtcgtctttgaagacagtatacatgtggcatcgacggttcctaccacaaagacataggtaccgtaagatggctagattgttcgataatacagtggagaatgacactgccccagcagcaagaggtggtacatacgtgtatgagataacgaagaagattaaggttgtatatggaaagggaaagaagaagaaagacttagagattcgacatgcaattgatgttatgcacctcgagaagaacgtgtttgatagcaccattggcacattgctggacatcccgagtaaaacgaaggatggattgaagtcacgtaacgaccttgtagatttggccatacggcatgaccttcacccggtagtgctgccaaatgggaagaccgagattcctcctgcttgttactcgttgacacttgaagagaaaaaagccttctgtaaatgtttactaggggttagagtgcctactggtttcgcattgaatatcaggaagctagtatcaatgaaggatttgaccatttcgggatacaatgcgcatgaatgtcataggttgctaacggtgttcctaccaattgctataatggcagtcaaaccagtccatacaaaggtggttataacaaagttgtgctactttttcaatcgaattttgcagaaggtatttgatcctctggaattaggtccgcttcatacattttccgtcgagactgtatgccaacttgagatgtatttcccaccatcatttttagatatgatggagcatttgatcgttcacatcgtccctcagattattgaacttggtcccttatacttacatcagatgtgggcctatgagcgttacatgtcgatcctcaaaggctatgtacgcaaccgcgctcacccggaaggatcaatgatagagggatacacaactgaagaggcagtcgagtgttgtatggactacataaaggatgctaatgccattggcattcctgttcatcgacatgaagggagattgtctggaaggggtactgttggtaggaagcagttctttgataatgattacaaaaaggtgtctgcggcacacaacagcgttcttcaacagctcggtatcgttgagccattcattgagcgacacctagaagaaatcaaagcctgcttcccagggcggtccaatgattgg

SEQ ID NO: 32562 - DNA, 2532 bp, Oryza sativa
  Clone ID: PAT_MRT4530_36759C.1
atggagtacggattcaccgccaactacatggtttggacctatcacggggaattcgccaatccggaagatgacgatgaagagttaagtttcgagatgaatgaggcagagaattttataatcgaagacatgtcccgtgaaagaatggatgtcgatgtttccaccgatagtgatgatttcgatggtggttttgatttagaggatatgctacgccatgttgaaccagaggaccgcctgaagagtctgtactcaaacccgactgatgctgagttgatgagatggcatcaagagagccggaagatagatggtatgattcgacatcccgccgatgctcgcaagtggaagacatttgatgtaaaacacccagaatttgcaaaggatcccaggaatataagggaagactggatgtctgatatgtctggagaaaacttcgtacaaatactggacatcgtctttgaagacatggagaatgacactgccccagcagcaagaggtggtacatacgtgtatgagataacaaagaagattaaggttgtatatggaaagggaaagaagaagacagtaaagaggaagaaagctgatgattactggaaggacctagagattcgacatgcaattgatgttatgcacctcgagaagaacgtgtttgatagcaccattggcacattgctggacatcccgagtccgcttcagacatttgccgtcgagactgtatgccagcttgagatgtatttcccaccatcatttttagatatgatggagcatttgatcgttcacatcgtccctcagattattgaacttggtcccttatacttacatcagatgtgggcctatgagcgttacatgtcgatcctcaaaggctatgtacgcaatcgcgctcacccggaaggatcaatgttagagggatacacaactgaagaggcagtcgagtgttgtatagactacataaaggatgctaatgccattggcattcctgttcatcgacatgaagagagattatctggaaggggtactgttggtaggaagcagttcttcgataatgattacaaaaagatccctgtgctccgttgtgaatgggttaaagacacaacaggagtttccgttgatgactacgggctaacgatagtcgatgacagtaaaacatgccacaaggatgatccatgggttttagcagagcgtgtggctcaagtgttttatgtgaaggacccttcagatgaaagaaaaactattgtcatatccagaaagcaacagatcgtcggcatcgacaacatcgaagaccccaatgattacaaccagttcgacgatgtaccattgtttactgatcttcctgtgcgaattaagaaggttgagagaacaatcgatgaagcgaatatgtcgtacgttcgagcagatggtgttgccaaggacctctctaccccctcgccgtcgccgtcgccgccgccaagtcgtccccgccaccgccggctcctccccgaagtcgccccgtccctcgccaccgccgtcgctgccgccaggacctctacccccttgccgtcgccgtcgccgccgcacggacctctcccccctcgccaccgccaagtcgttgccgccggccgccaagtcgtccccgccaccgccatctcctccccgaagtcgcccccctcgtcgtcgtcgtcaccgcagccagcacctctcccccctcgcgcgtcgtcgctgccaagtccttcccgccaccgccggcaatacctcctccggtccaaggtcccccggacgcgttgtcccattaatgtcaagttgtgggaaacggtggacgacaacatcaagacatttctctggaatgagttgcagaagtattttgtgttccctcctggatcagaggctgactgggatacgtttgttgcggatcatacaacagctgaagcattggctttgaggaaaaaaatgtccgagctcgcgaaaaagaacagatatccccatagattggggtcgagcggatacgctggtcacgtcgatcaatggcgggagatcgagcaaagatttgccgctgccggcaaacccctgctggtagaccccaaggttgaacgtagcaagaactgggtttgggcgcgcagcacaggtcaagtctcggataagggagacatactattcgaggctccagacatagaagaagtgactactaatttgcagcagatagtcgagaaagaaagatcagtacagttcgccccacggagggagcgagaccagcttactgcggcgttggggacggctgaacactctggacgtgaacacttctactcgttggcagctgaaaacccgacagcctttccaagtctcgtcgtaccaatcggccgcgctggaaagactaaggaggttgcaatgggtttagcgatacccggacgtcaattccacaacacggcaatccctgaggattacgcaagggtacaggtcgccaagagacataatcctgaccgcggccgttccagcagcagaatcttcaactccatcctcatcacaggcaaggacagctgccgctcctgcaccaccgtcgcctcctga

SEQ ID NO: 32563 - DNA, 235 bp, Oryza sativa
  Clone ID: PAT_MRT4530_3675C.1
attcgtatctcctcctctcctctccctctccgggggggcaaatttacccaaagccccctatcccaatgccctcccaggcccatccctagcttgttccaccccaaaccctcacccccacccatggcccattactgtcgcgccggagagcttcctcacatatcccttctctacccttcgaccccgtgtgtgcctacgaccgtcaccgccggccccgtactcactgcgcctggaacga

SEQ ID NO: 32564 - DNA, 1158 bp, Oryza sativa
  Clone ID: PAT_MRT4530_36760C.1
tataaacccattgcgcagcctcccacgtcggggtcggagcacgttcgccgacgttcacgcgccgccggggccgaagcagagggagcgcgaccacctcggcgacggccagccgccgacgtgcagccaccggcgaaccccccctctcccaccctccctactttccgccggtgaagggttggtccgaggtctcagcacgtttgccactgttcacgtgccggaccaaatcagaggagggtgactacctcaggaacggtcgatcggcgtctattggcttccctccagtgaaggttcatacatttgcatggatcaggaagagcatgtaatttgtggcatagaggatgcccgtcgcctcgtgggccttccacccccaatccatatcacgatgacagagtgtctggtaaaggacgcgggagaggtgctgaagctacttgatgagaacattaccagtgggagatggactgtctcagatgagactgtagccctcctcagggttcttgcagaaggttgtgaggatctgatgtatgctaagaaggaattaactgacactgtcaaggctgcacaggatgacctgatcacgttgggaggcaacaccctatcagtggaggaacagcttttgctgccagagaaagaagatcgtcgtattttggttctccgtgcacttaaccttccaccggacagcaagccatctcggagctttgacgtggagaacatcgatgccgtgcttgctgcgcgtggtcggctccgtggtcagattgtacaggcccgagcagacatggagggtctgaggcagtacatcacggagacgtggttgccgtgggtagagcagcggttgaacactcatctcaccctgggagagccagttatgccgtagagtgattccttcacagtgttgttttgagtcttcatcatgaaacttgttgcctttagcttactgatgtctccgtatatgtgcctcttctaaactgtagtttccagaatctgcatgtcccaggattgactagtaaccacttatttcctgaatctgcatgtcccagcaggataactaagttgttggtactgccatgttaatttgttgttttggatgctactttcccccagatatttctgttatccactgtaatatattcactcacctttatagcaaaaaaaaaaaaaaaa

SEQ ID NO: 32565 - DNA, 2282 bp, Oryza sativa
  Clone ID: PAT_MRT4530_36761C.1
atggctagattgttcgataatacagtggagaatgacactgccccagtagcaagaggtggtacatacgtgtatgagataacaaagaagattaatgttgtatatggaaagggaaagaagaagacagtaaagaggaagaaagctgatggtgacaacggtactgcgtcgcctttcaagaagcactcaattttcttcaaatatttagattcaaggaaggacctagagattcgacatgcaattgatgttatgcacctcgagaagaacgtgtttgatagcaccgttggcacattgctggacatcccgaatatgatggagcatttgatcgttcacatcgtccctcagattattgaacttggtccattatacttacatcagatgtgggcctatgagcgttacatgtcgatcctcaaaggctatgtacgcaatcgcgctcatccggaaggatcattgatagaggaatacacaactgaagaggcagtcgagtgttgtatggactacataaaggatgctaatgccattggcattcctgttcatcgacatgaaggtagattgtctggaaggggtactgttggtaggaagcagttcttcaataatgattacaaaaaggtgtccgcggcacacaacagcgttcttcaacagctcgctatcgttgagccattcattgagcgacacctagaagaaatcaaagcctgcttcccagggcggtccaatgattggatatcaagagagcacaagcgtcgctttcctccgtggttgaaagatctaaacctgccagttggtgattctgtggaggaacttactttacaaagactggcatgtgggccttcaagtattgtcaattcatggcaaggttacgacatcaatggatttaccttgagtacgactacgaaggacatgaaaagcactgcacaaaacagtaggatccgtgtcgaagcgattgacacgagtggagaaaagaggtcgtattatgggaccattcaagaaataagggaactggactatggcctaaacatccagatccctgtgctccgttgtgaatgggttaaagacacaataggggtttccgttgatgactacgggctaacgatagtcgatcacagtaaaacaggccacaaggatgatccatgggttttagcagagcgtgtggctcaagtgttttatgtgaaggacccttcagatgaaagaaaaactattgtcatatccggaaagcaacagatcgtcggcatcgacaacatcgaagaccccaatgattacaaccagttcgacgatgtaccattgtttactgatcttcctatgcgaattaagaaggttgagagaacaatcgatgaagcaaatatgtcgtacgttcgagcagatggtgttgccaaggacctctcccccctcgccgtcgccgtcgccgccgccaggtcgccgtcgccgccgcacggacctctcccccctcgccgttgttgccgtcgccgcagcacggacctctcccccctcgccgtcgccgtcaccaccgcacggacctctcccccctcgccgttgccgtcgccgccgccaggacctctcccccctcgccgtcgccgtcgccgccgcacggacctctcccccctcgccgttgccgtcgccgccgccaggtcgtccccgccgccaagtcgtccccgctaccgccggctcctccccgaagtcgccccgcccctcaccgtcgccgacgccgctgccaggacttctaccccctcgccgttgccgtcgctcgtggacgacaacatcaagacacttctctggaatgagttgcagaagtattttgtgttccctcctggatcagaggctgactgggacacgtttgttgcggatcatacaacagctgaagcattggctttgaggaaaaaaatgtcatacgctggtcacgtcgatcaatggcgggagatcgagcaaagatttgccgcggccggtaagcccctgctggtagaccccatggttgaacgtagcaagaactggacaactaccttccctgtggatagtataactggaccacctccgtgcagtctcatcgtaccaatcggtcgcgctggaaagactaaggaggttgcaatgggttttgcaatacccggacgtcaattccacaacacggcaatccctgaggattacgcaaggatacaggtcgccaagagacataatcctgagcgcggcctttcctgcagcaggatcttcaaccccatcctcatcacaggcaatgactgctgccgctcctgcaccaccgtcgccttgtcacgaccggaaataacccaacgggcgttccttac

SEQ ID NO: 32566 - DNA, 289 bp, Oryza sativa
  Clone ID: PAT_MRT4530_36762C.1
attattaatatatattatttttttttatttataatttttctggggggtttttttttattattttttttgacaaacaccaggtaatccccaaaattccatcccacccccttcaagctatcaaatttttcttaatagaggtcatataaaagtttgtctaaaaaaaagaaaaaattttttcctgggaaaaaatgtaatcccttaaaaattccacaaaatattcaaccctgaactataaattgaaaagcctgggttgccaaagaaaggatctaactaatattaattactttgc

SEQ ID NO: 32567 - DNA, 1059 bp, Oryza sativa
  Clone ID: PAT_MRT4530_36763C.1
atggtcaagacatcagtaaaaatctcgaggacaagtcatccactcggtgaagttgtgtggtccttcttgtcacgtcgccgtgtggatgttgtgcgcggcctacgcgtagtttggttaaccaatagaacgacgcttacatgcccggcggcgcgcggcgcgaccaattggcgcgagaaaacccggcggaaacgctccgccctgcgtgtgacttgtgaggccgacgcacgcacgcacgcagtcgccgtctcgtggagttgtgaccgactactccacatcacccgaccctctgagatcaccctgaccgatctcacccgtcaccgagacaacaaacaacattatctcgatcccgaccagctcagcctcagcttattacttagcttcgagccgatccagccgcggccgttaattttgcttcgatcccctgcgtttgctcgccatggtgctcattgccaagggtgtaggcagcaacagggatcaacgtgcggtgcagctccttgcgctgtgctgcggcctgctgctgtgctgcggctcattgtgccagggccgcatgtcgccggggatgggatggggaggaggcaggatggtgtgcttggaagcgagcgttggcgtggtggtcagggcgtaccaggccagcgacggggaagatgcgcgcacgacgatgccaatgccgcctccggcggcgaggacggagcgactgatgcggtccgttccgagccctggtgttgggcactagctaggatttttacggtacattgtactgtgcgcgggaatgacagaagaggaggaaaggaggacagtaaattgaatcaatcccggtttgcggtggcccggggcgcggcgtgctcacggtggctggcggcggtagcccatgtgatgaaggaaggggaatggagcggatttctctcaagccgccgtttctttcgaacgacaaaccgactggatttctctaggtcgggatctgaccaagaaacaaaacgcgaaaatacaaaaatacccccacgcagaaagatgaaaagacaaatatacccttttcgaatttatactgcaaagctaaccggg

SEQ ID NO: 32568 - DNA, 1898 bp, Oryza sativa
  Clone ID: PAT_MRT4530_36764C.1
atgtcgaacgataaggttccatcgaacgcaccaatagcgcctcaagaaggtaccgctcctaaaaaatccggtagcaacaagcagcatgacacttttagtaaagaaacgtggcgcaaaccaagtgacccgtttccaatggaaataacacaagtcgcccctcgcgatgatgatccagactacatacctatggaacaggccataagtgctgaacatcgctcgaaacgtaaagtcgcgaggaccaggagagaggaagaagttgagatggacactgctacgtctgcacctgaacgtacggatacatccataagtgcaggcgggagtgggaaaaaaagacgtggtgagagaagcaagaataaattacccaaggaaatttacaacatgattgctctcgatcaggatgggaagcccgtcgagccaccgatagtgcggtccaagtttagcaacacctgtggcactctaatcaggacgcgttgtcccattaatgtcaagttatgggaaacggtggacgacaacatcaagacacttctctggaatgagttgcagaagtattttgtgtaccctcctggatccgatctaaatcgggattatgatcagaagaatctgccaccgttcacggaatttggacatatattgcaggctgactggaatacgtttgttaaagatcatacaacagttgaagcattggctttgaggaaaaaaaatgtcagacctcgcgaagaagaacaaatatacccatagataggggtcaatcggatacgctgggcacgtcgatcaatggcgggagaccaagcagagatttgcagcggccggcaaacctctgctggtagaccccatggtggaacgtagcaagaactgggtttgggcgcacaacacaggtcaagtctcggatgagggagacatactattcgagactccagacatagaacaagtgactactaatttgcagcagatagtcgagaaagaaagagcaggacagttcgtcccacggagggagcgagaccagcttactgcggcgttggggactgccgaacactctggacgtgtaaggggtttgtcctcaaagacgagttggaagatagggtttccacaagacgcatcaagttataagaagagagacaaatacaaagaacaactataagacaaaatcaatgcgtaagtgaaggaacatgtaacgctccgcttttcctctaaagatatccaaattccatttctaacctccaattctctccaaattcaatctctctgtcaaagtctattttgcgtccctcggatttttgtgggccaattccctccttcggcccatctcctctcagcctggttctctcccctctgctgctcctcccctcacgtgcttgctcgtgcgctgcgcacgcgagagagccattccctctcttctcttcctcgctctctctctctatctctctctctctatttgaataggaaaaacaaccaaattggaaaaatagaaaaaaatcactgttcattgcgctgtaagtgctcgacgaggttccctagccctgcccttccccctaccgcgcgcgcctcatgccccgagcagccgcgcgccgtcgccatcaccgcctggtgccacgtgccgtcgccatcgccgcctgccgcgcccgagccgccacgcgccgtcgccatcgccgcctgccgcgcccgagccgccacgcgccgtcgccatcgccgcctgccgcgcccgagccgccacgcgccgtcaccatcgccgccttcctcctcgcgccccgcgccgctgccgtgccgcgtcgccgtcgcgtcgcctgtcgcggtcacatcgccgcgccgctgtcccgtcgcctcgcgccacgcgctcgccgcctcgcgccccgcgccacgcacttgtagagcctgagggagttgcggatccgagcgagggt

SEQ ID NO: 32569 - DNA, 3111 bp, Oryza sativa
  Clone ID: PAT_MRT4530_36765C.1
atgtcgaacgaaaaggttccatcgaacgcaccaatagcgcctcaagaaggtaacgctcctcaaaattccggtagcaataagcagccagacgcttctagtgaagaaacgtggcgcacaccaagtgacccgtttccaatggaaataacacaagtcgccccccgcgatgatgatccggactacatacctatcgaacaggccatggtagtccgacgccgctcgaaacgtaaagccgggaggaacaggacagagcaagaagttgagatggacaccgctacgtctgcacctgaacgtacggagacatctacaagtgcaggcgggagtgggaaaaaaagacgtggtgagagaagcaaaaataaattacccaaggaaacttacaacgtgattgctctcgatcaggatggaaagcccgtcgagccaccgatagtgcggtccaagttcagcaacgcctgtggcactctagtcaggacgcgttgtcccattaatgtcaagttgtgggaaacagtggacgacaacatcaagacacttctctggaatgagttgcagaagtattttgtgttccctcctggatcagaggtcagggggagagattacgcacttaaaaagatgggagatcgatggcgacagtggaagtccgatctaaatcgggattatgttcagaagaatctcccaccgtttacggattatggacatatatcgcaggctgactgggacacgtttgttgcggatcgtacaacaactgaagcaatggctttgaggaaaaaaatgtccgagctcgcgaagaagaacagatatccccatagattggggtcgagcggatacgctggtcacgtcgatcaatggcgggagatcgagcaaagatttgccgcggccggtaagcccctgctggtagaccccatggttgaacgtagcaagaactgggtttgggcgcgcagcacaggtcaagtctcggatgagggagacatactatttgagactccagacatagaagaagtgactactaatttgcagcagatagtcgagaaagaaagatcaggacagttcgtcccacggagggagcgagatcagcttactgcggcgttggggacggctgaacactctggacgtgtaaggggtttgtcctcaaagacaagttggaaggtcgggtttccacaagacgcaccaagttataagaagagagacaaatacaaagaacaactatcggacaagatctatgcgcaagtgaaggaacacttctactcgttggcagctgaaaacccgacagcatttccaaggttattccctgatagccagcaacccacacaatccgcacagcaaacaactaatgtacccagcagtgtaggctcagtgcagacaagtaccttccctgtggatagtataactggaccaactccgtgcagtctcgtcgtaccaatcggccgcgctggaaagactaaggaggttgcaacgggtttagcgatacccggacgtcaattccacaacacggcaatccctgaggattacgcaagggtacaggtcgccaaggtccatagcgaccacgtttccttggaactagacatacctgcacctgaggggattgaacttctcggtgatgcagtgaatcagtttatcttgtggcaccgcagagacataatcctgagcgcggccgttcttgcagcaggatcttcaaccccatcctcagctgccgctcctgcaccaccgtcgcctcctgaaccaccgtcacctcgacatccgccgtcaccaccaccgcttaggtcaccgcctcgccaacctacaccaccaccctccccttctcaacaaccgcctctcccggccccgcaaccagttcaagcctctcccacctccccagctaaaaagcatgctcccccggctccgccctcagttcaaacctctccacctacaccccaatctgctctggtagaacaagtgcacataccagatggtactacatccgaaccgaagtctaatactttggaacctcgtcgtataattccaaagttgatatcgacatacgacccaaaggagattgacaaggataaggagaagttcatgttttcagctttcaggaattctgagaagagaaaagaacttgctcacgtcttgtcagactcccagaagtcagtactggcggcccaagatgaagtgcaatcctggttatctgccgatgtgcctgaaacttatgagtatggcaagccattcttgccaacttatcttatgaacaagctaccatgggaaatgagggtaatgcacgaatggtatatgaaggcatctaggaaaggcgctttcatgagtggtcctaatgggatattttttatctctttccaagacctttacgccctctacaagctagataaaatggacgttaatctcgttgcggctttctgtcttatgcaattccacgaaactgatagaactggagcaaaggttggatacgtcgatccaacaagaatatgcaaaacacaacacaccgtagagctgagacaggactgcgagcaattggttggcaagaccccggaagaaaaggaagaatatgtgaagacattgcacaagaggaagaagctataagtagcaacatacttggcaaaagcaatgttggcgcacgccgacaaagatgtcttaatggtcccctaccaattcacagaccactgcatattattccttgtatatccgaaagaccaattgatcatatcattagaccccgcacactatgacaaggagacatttatggaattcctcactattttgaatttagcacacaagtactaccacaaaagaggtggaccagtacatattccatcccagaagaagttatccgtcaggactggctggccgtgctacaaacaaccaccaggaaccaacttgtgtggttattacgtgtgcgagatgctcagagtaaatgggaggtacaaaacaaccagtaaccgaatccccgaaatcccatatattgcacaacgattcaaccacactactatcttgaacgtggccgctgacctctgccgattcatccgtcgcgatgtctgcaacgcaagaggtctcttctacgacaaccagagtgaactcgcaatggacgacaaatttaaacctctcagagagtgggagaaagaacatatgtaa

SEQ ID NO: 32570 - DNA, 2070 bp, Oryza sativa
  Clone ID: PAT_MRT4530_36766C.1
atggctgaggccgtgattctttttgctgtgaggaagatcggtgttgcattgggaaatgaagcaaccagccaggctgtttcgtatttcaggaagtttgtcacgcagctaacagagcttcaaggcagcatgggccgcatcaggagggagctccggttgatgcatgagtttctctgtcgaatggatgtacgcaaccgtaataaccagacatatgaaatctgggtggaggagggacgagtacttgtacatgggatcgaagacattgtggacgaatatttgcatcttatcggtcagaagcttgacactggatggagcacctatctgaagaaaggaatcaagggacccaatgtcgtggtatccctgaacaggatagcttcattggttaaagaagccgaggtcaatctggtgcacctgtttcaggccaaggaccgatgggttttgcttccaagtgacagtaacgacaactcaagctacattgtcgagagatctcagcatttggcagccacttcatgttccatcagtgatgaagatcttgtggggattgatgattacaggagggatttggaaaagtggcttgaagatgatgaacctgcacaccttgtgatagccctgcttgggatgggagggcttggcaaaacagcccttgctgcaaatatctacaggagggcgaaggaaaagtttgaatgccatgcctgggtatccatctctcaaacatattcaagacaaggtgttttgagaaatttaattgggaagcttttcaaagatatagaggacgtaccaactgacattgccacgatggacatcacatcccttgaagagaaactgcatctttttctagtggagaagaaatacttgatcgtactagatgatgtttggagtacagaagcattcactgacttgtctaatgcacttgttcataacggcactggaagcaggcttgtaattacaacacgagacagtgaagtagccggccttgcttctaagaattatgtcgttgaactgaaaactttaccaagtgacaaggcaatggagttgttctgtaaaaaggccttccggagtgatacagatgacaaatgtcttgcaaagctaaatgatatttccgtggaaatcgtcagcaagtgcaaaggcttgcctcttgctattgtctctgttgtttgtttccagaggactatcctcttaaaagaaaggaacttgtacggctatggtggcagaaaggttcattgtggaaaagggtacatgtccgtgcttgagctaagtggagtacccatcaagacagttcccaatgctattgacatacggtgtctgccaagaaggatcgtcaagctgaagaagcttaggcacttatttgccgagaaactgcacgatgcaacctggagaaatttccgttgctgcactggtgtgcgcttccacaagggtctcggtaacctgacgagccttcggacgctacatgggctggaggcacaggaggagtccatcaggcatctcggagagctgaggcagctacgaagcctcagagtatggaacgtgaaaggagcctacagtggacgcctttgcacatctcttgttaagctacaattcctgtccaacctgtacattgtggcgagcaacgaaaacgaggctctccagctggaagagatgaacccgccgcctcccaaccttcagaggctgttcttgcgagggcggctagcagatgatatactgcaggaggagtctcccctcttccatcacgcagcaaggcgaaacctcgggcaggagcggccggcagtggaaggcaatgacgccaacacgcgtgtgatgagggctagcggcgaggacgggccggcgacaagggccacgaatccagcggcgcaaccctcaggagtgtttatggtgacgacgacggtgggcagcggatcaggcggtgccgccctaggcaacggttgcagcgacaacgatggcgggcggcagatctggcgccaccaccctcgggaggggtggatctgccgccctagggagtggctacggcaacaacaacggtggctggtgagggcggtggattcagccggcggggagcagatctggcgccgtccttag

SEQ ID NO: 32571 - DNA, 564 bp, Oryza sativa
  Clone ID: PAT_MRT4530_36767C.1
atgcaattccacgaagctgatagaactggatcaccggttggatacgtcgatccaacaagaatatgcaaaacacaacacaccgtagagctaagagaggactgcgagcaattggttggcaagacccctcaagaaaaggaagaatatgtgaagcaattgcacaagaggaagaagctagaagtagcaacatacttggcaatagcaatattggcgtacgccgacaaagatgtcttaatggtcccctacgcgttgacgtcgatcctcaatcttctaactactgataaaacaattgttttcttcaaacatagcacacaagtactaccgcaaaagaggcggaccagtacatattccatcccagaagcagttatccatcaagactggccgaccgtgttacaaacaaccactgggaaccaacttgtgcggttattacgtgtgcgagatgctcagagtaaacgggagatccccaaaatcccatatattgcacaacgaatcgacgacagtactatctggaacgtgggcgctgaactctgccgattcctctgtcgtgatgtctgcaacgcaatgtaa

SEQ ID NO: 32572 - DNA, 435 bp, Oryza sativa
  Clone ID: PAT_MRT4530_36768C.1
atgccgcgcgccgatgcagccagggtgcccgccgatgccgccaccgccgcgcccgccgatgccgccaccaccatcgatgccgccgtctccgcctcccttatcgagggcgccggcgtcgctgaggaggagggagagggagatgggaggatggggaggaggagagggagagggagagggaggatggatggggaggtggtgggaaaatgcatatggcttgctgaagctcaatggttgaagctacaatcttggctatttctggcagaaatccaaattggtggcttggagctgtgtttgtgtgaccacacatttgaattgaatatggtatacaacataattgaagtatggtgcaacacaataaaaccattaacttacctcacaggggctgtactcatcttaagtcttacatcttccgtttcacaatattttctgcaatag

SEQ ID NO: 32573 - DNA, 623 bp, Oryza sativa
  unsure (1)..(623): unsure at all n locations
  Clone ID: PAT_MRT4530_36769C.1
aatacgtatttattatcaatagaattgcaacgtctttttaataataaatcatcactaaacaatttcatactatcaactatgcgcaagtttcaactattacaatataaagtgttcttattttaaaatcgtccactaattaattaatatttcgatattttattacaaagagcactaaagggtatctaacatttactttgaatttgcagtactcttcccttctatgggatatattttctaccatactgattngtttttatatggttttcaataaatcttaatcctatttgaatgggttatgatttatattttcggggttgtaattttaaagagggcttaggagcttgtcatcaatgggctaggatttataatgctgaagtactggttngtaattattggcctcgtggatatngtcgtggctttggagctggctgatatacaggctgtggatatggcgctggtgtagtaggcttgtactcaggttgtggatatggttgtgggtagggctttggtgatggtttgtattcgggctggggttgaggatatggcgctggtgtagtaggcttgtactcaggttgtggatatggttgcgggtagggctttggtgaaggcttgtattcaggttg

SEQ ID NO: 32574 - DNA, 177 bp, Oryza sativa
  Clone ID: PAT_MRT4530_3676C.1
atggatgtggtcttctcgttgcccactgcccaggcatggagaaggctaaatcaacatgttggtcctatcatcatctgcatcctcatccgcatagctctcatccctaccgtccactgcgattcaccctcgcacagcaactccatggagaccactacacttcatacgtccgatggataa

SEQ ID NO: 32575 - DNA, 8493 bp, Oryza sativa
  Clone ID: PAT_MRT4530_36770C.1
atgccgcccccaatcgtcgggaacggccgcgccaagtccggccgccttcctttgccgccggccaccattcccgtcgccgttcccgcgcctcccgtggccggctccctcccccatcctataaaatgggatcctcatcccccgttctctcgttttagccccatcccgagcctccccgtgccctccacctcgtccactcctcggtttcgccggaacgccatcgccgcgaacctctacatccgcctcgccggagttgttcggccgcctgtccctcctcgccgtgcaccggtcgaccacacctccaccacctccggcatcgcagcggcaagcggcgtggtcctcgtcgtcctcgtccccgtgcagccgctgccggctgtcctcgtcgcctcctcgccggtcccggtcgtcgtcgtcgtcgtcgtcgtcatcctctcgtcgttcccggtcgtcgtggcgttcgtccctccgtcaagccgttctcgttcgtcgtcctcgcttcgtcaagatcgctgcagccccgtcctcgtgttcgtcctcggttccgcgtcgtcaagcctcgtgccggccgcgtctcgccttcgcccaaggatcgccgccgaagccgtcccctcgccgttcgtctccgttgtgcccgtctgtctccgccgcgcccgttcgtcgttgtcgttcccacgcctcgtcgcgtggtgggcaaatgaaggctacacgagctgcggcccggtagtcgagatgtcatacggcggagggttggtgcccaatgctaggggctcagttctgcctgcctgtcccgggtatcccggccgtagggctaaggagcatgctttgagggagaatatgacaaagatcttttgtccgtgccgtcattgcaagaatcagaaattgttggtagatcctggtgaaatattgggtcacataatggagtacggattcaccgccaactacaaggtttggacctatcacggggaattcgccaatccggaagatgacgatgaagagttaagtttcgagatgaatgaggcagagaattttataatcgaagacatgtcgcgtgaaagaatgattgtcgatgtttccaccgatagtgatgatttcgatggtggttttgatttagaggatatgctacgccatgttgaaccagaggaccgcctgaagcgtctgtactcaaacccgactgatgctgagttgatgagatggcatcaagagagccggaaaatagatggtatgattcgacatcccgccgacgctcgccagtggaagacatttgatgcaaaacacccagaatttgctaaggatcctaggaatgtaaggtttgcgttgagcactgatggaatgaacccgtttggtgacttaagcagctcgcacagcacatggccagtccttctcacaatgtataatcttccaacatggatatgtcagaaacgaaagtacattctactcactatcctcatacaaggtccaaaccaacctggaatcgacatagatgttttccttgagcctttgatggaggacatggaggagctttggaaagaggggttacgactatgggatgagtttaagcgggagcacttcaatctacgtgcaatcatattcgttaccatcaatgacctacctgcaaacttttcattatctgggcagattaaagggaagactggatgtctgatatgtctggagaaaacttcatacaaatacctgacgtcgtctttgaagacagtgtacatgcgacatcgacggttcctaccacaaagacataggtaccgtaagatggctagattgttcgataatacagtggagaatgacactgccccagtagcaagaggtggtacatacgtgtatgagataacaaagaagattaaggttgtatatggaaagggaaagaagaagacagtaaagaggaagaaagctgatggtgacaacggtactgcgtcgcctttcaagaagcactcaattttctttaaatacttagattactggaaggacctagagattcgacatgcaattgatgttatgcacctcgagaagaacgtgtttgatagcaccgttggcacattgctggacatcccgagtccgcttcagacatttgccgtcgagactgtatgccagcttgagatgtatttcccaccatcatttttagatatgatggagcatttgatcgttcacatcgtccctcagattattgaacttggtccattatacttacatcagatgtgggcctatgagcgttacatgtcgatcctcaaaggctatgtacacaatcgcgctcacccggaaggatcaatgatagagggatacacaactgaagaggcagtcgagtgttgtatggactacataaaggatgctaatgccattggcattcctgttcatcgacatgaaggtagattgtctggaaggggtactgttggtaggaagcagttcttcgataatgattacaaaaaggtgtccgcggcacacaacagcgttcttcaacagctcgctatcgttgagccattcattgagcgacacctagaagaaatcaaagcctgcttcccagggcggtccaatgattggatatcaagagagcacaagcgtcgctttcctctgtggttgaaagatctaaacctgccagttggtgattctgtggaggaacttactttacaaagattggcatgtgggccttcaagtattgtcaattcatggcaaggttacgacatcaatggatttaccttgagtacgactacgaaggacatgaaaagcacatcacaaaacagtgggatccgtgtcgaagcgattgacacgagtggagaaaagaggtcgtattatgggaccattcaagaaatatgggaactggactatggcctaaacatccagatccctgtgctccgttgtgaatgggttaaagacacaataggggtttccgttgatgactacgggctaacgatagtcgatcacagtaaaacaggccacaaggatgatccatgggttttagcagagcgtgtggctcaggtgttttatgtgaaggacccttcagatgaaagaaaaactattgtcatatccggaaagcaacagatcgtcggcatcgacaacatcgaagaccccaatgattacaaccagttcgacgatgtaccattgtttactgatcttcctatgcgaattaagaaggttgagagaacaatcgatgaagcaaatatgtcgtacgttcgagcagatggtgttgccaaggacctctcccccctcgccgtcgccgtcgctgccgccaggacctctcccccctcgccgtcgccgtcgccgccggcaggtcgccgtcgccactgcacggaactctcccccctcgccgttgccatccccgccgccaggtcgtccccgccgccaagtcgtccccgctaccgccggctcctccccgaagtcgccccgcccctcgccgtcgccgacgccactgccaggacctctcccccctcgccgtcgccgtcgccgccgcacggacctctcccccctcgccgttgccatcgccgccgccaggtcgtcgccgccgccaggtcgtccccgccgtcgctcggcgcttctagtgaagaaacgtggcgcacaccaagtgacccgtttccaatggaaataacacaagtcgccccccgcgatgatgatccggactacatacctatcgaacaggccatggtagtccgacgccgctcgaaacgtaaagccgggaggaacaggacagagcaagaagttgagatggacaccgctacgtctgcacctgaacgtacggagacatctacaagtgcaggcgggagtgggaaaaaaagacgtggtgagagaagcaagaataaattacccaaggaaacttacaacgtgattgctctcgatcaggatgggaagcccatcgagccaccgatagtgcggtccaagttcagcaacgcctgtggcactctagtcaggacgcgttgtcccattaatgtcaagttgtgggaaacagtggacgacaacatcaagacacttctctggaatgagttgcagaagtattttgtgttccctcctggatcagaggctgactgggacacgtttgttgcggatcgtacaacagctgaagcattggctttgaggaaaaaaatgtccgagctcgcgaagaagaacaaatatccccatagattggggtcgagcggatacgctggtcacgtcgatcaatggcgggagatcgagcaaagatttgccgcggccggtaagcccctgctggtagaccccatggttgaacgtagcaagaactgggtttgggcgcgcagcacaggtcaagtctcggatgagggagacatactattcgagactccagacatagaagaagtgactactaatttgcagcagatagtcgagaaagaaagatcaggacagttcgtcccacggagggagagagatcagcttactgcggcgttggggacggctgaacactctggacgtgtaaggggtttgtcctcaaagacaagttggaaggtcgggtttccacaagacgcaccaagttataagaagagagacaaatacaaagaacaactatcggacaagatctatgcgcaagtgaaggaacacttctactcgttggcagctgaaaacccgacagcatttccaaggaattctgagaagagaaaagaacttgctcacgtcttgtcagactcccagaagtcagtactagcggcccaagatgaagtgcaatcctggttatctgccgatgtgcctgaaacttatgagtatggcaagccattcttgccaacttatcttatgaacaagctaccatgggaaatgagggtaatgcacgaatgtatgcaattccacgaagctgatagaactggagcaaaggttggatacgtcgatccaacaagaatatgcaaaacacaacacaccatagagctgagacaggactgcgagcaattggttggcaagaccccggaagaaaaggaagaatatgtgaagacattgcacaagaggaagaagctagaagtagcaacatacttggcaatagcaatgttggcgcacgccgacaaagatgtcttaatggtcccctaccagttcacagcacacaagtactaccgcaaaagaggtggaccagtacatattccatcccagaagaagttatccgtcaggactggctggccgatccccgaaatcccatatattgcacaacgattcaaccacactactatcttgaacgtggccgctgacctctgccgattcatccgtcgcgatgtctgcaacgcaagaggtctcttctacgacaaccagagtgtcacgcctgagtcagcaagctttgccgatactggatatgaccccccgccaaaaaaatggaaagggatttgccaggttggcccatcgtttgaggccataagttgcaaccggaagtttatcggtgcacggtggtacatcgatgacgagattctaagtagcatatccgataacgaggttctttctcctagggatgtcgaaggccacggcacgcacacagcctcaacggctggcggcaacatcatccacaatgttagctttctggggctagctgcagggacagttcggggtggagcgccccgtgcacgattagccatatacaaggcctgttggtccggttatggctgctccggtgccaccgtgttgaaagccatggacgacgctgtctatgatggtgttgatgtcttatcactttctataggtggtacaaaagaagatgtgggaaccctacatgtcgtcgctaatggtatctcggttgtctacgctggtggaaacgatggtcccattgctcagacggtggagaaccaatcaccatggctagtaacggtcgctgcaaccaccattgatcggtccttgcctgtggttatcaccttgggaaacggcgaaaagttggtggcgcaatcctttgtcctcctggaaactgcaagtcagttcagtgagatacagaagtacacagacgaggaatgcaatgccaacaatattatgaacagcacggtgaaggggaaaatagccttctgcttcatgggagagatgttgaataataagcagcagacatcataccctgatgtcaccacggcagtggcagccaaaggaggcagagcaccggacattgctgcaccaggggtttcgattttagccgctgctcagattccatattacaaaggtgtttcctaccatttcgattctggaacatctatggcttgcccccatgtagctgggatcattgcggtgctcaagtccattcatccaaaatggtcacctgcggctctcaaatccgcaatcatgacaacagactactccatcccgctcgctggcgtgcaccagcgatcgggagagcaggtctccggaacctctgcctttgacgtcctgcaccgggagaaggcggcaataaggcactgtgattttactatggctgattttgccgatgcactgaggccggataaattcaccggtgtgcattttaagagatggcagatcagggtcactctgtggctgacagctatgaaatgcttctgggtgagtactggcaaacctgaaggagttcttactgctgaacagcagaagcaattcgaggaagccactactctatttgtgggatgcattcttagcgttcttggcgatcgtctggtcgaggaatactccgttgaggggttgatagcgtctcttgatgttgaggagaaagctcgggaaaaagatgccgcgtctaagggcgatggtgggcagtccagcgccaatgttgtgcacaaggcccagaacaagagtaaggggaaatacaaagctcagcagaccaccaacttcaagaagcagaagaagaacaacaacaatcctaatcaggatgagaggacttgctttgtgtgtggccaagttggtcatctggctaggaagtgtccacagcgcaaggggatgaaggcacctgcagggcagacttctaagtctgctaatgtgaccattggcaacactggagatggaagcgggtatggtaatttacctactgtcgcacggggttccaccgtcctaatggggaatgggtcacatgcttctgttcatggtgttggcacggtagatctgaagtttacttcgggaaagatcgtgcagctgaagaacgtgcagcatgtcccttctatcgacaggaatcttgatacacatagtggttcgaaccaaccctctgaaataattcccagttcaatcataccaccagaacaaactgaacatacacatgaacttgtctctgaggaggatgtcagtgaagctcctcgaaggagtaagagacaaaggacggctaagtcttttggtgatgattttactgtgtacctcgtggatgacactcctaagtcaatttcagaagcatatgcatctcctgatgcagactactggaaggaggctgtccgtagtgaaatggattccattatcgctaacgggacttgggaggtgacagagcaaccctatgggtgtaaacctgtggggtgcaagtgggtgttcaagaagaagcttaggcctgacgcctcacatggtcttctcgttcatcaaatggacgttaagacagcttttcttaatggagagctggatgaggagatctatatggatcaacctgatgggtttgtagttgaaggctttggagtcaatgaggcagataaatgtgtgtattatcgccatggtgggggtgagggagttattttgtgcttgtatgttgacgacatactgatatttgggacaaaccttgaggtgataaatgagtcccattatgtggagaagatcttgaatcgctttggctacattgatagtaagccttctccaacaccttatgatcctagcttgttgcttcgcaagaacaagagaattgctaggaatcaactggaatactcccaaatcattggctcgttgatgtacctggctagtgcaactaggcctgatatctcctttgctgtgagcaagttgagccgatttacctctaatccgggagatgatcactggcgtgcgcttgagcgagtaatgcgctatctgaaaggtactgtggaattggggcttcactatactgggtatcctgcggtactggagggttatagtgattctaactggatctctgatgtggatgagatcaaagccactagtggatatgttttcacactgggtggtggtgctgtttcatggaggtcttgcaaacagacaattttgacgaggtcaaccatggaagcagagctaacggcactggatactgctactgttgaggcagaatggctgcgtgatctattaatggatctgcctgttgttgaaaaaccggtgccggctatccttatgaactgtgacaatcaaacggaaattaagaaactccggagttataacgttggattacatccaaacagcgagaaacctggcagatcccttcacgaagggactatcacgaaatactactccatgccgctcgccggcgtgcaccagcgatcgggagagcaggtctccggaacctctgcctttgacgtcctgcaccgggagaaggcggcaataagacacctgcgaaaagtttcgaccaagcagcagatctaa

SEQ ID NO: 32576 - DNA, 376 bp, Oryza sativa
  unsure (1)..(376): unsure at all n locations
  Clone ID: PAT_MRT4530_36771C.1
ggttttgttttgggggtttttaaattatttttttttttttttttttttttttttttttttttttttttttttttttttttnggccatcaantttaaactgccccccatgaaaatccatttttttttttttaacatttaaacccttttacgggggggggggggggggcgtcccccccaacggggggaatgccccccggggcaaggggggggttggggtagtccccccccttggggggggggtttaagggcagcaaagcttggccttgggcttgggcctgtccaaaggagccaaccccccctttctggaggggggggggctgcacaatcggctggacccttctaagggcctggttgggggattggggccccccccccc

SEQ ID NO: 32577 - DNA, 1364 bp, Oryza sativa
  Clone ID: PAT_MRT4530_36772C.1
gcacgaggatttcctcctcgctcctcccccaccattcccacatctctccctcgccttcctcctgggggtctctccacatctccctctcgcttgcacgcctcctccggtttggcggcttcttctgtagggttggtctcgactcgactcgtcgaagggaagctgctcccatgaccgcggccgacgctgaggcgtgcgcggtggccgcggcggcggacatcatctgctcgctccgcggggccgacctcgccgggtggacgccgccgtgggggacggctgccgcgaaggggaaggaggtggtggtggaggaggaggaggaggagctggcgtggccgacggtggcacgggggaagcggtcgcggtcgtcgcggcgccgctcgccgtcggggtcggggtcggcggcgaccaaggggaggtgggccaggggtagcccggcgtctcccctcgactacagcggcggctccggctccggctccggctccgccgcgtcgacgagcggcggcgaggacggggccttctgctctccaccgccaccaccgccgccggtggtgacggcggcggcggcgactacgcccacggccgcgcccaccccttctccggccaagcgtgtctgtttggtgcggttgactcctaccttgcggaggggggcagccgcggcaattcacaagggtaggtgggttccggttcggctcccactcccaagtctccaaccacgagccgcggcttaccgcttttgcccaatctgcccattcgcctcgagcctaacttccgggggcaatccggtcatttcgcccgcccttatcctggacctgacctcctctatcgcgttcgttgccgtgggaagtgggccctgccggacggcgccagctgatcctaccgaccccgcctccccggcccgccggacagcgaccacggaagaagatggtccggcacagaggctgccggagattcagcagctggtgcggtcgctgacggtggagaacgatggccttcgcgaggagatggtggcgttgcagagagcttgcacggcgttgtccaaggaaaactgcaagctagagttacaaggtgttctactgactgttcatgcatgcttcgttttcaaccagccgtacatgtctggaatctttcccccaataaagaacgccatgttgccaggccatgaccttaatctatgcacaccaacccggatcctggacatgacaaggttagagaaatcaagcaaacgaaacggaacgaaatccgaggggcagcaagcaaggccgcagcctgatgagcccgcagccaagcaggaatctcaaaacggcttcgtgctgcctgacctcaacctcccagtggaggacatggctgctgatggatcagctccttga

SEQ ID NO: 32578 - DNA, 1587 bp, Oryza sativa
  Clone ID: PAT_MRT4530_36773C.1
ggaactagtctcgaaacgacactgagattgtcctcaagtgaagactaaagacgttaaatatcgattcagttttaacagttgtagcactgagaaaaagaaggaaaaaaaatcgggagccaaagaaattaatctagtggcggatagtctattggttgttctccatcatgatgaataaactctcagacatagatgctgactcggactcccaaggatctgatttaaccagttccttccaacagttttcgacaaaaggggtgaatgaaaaaagcatcacaattcgctggatcgcggaaggctataggtgatggttaagcgatcttcccgtaaacaatccagcttggctcaagcggtcagttcgacgccactcgatttaaacgtggcttcaccggtgtcttagaagggctcaccctgacaggcagtgtacccaaaatcatcccactgcaattcagagccatgatggcacactcggcatggacaaactcaacaaaagcaatccttgtagaatgtacattatcccctagaagtctcaaacgagagacctcaccacaaagttcttcaaagaaattctttacatctaattgagtaaccttcttatctatgtttgtacaataaacagttcttatgaccatttccttctcatcctccgtcctaggaaggaactttggattcacaggcaatatagctgtctttgaaggtaagactctaacagggtagaaaccaagcattgtgccaccaaggttaagtgcagttcttgcgccctcttcatcagcaaactcaatgaatgcaaaccttagaactgagtgtggatcaccacagattctgcagtcaacgacttgcccacagttagcaaatatatcagcaagtctctcctccgtcacagtatggtcaatatcagaaacataaacagttcgccgaatgctgtcttccctgtctgcatgccttgctctctcgttcatcctcctccttccttgactgaggtatccattcctcctccgccgctgatggtaggctgttaaccgacgctgctggtaggcgtcggcgccggattccttgccgcccccgttccagcctccgatcgagttgtagtcgaacaccggcgcgtccgccgacagcgccttcctggacggcgacgagaccgccgccgacgaggggacgaactccttggcagccgggttcagcttggacagcaggtccaccagcttctgcacgcccttctggtattccgcctccttcgccaccgccgccacggcagcggaatccgccggtggagccgcgcgcgatccccccgccaccgccgccatcccccagagccgggctcctcagaccagacggcacggccgaccaatcttggtcaaatcaaatcaatcgccgccttccctcgcgctgggctctacgcctctactcctacagaagcgaggccatccggtggctctggggcgggcggaggaggaggaggtggaggttgggggaggctaccgcgtggtggtgttgcgcgctcgagctctcgccaatggcgtcgattagtggcgagtgggttttgctttttacaaggttttggccatttttttttaattccccacgcgtccg

SEQ ID NO: 32579 - DNA, 549 bp, Oryza sativa
  Clone ID: PAT_MRT4530_36774C.1
atggcgacctctgtccggtggacggcaacatcgttctcggtcacaggcggctatggtgcagacggctaccggaactatggccgatgcaacggcgtgccccggcagccagctacgatcaagccgatagccagggcgcgcggtgcggttgcgcgcgacgtgacgatcaggattgcgaccgacgttgtggccaacgcggacggcagccggcgctacggccagcgcgtgcagtgcaactactcaacaacgacgggacggttcagcggcagtgcggcaacacagcgactgtcttggcttttggtgtcccgtgcagcttctgttcaaggaccatccccgaccacgtcgcggcaacgacaacgccgtacgcgcggcggcctctatcgtccctcccgctgctgcgcgccagggctgcgcttcaatgcgccacaggggcagcatgcatatccgtcggccgccgcgacgccatctttattcccccgttctctcgtcgcgcgcgcgcacttgttcactgtgatacgtcgcaccgtgctgttcactgttcagtcgtcgtga

SEQ ID NO: 32580 - DNA, 2542 bp, Oryza sativa
  Clone ID: PAT_MRT4530_36775C.1
cagcaaagcaagctgaacaagctgtccctcccgggaaaaacacacaggagctgaggtgcaagatgtctgcttgattgcctcctgcttcacttcactgcttctcttccttctccctctcctctctgcaatcttcttgtatttttctccctagctctcctgcatcagcatcagttcttgcctgtggctaaggatcttttgatcttcaaagggagagaaaaggatcttgcctgagcttcagtttcttgtgctgcctcctcctctgtgtttgtgtgatccaatttccaacttggaggagttcttggtttcctggcattgtgctttcttggacccagagcttgacaagattgggtcaatagtttgccaatctagagagagagagagaatacttggtttcttggcaagggggacaccagggcatagatctttgtagttaatagttgctcttgccctctggactgaggagtaaatagttgtgtgccagtggtctcttgcttcatcttggtcttgtggttctgattttctggtgattgttggagacttggaggagtaaagtaaagggtgaaaaaaagaagggaaataagaagaaaaaaaggtgacagattgaggttgttcttagtgtgtcaagatgaagtatatgaagcttggatcaaagccagatgtgtttcagacagagggaaacaatatcaggtttgtcgcaactgagttggcaacggacatcgtaatcattgtaggggaagtgaagttttatcttcacaagttccctcttttgtcgaagagttcgcgattgcaaacattggtggcatcgacaaacgaagagagcaacgacgaaatagacatctccgacatcccggggggacctgcagcattcgagatctgtgccaagttctgctatggcatgatcgtcaccctcaacgcgtacaacgtcctcgcagcccgctgcgcagccgagtatcttgagatgttcgagacgatcgacaaggggaacctcatctacaagatcgatgtgttcctgtcctcaagcatattcagaacctggaaggactccatcatcgttcttcagacaaccaagtcactgctgccatggtcggagaacctcaaggtgatcaaccactgcgtcgattcgatcgcgacgaaggcctccatcgatccgtcagaggttgagtggtcatacacctacaacaggaggaagctaccgtcggagaacggcctcgactcgcactggaacggcgtaaggaagcagcagatggtgcccagagactggtgggtagaggatctctgtgaccttgagatgtgcctgtacaagaaggtcatcatggccatcaaggccaaggggagaatcagcagtgaggtgattggtgaggcactgagggcttatgctcacaggaggctgttcagctcactggaaagtgctgtcagcaatgggcttgactgcacaaggcactctgcagctcttgagaccatcatctccctgcttccatctgaggaaggttcagtcccatgctctttcctccttaagcttctcagagcctcatgcttgttgggatcagatgaggcgtgccgcgacaatcttacgaagaggatcggcgcgaagctggatgaggcttcggtctcggacctccttatccccgctaactccgacgaggccgccatgtacaatgtggacatgatctcggcgatgctggaggagttcatggcgcagcaccgcgaggacgatgatggcgccaagctacaagaggatgatgatcaggaagccatggatggtgatgatgacaacctgaatggtgtctcccgcagctcgaagctcgcgatcgcgaagctggttgatgggtatctggctgagattgcgaaggaccccaacctcccactctcgaagttcatcgccctcactgagatggttcccctcgcaactcggcccgtgcacgacgggctataccgcgccatcgacatgtatctcaaggagcatccgggtttaacgaagggggagaagaagaggctgtgcgggctgatggactgcaagaagctgtcgccggaggcgagcatgcacgccgtgcagaacgagcgcctcccgctccgcgtcgtcgtgcaggtcctcttcttcgagcaggtccgggcggcgtcgtcggcgtcggcggcggcggccgccgacatgccgccggcagcgcgctccctcctccccagggagcaggacggcaactcgtacggcagctcgaggtcgacggcgaccgaggacgaccagtgggcgccgccgccgacgacgacgtccgtcgacgtcacctccttccggtcgatgagcctcgccaacaacaagaacggcggcgtctccggcggcggcggcgatcaggccgcctgcaagaagccgccgccgtcgtcggcgtcagcgaaggggagcggcggcggcgggctgatgccgaagaagatactgagcaagctgtggtctggcaaggcgagcagcggcgagaacagcagctccgacacgtcggagagccccggcgaggagacgaggtcgacgccgtcgcggaacacgaggcattcggtgtcctag

SEQ ID NO: 32581 - DNA, 330 bp, Oryza sativa
  Clone ID: PAT_MRT4530_36776C.1
atggcggcctccagtggtactgcagcaggtgaagacagcgagaagccacttgtgaaggagcccttgccgcaggcggaggtcgacttcatcctggcgtggaagagggagccatccccctgccccgacgacgtccactgggcgcttctctcgccggagcagcgccagctgcatgaggagatggctgccatgggcaaggagttcgaggacagcttcgaggaattccaggacgaggctcagctcaaggaaggatgggccgctatcgactggagcgacgtcgtctgcgctgactgggacgacttcaacgacccaaattgctatcgctcgctgtga

SEQ ID NO: 32582 - DNA, 1710 bp, Oryza sativa
  Clone ID: PAT_MRT4530_36777C.1
atggcgttctctatcgccggcgcccgtgccggcgtcatcccactccctcctacatgggatctctccgcccctccgcccattcactcggcagcatgggctttgttcgaaagatccatcggccagtggaacaatgactacgccatgaccaccgtcttcacgaggacaagcaacgaccgagacatccttgtctccctccggctcgccgcaccgccagcttcctcctgcgtccagttctacaccgatgacaccggagcctatagcatggtgtggcgccaccagccctccctggtgactgcagacggcgacctcctcgtccacacgatccatcacgacgtggacactctgaagctgccgttgttcgagtgggaggtggatggcacgctccagctcgaggaggagttctggtctctcccaagctaccagggatcacctctgccacggattacgccgacgttcccggtcttcagcatgcacgaggccgacgttctccacttcatactggacagacctggatatgatgacaagtgttggcatcagtgcaccccacgcgtccgcgacgccggcgccgacgaggacgcgcgcgcacaagctagcagcgtgccggcgacgaggccgtcagccatgggcacgttccttggccacttcgtcccaggcctcgccttcgccatcctcggcttgtggcacgcgctgaacaccgtcagggcgtacaagctcaagggcgcctccggcttccgcgccgccgcgtggttccccttcccgtcgccggtgcccggcctgaagcacctggagctctacctcctcctctccttctccgtgctcgccatcgtcgaccagctcgtcgacttcccactgctctcgttcactatccagccggacgccctcgagcacgccaccatgtacctccacctcgccgtgtacgcgtccgtggcgctcgccgccgacggtgtcgctgcgtcgtcctcccaccacggcggcgcgcaggcgcagctcggggaagtggtggccgcgctcgccgcgtcggtgttcggccaggagctgttcctgctcaggttccactccgccgaccacgcggggctcgaggggcactaccactggctgctccagctcgtggtcaccgcttcgctggtctccacctccgccaccgtcgtcctcccgaggagcttcgccgtcgcggtggtccggtcggcgtcggtgctgttccagggcctgtggttcatcgtcatgggcttcgcgctgtgggtccctgccctcgtgccgaggggttgccacggcgcggaggccggcggcggcgccatgcggagcgcggtggcgtgcccgacggacgaggcggcgcggagggcggtggtgatggcgaacctgcagttcagctgggtgctcgccggcgtgtgggccgtgacggcgtacctgtgcctcagggtgggtggatcccggagcatggagtacaggcagattcaggcgcctagcggcggcgacgtcggtgccctcgccggcgacggggacgcgacgcagtcgcagaaacgcgtgttccccgtgtcagacaacgtgtagaaagggaggagatgtcgcgtggcggcagcaaacactttgtttgcactggtggatggcagaaaactgggccgaggttttgttgggcctccagattcagtgccatttgtcacttgggccttttgtaatgtactctgcaataaatttgggtgtatggccattttt

SEQ ID NO: 32583 - DNA, 226 bp, Oryza sativa
  Clone ID: PAT_MRT4530_36778C.1
aagcttacgcaaccatcaaagaacaactttccaaactagtcaaaatcgaaaaggaagaaacttccgaaagcaaaacgacaatcacatgtcttatcgatcctggcaactttagaatgtagacgaattgattaagaaatcaaaaggcggaggaattgaagttttgaacctttctgtaacagaagagggagaagccaaagtacaataaaaattacaaaaaaaaaagctt

SEQ ID NO: 32584 - DNA, 242 bp, Oryza sativa
  Clone ID: PAT_MRT4530_36779C.1
atggcgcctcacgactcctcaagctggggttgcgggcccggcggggaatctaaaaggatatcatcgcgtggcccggcggggagatgggacatgtcaggccgcacgtcgcctgacacacaagcagcacacaggcgcactaccccagtcccatcggtcattcgaccggtcacagaccggttgagtgcattgcacaccgcattaaatgcggcgtggcgcgactactcgggacgccataaatgcgg

SEQ ID NO: 32585 - DNA, 304 bp, Oryza sativa
  Clone ID: PAT_MRT4530_3677C.1
gggccagtaaaacccaatacaaaataattatgaaactataacattacaaaatcatttttttgagataaaaaaaaatttccaagcagcttaaactctaaaaaagctttaaaaaggtttatactggccaattaaaagtgagttggcacaaaagtccaataatattcctaaattaaaagtaggggaatttttttttgagggggggaaaaaataaactttaaattttgaccaaaccctggtttgccggggtgaatcctcaatcttgaaattggggacctttccaattaaaagctaggttaacaaaaat

SEQ ID NO: 32586 - DNA, 879 bp, Oryza sativa
  Clone ID: PAT_MRT4530_36780C.1
atgatcagttcaaggaagcttgctcaattggccaagaagtggcagatgatggtggcatccagtgggcggcagactgcaaacatcgatggatgctgcagcacagccacagtgtatgttgcagataagggccattgcgtgttgtacaccactgatggggcaaggttcgaggttccactgatgtacctcaacacggtggtcttctgtgagctcttaaggatgtctcaagaggagtttggcttcacaagcgactacaaaatcacattgccctatgatgccgcagtgatggaactcagaaatggcactgaccctgaaatatggacccaggctacatgcggtcctcatgaggcatgcgtcttggacaccaaaacaggtcagtatagccacacaatgtggtgtccatacatccacgaactatttttgtggcaagaaagaaagagagcaaccatgatcagtgccaagagactcgctcaaatggtgaagaagtggcaaagaatggcagccttcggcaggaagagacttacatggacggcgcccaaagcaaccgataaatgctgcagttctgtggcagtgaagggccattgcatcatgtacaccgccgatgggaggcggttcgaggtcccgttggcgttcctcgccacgacgatcttcgcagagctcctcaggatctctcaggaggagttcggcttcacaagcgatggagggatcacattgccttgtgatgcagaggttatggagtatgtcatgtgcttgctcaaaagaaatgcatcagaagaagttgtcagggcattcctgagcaccattgtgaagccttgccactatgggagtggctttgcacaatccttgggatttgtccaacaagtagcagcttctagcttctga

SEQ ID NO: 32587 - DNA, 1386 bp, Oryza sativa
  Clone ID: PAT_MRT4530_36781C.1
tcagcttgcgaggaagctgcagaggatcaagacggccgccagcaacagggaggacgacgacgccggctgcacgtcgacctcgccgtcgccggtggcggacaagggccactgcgccgtgtacacgtccgacggggcgcggttcgaggtgccgttgccgtacctcggcacgacggtgttcgtcgagctcctgaggatgtcgcaggaggagttcgggttcgccggcggcgacggaaggatcacgctgccctgcgacgcggcggcgatggagtacgtgatgtgcttgctgaggaggaacgcgtcggaggaggttgagagggcgttcctgagctcggtggtgacgatgccttgccagaattcaggtccaacagttggcaccatagaaccagtgtagtggcaagatgccaccatggagctcagcaatgctttctccacctcaaccgaagcatttctcctgagcaagcacatggcatactccatcacagcagcatcacaaggcagcatgatcctgccatcgatcgagaaaccaaactcctcctgtgacatccggaggagctcactgaagaccgccgtgccgaggtacgccaacgggacctcgaatcggctcccgtccgccgtgtacatggcgcagtggcccttgcctgccatggaactgcagcattcttgatcttgtttggctctcactgtgagcctcttccttccgagtgctgccatcctctgccacttcttggccagctgagcaactctccccaaggattgtgcaaagccattcccatagtggcaagatttcacaatggtgctcaggaatgccctgacaacttcctcggatgcatttcttctaagcaagcacaggacatactccatgacctctgcatcacaaggcaatgtgatccctccatcggttgtgaagccaaactcctcctgagacatcctgaggagctctgtgaaaagcgatgcccataggggcaagatttcacaatggtgctcaggaataccctgacaacatcctcggatgcatttcttctaagcaagcacaggacataccaggagcgccttctcaatctcttcagaggcatctctcctaatcaaacacatcacgtactccatcactgaggcatcacaaggcaatgtgatcttgttgttgcttgcaaagccaaactcctcttgagacacccttaagagctcacagaagatcgccgtgttgaggtacatcagtggaacctcgaagcgtgccccatcagtggtgtacaacacacaatggcccttgtctgcgacatacgctgtggctgtgctgcagcatccatcgatgcttgcagtctgccgcccactggatgccaccatcctctgccacttcttgcccaattgagcaagcttccttgaactgatcat

SEQ ID NO: 32588 - DNA, 1320 bp, Oryza sativa
  Clone ID: PAT_MRT4530_36782C.1
atgggggcggagaaggcggaggggatggaggagctggagctggaggagggcgggggctcgccggctcggtggccgctgacggcctccgggaagatgcaggcgctggacttctagcacttggggtcgctcggccccgtggcggggtcgctctcgaccggtagaaagtggcggagggcggtcaccagcttgcccgtcgtcaccttgcaggccaagatcaccgtcctcctctccttcggccctctcgccctcatgctgcaatgcctctccgcctatccccaaggatgggttttcctttttagcttattaggcatcacgcccttagctgagagattgggagatgcgactatgcggcttactctcttcccgggtccgagaattggggggctgttggatggtaccattgtcaatgcgactaagatgattatctcattgtacccatggaaacactgaaaaacgggtttattcgtgtaatcgataataggctctatacttttaaacattcaattggttctcggtttcgctttcgtcctttcttctctggtggtcttgaccatcccagcagggaccaggtcttcaacaaggcgtcaaacgtctgtaaactcaggattgcttttgatggctgtcttgggtctaatgtttccagcagtacttcactttacacattctgaagtgcagtccgaagtttccctttcaaggtttagtagctgcatcatgcttgtggcatatgcaagctatctgttttttcaactaaagagccagcgaagtctgtacagtccaattggtgaagaagaagaagtaactgaggatgaggaggaagaaaaggagataacacagggtgaagctatctgttggctttttgtgttgactatttggatttcgattctctctgggtacctggtagacgccatacagggggcctctgaatcattaaacatgccagtggcctttattagtgttattctgcttccaatcgtgggaaatgctgctgagcacgcaagtgccattatgtttgccatgaaagacaaacttatcccattctgtgtggtaattggctggataatgggccaacaaatggacttgaattttcaactgttcgagacagcaactctttttataacagtactggtggtggcatttatgttgcaggaaggaacatcgaactattttaaaggccttatgcttatcttatgctatctcatagttgctgcgagcttcttcgtacatgttgatcccgattcaacgttgcagttcaagggacactggataactggactacatagtccatacacatttccaaacggtgccagttgtgcaacatga

SEQ ID NO: 32589 - DNA, 312 bp, Oryza sativa
  Clone ID: PAT_MRT4530_36783C.1
atggccaccctgaaggtgtacctgctgctgttcaccgccttcttcctctccggcctcatgcagctgtccacggcgacgcagacggcgccggcgccggcggcggctccggcgagggtgatcgacgccaaggccattgatcaggcgatcgcctacctgctcatgttcgcggcgctgagcgagatggcggcgtcctctactacatgccgcaccggccgaatccgccggggcatggcgatgacgatggcaggcgacgacgacctcggagacgacgggacgacgacctcggttggcgacgacgtcgatgacagctag

SEQ ID NO: 32590 - DNA, 524 bp, Oryza sativa
  Clone ID: PAT_MRT4530_36784C.1
caccaacccgacagggttgatgccgccccccccttcgccgcctagttaatcctcaactcatccaaaagaaaacagagggaggttaaaaaagctttttttttcacacgcaactatggacagccgggacatggggcccaaatggcccattccggcccacccactctaggataacaaacccggggccaaacagggcttccttccttaggcgggtaaaccccctggggcttgacaggggtctggagctaatccggaacaactggggtggtgacaaacaggttcataacaaaggacaagtcttggggataagaacggggtcaacgtcggaggagttgacggggttaaaagtcgccgggtaaacccggtgggccatgttgaagctgatcggaaccacctcgtcgtcgacgaaaaacgggttccgaaaagacccaagcacccgccgaaaagacttggggcggttctgggggatggggttcaccgagatccgcatcctggtccatttgggcaacgaggtggggctgaggggg

SEQ ID NO: 32591 - DNA, 566 bp, Oryza sativa
  unsure (1)..(566): unsure at all n locations
  Clone ID: PAT_MRT4530_36785C.1
ttttcattcaaccccctaaactttataataccgtttatataacccctaagatggttttgcatagtggggtttttatctaatttatatataagttggatgagtttgatcacatatcatactctttagagtaaaattttgacttaaatatttatttttctacttatgagctctcacaaacaagtacctacatgataatagtataatattactgaataagaataaattgatgagttgcaactgatgatatgcaaatgtgttatattacttatttaaaattgttcgtttaagcttccaaaatatacaaaaccatcatccaaaaccaccttagggggtgatatggatgatatggcaaagttcggggggttggataactgattttaaagtttagggtgctagacggattttcatctaaagtttatggatgtatttggactttntcctattatttatttattgtgtgtgttgattcgatcgatagtacatgaagatccattcgttgacacgtctcacctctattattactcttcctatcgntnttcataaaaagagaagatggtttgaatact

SEQ ID NO: 32592 - DNA, 273 bp, Oryza sativa
  Clone ID: PAT_MRT4530_36786C.1
atgggcattctttcttactacttttatatttcagtgccgatcagggagaaagacgagagcaactggtttcgggagccggacaacgtgcagcagacgatgatctgtggaaccatgattgtggctgatgcttttagctggataatggaggcaaccaatgacagcaaatgtggatgcctacatcatcgttgtagggcacatggaggggctgtcttggtgaagttccggggaggcgactacctctggggcggtgaggtcagcttgactggggcctag

SEQ ID NO: 32593 - DNA, 424 bp, Oryza sativa
  Clone ID: PAT_MRT4530_36787C.1
ttggttttttttttttttttttttttttttttttttttttttttttttttttaaaaaaagccagctttgccaaaaggcttttatttaaatatagacttacaaagaccccaacaaggggtccaatgaaaaatatccagggtctcccccccctggggtgctccttacattaaaagaagggggataggtttggccccccttatccaaattaaggcgtagcccattgcccctaaaatttaacaccagttcctccccccctacaagcgactcaacagcaaggcgcaaccaaattttacccaaaatttgaagcttttcacattttaacaggacgcgcgatcttgaaccactccgtgtggaaggggccgggcatgtcccccctctcgtgggggggcgcccccaaaaagcccctttgggcccgcaccaggtt

SEQ ID NO: 32594 - DNA, 406 bp, Oryza sativa
  Clone ID: PAT_MRT4530_36788C.1
ggtggggtggcccgtccggtcggtgggtgaggaggcggcggatccgccgcgagagacgccggagatggtcaggtccggggagggaggaggcacggagggaatcgttcacaagagatgaaaagaaagaagagagaagagagagagtagagagtagtagcgtaggccaatgagctggaggttgaagacgatctatcagaccgattggatgggcaatccaacggatgacatagcactccactgctatctcctcctttaatttaagactgaattgcacctttgtgcgtgaaacgtttcactttgcatctaccctatacacaactgatgttttactttggactagataattttatctttattacataatggaccccctaactctctttgttaaaaaaaaaaaaaaaaaaaa

SEQ ID NO: 32595 - DNA, 300 bp, Oryza sativa
  Clone ID: PAT_MRT4530_36789C.1
atacatgagcagtgcaaaactgcatttatttggagacggtgggagtataaattacaaacttagtactaacagatacttccttcatttcgcaatataagttattctagcatttttcacgttcatattgatgttaatgaatctagatagatgtatatgtctagattcattaacatcaatacgaatgtgggaaatgctagaatgacttacattgtgaaatagagaaagtggattagaatagcgggtctaagaaaacagtttctctcagatgcatatggaccaaataatccgtggcgataattc

SEQ ID NO: 32596 - DNA, 366 bp, Oryza sativa
  Clone ID: PAT_MRT4530_3678C.1
atgtcgtccgtgggggaaacacaggagagtcccaggcaactcctgattctcgtccaaactgccctcgtgtactcgcaagcgtggaacatatgggcacatgattcagcatccttcccgcaaaggcttccaagaaaacaaatcaggctgagtagggttcaaggaaacggtggcaacaaggtcccagatttggaggaacacaggattggggctcggttcaggatcgaccccccatctgggagccagtcatctgtccagaagaaggaactcttcccgtcacccagcacaatcctgcatccggccgctagacaatgttcggctttcctatcttgcggcaatgtgaaggacacccagtggcgctccggctag

SEQ ID NO: 32597 - DNA, 183 bp, Oryza sativa
  Clone ID: PAT_MRT4530_36790C.1
cttccggggagggaagggttaaggaaaaatctttcaaggtgagctcgtcttttcccaaaaggggatcaacccccttattattaaccccccagaacttgagaaacgcaacccccgagaagccgcgaaaattattaagcagcggttccccgaggggggggacattattaaaaaaggggagatgtg

SEQ ID NO: 32598 - DNA, 1203 bp, Oryza sativa
  Clone ID: PAT_MRT4530_36791C.1
ctgcttccagtccagcccgctcgccgtctcgccattttgaccagaccacctcgctgcctctgctctgctcagtgctgctcactgcctcactcacactgtcacagtgctcttctgggtataagtagctgggcgcgcggcgtcaccttccttggctgcccgtgagcttcccgcgcgcgccatggcacggcctcgtgggcgtgggcgagcttcttggtaggcgaggtgtcgccggcgatcgagttgtctcgagaactcagctatgaggacggcggccacgccgcctctcgccgccgccgccgccgccgtcgcggcagtgttcctctctgcgttgctgctcgcctccgcctccgcctccgcctccaggctccctcctcctcgccgtcttcttcccctggttggtggcgaggtggcggtggcggtggtggctggggaggaggagaaggtgcggctggggtcgagcccgccgagctgctacagcaagtgctacgggtgcagcccgtgcgtcgcggtgcaggtgcccaccttgtccgccccgtccgtccccgccgccgccgccgccgccgcacgacgccgcgccgctcgtggcgacgttcaccaactacaagccgctagggtggaagtgccagtgccgcgaccgcctgttcgacccctgaccctgaggcgcgcgcgccccgtggcgcgccgtggcgtggcgtggcgcgtgcatggcggggctcgcgctcgcgctctcgctgtgaattacggtgtgtgtggccgcgtcgcgtgcccggcagcacatggcgctgcactgctgctgatgctggtggtggtggaatcgttgtcgtcgcgtcgggctgagagggattgttgatagattccgtgtaatatgccaggacaaaattttgtcaccgctgctgctgcccatgcagctggatcggctcggctactttcaccacctatactgtatctttcactggcatctgctcgccgttttggaatctctgcggtgtggggttgcctcttgcatgtacacatgtttttcatgtatcgatccatgcctcctccatggaatctaatgggaatccatcatcgttcatgctggatggatggatggatgtagtgaatggtagtttttcttatttttgttggagatggatattttttactttacatctaatcggatatatgttgtcttttaaattgagaaaaaaaaaaaaaaaaaaa

SEQ ID NO: 32599 - DNA, 261 bp, Oryza sativa
  unsure (1)..(261): unsure at all n locations
  Clone ID: PAT_MRT4530_36792C.1
nncgagccgccggngacatcttcatcaaccccaaattccataacgataccccttggccttaaacaacctgccttcagtccaataagaagatatgggggccaagtctaacaagtcgctttacttcgacaagctcaagggcttgctcgagaagtacacctccatcttcatcgtcgagatcgacaatgtcagctctcagcagatgcacgagatccgacatgctctccgaaacaagggtgttgtcctcatgtgtaagaacaccat

SEQ ID NO: 32600 - DNA, 133 bp, Oryza sativa
  Clone ID: PAT_MRT4530_36793C.1
gcaacaataagactcaaagcatccaatttttaacccaagagaattaaacggggtgtaaacgactaacatagtgcacattgagagcgaatatccacggaccatgcgacgaagtgccatggcccgtgggcaaaac

SEQ ID NO: 32601 - DNA, 690 bp, Oryza sativa
  Clone ID: PAT_MRT4530_36794C.1
tttttgcaccggccgccactaatctgcgggagagagcgttcgttcgttcgccggcgagagggagagtggcaagatgcagatcttcgtgaagacgctcaccgggaagacgatcacgctggaggtggagagcagcgacaccatcgacaacgtcaaggccaagatccaggacaaggaaggtatcccgccggaccagcagcgtctcatcttcgcggggaagcagctcgaggatggccgcaccctggccgactacaacattcagaaggagtcgacgcttcacctggtgctccgcctccgcggtggcagcaggggcggctaccccaaggggatcgagcccaacctccgcgagctcgcgcagaagtacaacgagaacaagctggtttgccgcaggtgctatgcacgccttcccctcaggtccaccaactgccgcaagaagaagtgtggccacagcaatgagataagggcaaagaagaggtttatgtccaagctttcgaagtgaaccactggaaagctccgtcgtggatcagttcaatcgaccgccttgcagcttttataccttcttattagttactttgtctcttcatggagagatgcttatgagattttgctttcaagtttctgttactggattttggacaaatctctatgaataaagttttggtataaaattttatttaaaaaaaaaaaaaaaaa

SEQ ID NO: 32602 - DNA, 2844 bp, Oryza sativa
  Clone ID: PAT_MRT4530_36795C.1
tcagttgcggaagaagatgaagtggatccagaactcatgctgacggagcctcttcagcttgagtgcttgtgtcgtccccaaccttgagatggtgtccactctttgatctgttgttgcaatcctcctggcgatacgcagtagctctggatgttcttccggatctgcagttccaaaggcaatggttcggaagaagtaccagaactcgtggcgtttgagcctcttgagcttgagtgcttgtgttgtccctaaccttgagatcgtctccgatctactgatgactatcattttgctgcaaccatttgcaatggatgagcagaatcctctccatgtctcgtcactgatatcgtcgttgacaagctcaacgacaaccagagacatggtactagaagcaaccagctcacttgtcttgaagaaactttcttgattctcttcattgttcaaatcatcgctcttgaaacgaacaacccgtgagaaatgctcgtgcacgctctcctcgttgcagacgtgctcgatcagcgtgttcttcccgacttctcgggggcggatgattggaagaacacgcaaaggagaatcacaaggttgaagcagaaattcacggatcagctctttctcttcgtgccgaccaaacatgcacttctccctgaacaggtgagtgtcgtatggtcgctgaggcaagcatgggcagcctagcaagaacacaacaaactccttcttcgagtcatcgatggcagattccaaatcctccatggcagcctgaagcttcttcagtttgagggatgatgatgatcgccttcgtttaccggtgatgtgctgttcttggaaggcgttgagaatgtagtagccttggtacatgctctgcattagctgcctgagctgtaggagcataccttggttggagatctgccggccatgggcttcctcgacgatggttcttgctctgaggagcagccattgcagacgctcaagcttatgatcggcggtgctttggttgctgtacttcgtgatgagggaggagatgaggcggctgataatgtcactggcaacatcaatctcatcatcttcgtcgtcttctacaacatgcgcaaggggatttgcttgcatcttcttgaaatggcttataaagtctgttgcttctgtgatgagagcattccttgcagccttcacaccacctgcctgttgagtcttgacagaatccagagctttggaccctgcagcttttttacgaggccttgttgtgccttctctgcgggacaatcggtcaacatatttctcatgtaagataacattttttataggcttcagaactgctgggctcggttcagcggggtttatgccaacattctttacagtttccaaccttgctaacagttttttccctgaactgttaggagtcccaggagaatcctcaaaagagaattccaccggtagaacagttggtgatgtctcgaaaattgagaagtgatcagcctcttgagtttggtcagtgaggcactgcttcttcagtaaatgtctcactgtcttctgtgctgctaggctcttctgcttggcagtccgtcttctgaaggaaggttccaggacgtttggatgttttggatcagacaatgtgaaatgtccaagaggagaaaatttcattttacttgttctaggacgaggagcaattggagtcggtgttgaaagatcagcatgaactctgctcaagcactcttcagcagattttccaggaaccatcctcatagaaagctttaccacggtatttttctggctccttcttgatgaactctcatgattctggtccatactaaaagcattttgactgttttgattatgacggagccgtagggatcttcggaaaggcacaattgctgactgctttccccttaccatagattccttgcacaccccgtcgaccaaagccgggggattgccagcgaggcgtggggaccgacggggaggagcaggcaacaggggcttctctgcagcgtcctgactccggctgccgcatttacccgtatccttggctttcttcggggcagctcgcctcttgaacgattgggcctcctgctccctcttcttcttctggttcttggcatgatccatttttgcaaccggtgactcctcatctcctagctgctcagtttccttgtcctcctctccggtgtcatgcccgcatccccaccaccagccgttcgcagcgaacttgcaccatcgcctctctccatcgccatccactgggctgtcgtgaactacgtcgtcttcgtcttgctcctgcgccccccaccggcaaaagctagggtttcgaaaattgcaaaccctggtcacagaccgaatgagcacaaacctgtcacaccatttgtcatccagttgcgtccgccactgttccctacctcctgcgccatctttcgtaaagccaaacaccgtcgcaatcgactctatgtcaaccaatcggcgttacttccacctctttatcgtgacagccaccatttcaacatcatcgtcggtggtgactcaccctccatgtgcggtagccatcacatgcacacagaggaggcgtcgccgtcggggtacttgagctgctgttaccatttcatcctcatgttgagaccttgttcacagacattgtctccttactgcttcgtccaccattcttttagcgcacgccgagatgttgctggattggagctccaccacttcgcttgtactctgtctccacgctgttgtcattcctcaccatcaccagaagagcacggctgctgcatcgccaatcgagccaacactatcaccttaacaaagtgcatgctttgcttcggagcaaactatactttccacgagagcttacccattatg

SEQ ID NO: 32603 - DNA, 258 bp, Oryza sativa
  unsure (1)..(258): unsure at all n locations
  Clone ID: PAT_MRT4530_36796C.1
gntcgatccctccatccacaaaccctcctcnatctnatcttccttcgtntcgtcaatggcggcgagctactcgtgccggcggacatgcaaggcgtgcagcacgagggcnatggccgggtgcntggtgggcgagccggcgtcggcgccggnggcagcgggtaacgttgctggcnatcnacggcggcggcatcaggggcctcatcccgggcaccatcctcgcnttcctcgaggccaggctgcaggagctggatggccccn

SEQ ID NO: 32604 - DNA, 4026 bp, Oryza sativa
  Clone ID: PAT_MRT4530_36797C.1
cccagaagcagacccatccacacaatcaaagaagaagagtcagaagaagagaggtgagctggccagcaatggaggcgacggcggtgagcgtgggcaagtcggtgctcggtggagcacttagctatgcccaaaccgcgatcgcggaagagggagctttgaagctgggcgtccagcgcgaccaaagtttcatcagggatgagcttgagatgatgcagtctttcctgctggctgcggacaaagagcatgatggacatcatcacgaggtcatcaggacctgggtgaagcaagtacgtgacgtggcctacgacgtggaagactgcctccaagactacgctgcccggttgaagaaaccaccctggtggagcctcccttgcacagtacaccgggagaggcgtcgcatcgggaacgagatgaaggagctgagagccaaggttgaggatgtcagccagagaaacatgcgttaccatggtgtgtctgcagctgccccacagtcttcttctgttactgctgctgagctgctgcaatccactgccgccatcgacgacattgatgaggctagacgtgccgccaagcaacaagaaaaggtggacctcgtgaagctcatcaccaacgacggacaaggtggacttagagtgattgctgtgctggaaacaagaagtggacctgctgggacagtgcccgttgttcgagctgcctaccaaaagctcaaaggagagtttgaatgccacgcctgggtaaggctgatgcactcctttgatgcaaaccaattcattgggagcttggtgaggcagttcaaagcgaactctcgcgagggtactggcaagacaccacaaggaacaccttctggggtgtctgttctgaatgagatggaagcacaagattataatctgcttcatgactttactggatatgtgaccaacaagaaatacttggttgtgcttaatggcctgtctacaatagaagagtgggactggataaaaacttatcttccaaacaatcataacgggagccgagtcctagtgtgcacacagcaagctgaagttgcaagctgttgtacttgtaccgatgataagtacaaggtgtctgagattcaacacgaagggtcattttccaaacctctttatgtcttctacaaggaggtggtctctcagccagttaattcagattccactaagatgaaatcagagaccaggtccagcatggagggtgcctctactactagtgacagcaaaacagtaccttctgatggcgtgatacaggaggatggcccgaaggacctgcctgaaagcagtttaccccctcacctcaacagagattccaacactgtgtctgtgaaggaactttctcgcagcacgacacagctcattggtagaggaaaagaaaaggatgacgtcatcaaactgctttctgattgtaatccgatccgtcaagtgatttcggtgtggggaatgggtggcattgggaaaaccactctcgtcaaaagcatctatcagagctccgagcttgagaagcttgggtttgagaggcgtgcttgggtaactgtattgcgtcctttccagcttactgagctccttaggagcttagctcagcggttggttaaagattcccctggaaagaaggtagaatctataccaggacttgcaaggagtggtttaagcacgatgggatctgaagaattaattgacaagttgaagcaagatttaactgggaagaagtacctcattgtccttgatgacctatcgactactactgagtgggattcaataataagaaacttgcctataaacaacaatggtagccggatcatactgactacaagatttaaacttgttgcgcaacattgttccaagaaagaaatgaacatgcacaatattgaaggtctaacagacggagatgctcttgagctattcttaactaaggtacgcatggatggtgatgaatcagaattgaaacctgacttgaaggaggaagcaaaaattatcatcaagaagtgtggccgacttccccttgcagtcgctacagtgggtggtttcttgtctgccagacctcgaaatatcatagaatggagggagtttagtgatcgcatcagtgaagaatttgataacaacccaagtcttgagatgataaagaaaatacttgcatcaagctatgagggtttaacttaccacttgaaatcttgcttcctatatatgtcgattttccctgaagactctgacatcagatatagacgattattgaggcgatggactgcagagggttactcaagagcaacgagaaacaggagcaacgagaaagtggcagaagaacagttcacagctcttctcaacaagagtatgatccaacaatcaaaaacgattgccagtgggaagacaggtttctgccaagtctataatctcatgcatgaaatcatcatttcaaagtctgaagaagaaaaccttgttcttgttctagatgaccacatcacctcgcgctctaaagataaagtacgccaccttgttgtgagcaagagctggagcagagaaaagaacgatatgcaaaatatagtggatgtgtcccacatacgatctctgacagtctttggggagtggaaatcatttttcctttctaagaagatgaggatgcttcgagtgcttgatttagaagatgcagaaggtcttcaggatcctgaccttgtgccaattggaaagcttcatcatttaaagtacttgtctctacgaggatcttttggagtcttcaatcttccaaattcctttggtaacctgttgaacctggagacactagatatcaggggaacatgggttacaaagttgccagcaaccattggtaggctccaaaacctgaaatacgtccatgccggatctttagatgatgaggatgatcagccgataattaaactactgcatcagttcagatcaatccgagaagagatgggaaccaggttcgctgtatcatatatcatgttgttcatcaccgcttggttaagaaacctggatgtatgtggtgttaaagtgccaagagggattggacggttgaggtccattcacacactgagcatcgtgaacattgcacggggaaaggccttgctcaaaaacctcaaaaagctaacccaactgtgtaaactaggtgtgactggcatcaacaagaataactgcaaagagctctgttctgccattgccgaccatggccgcttgcagtccttattactgcgggcagagggtaatgctgggttagaaggttgtttggataacatgtcccagcctcctaaagaccttaagagcctccagttgtacggcaatctggtgactttaccagaatggattaaggatcttaaaattctacaaaagctgagccttcgcaacaccaatctgaaggcagatactaccatggaagtgcttggaaacctaccaatgctagccattcttcgtctccaggacaatgcgtgtgaggaggaagaactctgtttcggtcccgagcgtttcacaggtctgacgtcattggagcttctcaattgggagagcctcaagtcggtgaaatttgaacgaggagctactcctaaactgaaggtgctactgctgcactactgttggcaaatacacaatggtgggttttctggcatagaaactctctcgaccctaaaggaagtttcaatcttgggctataattatgaccagacctacaccgaattcaaggaacaattacagaagcaacttgacatgaacaagaacaaaccaaatctaagtattctgtagtccaaaactgccactggctttcatagaattgctccctccacactcaaatatgtggcattgtgtcattcaggtagtgtttcaaatttcaaaatcatgtataattatgacaatttcaacattaagttttactcccttttttctcctcatgtaccatacgctttaagtaattaagtgtataagtttagtttagtttcatggtgaaaattgtagtacctttaccatttacttccagtggcaaagacaacagaaaacacaaagtggttcatctatttatcgt

SEQ ID NO: 32605 - DNA, 350 bp, Oryza sativa
  unsure (1)..(350): unsure at all n locations
  Clone ID: PAT_MRT4530_36798C.1
gaaagagacctgacccccccccctcccccccaatntccataggagtgtgatttgagctctcaagaccccccatctttggtttcgaggaattaatcgtcgagggaagaagggaagtagaaatggcgacgcagtgggttctccaatatggtgatggatganccgagcttttttcaccagtggcagtcggatgggctgctggagcagtacacggagcagcagatcgccgtcgcgttcgggcaggccggcgaggcggacgcggcggcggcggcggcggcgatgatggttcagcagcagcagtacgcggcggcggcggcggcgganaaccggccgcggaaaggcggctgaaaggt

SEQ ID NO: 32606 - DNA, 2266 bp, Oryza sativa
  Clone ID: PAT_MRT4530_36799C.1
ttcatttgggcgaaaatagaccccgtaccatagcaatcaactacagctttctacaggaacagagccatgacctaactgaccttgaggaccctttcatagaagatgaaataaaataagcaatctttcacgcaagatcagataacgccccaggtcctgatggcttcacaggtgcttttttcaaaaaatgttgggagattatacaggaagacgttgttctggcgataaatcaggtggctaaccacgacactcgaagcctttggttactaaactcggcctacattgccctcttgcctaagaggagtgaagcacttcgagtaggtgattatagactgatcagcctcattcatgcctttgggaagctcttctcaaaattattagcaaacagattggcccctaagctccaacagatgatctcaaaaaaccaaagcgccttcaaaaagggaagaaatatctaggacaatttcctcttcgtcaacagcctggtgcgcgaactgcattcctccaaaacctcggcgatcctcctgaagctagacattgcaaaagctttggacactgtcagttggccataccttcttgatagactcagacacctggggttcggagacaggtggattggatggatcatctctatcctatctacgtcctcttcaaagatcatcctaaacgggaaagcaggtgacagcttcttgcacggaagaggtcttcgtcagggtgacccactctcccccatgctctttattctggcgatcgaccccttacagagattacttgctaaggcacaggaagagggcctactccaacctctccaaaggcggacatctcgtttcaatgtagccttgtatgctgatgacgcggtggtgttcacaaggccagataaacaggaacttcagacagtacaggcgattctccataactttggactctcaacagggatggtcactaacctatctaagagcgaaatctacgcaataagatgtgaagacctggacctccaagatattatctcccctttcccagcgcaattgaaggccttccaatgcacatacctaggtctccctttgcacatcagaaagcacaaaaaatcggatgtgcaaccactcattgacaggttttcagctcggcttccgacatggaaaggaaaattgctgaataagacaggtcgaacggttttgatcaaatccaccctttctgccctcccaacttatcaccttacagtcttccccctaaagaaatgggctaaaaaaaagatcgacaaaatccggcgcggattcctctggacaggatcagaacaggcacagggaggacactgcttagtaaactggaagagggcctgcagaccaaagaacatgggagggctgggcataacaaaccttgagctcttcgaccgttacttaagacttcgctggctctggcaagaatgtactgcagtagataaaccttagcagggatctacccttccttgtgatgaaacagatcgacaagttttcagggcttccacggtgatcaccttaggaaatggcaacaggacaaaattctggcatgacagatggcttgaggggtcatcccctaaagagctatacccttccctctaccagatagcaacaagaaaaaacaaaacggtggcacaggagcttcaagacaaccgttggttgagacagatgcgaagaatgaacaccacagttcaagtcagagagttcatccccctatggcaccaaatccagcaggtcgttctacaagagcaaatggatgacacgattatgtggcggtggacttcaaatggaacctactcggcaaaaaccgtgtacaggattcagttcgttggaggcatccaagataacaggtcggatttcttttggaaggcaaaagcggaaaataaatgcaaattcttcggttggcttatgatacacaagaagattctcactgccgataagcttcacattcgtgcttgggacaacagtcacatctgccctctttgtggtgtagaactggagacagccactcacctcctcatggactgctcctttgcaaagcaagtctggagactcatttggcagaaagcaggccttcatatgccactagcctctcttttcaatggagacatgctagcatggtagacagcttgcaggagagagatggtgaaagaacagagaagaaattttgatggcctcttcatctacacagtttggggcatttggcttcaatgacatgctaggatcttcaagggtgcttcatcgaacccgagcaaacacaaattgaagatctctca

SEQ ID NO: 32607 - DNA, 834 bp, Oryza sativa
  Clone ID: PAT_MRT4530_3679C.1
ttcttgtggaagggggatgaggatgcactgggtggatgcaacctagttgcttgggataagctctgtctgccgatcgaaaatggcgggttgggcatcatcaatcttggcagaatgggcattgcccttcggacgcggtggctttggctgcggcgtgtctagccggagcgccactgggtgtccttcacattgccgcaagataggaaagccgaacattgtctagcggccggatgcaggattgtgctgggtgacgggaagagttccttcttctggacagatgactggctcccagatggggggtcgatcctgaaccgagccccaatcctgtgttcctttgttaaaaacagaggcagaacggttcattcggcgctgcaggatgatgcctggaccggcgacatcaggggaggtctttcactgtaagcgatgtttgaatacctccaaatctgggaccttgttgccaccgtttccttgaaccctactcagcctgatttgttttcttggaagcctgccacagatggtggtttctcagtaaaatcagcctattcactcctctgcactgggaagacacgctcggcggttgggaagctgatttggaagtctcgcgcgccgacccgttgcaagttcttcatgttccttgccatacgtggagcatgcctaacggcggacaacctccagcggcgaggatggcacttggctccatactgtcacctttgcgggaaggatgctgaatcatgtgcccatatgttccacgcttgcgagtacacgagggcagtttggacgagaatcaggagttgcctgggactctcctgtgtttcccccacggacgacatgttggat

SEQ ID NO: 32608 - DNA, 1540 bp, Oryza sativa
  Clone ID: PAT_MRT4530_367C.1
ttgatgcgcctcgccgccggcaatggcatccgccgtcgctagcaccatgccctcgccgccgccgcccgccgtctcgttcggctggctcgcccccacgcgcgtgtcgccgccaccggcattgccggcggtggcggtggcggcggagcaggctgtgtcgaaggagttcattgattttgagttcagccttggtggatctgcgaccatgttgccggcggatgagctgttcgccgacgggaagttgctcccgctccggccgcatccggtggcggcggagaaggcggtggcgatggaggcggagaaggcggtgccggagctcgtgaaggcggtgcggcctgcggtggcggtggcagcggaggtgttcgacccgtacgtgttctcacccaaggcgccgacgtgctcgagcaggtggagggagctgctccggctgaagaaggtccagacgccgacgaagccgtcggcgtcgacgtccgcatcgccgtcgacggcgacggcggcgacgccgtcgagatcctcgaactcctcggcggccaggtcgctcaagctgctgctgctccagcggaacggcgggcgcgcgtctggcgccgccgcgtcggacctctccgtggcgccgctcctccgcgacagctccgactccgaggcgtccctctccctcgcgtcctcccgcttctcgctctcgtcgtcgtcgtcgtcgtcctgccacgagcacgacgacttccgccgccactccctggactccgtcgaccccacaccacggccccgcctccgcgtcgtccggtctcaaccacagccgcaccctcctgccgccgccgccgccgccgccgccgccgttgccaagcctcgggcggcgatccagagccccgcccggcgccgcccctcgccaccgccgccgcctccgccgcaggtggcctccgtggactcgccgcgcatgaactcgtccggcaagatcgtgttccagggcctggaacgcagctcgagctcgccggcagggagcgtccactcaagcctccggtcgcggtcgcgcgtcatggacaggtcctactccgctggcgtccgcgccgccacccccgtcgtgctcaacgtgccggtctgctcgcgcccggtgttcgggttcttcaaggacaggaaggacgcggcggcgaaggactcgtcggcgtcgcggcctcggtcggcgcttggccggaagacggcgccccacgccggcaatggcggcggcgcatccagagatcttggccgtccggtggtggggaggaggtccgacggccggccggcaatgcgggagaaggggcgacgcggcggcggtgggccgggagcaggcaggaaccgcggcgccacttgcgataggggcgacgacgctcgggcattcccagattggcccggcacgactgccgctctgattgagaccagtggaggcggctccgcgacgaggcggcttagggtgagaagcccgtgggcggctgatggggagaagaggttgttgctgagcttgctcgagcgggcggccgcgggcggcatcatggttgggacttgggggcgcggctag

SEQ ID NO: 32609 - DNA, 1086 bp, Oryza sativa
  Clone ID: PAT_MRT4530_36800C.1
atgaaggaacaaaagaaaacagagatcattccttctcatgccattacagtgcgacgcggcacggacgggataaaggtgaaagcggctttggcgagagacttttgtaacgctcggtcggcagcgcagctgcgcaaagcaaagcttggcgatcgacgcgacgaagaggacatgcatggcaaagcagaatggcaaaaggcagcagcagcaaatcgcgccggcggtgccggcggcggcgcctgcggtgcgggcgacgccgacggcgagggggacggcgccggcgcggccgagccgggaaagacggggccgccgctgccgcccgggtggaagggcggctcggggtccggccaggggtccagccccgacggtgcttggaggtatggctggggctgggccgctagccctggcggcaagggctccgggttcgggtttgggtacggtggcagcagaggcgaaggtggcggcggcggtggcggcggcggcggaggaagcggtcgagcatatggtttcggtggaggatacggtggccaccccggaggctttggaggtggcggtggcggtggcggcggcggcggcggccgcaactatggtggcggcagcggcggcattggaggatatggcaactatggtggtggctataatggggaacctggagggggtggtggcggagccggagaaggtggtggatatggcggggattatggcggcggcgatgtcggtgcaaactggagcaagcgcgggagcttccgcggcggcggcggcaagacacagcagaaggacggtggcggtaacaactgaagccgcccgtcctcgtcttcctcctctggccatgagacgaaccatgagcttcataactagagcaatgtataggaatctcctaagatatatatagtgtcatgtcatccatgctacgttatcaactggggaacgctgatgtacgagcttcaatttgagcatagcggtaccgtacgtgctgtgttcttcaggctttgtaactggtagtaccttctactacgatggttcatgccccaaatgccaaaaaaaaaaaaaaataaaaaattggaaaaaaaaaaaaaaaaaaaaaaaaaa

SEQ ID NO: 32610 - DNA, 537 bp, Oryza sativa
  Clone ID: PAT_MRT4530_36801C.1
agggaacccgcgagatcggattctgacgatgttcttcttcttcgtggggggcgtggagcagggcgcggggcgggtgctgaaggaggcggcgcggcggtgcctccgctgcggcggcgcggccgacctggtggagaccgagaaggtgctcaagctcttcttcgtccccgtcaagcggtggcccgggaaggaccccgcctacctctgccgcgagtgcggcctcctcgggcctggatccctcggcggcggcggcggcgaggccgggacggggccgccgctcctcccccgcgacgcgcggtgcggcgcgtgcaaccgcgccgtcgccgacccgcagttccggttctgccccttctgcggctccgcgctgtgatcccgaccgacgcagccggcgatggatttctctttgacggtatgactccttgctttttatttctagcagtaagcattttggttgcgtgatgagtgtagatgtaaaacgagctccttgtaaactactgacaagaagattagcaaaataagtaatcaaaaaaaaaaaaaaaa

SEQ ID NO: 32611 - DNA, 1227 bp, Oryza sativa
  Clone ID: PAT_MRT4530_36802C.1
atggccggccgcctccccggcgccgcctccgccgccgcggcgcccctcccccgagcgctcctgctactcgccgccctcgccctattctccctcaccttcctctccctccgctcgctccgccccgccgcggccccaccctccctcgccatcggcggctcccgcccttcctccttcgcgcggccgtcggtgtaccactccgccgaggccttcgcggcggggtacgcggagatggagcggagcttcaaggtgtacatgtacccggacggcgaccccaagacgttctaccagacgccgcggaagctcacggggaagtacgccagcgagggctacttcttccagaacatccgcgagagccgcttccgcaccggcgaccccgacaaggcgcacctcttcttcgtccccatctccccccacaagatgcgcggcaagggtacttcatatgagaacatgacaataatagttaaggattatgtggaaggcttgataaacaagtatccttactggaacaggacacttggagcggaccatttctttgtcacctgccatgatgtaggtgttagggcttttgaaggacttccattcatggtgaagaattctattagagttgtctgttctccaagctataatgttgactttataccgcataaggatatcgctcttcctcaagtattgcagccatttgctctgcctgaaggaggaaatgatgttgagaacaggacaatccttggattttgggctggccatcgcaattctaaaataagagtcattttggcacaagtctgggagaatgatacagagcttgctatcagtaacaatcggatcagtagagctattggagagctggtttaccagaagcagttctaccacacaaagttctgtatttgtcctggtggctctcaagttaatagtgcccgtatatctgattcaatacactacggttgtgttcctgttattttgtcagactactacgatttgcctttcaatgatatcctagactggagaaaatttgctgttgtacttaaggagcgtgatgtatatcaactaaaaagtatacttaaatctatatcacaggaagagtttgttgaattgcacaaatctcttgttcagaacattagctgccctcaggtacagaaacactttgtgtggcattcacctcctcttccttacgacgcgttccacatggttatgtatgaactatggttgcgacatcatgtgatcaagtactaa

SEQ ID NO: 32612 - DNA, 791 bp, Oryza sativa
  unsure (1)..(791): unsure at all n locations
  Clone ID: PAT_MRT4530_36803C.1
atgacgatgacgatgagcaatgagcagggaaagccagaggcaaacgtacgtggaggcaggaggagtggtcaccgcgtgcatgcgcgccacctccccggtctgccgactctggcggctgcgcccgcacgcacaaatgggagctcgtgggctccaggaaagaccgaacactgcactgcacaacacaagcgtcgtcttcaggccgtacgtgacaaacctcagcaggcgagtgtcatggcctccgaaggcgccgtgagcccggcgttcgcctacaccgtcgtctacgtcaaggacgtcgccaagtcggccgccttctactccgccgcgttcggctacaccgtccgccgcctcgaccaatcccacaagtgggcggagctggagagcgggacgacgacgatcgcgttcacgccgctgcaccagagggagacggacgcgctgacgggcgcggtgcagctgccggactcggccggcgagcgggggcccgtggagatctgcttcgactacgcggacgtcgacgcggcgtaccggcgggccgtggacagcggcgccgtgccggtgagcccgccggagcagaagagctggggccagaaggtcgggtacgtcagggacatcgacgggatcatcgtgcgcatgggcagccacgtccgcgcgtagcggccatgcgcctgctcggttgggggattttagccgtgtatgttcaataatgtgaactgttctccactgatctgttgatatatggaataaaactgtgatctcgttggttgtggtctgttatatataaaaaaaannnnnna

SEQ ID NO: 32613 - DNA, 259 bp, Oryza sativa
  Clone ID: PAT_MRT4530_36804C.1
ctcctcctattctcctcttctccaagagttcttgggggggtgctggctgatctgggagagttatacaaattacagggctcaagtccttgtgggggggagagaacagatccagagggatgctccgcaaatcggagagtgcgaagactgatatagaggaagagatcgatcgttttgtgccagaaaaggtcgagatggagacccgtaatgcccatggggacctcaacttatagtgcttgtaaaaaaaatacattttaccggg

SEQ ID NO: 32614 - DNA, 553 bp, Oryza sativa
  unsure (1)..(553): unsure at all n locations
  Clone ID: PAT_MRT4530_36805C.1
caagnacattcagtttgcacttgtactcatgggatcagtatagatgcattaaaccaataatgcttcaagttcaaagggcatgagtctttttagttcggttctgaaacctgaatgtatactctttgtgaatccaaacagatggtatacatatatttgtgggcttgggaagcatcgagagcatgcgacgcagtgaagacatttttcaggcagcaaaagatatcacaaagtcgcctgaacttttcagttggacctgatgaacgtcgcaaggtttccgacccgacattactacgtgagattgatggatgcttcacgcaggttgttctgattatgtttagtatatggccgagtggattaactaggtgacgaattaaccaaccaaaattaagctgtttgagctcactaccagactcttagcacctagcctgtaggcacgaaanccacaggaaaatacattttaccgtcagaaattgtttttctgtggatggaccgacagaaattggcgtcagaaaaaagaccacggaccgacagcgctgtgagagaagagacaagagag

SEQ ID NO: 32615 - DNA, 2201 bp, Oryza sativa
  Clone ID: PAT_MRT4530_36806C.1
tttttttttttttttttacgccacatgaaaacacagttcttctttgtattcatcataataagttcccaaactaagtttctttttttttgagaggctgagagcaataagatacttctagtagtgacataatacagagttatacgctttggtgcctgaaattgccccaatcctggagcacaaattgttcaagatgacacaaagtggaaatattacagattcctcaaaattgctcaaatacaaaatacaaacacaaaccaaaagaagaatataaaccattcacactactctgcagttgaatcggaagtactcatgaatccacctaagaagccagcaccattgcagctaccgcacaagatttcccgctttcctctgcaaagccagcataatgctccagctttaaatcggccgttgaagtgatcgacagaattcaccccatctcccttgcactggttgcacactattgcaccgtttccttcgcagtcctggcagacaaggctgcttcccttcggaggactcttttcggtctgatcattttctgtggccttggtcttgacggactggaacctggagaagcgagagacgggccggagaaaggaggcagcgagcggggaaggggcgggtttgaggaggagcggaggggaggcggcggtcgccgtgaggctcgaggtggccgccatttggggcccctcccccgggaagcggagcacgtaggggcgaggaccgccgcccatggcccaagcactgcgggcatgtggggcccacgccgaatcagcagccacgtcgcttgaacccggtctcaagactaaaggacctccaggtatgtaaccacggccacggccacggccacggccacggccacggacatcatctaaattgttgggtcgccccctccctgcatagggatcagcatacaagtctggtcgacctccacctgtgaaagaacccttcagcctgcctcctgcaggggatctgctccggtcccgcatattgtgcccccagttatcccgaggagacactgatcgtcgccgactcctctcaagatacatatcatgtgggcgctcccttgggttgtagtcttcagctgaagaccagtcatgctttacacggtccctcaactgacaatcaccacggaagcccattctttccctttgcactggatctgcataccgtcctgcatgatctggaggtgatcgagctggataacccttagggtcacttccccaaccacggggtggtgacccgtacctggccatctctcttggaggggcccgatcacttggaccaagattccttgcaggtccacgtggaggattgacgtaatctctgtgaggactgtggccaggctcacatacttctcgtgaatagcgatacttgttgcagttgttacagtgagttcgccgagcaaaattaagatttccacagttgggattctggcatatccaatcgccttctcttggcgacagatttggatcattcctgtgaacatattctccatcaatattaatgaactcctttccaggagcaccagagcccctcccatatgatctgcctcctcttccatatggtggagaaccatcccggaacctcgcgactcctctaccaccaccttgatatccatgagcataacgtggaccaaaagtatcatcaaaatttctgttttctggtctgtgttggcgctgaggtgaaaggccttgcagctcgtggtaggggcgcgggtgccgaggctggaaatcaggcggcgtcaggcggcgcgtgggtggcgggctcaagcggcgacgctgtggcggcggactcccaggaggacgcctcctagccagcagcggcggcgggggcgagcggcgcctctccctctccggcggcgagaggtcgcgccgtcggcgggggagcgaggacccgcgatggcggcccggcgcaccggcggcgggggtcggggacgagcgcgccgctgccgcggcggcatccgggtaggaggaggaggcgccgtccccctcgcgcggcgagggcttgacgacgaggctgctgaggggggcccgagcggggggaggcggcggcggctgcagcgcggcgtcggcgtcggcgtcggtctcggactccggctccggctccggctccagctcgctccggtggggagagtagtccaccgcctcctcctcctcctcctcctcctcgtcgacgtcgtctcctctgccgcggggccgcat

SEQ ID NO: 32616 - DNA, 150 bp, Oryza sativa
  Clone ID: PAT_MRT4530_36807C.1
catgatggaatggtaagaactgtcactgcggaagtcattgatgcagatatagtcagcagcggtgaggatgataccggcggcagcgacgagttcgaggtcaccgccagcggccgtccgcagcgcgggagcaagaatacaaagacgtcttaa

SEQ ID NO: 32617 - DNA, 298 bp, Oryza sativa
  Clone ID: PAT_MRT4530_36808C.1
gctagttatgtggtggtaggggatagatccggggcggggggcatgagcatggatgatgtggtgggtagtccaccaagtccgtacatgggcagggatgagaagaagaagaggtggaagtggaagcttgggccggccaccatcctggggttctagctgctggagagcatcgccttctcctgcgtggcgctgaacctggtggtgtacctggacaccgggcttcactggaccctcgacttcaacgccgcccatgtcgacacctggaatggcaccaccttcatcgtccccgtcatcggggctt

SEQ ID NO: 32618 - DNA, 2069 bp, Oryza sativa
  unsure (1)..(2069): unsure at all n locations
  Clone ID: PAT_MRT4530_36809C.1
ttttttttttttttttttttgcaaactgatgcttctcacgactttcatttccgtttgattgtaaactttacaggtgtcaatatctagccttttgctttcctctcttcctggccccattgttcagctggtatttccttagcaatgcatattatttgcccttttctcattattattccaatttggtacaatgcaagttcttccagctggtgacttttccttttgaatagctgaataactgaatttggtggtttgtcaaacatagtggctggttgccttacctgcacctgcagaaaaacgttgctgctcttcttcagcacctctatgcgaaataatcttgttggcacaactacaccaaatcctgcagaactcctgaatgtttgtagaaactcagcaagagggaatttcctgagatcaggctctgttagtttggcaagatttccagctgagacaaatgcatggccatggattcccagctccctgagaggcttcagaggtatatcaaatgacagatcagcaaaggctgtgaccgcaatgtcacctccccgtgcacttagctcaggagaagtggaagcaacattttcagaattctctggggtactgcttcgcaagtctgtccccagccctcttttcttgaaacctaatagtgatgatggtccacccaagcggcacataagagacctattgccacccaagtagaactgctctgaaagtggcgatatagagcccgtcgatccccttgccaatgggtggatgatcccagcagccactccagcattaacggcgccattcaacacacccagcggtaaagccactcgaagatcaatttcctgtctaatgtaacgtgcatctttgctctctggtgcaaggcctccaacttgagaagaaaatagataagcatatcctcgtgtcggtcgaattcttgaatctctctggtcaaccttgtatgcatatttaatagaggacaaaaggctatgccctaactgcccccttatggaattggatgacatcagtgctcggtctgttatagttcgccatgacagattgtaagcgaggttatggttcatggtggagagcaaaccaacagaaacacccatcatgtgttctttgagtgaggacttcaaccagtcctcagagagaaatgatattcgagctaccagtggagtaggtattgctccaattcttggtattgccactccagtacttagctccactgtctgatctaatccaagatcaccggatgcatcccatgtctcacaatatccaaataggttcttcaacttcactgaaccttgaaccgaacatgatctagtccctttgttagcgaagatgccgagttcgccggcggcgcggccacgagcctcggcgacgtcaacaaggacgatgacggcagcgttaccggggatccctggcggcgcggcgtcgagggtgatggacacggtgtcgaaggcgccgaggcgacggatccgatcggcggcggcggctgcagcgcgcacgaggtctctgacggtggcggcacgcggcaggtccgagccgaccgccgcctccaccgcggcgcggcgcgtgcggcagcagccccggatctccacatcgtgcacccggatccggacctcctccgcggtgaggcggcgcaggacggactggaggcgagcctcgtcggacggggacggggagggttcttggtcatcatcgtcctcctcgtcttcgtcatcgaggtcgtcgtcgtcttggaagtcgtcgtcatcatcctcttgcaggtcggggtaatcttggacggaagcgggagaggatgcggtggccattggatgatcggaaggggatctcaactgaattgggagacgaagaagacgactctactcactcaaactcaaggatgccttcacaagcaacgaataacactatcaacttccttttttgggggtaaaattaaatttatgcagagattgatgcaattcaggagtttcacaagtttctttttttaaagaacaacaaatgcatgatagaatatgtggaaaattgctacgatttatatggnataagaggaaatggctttgatactttttttttttgcc

SEQ ID NO: 32619 - DNA, 719 bp, Oryza sativa
  Clone ID: PAT_MRT4530_3680C.1
atggcgacgtcggcggcggaggaggaggcggtgcctgtggcggaggcgcgggcgcaggccgagaagcgcgctgcggcggaggatggcgagggggcggaggcggagggggaggggaacgagatgcccgagccgaagcggcggcgcgcgtgcgtggcggcgctcgagggcgtgcgacgcgccgcggcggacgcggccgaagagaacggcgacggcggcggcggcggcgcgggcgggcctgcggcggacggggggtcgtcgttctcgttccacgcgcgcagcttctccggggtggagacgacgcccaaattcgggtccttcaaccccgccgacgacctcctcgtcgccttccagctcaagcctccgcctcccccgatggatgcgccggcgaaggaggagccccccgccgccgccgccggcgacgacgacgacgaggaggagcacgaagcaacagctgaggagggcaatgacgggatttcacaacagcttggggtagtagaccagtgaagtgctcaagtgagcgacggttttgacttggtgcgacttcgcttctccgttaggcactgtactcctactttgataacggtagcttttgatttgtgtagtagtaatcttgtactactatctcatcgtgtcaatgcctcagtggttctgtgttgtgttgtacaatccgattcctaatgataagattagcgaataataaaaatgatttttgctggtgt

SEQ ID NO: 32620 - DNA, 540 bp, Oryza sativa
  Clone ID: PAT_MRT4530_36810C.1
acagggaggatccccgtcattcaccatttaatagatgtagacttccggcgcgcacgcactggaacacgatccccagtgtgtccaaagcggtcaagccaacttcggatggttgagaggcgttgtgcctcttatcatcgcgacgagacagggcatacctgccgcacgccgcctaacaccaggctaacgcgcacgtggcttcccgctgtcctgtctgtcattcgaccggccacgcaccggtcacaatttggtcaagcgcgcagcacgccgcattcaatgtggcgtggtgcgcttgctctgcccgcactaaaagcggttaggtgggcgtagaggggcgtccacctaacctcacttgcatgacggccacgtggtgaccgtcccgatgggtcggggcagcccagggtcgggctagggaggggtggctaccacctatccacgggcccgacccctcgggggaaaacgccacgtggacattggggaatcaccggtgagaaaaaaaataaattcatcaaatatactatgcctactccaaaactatcttcc

SEQ ID NO: 32621 - DNA, 525 bp, Oryza sativa
  unsure (1)..(525): unsure at all n locations
  Clone ID: PAT_MRT4530_36811C.1
ntcgatcccatcgtcgtccgaagtccatggtccctttctgggtagcgcgcatgagtcatccatccaccacgtcnntgatcggctatctatggcgcgagggcgagatcggccggtatgctagggccatctcgcatcgccatcgacgtggcccgcatcattnatgtaatgcgcnngcggcatgtggtgggaaaacctaaactgggagaagggctcnnggagtttggggagaatcgagaatgnngctgttcnnacgttgtggcttctttcgccgttngccgtgcggcggcggcgggcgggccggagggggttcctgcaggggcgttcttggcagtannctcgttcctggtggtggcacgttcaaacctcgtggctgtccgtctggcgcgccatcctgggccgcgtcgtctgcagtctgcgcttccgctggcgccggcaggatgttcctcnngccggcgagaaatgcggnnatgttcctgaatgcgggcggcgcaagggtgcaagnnntgccgcatgctgtctggctac

SEQ ID NO: 32622 - DNA, 776 bp, Oryza sativa
  Clone ID: PAT_MRT4530_36812C.1
ccggccggggagtgacccctcctcgacgtcctcgtcacttagcccttgcgcacagcctccgcctccgcctccggctccggcgatccccatccatcccgcgagcgagcagggcgccgtcgttcttcctgccgcatccatcctggtgagcacatcctccgccaccgccgcctgccccgatccccatccatcgcggcgcgcgcgagctcgtcctgctgcttccgccgcatcggctcattgacactcaagtcaaaaaagaaaaggagagaaagggggatatggaggagtggtcaccaccgtcatctccgtcgctggtggtgcggagccccaggcagacggtcagccttctccggaaccgtcacccatggcgggagtctcggtcgccccccacatccacatccacctcgttggccggtggccccaagctgtcggaagtttatggctttgtgggatccatcaccaccgtcatcgccaccactgtctaccttgtctgggcttacatgcctgagcgttgcctccgctctcttggcatcacctactacccgagcaggtattgggcccttgcagtgccatcgtttgtgatagtagcgacggcactttgcatggtcgtttatgtgggcttcaacttcctggccactcctccccccacttcctttaacaccatttttgacgagtacagtcgagagcggaccatgtttgaccctgcaaatgcaaatgcaacgggagaaagaggagaggtagagaaggccatcgaacctatttcagacattagcattgac

SEQ ID NO: 32623 - DNA, 1422 bp, Oryza sativa
  Clone ID: PAT_MRT4530_36813C.1
atgacagaaaagatgctgcaatggaacgatggtctctccggcgaagccgacgcatccggcagcacagcgctccatttcgcagcctcagcggagggaccagagatcgagctcgagaagagctcactcctccggcggctcgccttgcgatggccgtgctcgcgcaatggccgccgccgccgccggacatcgactcaagttctcctgaaagccgacccgtccttagcctgccggccggacagcaacggcgagtaccccatacacgtcgccgcgtccatgggaaacctcaagctcgtggccctcctcctccacaggtgcccggagtgcgccggcctccgcgacgcccgcgggaggaccttcctccacgtcgccgtcgaccgggggagggaggagatcgtgggattcgccaccgacgacaggcggaggcgggacggctctcagctggcgacgcccatcctcaacgcgcaggacgacgacggcaacaccgcgctgcacctggcggtcgcgagcggtgtcctcaacgtgttctgctacctgctgcggaatcgcagggtttgcttggatcttgccaacaacgacggcctcactccggctgacctctcaaggtgtaccattcccgctgggcttaactacaaaacgaacgcacgaacgtggatactttggtccctggtggtagcgaaagccctcagcggcaacatccggcgcgatcacttccagcagcagtacgtacccaagctagacgagatcgccgagtccaagaaaatgacggagtcgacgcagatcctgggcgtcggctccgtcctcgtcgccactgtcgcgttcgcggcggctttctcgccgcccggtggctacgcggctggcgatggtaataataacaatggccgtggcaacgtcgtcgtcgtcgcgggctctccggcgctgtcggggaggtacgccttcgacgcgttcatgtacgccgtgacggtggccttcacctgctccatgctcgccacgttcagcctgatctacgccgggacggcggcggtggactggaagatccggcacaggtacttcaagcactccctgtcgtggatgcgcaagtcgacgaggagcttgctggtggccttcgcgctcggggtgtacctggtgctggccccggtgtcccgcgccacggcggtgggcgtctgcgtcttcaccaccggcacgctgctgttcaggaacagggaggtggtgcggatgctgatctgcgcgtacgtgctgcagaggaggatggggatcacggtgctcgcgaagattggggtccccatcaccgtcgacctggtgaagtccaatcttgtctacttggtcatcttcggtgggcccctttgcactccgctgtgcgttctgttctttgtttggaggctagcaccagtgattatgagatacgtccacagaaagttaatatga

SEQ ID NO: 32624 - DNA, 658 bp, Oryza sativa
  Clone ID: PAT_MRT4530_36814C.1
agcgcacgaacttggatcctctggtctctggtagaaagcaacgcactcggcagcaacttccggcgcaacgatcacttcgaggaggagtacgtccccaagaaagacgagagcgccgagtcaaagaagatgacggagtcgacgcagatgctgggcgtcggcgccgtcctcgtcgccgccgtcacgttcgcggtggccttctcccctccgggcggctacggcggcgacggcggcggcgcgccggcgctggcggggcagtaccccttcgacgcgttcatgtacgcggtggcgatagccttcgcctactccatgctcgccacgtttagcctgatgtactccagcacggcggcggtggactggaagctccgccgcgcgtacttcgagcggtcgctggcgtggatgcggcagtcgacgaggagcttgctggtggccttcgcgctcggggtgtacctggtgctggccccggtgtcccgcgccacggcggtgggcgtctgcgtcttcaccaccggcacgctgctgttcaggaacagggaggtggtgcggatgctgatctgcgcgtacgtgctgcagaggaggatggggatcacggtgctcgcgaagattggggtccccatcaccgtcgacctggtgaagtccaatcttgtctacttggtcatcttcg

SEQ ID NO: 32625 - DNA, 653 bp, Oryza sativa
  Clone ID: PAT_MRT4530_36815C.1
ctgcaggaattcggcacgaggcagacacttgctgctacatattttttaaaaaacaaattatgtggaattaacttgctgggaactaagtttaatgtttttggggaagtgactttcgtgttgaaggaagtaactttcttgcttgtagaaagtaacttttacttctagagaatgtatatgcagctgatgcaactttttgttaagaatccatcaaaatgcataccagatcagtatgcaactagatatacattttatgtttttgtcaagctaagaaataaactgcatagaattacgtaaaatctaaatcaagaggcatctcattttagtgctaatgagtgacgccagatgttgtccgaatatgtgttaatctatagtacttgtctgtcagatatagtacttttcatgggttagctttggaaaggccttatcatgaacttccattaccgacgggtaaacgatgtcagcttcgtgtcatgtgggtaaagcatgcaatctctgtagagattaatgaactattcgaacagccgtgcccatggtcaagggcgagtgtaaggtgtttctcatagcgtagatttgtttgacaaaggtttgtggaaaagtggttattgggaaggggaacgttttcagagtcagcctgtgtggcagacggctaacct

SEQ ID NO: 32626 - DNA, 742 bp, Oryza sativa
  Clone ID: PAT_MRT4530_36816C.1
ccggccgggaacacacacgccgcctttgccagatgacacagcagccaccacagctgccaccgccgtcgccaactgccgtcggcgcgccggcgctggcggggcagtaccccttcgacgcgttcatgtacgcggtggcgatagccttcgcctactccatgctcgccacgtttagcctgatgtactccagcacggcggcggtggactggaagctccgccgcgcgtacttcgagcggtcgctggcgtggatgcggcagtcgacgaggagcttgctggtggccttcgcgctcggggtgtacctggtgctggccccggtgtcccgcaccacggcgatcggcatcatggtgagcgcctccggcacgctgttcctcaggaacagggaggtgctgcggatgctgatgtgcgcgtacgtgctgcacaagaggatggggatcatggtgctggcgaggattggtgtcccaatggccgtcgtcctactgcagtccagccttatcttcgtggttatctttggtgcacccttgtgtcctccgttatgccttctggttttcgttgggaagctagtgcatgaggatgtctcgttcctaagatatgtaaatggaaaggttggttcattaccttttcaataaaacttcagagtaatagtttaacctgttagagtttgtgtcaaatatgtattcatagtcagttacagtttagaatttgaaattgtaataggtataagttagagttagagttagaattggac

SEQ ID NO: 32627 - DNA, 1364 bp, Oryza sativa
  Clone ID: PAT_MRT4530_36817C.1
ggcccgcgctcgaccaaacacactacagctagcttatagctaagctgtgtgtgctagctcgatcggtagtagcagcgtcccagacagccatgccggccatcgcggattgcgcggccgacccgccgctggcggacagctactacacgctgctccgcctcggcggggacgacgacgacgacgcgtgcacgaaggtgaccacgacgccgcagcccgtgtcggagtgcgagctcccgatgatcgacgtcggttgcctgacggcgccgaccggcgccgccgccgccgccgccgtggggcagcagcatcaagccgaggagagggcggcctgcgcggcggccatcgcggcggcggccgcggagtgggggttcttccaggtggtgaaccacggcgtcgcgcaggagctcctggaggcgatgcgccgggagcaggcgcggctgttccgcctcccgttcgaggccaagtccagcgccggcctcctcaacgactcctaccgctggggcaccccgaccgccacctcgctccgccagctctcctggtcggaggccttccacctcccgctcgccggcatctccggcaaatcctgcaactacggcgacctcacctccctcagggacgtgacgcgggaggtggcggacgcgatgtcgaggctggccagggcgctggcgcgcgtgctggcggagagcctcctgggccacgccgccggcgagcgattcccggaggggtgcgacgacgcgacgtgcttcctccggctgaaccgctacccgccgtgccccttcccaccggacgacgccttcggcctggtcccgcacaccgacagcgacttcctcaccgtgctctgccaggaccacgtcggcggcctgcagctcatgaagggctcccgctgggtcgccgtcaagcccatccccggcgccctcatcgtcaacatcggagacctttttcaggcgtggagcaacaacaggtacaagagcgtggagcacagggtgatgacgaacgcgacgacggagagatactccgtcgcctacttcctctgcccgtcgtacgactcgcccatcggcacgtgcagggagccttccccttacaaggcgttcaccttcggggagtacaggcgaagggtgcaggaagacgtcaagaagacggggaagaagactggcctcagtaatttcctccttagtttgacggtgtacaagtactggccgcccagcagggggggaggaggaggtccgacggtcggcggcgcggtggcggacgatgacgacaatggtggccagcgcgcgcagctcctcccccgccgcccgttggcccgcgcgcgaggaactcaccaaggggcagcacaacgacgagcagcgaagggagatgaccggcggtga

SEQ ID NO: 32628 - DNA, 1130 bp, Oryza sativa
  Clone ID: PAT_MRT4530_36818C.1
gattttttcctccccctctctatctctcgcgtccatggcgtcctcgtctctcctcgtccggctcgcctccgacgagatgccccaaaccctagatgcgtcgtcgtcgtcttcgtgctacgacgccttcgtgccggtgttccacccggatccgtcgtcggggttctcggcggcgtcggtggtggcggccgccgaccgcctccgcagccagttcctctccgtggagcccgacctcttccacgacgcgctcgtcgcgccaagccccgaccacctcggcttccccgatgaggaggaggaggaggagatccggtgggattgcctccaattggatgacgacgacgaggaggaggagggggtggcggatctgcggcttgaggcctccaacgcggcggaggaattcgattgggaggaggtggcatcgccctccggcggcgccgggatggatcagccggagcccgagtgggaggtcctcgccgacgtgccgccgccgccgccgccgcccgccgacgagggcttcgtgtacacctccgaccgtgacgtgtacgaggtgctcgtcggggagggtttgttcctgaagagcaagccgcccgcggcgaggtcggccgtcgaggcgctaccgtccgccgtcgtcgccgccggcgaggacggcgaaggggaggagtgcgcggtgtgcagggacggcgtcgccgccggggagcgcgtgaagaggctgccctgctcgcacggttaccacgaggagtgcatcatgccgtggctcgacgtgcgcaactcgtgcccgctctgccgcttcgagctgcccaccgacgacccccagtacgagagctggaaggcctcgcgagctgcggctgcctgaattgctgcgcggtaaaaaaaaaaggcaagcctttcttttcttgcacagactttatagagttgtatgtcttgggtttcaaactggtactatgatgaaagaaccccactggtatgatgaaagaaagcgtagaggtagtcgcacgagatggttttgcacctttcgatttgtgtactttttttcttataaagagggatttgtgttgtgacttaaggttgcgaggatattacataagtttatcctatatatatactgttgtatttaaaaaaaaaaaaaaaaaaaa

SEQ ID NO: 32629 - DNA, 324 bp, Oryza sativa
  Clone ID: PAT_MRT4530_36819C.1
aaaaggcataatggtttacatgtacggacaaactgatattaattacactcgtgaaggaactaaaaacctgacggttttagaaatgtgatgtgactgtatggcataagattatacaaatactttcccagtggcaacaagttgctcaccttactaaaggatgcaaaccctacatatcagcatcctgttgaaaaacgcacactttaaagcttaaatccctgttacagacgtactgatttgatatccatgaccagtggggcaaaaatgaaacaatggcccaatggaaacctttacattattgaaccatcgacacaattcagtaccccg

SEQ ID NO: 32630 - DNA, 358 bp, Oryza sativa
  Clone ID: PAT_MRT4530_3681C.1
ggggttaatttttatttcgtggttattgtttagtgtaaacagttaattacactcatacattacattgattcttaagggggaaagcaagaataacggggttataaacttatatgaagcaaaattgctaacatggtattggtcagtatatgcataataacagtggtcagggagagactaccttactaagactaaacccagaaaacctttttgtgggactcttccaggaccccttgcgaccatatagatacttgccacacggatcagggagacagaggttaataagcctacataggttaactggcttttcgcggtttatgggatgtacagggtttttgacaatgactagctcggaagtatc

SEQ ID NO: 32631 - DNA, 131 bp, Oryza sativa
  Clone ID: PAT_MRT4530_36820C.1
cttcgaggagatagatggcacagagggtaagaagatgaggagctctgatggagggaagcgcactgaagattgaaagaatgactcaaactccatagcgatcactgctgttactttgtgaacaccccacctga

SEQ ID NO: 32632 - DNA, 130 bp, Oryza sativa
  Clone ID: PAT_MRT4530_36821C.1
attaatggtccggttgattgcacgacccatgccactaccgatgaaggtcctagctatgcatgctgttaggcaaggtactaaactccgagctccttgcctaactactagttctacaataatgtcctcacta

SEQ ID NO: 32633 - DNA, 258 bp, Oryza sativa
  Clone ID: PAT_MRT4530_36822C.1
gaatctggaaaagggaaagaataatacaaggggggttttataaaagacgaggacttaacagctattgaaaaaataagacaccaataatggcctatgaacaaaacaaagaacaaacattgtacatacaatgaccaaatgctgcaaaatgagaaagcttgaatggtaactaccacaagaaaagtaactagagggcaactcacttggacattgggacaatcacgaatagtaatgaatagaactaaccaacaccatggacat

SEQ ID NO: 32634 - DNA, 2709 bp, Oryza sativa
  Clone ID: PAT_MRT4530_36823C.1
acgggagggggcagagtcatgctacactcccaacaagtccctaaaggaagcaacgcccgctaacgaccacaaccggccctccgacaggatggactctaggaccactgagaccgaagagagcgcagagtcaaacaccccggagttatgttccttccatagctgccacaagaccaggaggaccagggagtcgaagctggcacggaggtgatcaggtaaaccagccttggaagatggccaccagtcctggagccagctgccacggggggcgagagggcattccagccaggaggcgacagcacccgtaaccagacctgacgagcgaaaacgtagtcgaggaggatgtggttcgctgtctcgagctcttgagcgcaaaaggggcaggtcgagtggctatcgatgctacgcttttggaggagatcagccatccaacagcgctgctggaatgcaaaccagaggaagaatttgcatttagcagggcctttcgcgttcaagagaagatcgacacaagcaaaggagtgctggccaaggaagaacgcctggtacgccgaatgcgccgagtagcgctggtcactcgtccaacgccagacaagacgatcctcgacacccggtgaaagttggaagtgaagcaccgcgtcctagacaagaagaaactgggagatgcccgggacagtgagggccccgcggatgtcagaaatccaagcgttgttcgccaggccagaagaaaccgtgcgcgaaccacgcagacgcgggggcacaacgaagaggagatctggagccaaggaggcaacagagcggccaccgatccattggtcagaccagaagagaatcgactcaccatcacccggcacgaagaaggtggacgcctgaaacatgtcagtgacggctcgctcggctggggctttcaggccgtcccagtaaggattccctgagtgttggagccaaagccaacgaactcacagggcaaaccctgccaacttcaggtcaggaattcctaacccaccgaaagctttgggacgacagacattcgtccaagacacccggcactaccctccatgagccgagtctgtacccgtccacaagaaggcgcggcgcttcttgttaatggccttgatcatccaggcgggaagaccgatcaccatagacacatggaccggaatggaggagagaacagactggaccagcacagagcggctaaccagagtggtgagttgtcccttccagggcggaagacgatgggaaactttgtccacaagaggttgcagggccgccttcggcaatttgcgaatggacaacggaatgccgagataggattagggaaaatctgagattgagcggggaaagcaggactgcaccaggtccaggtcctccgccgaacagcggatcagagtaaccgaacacttggcaaagttagtgcgaagcccggatgctgcaccaaagatagagaggataccctggatgaattcgagatcctgacgaaccggggagaggaagagaaccaagtcatcagcgtagagggaggcatggtcgttgagcggaaggaacccgcctgactcggaggctttgcggagcatcgtattgagcacatccatgaccagaatgaagagcatgggagagagaggatctccctgccgaagaccgggaaacaaggccccggcaccccattgatcagcacccgggaagaggaggcaccaagaatgaggaaaatccaatcacgccagcgctgactgaaccccaggtgggcgagcatctcaagtagaaactgccagctgaccgtgtcaaaagccttggcgatgtccaccttaagaaggaggcgggggatatgcttggcgtggagagccctggccgcgagctgaacatagcggaagttgtcatgaaagggatcggcctttgacgaggcactctgattgggcgccacaagctcgccaaggtgaggagagagacgggaagccgggatcttggagaacaacttcccaaagctgtggatggggctaatcggtcggaaatccttgacgtcaacagcctcgtccttctttggcagaagggagatgagggtatcattgagggaggagaacccccgaccgttagcgagaaagagggagttgagagccgccatgacctctggcttgatcaccgaccagcaagtcttgtagaaccggcccgtgaacccatccggaccgggcgccttgtcagaaggtaaggccttgaccaccgcccaaacctcctcctccgagaaagggttgtccagccccccaagatgcgcagggcagagaccaagggagtggaggtcaagggcgaaatcgcgctcaacagacgtccccaagatagcgccaaagtgagaagaggcaagctcctgaagctcatcgtgggagacggcaagttggtccccatcttgaagacgtgtgatgaagttcttccgccttcgggctctagcgtgcaggtggaaaaacatggtgtttctgtcaccctccttgagccagatcagacgcgaacgctagcgggctcgagcgaggcaagctagcccaaggcacttcagtttcaaatcccgctgcaaccaagtctccagggggagagagaccggttctcttgcgcgacgtcaaaccggaagacgttctccttcgccatctgcagttggagacggacgctgccgatgtgacggtcactccaactgtcctgagttgttgcaaaccaaggtgcagcaattagctgtag

SEQ ID NO: 32635 - DNA, 251 bp, Oryza sativa
  unsure (1)..(251): unsure at all n locations
  Clone ID: PAT_MRT4530_36824C.1
gaaaaaaaactctcccgatcccctccgccgccggcaaacccacgccctcgcggcgccgctctaggtccccagcccgccgccgagtgccagccatcccactccacctttgcctcgtngtctcaatcgccttcgtcggccgtcgctcggntctcttcgctcggtcatggagcaactggatccaccgcctccaagactccaagttttgaatcaaggagtacagcttcaggaccacaagcctggngtcctagccg

SEQ ID NO: 32636 - DNA, 581 bp, Oryza sativa
  Clone ID: PAT_MRT4530_36825C.1
cccacgcgtccggaaggttgctcccaatctcgtggacctggattacgccatggacgtcgtggagaacaactacaccgacgatgagcagataaagcacaacctctggatcatgtacaagcagatgattagcagtgcgccgttggcctccttattccacggccaaccttttcgtgcaggtgaggctagcaagccaggtgcgggaaccgtggagctacaaccacataacttgatgcatgtttgggttggcgacttattgtcttatcccaacgccgaggatatgggagcttactacgccgctggtcgtgacccgatcttctacacgcatcatgctaacatcgatcggctgtgggatgtatggcgcagcaatggcaaaggcgaagactttacggaccctgattggctcgactcctcgtttctcttctacgatgaggaggcccgtcttgtgcgcatcaccgttccgtgacgtgctcgacatggacaagctccgatacacgtatcgtggcgttggtttaccatggttggatgcaccgccacccactactcccaacgtgaagtccagagtgaaaaacatggtccagaag

SEQ ID NO: 32637 - DNA, 732 bp, Oryza sativa
  Clone ID: PAT_MRT4530_36826C.1
atgccgcctcccttcgttccaccttcgagccagccagcactcaagcacggccacgccgcaccatcaccacccaccacccgcgcgtcgtcggcccgccccccctgcacgagaccactctgccgcgccggccttcccgcttccccagccgagccaccggtgcccccttctttttccccaccgctaccggccaccacctacgccacccctttcctcggcgccgcctccctcccatgccaccgtgccgccttcgttcttcctccgccaccacaccatggcaccgtcgccctccccagcgcgtggccaagccaccgccacgccacctcacaccggccacgcgccgagccacacccggccgccggcccgccgtgcacgccccgaccctccattcctcctctccaccaccgccggccctctccctaccgctgccagtctgctcctccttttttccccgtgccgcctccttctcccccccggtggctgccgagcccctgccgagctcgacccggccacatgctccgccgcaccagctgcaccgccgtcgtcgtcgccgccaccgccgtgcttgtgtgctcggtgccgccgcttgcacctcgtcgtcgttggcattgggtacccggcggtgcgccgctgcttccccggccgcacgctgggccgtcccggctcgggccgtcgtgccgactgcgcaagggtatttttgacatttcacgtgatttctctctcctccttaactga

SEQ ID NO: 32638 - DNA, 1252 bp, Oryza sativa
  Clone ID: PAT_MRT4530_36827C.1
ctactgccccggctccccgcagtacagtgccttccgccgcagcctcctcttatctccaagtccgcaggttgaggggtggcgcagtgtgaggacaaggtcctcgccatgaagatgccaccgtgccgctggcctctggaaaccgcctgggaacgttgccgcctttggagcccttagtgccgactcctccgccgggaaccgccgccgccgaagttcgacgccaattccttcatcgggaaccgccaccgacctcaggaaaccgcctgggaacgtttcctcctccggagccctcaatgcctcctcctccgccaggagccgccgctgccaaagtccggcgccgattcctccgcctggaatcactgctaccgctgcaagctccttgatgagctccgacgaatgccgagccgagcaccacgccgtcgcgcaccgcaagcaatcagcgacgaccgggtggagcgagacggcggtagagcaagcgggaacatcagccgcgaatcgagtagcagcagttgcatcaatggagaagcaagcagcagcggtggtggtggtcagcgggaaggcgacggatccagtacgtggtgggcttaagcaaatcaggcgggggagaggctgtgacaagttcgtcgcggcggtggtgggtctagcagcagcgccaacaggtccattagcggaggcgagtctggttgcggcttggcggccggggagcggcggcggtggcattcttgagctcatggagcaggagatcggtggcggtggagcaggggacttgttgcggcgacaaagctcaagcacatccctagccttcccttctgtgcgaaccgccggcgagcccaagctcaaggtccgcctctcctgccgccttcaggagctctatcttctccacgaaatcgagcttgccagtgagctagagctgcttggggatgtagagtttggcggaggtgacggggcttggggacgcgtgtggctccggcgagatccgcctcttttgcgcggggcagcaagctccaccgccatcgctgctctccttgccggcgactgcgtggaaaggcttccaccgatgactgcctccgcaaccctagcagcgccgcagccctcgcagccgctccacatagccaccgctgccgtagctgccaccctcgcagcagctccatgccgccgtcaatggtcacgagggagagaaacacaacagggcgaggagaaagagagagagagagagagacaatatggacttggcctatattattttgtgggctga

SEQ ID NO: 32639 - DNA, 324 bp, Oryza sativa
  Clone ID: PAT_MRT4530_36828C.1
atggcgaggagagagctcctagaagtagttctgtgcgttgttgtggtggaacccctggtcctgttgccccaagagggaaagcgagagctagagcgaggtgagcgggtcatcgtcgacgtccccggcactaatggcatagaagccgcgagggcgtggaacacctgcgcacttccgcaccccatggataaaaggcagtctcggttctggttggtttttttaatagatcgctcggtctcggtgactcaagagaatttagaaccaagagaccagcctttgtcaccctatggatctggcatgcggaatggacaccagagccatctgtag

SEQ ID NO: 32640 - DNA, 1584 bp, Oryza sativa
  Clone ID: PAT_MRT4530_36829C.1
atggctgcgggtgcttccttcgccgcccgaacttctcccaccaccatccttggatcacttcgccgccccctccacctccccgagcaccgctggctgcgggcatcccctccgctgcctcaacgagccgcgcgccggcggctacgagcgccccttcaccgccccaagctccgtcgcccccttggccccaagctcggcccgccgtcgtcctcagctcgctccatcgcccccttcatctccctgagcaccgctagctgcgggtgcccctccgctaccccaagcaccgcccttcgttgtccgctcctcccaccactcctcctcccaccgcctcgagctccgctgccccctcctcccgtcacccgaagctccgcccgccgtcctcgtgagcaatcaccaatcaaccgagacaagatggtgcagcatcatcaagcggcggcgaacgacgatcatcaggctatcccgctgctgacaccgtacaagcaggctgggcgcccggggtcgaagctggacctctcccaccgggtgctgctcgcgccgctgacgcggtgccgctcctacggccacgtgccgcagccgcacgccgcgctgtactactcgcagcgcgccacccgcggcggcctcctcatcgcggaggccaccggcgtctcccccaccgcgcagggctacccggacacccccggcgtccgcacgcggcagcacgtcgaggcgtggaagcccatcgtcgacgccgtccaccgcaagggcgccctcttcttccgccagctctggcacgtcggcagggtctccaccaccggtttccagcctgacggactggcgcccatctcaagcaccgacatgccgatcacaccggacggctctgggatggtgtactccaagccccggcggctgcgggccgacgagatcccgcagatcgtcgacgacttcaggctcgccgcccggaacgccgtcgaggccgggttcgacggcgtggagatccacggcgccaacggctacctcctcgagcagttcatgaaggacagctccaacgaccgcaccgacgagtacggcggcagcctcgagaaccggtgccgcttcgccgtcgaggtgatcgacgccgtcgtcggcgagatcggcgcccaccgcgtcggcatcaggctgtcgccgttcctggacttcatggactgcgtcgactccgacccggaggctctcggctcgtacatggtggagcagctcaacaagcacgagggtttcctctactgccacatggtggagcctcgcatggccatcgtcgacggccgccggcagattcagcacggcctcctgcccttcaggaagccgttcaagggcacgttcatcgccgccggtgggtacgaccgggaggaaggcaacaaggcggtcgccgatggctacgccgacctcgtcgcctttgggaggctcttcttggcgaaccctgacctgcccaagaggttcgagctcgatgcgcccttgaacaactacgatcgcaacaccttctacacgcaggaccctgtggttgggtacaccgactaccctttcctcgacgagcatcaccacgacgccgtcgctgactctaatgctccttctgcttaa

SEQ ID NO: 32641 - DNA, 4116 bp, Oryza sativa
  Clone ID: PAT_MRT4530_3682C.1
atgagccgccaccgctcgccgtcccggtccccgctggacgacgacgacctcctcggcgagatccttctccgcctcccgcccattccctcctcgctggcccgcgctgcctgcgtctgcagccgttggcgccgcctcgtctccgaccccgccctccgccgccgcctgcgcgcccaccaccgcgaccaccttcccctccacggcttcttctaccacagcgaccacagcgcccgcctctggcccatcctggagcggccggatcgcatcccggcgtggcgcgtcgcccccacggagaagctgctccctggatggcaagtcctcagctgctcccacggtctcgtcctccacaaggatcgcgagaagttcatggtgcttgaccccgtcgccggcgagcagcacgccgtgcccttcccctcctcggtggaggacacatccgggttcgtcttggggatggtggttccttcacgccgttcttcttcttaccgcgtggtggcgctcttcgccggtagatctaccagcacaagagtagccgcctatgtctactcttcagagtctgggagttggggtgattcggattcccccatcgcgacattggttctaccatcaaaggccaaacatcgagccaggcatggcaccattgtgggcagtgtgattcactggtttcttgatggacacaaggtccttacgtttgatttggagaggcagattctagccatcatcgagctgccgccggaggtggtgaaggatacggattcattctatgaatttcggtgtcagatcataccagcactagatgatggtgttggtgaggttcgtcttgccgttctagctgatcctaacatgcaattctgggagaggaagaagacagggggagatgggagtggtgccgcatacacatgggtgctgagttcaactgttcggctgaacttcccttccattgaatcaatcaggagtgatctgaaatatcaggtcctggggtttgatgatgaaagtaatgcgatctttatatgggtgcagaatgttcttttcatggtctacctcaggcggcggcgcgcgcggccgacgacggcggctcccgggtggcggcgcgtgggctcagggcggcgcgagctcgccggcctccccgtccccctgtgtggttggcgatggcggcgcgcggctgcggccatcatcaccgagatcgattcgacgccgccgccatcagtcgctgccgtcggcgcgctgcagtgggccgtccgcaacttcatccgcgccggcgactgcatcacgctgctgcacgtctgcccgtcggcgaggtcgcggcggaggcggcgcagcctacgcctcggcggcttccagctcgccctcgccttcagggagctatgcaacggcatcgcggaggcgaaggtggagatagtggttaggaagggggaggtcggggagacggtgttggcgacggtgaaccagctcaccgccaccacgctcgtcatcggtctccacgacaagagcttcctctacaggtcgacgaacccgtacgagcgaatgaggagggttgggtgcagggttcttggcatcaggcagcacgccacggcacgggacggttccttcaacgccgagctcacccaaatcgagaccatcaatttgcatattactcttcctatgcgcgaacagtattttggcatctttaatcacaaaaaagatactaaggagtatttattaagagaaatcagaaaaaaggaaaatggtcttgaattagccgagccgtccaaagagaggatcgatatggggaacgcaactctcactgatatgactctcttgcccagcgtagaccctgacgacgcgctgtccgggatggcggccacctcctctgcccctgcccagggagccaagcccaagaagaagaccatgaagtccctctacctccagttcttcgatactgcccccgatggcaagtcccgcgtctgcaagctctgcaagaagagctactgcatgaccactgccaccgggaatcttgggaagcatcttaataaccgccaccctggttactgccaactttctgagggtgaagcaactcaaagtacaacgcctaccagcatggtttctcgagccaaaagatctcaacccctagcgcgaactcgatcacaagctcaatctcagtcccaagttcaacctcaatcccaagttcaacatcaacctcaacctcaaactgtatctaaagttcgtcatcaacctaaagcgaaaccagcaattgatattgaccatgtcaactggttacttctgaggtggcttatcagctcctcccttccaacttccaccctcgaagatagtatgcttatcgacagttgcaggtatttgaacccgcctgtccagctatggccaaaagaaaaggctcatgaaattgtccttcaagtgttcagaagcatgaaggaggatgttaaggcatctcttcagtgcgttagctctcggttctccattactcttgacttttggacttcttatgaacagattgtgtacttgtccgtcaagtgttactggattgatgaaggctgggccttgcggaaagttttgcttgatgtccgccgtatcccatacccatgcactggccctgagattctgcaagttctaatgaatgtgctgcacgagtttaacattgattcaaagatccttgcttgcacacataacaacagccaacatgcaatccatgcttgtcatgagctcaggcaggagcttgagtcccgtaaacttcctttctgttacatcccctgtgctgctcggatgctcaagattatcataaaagatggcctggaaaatgtgaggccagtattgtccaagatccgtgaatttgttcttgagaccaattcaaaccaggacatgatggaagattttatgcactggactgaagtttatcaagaaggctcatggaaacttccatttgaccattcatcaaactggagtggtgattacaatatgcttgatgtggtaaagaaggcccctaatgcaatggataacaccatcaagaagtttgaaggggtatttggaccaagggactgggttctgagttccacagagaagtcagccgtcaactcattgcactcgtaccttgagcccttctacaaaactaccaccaacctttgtacttgcaaaataccaacagttgggctggtgttcttctttatggaccatgttattgaattgatcaatgtctgccatgatagcacccgtcaggattggctcaagaaaatcgccagtgacatgtctgagacagctcataacttcgcatctcaagcttacaatatctacacgttcacggcagcaattcttgatccaagaatcaaaggagagcttatccctgaaacccttaactcaactagcaacttggaggatgcaaggaaccaatttgtcagggactacagtagcacctttgaagctgttgggaatggctacaacacccaagacaccactgacggcggtgatgcattttcctttgctgaagagattgtccgtaaacgccgtcgtgtgagtatgatcactgctgctgatgagctttctcagtatcttgctgagccccctgcaccaatttccactgatgcccttgaatggtggaagggtcactcctcccgttacccacggctctctttgatggctcgtgattttttggcgatccaagggacctcattagaccctgaagaattgttcacgagcaaaggtgacagcatgcgcaagcagcactactgccttcctctcagtagcattcaagctacaatgtgcgtaaaatcgtggatgcagagtgggtaccagttcaattttcaatcaaccattattgatttcgagagattggtcgaatctgctgttgctcctgatgctgtagatgctcctgagttttcatgaatgaatgaccgtaaattcagaatttagatcagttttccctgtctttgatgtttatgtttgtagtggtctctaacaaaatcccagagtgagaaccatggagagtagcttgtgttagaatcatgacattaatgaatttacccccatgtctccgggcagttgttttaatattgtagcgttattatgttggtacttccgtgggtggccaaaactaaagctaaatgtatcaggtaatattgattgtagtttgtcccg

SEQ ID NO: 32642 - DNA, 276 bp, Oryza sativa
  Clone ID: PAT_MRT4530_36830C.1
ctccgttttggtgggggttttagcgagcgcgtgggaggcctgaggcgacgactacgaccgcgcccccgccggagaagaaggccgcggaagcaccagtaccagcacccgtatatgtgttctagccccttgtccaatgtggcggtaggcgtgctcctcgtgtgcgccgacatcgccgcaggcgtcctcctcaccctcgtctgcgcccgccgatctatgcaccagaggctccacggctggaacaggtccacgtcgatgctcaagtgcgacctggtgccc

SEQ ID NO: 32643 - DNA, 622 bp, Oryza sativa
  Clone ID: PAT_MRT4530_36831C.1
taaccacagggactctctccacgaagattttgaatttgggaattcgtggaccaatgatgatttttctttgctattgaattcgctggggataaaaaatgagggacataattgtgcaccctttggcatccttggatttcatccttacaaggaagttatttacttggaagaagaaattcacaaaccgggtggcgtgatcatggtgaatagctcgaagattccatatctgggctactcgcgcccaaagtgttacggccatactcacaatggtatagaaggctcattcgtgtacactccatgcatgattggagacctttaatgaagacctacactttggatagagcttttatcttaaataacacgaactatatattttaccagggcttacagttgaacagatcatagaaaccataatggcgggatcactgtccgaaaacctgggtgttctttggtctatgtttattattcatggaattccatattcttgaatcttagtataatctgaccgttgttttggcaactgagttgcatgtaccaccctgtatgattttattcagttgaacctgttttttcagttttcaacaagagcatttttttcccgtttgaaaaaaaaaaaaaaaaaaaa

SEQ ID NO: 32644 - DNA, 395 bp, Oryza sativa
  Clone ID: PAT_MRT4530_36832C.1
agacgcagagaaagtagacagaataacacacagagagcaacacaacaacaacaacaacacaacacaacaacaacaacatcaacaagaagacaacacaaaacagataaataatagcagagcaagaataccaacaaaagagtacaagcaaaacaaagataaaaagaaataaacaaaaaataaaaataaaaataaagcaaagacaaataagtaaaaaagcaagcaaatagtaacaagaaacagaacaaaacagacaaaatagatagataaaaaccaacacaaaaatccaaaatagtatagtaactaaaactaactacagtaaatgaaacaaaaaataaaacaataagactatgtcactagtaaataccataaaaaaaaaaaaaaaaaaaaaaaaaaaa

SEQ ID NO: 32645 - DNA, 329 bp, Oryza sativa
  unsure (1)..(329): unsure at all n locations
  Clone ID: PAT_MRT4530_36833C.1
tccaccacagcgacagccgcnttatcccctcnttgatctctcttggccgcggngtcctcgcccgagccggcgctcttggtcgccgccgaatcctcctcgattctcccgggcaccgaacccgtcggcgacgcgggcgccgcctccgccttggggcgcttcgggggaggggcggaggaggaggaagggnncgggnnggagcgcttggacgccgcggcggcggagctccggcgagtctccaccatggcggaggaggaggaggaggcgacgagggtttcttcctcttcttcttctttcctctctcgcgaggaggaggaggagaaaaaaaaaaa

SEQ ID NO: 32646 - DNA, 493 bp, Oryza sativa
  Clone ID: PAT_MRT4530_36834C.1
aaaaaaaacatcatacaacacaaaatataaaagaactaaatgtaacaacaacaatgaacaaacaaaaacaaactgggaggtaattaataattgcatcattcaaaaaacactgaacaaatccgatgctgctgagaaaaaaaaatacgcgcttttaggaccactgcctttttctgctacaccctctggtccttatcccatattatgcttgtatcaggcaactttattgcattgcctgcagccccttattgccttcagctgcgtaataactcatacacaaccactttttgcttcacctaaagctgaaaaaacagcagtctcattaccaggacattaactttggtcaggccatattccaccagctacatctgctatagtttggcattctctacattgacttgccatctggttcaagctcacgcacttgtgaattctatctcgccatctacctatgttatcttcccttggatctattttgcacccgttagcattacca

SEQ ID NO: 32647 - DNA, 171 bp, Oryza sativa
  Clone ID: PAT_MRT4530_36835C.1
atggcaagtatagccaagtgcgtatgtgccggagacgggccgcgccaggacacaagtccctggcacgccggcttctgcggggtggcacgtaagcacgttggcgtcgtcaggttcaatggttcggtgcctcgtgcatcgggccgtgctttaaaatatgagcaggagcggcag

SEQ ID NO: 32648 - DNA, 1302 bp, Oryza sativa
  Clone ID: PAT_MRT4530_36836C.1
ggtattgaagggagtagcatatggtattgtatgattgtatatgtactactaatctaatcatcttaggcaggagaagaagcattcaaccaccagccagccagccagccagccaaacacaaacaagctcacatgcagtgcagggaaggcaatgcaagcctgtgtgctgtacccagctcactcactgctgagctggcacacacacatacatacaccaacacatacagtacataccaaagaaaattcccttctcaagaatctcaaaaaaaccagccccaattggcttctcaccccaccttttccttgttcttttcttgcttgtaacacatcactgacaaacttaatatcacacaggtgcatggactagagagagaggaagagagagagagagaggaggcaaaaaaggtaaagagaaaaaaaaacaggttgcaaaagtacccacatctcccttaagtagatacacccaaaccctctgcaggcagtagcagttgttgtttgcagcatcagcagcaatctcaccacaggatttttacacaaggggaaaactggctcagccaattgtctctgtcttcttgtctggatctcaccctcattacatttccttgttttaactcctctcttcacctctggtcctggtggttttctgctcctgatgatgcctctcccatgaacctcaggccaggaacatctgcctgtgacaaacgcgaaaaggtttaaggaaggaaatttggcgtgtgatttgattccttgcctgtccttccacctggcggcgtcggcggcgtccgtgccggcggaggcggagggcttgcagtcgggtggctcctcgaagagcgacctggagagccgcttgtgggcgtagccgatgtcgaagaggatgacgccggagcccgggtcggcgacgacgatgcccttgacggggagccacacgaagagctcctcctgggacaggccctccacgccgcggagcgcgccgaagctgaggttgccccgcaccacggtgtcgaagaaggccaggtcgccgtcgtcgtacttggcgtagcacggcgccgacagccgcgcctccagcagcccgttcgcctcgtcgaggctgtacgactccacccctcgcggcagcagcccccccggcagcccgtgcgtccgcaggagctcgtgtatcgtgtcggccgccgccgcgccaccaccgccacccacggccgttcttggcgccgcgcgggatcgagcgagcggcagcgcgcaggcggcgaggaggaggaggaggaggacggcgagaggccgttgcgtggccatgggagtggcgcggcggcg

SEQ ID NO: 32649 - DNA, 279 bp, Oryza sativa
  unsure (1)..(279): unsure at all n locations
  Clone ID: PAT_MRT4530_36837C.1
cccacgcgtccgcttaaacaatcaataattaccattattaccttcaagtacctttttccttgtcccctctactttatcctcctccatgattgagaggagtgattttcccattctttacagcttgtatgttcccttggattattgccactntaataatgtactctactcatgacccaagttgagttaaatggtattcccacanaagatcgtcgagtaattatgcatttcaaagtaaaaggggttcaatgcttcttttgttttgaatatagtatgattcaa

SEQ ID NO: 32650 - DNA, 244 bp, Oryza sativa
  Clone ID: PAT_MRT4530_36838C.1
cacgaggagagagagagagagagaactagtctcgagtttttttttttttttttttaaatggaaatcagaagggcttcatattaacattaatggatccaaagtatgagtcggcacactgaaaaaaatatgatagagaaaccgttctaataactgtaagcaaaatattatatgccaatgccacagtttgagctattgacacagtggatgagaaggacccagtcatatctcataaaaggggcatggt

SEQ ID NO: 32651 - DNA, 366 bp, Oryza sativa
  Clone ID: PAT_MRT4530_36839C.1
atggctgggtggaggcgggcgacaaggcaggcgacggtgtctgggtggtggagatcgggggcggcacggaggacgggaggagacaaccgaggcgggcaacgaggagaggaggcgggcaacggtgtctggtggtggagatcaggcgggcgcgtctgggcggtggtgatcggagccggcgcggagatgggcgtcgccgagtctgatgacgcagctctggcggtggagatcggggatccgcagtgccggcggcgggtgcttaaccataatcaattccaatcccaattgaacgagctcggaggcaaggagcaggggctgcgcgcgcgacggcggcgaccagcaagcacgtgcgaggcggcgaccggctag

SEQ ID NO: 32652 - DNA, 382 bp, Oryza sativa
  Clone ID: PAT_MRT4530_3683C.1
ttacagcaagtgcaagggtacacagggtccagtgatatgttctcacagggtcagtacacacaacagccggttccacaacacaggagcacgtcagatgcaggctgtgcggaactgttgagcaggcagaagcaggatgcaggatgcaggcaggcagcagcagcagcatgcacacacaccctgccactgcacccccagggacagccaccccagcaggcagttgcagctgcagcacaggcccagcatcaggttgaggttgaggttgcccaccccacaggccagctgtgagagggatgcacaagcttactaacagcagggcatggcgacatgcatgagtgcttgctaaaaatgtgcaggttaatgcatgactgttgttttgtttttt

SEQ ID NO: 32653 - DNA, 1459 bp, Oryza sativa
  unsure (1)..(1459): unsure at all n locations
  Clone ID: PAT_MRT4530_36840C.1
cacgaggggttgttcttgtgaatccagtagtacaggcatatgtacaacaaaggtgcatgattgcatcccagggcctcacttaataagtacaagaaacaaacaaacaaaaaaaaaacagagaaaaaacaaaaaattacactcacctagctnactaagcaattatatgccacacttgctgctgatggtgattaaaagctccaggttgatccaccgggttaactaataattaattaaaccacccaagctaatcactaattaggagacagtaattaattaaaaaaacattctgtccgtgacgtcacttcttcttggcgatagcgccgccgccgccgtcgtagcggcggctgctgctgccgccgccgccgccgctcctcacctcctccggcgcgatgaacgactccgggcagaggccggcgacgttgaaggcgacgtcgtcgatggtccacgcctcctccatccgcgtgacggcgcgggcggcgccgacgtcggcgccgaagcgggcgaggtgggcgacggaggtgcccgcgtgcgccaccacggcgccgtcggcggcgcggtagtcgccgaggcgggaggagacggtggtctcccagtacatcgccggcgcgccgggggtctggatgcgggtgagctgcgagtcgtcgaggcgggcgaggaggccgctccgctggctgaagtagcccgtcatgccgtgccggatcacctccgccgcgccgtcgccccaggcggagagcaccgacggcgccacgtcgagccgcagcgcgaagcagtcctcgccgtcgacggccttctcgccgacgtgctccgccgccgagaacaccgacgcgatcgtcaccgggtccagcccctggagggctcgccggagaggtctcgcgccgccgccgcgcgcggcgtgggcgtcgagccagggcgtgcggcgccacgcgacgcggccgtcgcagccggcggcgacggcgtgcccggccacggccatctcgacgagccacatgtccggcacgagctgccacactacgaagcacccctcgtgcccgcctccgccgccgccgccgatgccgatgccgccgccgggctccggcgccatggccatccgcaccctccccgccgcgtacatgctcttcgccgcgccctcgatcttggcgcaccccgtcgtcgcccggaactgctcgaggatgtactgcgccgacgacgccacgttgcgcgggtggcgcgggaggacggggacgggggagagcgggcaggcgaggacggagaggagcacgcggaggtcgggggaggggcgtccgcctccgccgccgccgcccacgcctccgccacctcccccaccggaaagaaaccggagcgggatgcgcgcccgcgcccagcggtggagcgccgcgtgcaggccggtcttccgccgcgcccgcgccgcctcctccccgccccccggctcctccgccagcgtggccagctgcggcgccat

SEQ ID NO: 32654 - DNA, 303 bp, Oryza sativa
  Clone ID: PAT_MRT4530_36841C.1
atgcacatatacaaagagcaggaggctgaaccatccactggcctgatgatgccagaaccagcacctgctgcttcccccggctccggcagctcagagggctcaagcatcgaggacacagcggaccgtcaggtcaccttctgcaagcgctgcaacgggctactcaagaaggcgtatgagctctccatgctctgcgatgccgaggttgccctcatcgtcttctccagccgcggccgcctctacgagtactccaacaacaggtactgcattcctcttcctctcttcagttctagaaacctgaattaa

SEQ ID NO: 32655 - DNA, 1526 bp, Oryza sativa
  Clone ID: PAT_MRT4530_36842C.1
caacgttttttttttttttttttttttttttaaaaagaagcttctgacatttattatttcatcgatgatttcaaagcgcgcaaaagaaaatcgaatacaaacaaacagcttgtgcttctctctctctctctctctctctctctctctctctctcctccaaatctttggaaagaagaaaaaacagtggaattaaaggctaataaaacaagaggagaagagagaaactttgaaggaccatcatatgtatgatcctcatgtgttgattcaattgagttatttagtagtaggagtttagttgtccttggtggggtaagaggccatcttgttgatgccacatagaccttcaccctttgcctgggcccctcttgatgcggttgtatccctgcccgacccaacttcaccggccccagtgccttcctccatgcggttgtacccctgctcgccccaatgtgccccccatgagttcttcacgatgatgtaatcttggcccttgcttgtaccatatccaacggccgtcacaccgtgatccagttgctcaccgcatggaccatcaaacacacccccgctgtagaactggaagtggcgaccggatgcttcaatggcgacgctgacaggctgatgcgccaacgccttcaccagcgcctgctcgtcgttggccggcacgtcctcgtacccggagatggtcaccaccgccgcgcccttcccctcgtcgcagtcgccctcctccatggcgtacgggtacgcctcctccgtgcgcagcccgccggtggaggcgatgtaggagaaggcgtagtccatgaggccgccattgcacccgttgttcccgtccgtgctgcagtcgatcagctcctgctccgacagcgacgtcaggttccccgtcacgatcgcgttgatcccctccaccgccgccaccgtcgagaacgcccagcagctgccgcactgcccctggttcttcacctccgtcaccgcgttcttcttcctccagtccatctccttcggcacctcgccgttgctcatcttcccgtacctgaactcctccgacgagtagtgcttgctgttcgacctcgtcggcggcggcgtgaggccgaggtaggtcgccttgaactcgtcgtgggtgaggtcggcgaactcgttgagccccagccagtagctggtgaccttcttgttgatgtcgtcgatgtggttgaggttgtccttgaacacctcgaacctcctcaccttctcctcgaagctcgcgtacgccttccggtactttgccacccacttctcgaacagctcgatcagccggtcgtgcgacgccaggtcctcctccgagtacccgacaatggagaactcgccgccgctgcggccggcggcgcacgcggcgccgccgcacaggcacagcagcaggaggacgacgcccacggtcaccttcgtctccatgtcgatctctgtctgaatttttcctcttctccttcttctttttttaactgaagacgaaagaaacccaccccgtccgccggcaggcgcaccagctttacactata

SEQ ID NO: 32656 - DNA, 963 bp, Oryza sativa
  Clone ID: PAT_MRT4530_36843C.1
atggcatttggatctggttccaagaaacgcaggcgatctgagatcgcagcacatgaagatgtaggaggagctgatgcagacgttgtcgtccacgaagatgacagtaacacgaacgatgaacttggggctgatggctccgaggaagaagatgcaggatcatctaaaaagagtggtactgtaaaccctctttacgatgaagtaactgtcgttaaggcaccaaaaggaaagaacgacagtggaacaaaacagtggcagtgtaagcattgccagaagaaattgaagggtagcttaacgagaattcgtattcatttgcttgggcctccacctggcaaaaaagcagaggtagcacgctgtgttgcgctactaaaagatcctatcaagtgcaaagctctgcgggataaggttaaaaaagctgaacaaaatggagatggttcgaaatcagttggtactaggcagggcaatccgttggctgattgctttggagaagggaaaagacatgatgcagatatgaaaatagttaaatttttatgtgctaacggcattccgtttaatatattgagaagcccacaatttgctgaaatggtcacagccattaacaaagctcccagtggatacaaaggtccatcctctgagaaggcaaggacaactctgctagatgcatgcaaaagaagcgtagaacatgatttggcaatagtcaaaagtacatggtgcacacaaggtgtttctattgtgtctgatggatggactgatataaagaacaaaccacttatcaatgtgattgcatctaatagccgaggttcatgctttctatatgcagaagatttctctggagttgaaaaaacaggggaagctattgcagagttcttattgaaggctattgatgaaattggaccaggaaatgtccttcaagtagtaacagacaatgcatctaactgcaaagcagcaggcaaagaaattgagaaa

SEQ ID NO: 32657 - DNA, 407 bp, Oryza sativa
  Clone ID: PAT_MRT4530_36844C.1
ggggaaacagaagacggaaggagagctaccgccaacataacaaaaagagagggtaaccctagtgataaaggcaaagcctaaaccaccaaccatgctactgcgcaggcagctaaagggaaacattataaaacgctacgcagacaacaccaaaaaggctgcaagaaaactgcgacccggaatcaacaccgacggaagcgcaagaccctcagggggaaacctacagggaggtgaccgacgccagaaccctctgccgagggccgcccaaagaacgagggagggtttccacccaaagggcgagaccgaccataggggaacaccctcaaggtggaaacggtgcccacatacttctgacatgccgaacctggaacaccttaaagggctacccccgcaaacccaccaaaggggga

SEQ ID NO: 32658 - DNA, 258 bp, Oryza sativa
  Clone ID: PAT_MRT4530_36845C.1
atggtgatgcctatccgcatgccaaggtggccagagttaatggccacccccggtggggtgggcccggagattgtgtgctcccacaagccagcgtgccgcgtcatccgcttcgggcatttctggtttccccgcgtcgaagcaaaggggagacaaatactacgtgccggcctacccgacgccactgagtggggcactcaggggatcaactgcggctgttcggtcacgcggcgatggtgcacggagggctctaggttctag

SEQ ID NO: 32659 - DNA, 276 bp, Oryza sativa
  Clone ID: PAT_MRT4530_36846C.1
atggcgagggccccccgacctagcggcacttgggttgctcctcatgtggataaacacttgccgtgctcgtgcaaggcatggcgggggagcacgggagcagcgctcggccatggcggcgtcgagctagggcggcgccaggttgcagtggttggcggcagtggggtggcggcagccggcggcggggtggtggtgcccggcgtcggcagtggggtgccggcggtcggcggtggggtggtggcgctcggcctagcggtggtggggagcgaatctggctga

SEQ ID NO: 32660 - DNA, 1037 bp, Oryza sativa
  Clone ID: PAT_MRT4530_36847C.1
ttagaaaaaaagacagaacaactatatttgggggcaaatccaaaagatacagatatagcatatctgaactaaatccacaggcataccatcacctgaatagtatgtaaactgggtattttccattctactaaatccgcatatccactaatatacaacaatggagcgaggtaagtaacaatgtttgaaggtaaccaaccacaaaaaaccttataatattacacatttaccattgttgccatcaagacggttgttcattccacccgagatacacaacaagagttagaaatgttcacccatcagcaagttcatcagtcactgtcactctcgacgccatcatcgctcccttcggtccggcggagagcgtcgcgcgcggcggcgagcgacgggtcgatggaggcggcggtcttgaaggcgtccagggcctccgcggccatgcccttccgctcgtagcactcgccgagcagcgcgtgcgcgcgggcgttctgggggctgaggcggacggcctcggcgaggtcgtcggcggcctggtcgaggcggcgtcggtggcggcggtggagcgcgagcgcgatctcggcgcgcttcgcgagggcgtccccgcgctcccgtggctcgagggagcgcgcgagcggcggggcgagggcggcgtcgagggcgcgcagcgcggggaggcggtggccctggaggtcgagggcgagggccttgaggatgagcggggcggcgtcgcgcgggtcgagggcgatggcgcggtcggcctcggcgagcgccgcgcgagcgagcgggccgggtggcttcttggtcccgcccgcggcggcggcgcgcgcgcgggcgaggagctgggcgccctgcgcgaagtggcggcgagactgcgcggcggcggcggaggaggagccggcggaggaggcgcggcggaggcggtgggcggcgcggcgggggagggagtggagggcgacgagcatggcggcggcgaggatgaagaggaggcacaggacgatggcctccggccaggtggcggcggcgcccagggccagggcagccat

SEQ ID NO: 32661 - DNA, 491 bp, Oryza sativa
  Clone ID: PAT_MRT4530_36848C.1
ttctattctcgttgagctcatcttagggcacctgcgcccgagagcttccacttatcctacacctctcaagtcatttcacaaagtcggactagagtcaagctcaacagggtcttcttttcccgctgattccgccaagcccattatcttcgctgtggtttcgcgggatagtagacagggacagtgggaatctcgttaaccattcatgggcaatttggtaaggttggaaatggcatcaaagtgaacaggcccatagttactcccgccgattacccgcacttggttgaatttcttcactttgacattcagagatctgggcataaattacattgcgtcagcatccgcgaggaccatcgcaatgctttattttaattaaacagtcggattccccttgtccgtactagttctgagtcggttgttcgacgcccggcgaaggcccccgaagggggccgttcccggtccgtcccctggccggcacgtggcggatcgatctc

SEQ ID NO: 32662 - DNA, 375 bp, Oryza sativa
  Clone ID: PAT_MRT4530_36849C.1
atgactcatccatctccagctcctctccacgccgacgtacctctttggctccactgccggccaccaagtcttctccaatgggctgctcctgacgcaacccggattccaccgatgccaccggtgccaccgatgctcgccccagggccgggagagaaaggagatttaggcagtctggccagtggtctatggaccatttcgactgcatggctcttcggcgtcatcttccatcatgactaccgtgattgcgtcaacatcttcatcctcaatgcgtcctcgtgcaccttggtccatgatgccctcccgcatgcatgtgaccactacttgcactccttgcaccagctctaccctggtctgcaagttgagttcggcctgtag

SEQ ID NO: 32663 - DNA, 696 bp, Oryza sativa
  Clone ID: PAT_MRT4530_3684C.1
agttgatgtggtcatagatcagacatatgcttcagatcctgcagagtacaaactatccacattcttggagagcattaatgtggaccgtgactcttgttttagttttgtagccaaccgtagcatatggagatttgataaaagaataggatattcgaagaaaaaagattggttcgatggagctatctcccagccccagttggttcttgctgatctaatagaaattttctttccaacggggaattacacaacaatttacttcaggaatctaatgaaggatgaaggggtcactgaagttgtccccgaaatgtgtagtagaagcatatcaacacccatggagccaacaatcttgccctgccagtgatgaccttagatgaatatgaagacagaggaccttacagctactgtacccacaaaactatggcaattaaccactgagaccattacaggttgccgataaagtgatttgaagttttaaacaaagcagactagattgcatatttgagaaagaatcatggtgacaaaggacaatgatgtctaaggaatactatgtatctatctcatcatttgacaatgaaagaattgttctcaatatatgatatttcaataacaaaaaaaaaaaaaaaaaaaaaaaaaaatataagattgaggtaaaaaaaaaaaaaaaaaaaaaaaaaaaaaaaaaaaaaggcctcgtgc

SEQ ID NO: 32664 - DNA, 234 bp, Oryza sativa
  Clone ID: PAT_MRT4530_36850C.1
atgcagtaccactacgagaacttgcaggaacagggattcggccagttaggggagcagggctcagaggagatgcttgagatcaaaatgggcaagagaatcagaaacagaactggagtaggacttacatctatctattatattattaaaacaactttgaaaggagacaccatgttcgttgtggaggctagaaattcccacattaatcggagaaaaagaaaaacagagtctatgtag

SEQ ID NO: 32665 - DNA, 399 bp, Oryza sativa
  Clone ID: PAT_MRT4530_36851C.1
gacccacgcatgcggtcatctatatctcgcctgctcctgctggcgtagccgaagatgggatcgcggcgcaacggcagccctggacaccctaggggagtatgaagccaccgcgcatcgaatggggtccccggcgcggcccagggtaggctgcaggtgcggcgccttaagcctctgcgacgagccggcagcggtgctcctttgaccagacgctacggcgagaggatttccaggacagccgggtggtgaggtcacttggtagtatccatgagcaagaaacttattgcagagaaataataacgggagctatcgagagctgcatgaagaaacaaggggacagcttgctgaatacactgaatgggatgagtgggaggctgtaacaggggagagctgaattggtgt

SEQ ID NO: 32666 - DNA, 318 bp, Oryza sativa
  Clone ID: PAT_MRT4530_36852C.1
atgaggcgtgctgtggaggtcgagggaatagtgaagctccgaccgttgtacgcatcaaggcgtggggtgctaggagcagcacttcgaccttggagaggagaaggagagggggcgccgggctccggtggcgaggaggcggtaacgccggcggccactgaggtggaggaagaggggaaaggggaaaaatggattcctctcatcgaggaaagctcgatggcgcgagggattgtccggtattgctccggcgatgagaggcggttcgaagaggaggaagacaagggagaatcggcgacggcgatggcgtggaaagaaggatga

SEQ ID NO: 32667 - DNA, 345 bp, Oryza sativa
  Clone ID: PAT_MRT4530_36853C.1
gaagacaaaagttatgaacttactggtacaattaagccacgccatgcattctgcatagagattgtattgaataattacactattgtatgcattcacacggatgcacatgctcgaatcaagcccattaagttcatgactccttctttccttctttttattagagacatgtgcgggtgacgtagacatactatgctgctaacaaggagtgcgcgcgtgctccactatcttattagtcagattgtgccatgctcttgcaccttgccatattatacatccccttttgtggttcaactgcaacttgattgggcttgatagaagtaatgactaaacccaacgggatcataa

SEQ ID NO: 32668 - DNA, 288 bp, Oryza sativa
  Clone ID: PAT_MRT4530_36854C.1
accccccaagcgtcttaatacgactcaccgattagggaaaacgtgggggacaccctccaaggtgacccggtgcccggaattccacacaggcgtcgagacacccaagcagtccacacggagacatctccatttggttgggttggtgggtgtttgtgggtggatagtggattggttgagcagatgtttgcagagattgcgagatagcgttgagggatagtttaatatgggcatgaacatgctcccagaaaatatgaggggtgattgaaaactcccaccagatgcaagctt

SEQ ID NO: 32669 - DNA, 236 bp, Oryza sativa
  Clone ID: PAT_MRT4530_36855C.1
tataaatccgccaaggctggaagcggcgcggcgccacgccacagagacgcgcacgcacggagcactagcagaagtggcagagaggaagagtaacctagcttgttgattccgccgccatggagaaggcgctcgtggagcggctggaggcggcggtggcgcgcctcgaggccgccgtggcctccggggcctcgctgtcggcggcgccgcgggacctcggggacgggctggacgcggtg

SEQ ID NO: 32670 - DNA, 250 bp, Oryza sativa
  Clone ID: PAT_MRT4530_36856C.1
ttttctgttttttttttcgacgaacaaaagccagatggggggtccttgcataaatgatggaacttgctcttacaaccatcggagcacactatgcgtaagaaacagaagtaagctgttgatccgtactgtattagcatacatccatcgtagaatgaagtaggtggacagtggtcctccagatacaagaacaacaaatatgacaagggcgacggatggacggtgtgatacaggacgataattgagatcgaag

SEQ ID NO: 32671 - DNA, 546 bp, Oryza sativa
  Clone ID: PAT_MRT4530_36857C.1
tttttttttttttttattctccttttttttttttttttggtaaaattcgtcaatttggattctcaatagcgtttagtatggatttgatttttttcgttaatttgtctgtctgtacagcagcagcagcattacattacatgcatgcaactaatttggtagcctatctagctaattgaagaagatggccggctccagccgtggctccgtcaagtccaccaccgtctcctcctccatctccggcgatcgccaactctctccgacgctgcacttcacggctaacctagtgctgtgcatcgtgtcgccggcgctgctgcttctcccgatgcgggtgaccaaggtggcggcggcggcgtgcttgcgggaggaaggagcgatggtggcgaggatctggacgacctcgctcatggtgggacgcgactcgggctcccactgcaggcactcccgcgccaggtgcgccatgatctgcatctcctcctggggaaccgccctgcagcgccgggtcggagtccgcacacagcggtgtcgcgcaacgggcgcgccaaggga

SEQ ID NO: 32672 - DNA, 425 bp, Oryza sativa
  Clone ID: PAT_MRT4530_36858C.1
tttaaccctagaacaaactctagacgcgccgcgggatattcatgggtgaattgggtagctaggctctatacatatgcgcttccacatcacagagattagtgactatctcatggcctatctggacatgctctataaaatcactgggtacgcaaactcggcacgaatcaattcatcggactgctacacatttgcatgcctacatacacactaccgcccgctcgggggaggggtaccgaccttacatgatctgatggctcgtcgtacatcacatataagaacccttccatcaatgactgctgacgggacatctgccatggcttgccccacccgaagtgcaccgtgttgtacatcgtgatgcccaggcagataaccaccctcaggtccgtctgcgggaggctggcattgatcggacgatctggcattcc

SEQ ID NO: 32673 - DNA, 603 bp, Oryza sativa
  Clone ID: PAT_MRT4530_36859C.1
atgcgttcgaagaagccgctaccgcagcacaccaagatcagccaccgatcggcgacaccaatggtaaagatccggagcggagggaattacctcgacaggctacccctccacctcgtggcattggagatcttcgagatcaaatcaatgatcgccgagaagcacgacgcacatgggacgacgcaaatcgctcccggcgtcatgtctcttcacgacgccatgatcgaggaaatcgcccaaacgaggaccgagactacaacgatcgcgaacggcgggggccagacaatactggtcatggccgtcgccgcaacgacgacgacgaaggcgatcggcgccgagacaacagcgagagacaacgacaggatgcccgggatccaggtcgtcatcctcgtaatcgggaacgcaaagctggcggtgcagtgcgacaagcggagcctcgacatggtcgagcaaacgcccaccccacccgccacgtctgagccacctaagaaagtgagcaagccaaataagacgccaaagccagacggcaccatcaagatcgttccgctctctagtgctaaccccgacaagactatcaaaatcgggactacactagatgagaaatag

SEQ ID NO: 32674 - DNA, 205 bp, Oryza sativa
  Clone ID: PAT_MRT4530_3685C.1
aaaagttcaagcaacgtacttaaggtacttgcttgggcgaaagaaaaaaagaccgagcttaaggaatgcatggatgattgaagaagttgattggggaccaaaccaagaccttctccaagtcttctttcatctcaccacgtcacttttggtccatagaagacaagaaataaagttctacacgttttggattcgaattcaggcctct

SEQ ID NO: 32675 - DNA, 443 bp, Oryza sativa
  Clone ID: PAT_MRT4530_36860C.1
acaccaggtccaagcatgcttttgagatggcccaagctgcgcaattgcttttggagcgacaacgttcggtggaaagcttgtggtgcctggtacgacatccgaattggggataccagcacccgtgtgtggatgcgacctgatccgtcacatggcactagctaccaatctagacgagccctgcctcatgggaggcctgcagataccaggggattgtgtgttggccccagagaagatgtgatgatgaacgcctgcttccgagatataaatgtgttaaatgtctgtatggttttaatgtgcaagtcgaaacctgataacttatgacttgggttggttatcatgggtggttggttgggcctggtcatgggctcatattttgtgtctaattttctcgcgcttaatctaatatcgaagtgttgcttccccaaaaaaaaaaaaaaaaaaaa

SEQ ID NO: 32676 - DNA, 729 bp, Oryza sativa
  Clone ID: PAT_MRT4530_36861C.1
ctatttctcgtttagtgtcgccctgatcttgacagtcttgtcggggttagccctggagagtggaacgatcttgatggtgccgtccggcttcggcgtcttatttggcttgctcactttcttgggtggctcagtcgtggcgggtgggctgggtgtttgctcgaccatgtcgaggctccgcttgtcgcactgcaccgccagctttgcgttcccttgaataatgattgttcccttcggtcccggtatcttgagcacttgatacgcgtagtgagatgcggccatgaacttcgcaagtgcagttctcccgatgatggtgttgtaagcttcgtggatgtctgtctgacgatgaagaggatgcggatgatgacgatgacgatgggtcgcttggttccagcgtacggttacgaggatgatgacctggatctcgggaatcctctcgttgtctctcgctgttgtctcggcgccgatctccatcgtcgtcgtcgttgcggcgacggccatgaccagtattgtctggcccccgttgttcgcgatcgttgtaatctcggtcctcgtttgggcggtttcctcgatcatggcgccgtgaagagacatgacgccgagagcgatttgcgtcgtcccgtgtgcgtcgtgcttttcggcgaccgttgatttgatctcgaagatcgccagtgccacgaggtggaggggtagcctgtcgaggtaattccctctgctccggatcttcaccat

SEQ ID NO: 32677 - DNA, 445 bp, Oryza sativa
  Clone ID: PAT_MRT4530_36862C.1
tttgggtttttttttttttttttttttttttttttttttttttttttaaatttttttttttttttttttttttttttgtttttttttttttaacgacaaaccacgaaccggggaattaaaggggccccaaagaggggtcacaaaaacaacacagggcacaggagggaaaggtacaaggaaacccgggaaaaacgaaaaggaaagggttttcaaaacccgacccacaaacgggtagaaagaagcccacccgggcagaacaaagggaaggcgcaggaaaaaagcatgggcaagggaccagggaagaaccccgaacccctttaggacttgggaccctaaaaaaccttgggaccaatggggaacctggaggcgaccccccgggagcccctttccaggggggggggggccccggggggcccggggaaaatccccctattccaaggccttg

SEQ ID NO: 32678 - DNA, 350 bp, Oryza sativa
  Clone ID: PAT_MRT4530_36863C.1
cggcggcacgcgagacttcggcgccttggagcaccacgccgccgacggtgcgtttgtagcgcgggcggcgatggtggccggcagccacacactacgcgcgggtactggagctctgacagacggaggccaacccgggcgctggccgtgccatccacgcgcgcgccagcaaggatggaactctcaacagagcctacctacggaacaacctgctcttctactacggcaagaccgccggcggcgccggagggatgcggaacgcgcgacgcctgtgcgacgagcatcccctaggcgcgatacaacgagcacacctggaactcgctcctgcaaatccacggcaagaccggacgcta

SEQ ID NO: 32679 - DNA, 723 bp, Oryza sativa
  Clone ID: PAT_MRT4530_36864C.1
agaagtcaagaacccatttttgtgctttgtttctgcttgttatatggagtttattagagtaaaagccttttctttttcgttggtcgtgtagacgctgcagcttcggaagatccgctcttcgtggaagttgaagccagaactcctgcgcggagcgggtgcgctcggcctcaagcgccacctcccgggcccgcagcgaggtgtcaacctcctatgcccgccgctcttgggccgcggcagcgtcgaggaccccgcgggcatcctcagcccttttcgccaggtgcttggcgtaggcttcgtactacaggcggatgttgcctagcgcctcctctaaggcgctcgaggcgatgagcgccgcctaccgctcctcctccgtctcccgcatgaccgagtccagcgtctcctcgcacgcctggatctccgccagccgggcttggcacattttgcgccccgtctccaccaggccatccacggcgcggcgtccctcatccacccgcgcacggtccgccgtgagctgcgcccattctgcctccagggctgctcgctcgtccgccagggcttgaacttgggcgttgagcccctcccggacggtggagtcggcgggggcgagcacctgcaggagcggctccatactcgcggggatcggggaagaaaaggtcacggtccgcccccgggacgacggagtgcggctggaccccctgcgggactgggggctgcgctcggtcc

SEQ ID NO: 32680 - DNA, 1305 bp, Oryza sativa
  Clone ID: PAT_MRT4530_36865C.1
gcacgaggcacaaagtctgaggcggaactaacccaccaatccgccaccaacccagagcgccgagaagcccaaccgcggcgagcagtgtgccacgggccggcgcgccggcgaactcctcctcctatgctcgccgccggcgatgcccagcccgctgaaggagcgacccgccggccgactcggccgcctcctcgccgcgctccgcccggcgcgcgctggcccgctccccgtccagacaggcttccccacctccctcgctgacctcgtcgtcaagaaccatggccgcctcaagaagccctccgcctcggcgtccaggcgcaagaagcgcggcgggccggaggctcccccctcgccctcgccctcgccctcgccttcccctccgccgcagccttcctcgccaccaccaccaccaccatccccgccgcctgcggccgctgtctcggtctcgccgccaacccagccgagaccgagaccggaacttccgccgccgtcaccgtcgcctccttctcgctcttcctgctcgagtccgcccacagcacccacctcacaacaccaccatcgccgctacctcggctggatatcccatggcagcacccccacctcaagccgtgcgcccgccgcgaactcccatagcccccgccaccacaccactctccctcgccaccgtcgccccctcgcccactgccacaacaacatccgtctcttccggccaaatctggtgtggaagggcctcgatctagccattggggccggatccacgctccgttgtcactgcgcctgctccttccccacctcctgccacaaacctctcctccgctgccatctccggaaccgccctctcccccacctcctgcccgtccctctgcacacaccgcctccacgccctctaccccgcagccacatctcctccaaagcctcctccgcaaggcaagctgccgcccagccgccgtcagccgggcacggccacgtcgacgcgcccgctccgagcaccgccagcggctgctgtccttccccctgccgccaagctccctcctcaccgcgccggccttctctccctcaggcctctgccgcgctgggctgactagcgcccgaccgccgttgcctcggcccggtcgccaggtcgcgccgccgcatccagcctcgccgctgcaccggccgctgcccgccctgctccgccggccagccgctccgccccggatagagagagagagaggagtgaggagtgaggatgacatgtggggtccacgtgggtcccaccattttttaattattttatttgtggaactgacatgtgggtcccacgggttt

SEQ ID NO: 32681 - DNA, 570 bp, Oryza sativa
  Clone ID: PAT_MRT4530_36866C.1
atggcgaggacggtggctggcggagtggagcggggcggcggcggcggtggacgagcgcgcggccggcggagccacccctcgctaccggtgccgtgcccgtgccttctccgccaggcgtggggcagcctcaacgcgctcgtcggccgcttccgcgccgcctttgaggagcatggcggccaacccgaggccaacccgttcggcgcccgcgccgtccgcctctacctccacgaggtctacgactgccaggccaaggcgcgcggcatcgcctacgagaagaagcgttggaaacgcccgcccacctcgtcttctcactctcaggccgccgccgccgctacctcctcggcgagccagccgctagcccgctgccgccaccgccgttgccggagagatcagccgacgtggttgactgtgcctgattccttaatggtggttttatgtgcacaagtgcaaattaagagcaaagccgagcgtaaaaggctgtggatgctgccatctgattcaccttcaactggaacccatctgaccttaaaggacagctcagaaatttcagagaatacaattagttggtaa

SEQ ID NO: 32682 - DNA, 440 bp, Oryza sativa
  Clone ID: PAT_MRT4530_36867C.1
cccacgcgtccgcccacgcgtccgcagaaactgaaaaaagttggggtttgcaaaagaaaaaaaaaaaaaaaaaaaaaaaaaaaaaaaaaaaaaagggaggtggatattgtggtatcctagcttactaccgctagcttgcttcgtcatacttcgtctgtggtggttcacctctctgacctcactcttcgcttgattttaccgtcctaatggtggcatgcctgcgtatggctaacttgtttgcctggcaggagaagctcctttttgtatgtggcgcaattatggtatggtcgtgcccctttgtcctttcttgccttttctcctactgatcatgcacatcttccgtcccccgatgtagcgtttttcattccgttgtggtgtgtgcttctcacatgagttactgtactaccttgggcatcctgatgttccgctttttttttttt

SEQ ID NO: 32683 - DNA, 196 bp, Oryza sativa
  Clone ID: PAT_MRT4530_36868C.1
aaaacagaagtgtctccataggggtctaataactcacaaagataggcatcgctagctaataaaagtcatactgtaccaaccgatccagggtactaattaatacacaagaataagcctcatatattactgaagtaggataataaagcggggataaaaccaccaccctctcaataaatcaatcaaagggatgtgcgcc

SEQ ID NO: 32684 - DNA, 343 bp, Oryza sativa
  Clone ID: PAT_MRT4530_36869C.1
ctccctcctactgatagcggcctggctctctccacaatcgactgttgtgagggccaacgcttctacatcctatagcatattatacagggtctccaaagatctgtgcaaagttagtaaactacagcccaaacttgatcaccactttagacttatactctcactcaaccttatccaagactcagctaagacattcttacgcacactacacgctcttggagggtggtccctatctgcatgtggcagcgcaaggtgcataatcttgtaaaccaggggtctcaggtgtgcatcctcgcactccccacggaggtagcttaccagataatcgaccctctagtgaatctcc

SEQ ID NO: 32685 - DNA, 306 bp, Oryza sativa
  Clone ID: PAT_MRT4530_3686C.1
atgggcgacgtggaaagagatgctcgcgtcgatacggtcgtcgtcgtcgctgccggcaagggaatggcgccgcggcagccgtcgccggaggacgccgacgttggtgccatgtccaccacggacggcgggaaccgcgtccagctcgacatccgtgagggccatgtacagacggtggctgccacactctccatgctgcgcgactcccccaccctgcttcgccaccgccgccgcgtcgccgaccgccggacctcctctcccgcctcgtcccggcgaccttcttcccacccgccggccggcttgccctga

SEQ ID NO: 32686 - DNA, 252 bp, Oryza sativa
  Clone ID: PAT_MRT4530_36870C.1
cgtccgattcccggtcgcccacgcgtcgggtctcactactagcccacagtccagagtttgcatttcttgagctggcgatccatcgggagggagagaggcagagcggggaggggagaggatgggctggatctttctagctgctggcaacacttcgagtctcccggtccattagtgcgtgggtatccatatatgccttggggagcataaaacaaatctctgtgatgacagcatggtcattactgggctcactcg

SEQ ID NO: 32687 - DNA, 191 bp, Oryza sativa
  Clone ID: PAT_MRT4530_36871C.1
cgtttgcagaggtacttgcttgggcgaaagaaaagagaccgagcgtacagaatgcatggatgattgaagaagttgattggggaccaaaccaagaccttctccaagtcttctttcatatcaccacgtcacttttggtctatagacgacgagagataaagttctacacgttttggattcggattcgggcctcc

SEQ ID NO: 32688 - DNA, 448 bp, Oryza sativa
  Clone ID: PAT_MRT4530_36872C.1
gcacgaggcccgactctccggctccgcctacgcacgccctcccgtctgtccgcccgctccaccgtctcctccgctcgtcgcctcgtcggcgcgcgttgcgatgcgcggtggtgccgtacggctgtcccccgccccgctagccgctgccgcctccccgctgccgcagggccgggccacatggcccccggtggtggtgtactgttcgccggtacgtccgtctgctcggaggaggggcaggatgaggatgaggaggtagcgcatcggcggcggcggcggcgcgacgatgcgggcaccgaaaagcgcgcgcgaagttttttgctcaggatttcacacatcattttgggctgatgtgctttgtatcttcctgctatttttcaatcaacatgaaaattccattcagatagatagattcaaaggctatcctgagtgtgtacaacttgtacaaaat

SEQ ID NO: 32689 - DNA, 321 bp, Oryza sativa
  unsure (1)..(321): unsure at all n locations
  Clone ID: PAT_MRT4530_36873C.1
tgagggcaatgctggtggtggtgggccccagcagtacacgcttatgttcgaccagattagggatgagaggagaggcagtgctccttcaacgcctaccgtcgagcaactccagcgtgccactccaactcggtacaatcagcacaatcagcatgcaaatatgcgcaagagattcacatntttcggactgtgcttgaagtagaggaatcatcatggatggatcaaggaaattgtgtattaatgtcaatggatactgcttttgttgtgcatgtatggagttattgctatgagttttccatcaataaanaaaaaanaaaaaaaaaa

SEQ ID NO: 32690 - DNA, 2832 bp, Oryza sativa
  Clone ID: PAT_MRT4530_36874C.1
atgtcggtaaagaatgcttcatctatatcttttgaggatattgagaaaagtatttccaactggaagattcctaaggttaatattaaggaaatatatcatgtagaaagagaaatcaattctataagagctaaacatcaatatcactaccttcactttggtcttatacaagttgctatcagatccttgactagaaagggtttgaacgtctctgttctggcttgtctaagagattgcagaaataaaaggttcaaagattccttacttggcatgatggaagccagcctcagtaatggtcttgtttattttaacacctttcctgatttttctgtatccctctcagacacagatatccataaagttctcactctcaacttacaaacatctggttatgaactagaactagggagtgaaaacatctccgttacctacagagtttactacaaagccatgacaactttagcaccttgtgccaaacattatacaccaaaaggcctaaccactctccttcaaaccaatcctaataacagatgtactacccccaaaaccctgaaatgggatgagatcaccctgcctgagaaatgggttttatctcaagctgttgaacctaagtctatggatcaatcagaagtcgaatccttgattgaaacaccagacggagatgttgagataacatttgcttcaaaacaaaaagcctttctccagtctagaccttctgtcagtctagattctaggcctaggacaaaacctcaaaatgttgtctatgctacctatgaagacaactccgacgaaccttcaatctcagacttcgatatcaatgttatcgagcttgatgttggctttgttattgccatagaagaagatgagtttgaaattgataaagatttgcttaaaaaagaactcaggcttcaaaagaaccggcccaagatgaaaagatactttgaaagggtcgatgaaccatttagactaaagataagagaactttggcacaaagaaatgagagaacaaaggaagaacatctttttctttgattggtatgaaagtagccaagtcagacacttcgaagaattcttcaaaggaaaaaacatgatgaaaaaagagcaaaaatccgaagcagaagatttaactgttatcaagaaggtttctacagaatgggagacaaccagtggaaacaaggtagactctgttcatcctccatttgaatccattcaattatctcataatagaggaaaagcttgtccactaaaaagtatttctaaaaatacatatggagaaacagcaaaggttgaacacataggacatttggtagaacaacaaaattatgcaaatatatctctacgttctcttggtcaacaaacagatcgaatagagacaatccttatggaaggctacaaaacaagaagacctgaggtaaagataaatattccctctaattctcagtcttctagttctcagtctgttagtcctatgtttgtcccaacaattgatcctaacatcaaacttggaaaacaaaaggcttttggacccgcaatttctgaagaactagtcagtgagctagccttaaaactaaataatttaaaagtaaataaaaatatcaatgagatttctgataatgaaaaatatgatatggtcaacaagatttttaaaccttctacacttacttccacaactaggaattattaccctcgaccaacttatgcagacctacagtttgaggaaatgcctcagattcaaaatatgacttactacaatggcaaagaaattgtagaatggaacttagatggctttactgaatatcaaatctttactttatgtcatcaaatgattatgtatgctaatgcctgcatagctaatggaaacaaagaaagagaagctgccaatatgattgtcattgggttttctggtcaattaaaaggatggtggaataattatttaaatgaaactcaaagacaggagattctttgcgcagttaaaagggatgatcaaggaaggccattgcccgatagagatggtaatgggaatccaaccgattttagatggtataaagatactttcttgtcaaaactatataccctaccagaacctaatcaagacttttggaaagaaaaatatatttctggtttacctcctttatttgctgaaaagcatatcactttaattgattctggtgctgatgtcaattgcattcgagaaggtattatccctcataaatatttctgtaaagccacccacagaattcgtggggcagatggaggacttttaacagtagaatatcaaatccctgaaatctatatttgcatatctgaactttgcattaaaacatcttttctactcgttaaaaatcttaagcaagatgttattttaggaacaccgtttttatcactcattcgtcccttccttgtcacaaacgaagatattcaatttgagataatgggcaaacaggtgagcctaagattttcgtctaacacagatgagattcttgaccagcttgttcagaccaaaagagaacaagttgtgaattcaatatatttacatgacaattctttcccaaaatctatggacttgccagaaattgaagaagctatcaccacagattatgaatatcagctagttttccaaaacaagatcacaaggatttttatcagcaaatattacaaccaaagttatgaatacttcaagggagcagggcgcataattaaaccggattttggaaatgaatgctccaagaaaagttactacagaagcctggctcagtggtttcagaaaaaaacagagccgtcagagatcgacacggtgcaatcagcacccacgataatcaacgaagataatgaataa

SEQ ID NO: 32691 - DNA, 1059 bp, Oryza sativa
  Clone ID: PAT_MRT4530_36875C.1
cctttcaaagtatcttttcatcttgggtcggttcttttgaagcctgagttcttttttaagcaaatctttatcaatttcaaactcatcttcttctatggcaataacaaagccaacatcaagctcgataacattgatatcgaagtctgagattgaaggttcgtcggagttgtcttcataggtagcatagacaacattttgaggttttgtcctaggcctagaatctagactgacagaaggtctagactggagaaaggctttttgttttgaagtaaatgttatctcaacatctccgtctggtgtttcaatcaaggattcgacttctgattgatccatagacttaggttcaacagcttgagataaaacccatttctcaggcagggtgatctcatcccatttcagggttttgggggtagtacatctgttattaggattggtttgaaggagagtggttaggccttttggtgtataatgtttggcacaaggtgctaaagttgtcatggctttgtagtaaactctgtaggtaacggagatgttttcactccctggttctagttcataaccagatgtttgtaagttgagagtgagaactttatggatatttgtgtctacatgatatatttccttaatattaaccttaggaatcttccagttggaaatacttttctcaatatcctcaaaagatatagatgaagcattctttatcgacatagtgccaatagacttctcgctactgcacgaggctttgatcttcttaacagcttgagtatgtttagctgtccaagctggaggctttttcttcaacctctcggttaaaatctttctgtcttttgcaagatctttataaaaatcggagacatagtttaaacaccctagaaatctttgcaactgtgttttatcttttatctcatctggaaatttttctgcaaattctattactcttgctactggttggactcgatcatattgaattttataaccgagaaacttaggaatcttccagtcagaaatacttttctcaatatcctcaaaagatataaatgaagcattctttaccgacat

SEQ ID NO: 32692 - DNA, 3186 bp, Oryza sativa
  Clone ID: PAT_MRT4530_36876C.1
atggacgaggtaattaccgcagagaatgttgctgaggctgttgatagtataattgacaaactaaagaaatcagatgtatcaaatgtggtctattttgatggttgggaaggattgggtgtatctgctgtcctcagagctgttgccgaacggcttacactgggccagatcacggacccagaattgaggtttgaaaagataatccacattgattgctcgaggtggaaaagcataagggaaatgcagaggaaaattgcagagaaactagagatgacccaagcaaaagatcttattgatgagcaggatgaggctgatgatatcaatggaaaagatgaaagctccagagacgtgatcaatgatgttggaatagctgttaatgatgtcctaatgagtggaagatttcttgtggtttttcataatgggagtgataatgaaataaaagatgtaactaattttggtctgcctctatatcagctgtataagggaaacaaaatattgtggaccttcaggggcaggtttcggctgagtaccaaaattcaggacaaggtgcaaaaggcagatgtttttcttgctgccgaattccataacaaaatatatgggatggagttccaggatcaaagccattggtgggatatattgtgtgaggaggcggcagaaattgcttccaacacatgttccggagtagccaagctgcaccctacaacaattgccaaatgttggttgtatatatcgaaacttaattttgttggcagagacatcattgactatgactgggcagttcatgcttcaaactattgggtgtgtgatgggatcattcaggaatgggagattgctgatgctctacaacaagagatgtggcaagaatgggacgaccctggactttaccacatgatgcggaacactgacaactggatttcaacaagtcacctgatttcaagtaattatgggttcctggctgcctcagcagtggctcaaacagtgtcatcatttttcttggcagaacaccaaattgacacagaatcaaaagacacggtggaactagtagaatatttttttaagtcaaagctcaaccctgcacatcttttacaaaattataatgacatgtttcaacatgcagagaaccttagagtgctaaaacttagcctctgtacctttagatttgcttcacctcctttcctctgttgccgcggattgagattccttgggcttgataactgccttgatctgaacattgatgctggagaggaggttcagtcttggaactgttttcatggtttgtgggtgctagacctacagtacacacagtgggttttctccccacagatgattgaggaaatgaacaatgtcagggagctcaatgttaagggagtgaaactgcacaacttgagacatatttggaaacggcagcataacaagatacagaagcttcgtgtaatcaagacgattgatcaagactatacggcaaccaaagatgaaaaggatccattcacattcacattctcaggtatggaaaagatggagattctagacttgtcaggtaactctaccatgcaagcttttcctgacctgtccaaggcaacatgtctgaagactgtcactcttgatggttgtgttgggttggattctgtcagtgatagcaaccttccggtatcacttgaggaattcagcttagttgcagcatcagaacagtatccaaaggcagcaaatattacaaaaatctcattatctggatgttgccggttaaaaaagctaatcttgagtggactgccaaaacttgaggaattggatctttccggcacaatattggaaaaacttgacctggatgccatgcaggcagaaaaacttaatcgtcttcttctgtttggttgtctgcatctttgtgcaataaagtggtcagatgttacaaaaccacaattggatgagttacatgtagatacagttggagtacatctggaaggcaaacgacaaaatagcttgtcacctgtccaggatgatgataaattattccaatcacatgttgttatcatggatcctaggcttcttcggtttctacagttgtttgcaatgcaaagtcaccatgtgcatttctgcatgtcacctgtttttgttaattattgcaaagatgaaggacaaagtaagcagtgcagtagtgaacaaataaggaatgcccatgttgatcgaacagttgcagggaatatgtgcagtgatatatttgacagagttgttgcacttagtgttgcccctgtgatttgtccttgcccgcctctgcctttagagtcaaagtgcaacagaagctgcaaggtagagatcagaaacagaaaacaattgcaggggaatgacaatatcttgggaaatttcatagacattgtacactctctaaacgtgcatgatgactcttggatgactagtattcctggatcaaattggggtcggattaagtggtgctgtattgagagatgccccaagttacattctgtattcaaactcagagaccatgaccaaatcgtagctttctcttggctagagaccttctgggcatcacatctccaaacagcccactgcatttggagcatggaagtcaagcatgtaaatgttgattccttcaagaaactgcagtatatacatctggattcctgtcctaggctcatccatgtacttcccttgtccaacaacttaccaagcttggagaccattcagatcctgtactgcaccagcctcatatatgttttccctttgaacacagcaaactccaaggggacagtaagcaatgatgctattgatttcccaaagctgaagcacgtccacctgcatgagcttcccagcttgaaagggatatgtgaggcaaaaataatgtcagctcccatgctggaggccatcatgatcaggggctgctgtagtcttagacacctgcctgacgtccaaggattgcatgaaccaagacccatagtatactgtgagaaggattggtgggataacctagtgtggcctcagaaagaaggtggctatgatcagtcattgctctacaagcggcagtcagcgcaatactataagaaggccttgcccaaaggctctattctcagggatttattggaaatgaattgcatggctagcaataccactaggcatgcgattcttggttgtaacaggttggtagattcaattgactacaacggtcaccgacatcgatga

SEQ ID NO: 32693 - DNA, 4251 bp, Oryza sativa
  Clone ID: PAT_MRT4530_36877C.1
atgacaactttagcaccttgtgccaaacattatacaccaaaaggcctaaccactctccttcaaaccaatcctaataatagatgtactacccccaaaaccctaaaatgggatgagatcaccctgccagagaaatgggttttatctcaagctgttgaacctaagtctatggatcaatcggaagtcgaatccttgattgaaacaccagacggagatgttgagataacatttgcttcaaaacaaaaagcctttctccagtctagaccttctgtcagtctagattctaggcctaggacaaaacctcaaaatgttgtctatgctacctatgaagacaactccgacgaaccttcaatctcagacttcgatatcaatgttatcgagcttgatgttggctttgttattgccatagaagaggatgagtttgaaattgataaagatttgcttaaaaaagaactcaggcttcaaaagaaccgacccaagatgaaaagatactttgaaagggtcgatgaaccatttagactaaagataagagaactttggcacaaagaaatgagagaacaaaggaagaacatctttttctttgattggaatgaaagtagccaagtcagacacttcgaagaattcttcaaagaaaaaaacatgatgaaaaaagagcaaaaatccgaagcagaagatttaactgttatcaagaaggtttctacagaatgggaaacaaccagtggaaacaaggtagactctgttcatcctccatttgaatccattcaattatctcataatggaggaaaagcttgtccactaaaaagtatttctaaaaatacatatggagaaacagcaaaggttgaacacataggacatttggtagaacaacaaaattatgcaaatatatctctacgttctcttggtcaacaaacagatcgaatagagacaatccttatggaaggctacaaaacaggaagacctgaggtaaagataaatattccctctaattctcagtcttctagttctcagtctgttagtcctatgtttgtcccaacaattgatcctaacatcaaacttggaaaacaaaaggcttttggatccgcaatttctgaagaactagtcagtgagctagccttaaaactaaataatttaaaagtaaataaaaatatcaatgagatttctgataatgaaaaatatgatatggtcaataagatttttaaaccttctactcttacttccacaactaggaattattaccctcgaccaacttatgcagacctacagtttgaggaaatgcctcagattcaaaatatgacttactacaatggcaaagaaattgtagaatggaacttagatggctttactgaatatcaaatctttactttatgtcatcaaatgattatgtatgctaatgactgcatagctaatggaaataaagaaaaatatatttctggtttacctcctttatttgctgaaaaggttagaaattccctaagaaaagaagggggagggagtataaattatcactatctagatattggaaaaatcacacaaaagatacaattggtgggggctgagctttgcaatgacctaaaaatcaaagatcaactcaaaaaacaaaggattcttggtaaaagagaaatgggagatttttgctatcagtttggttttcaagatccttatgtccatagaaaaagaaaaacccattccaaaccaatgacaaaatcaaatgataaaagcaagatgagctttcaagctaccaaaagaaaaccaaaaagaatttacaataagaatataagaacaaaagacactgaaagcaaagaaaccatttgttacaaatgtggcttgaaaggacacatagctaacagatgtttcaaatctaaagttaaaaaagagatccaagccttgttagattcagaatcagaagatgttaaagaaaaacttgaagcaatactaaataatatagacaatgactcaagttcagatgaagaaaaaaatgcagagattaattgctgccaagacagtggttgctcttgttatgagccagataattcagaagaagagtctgatgaaaatatactcgttctaaccagtttagaagaatttgttctcgatacttttgaaaccattcaagatccagaagaaaaaagaagagttctcgaaaaattcctttcaagagtcaagactgataaggataaactaaaaaaggatattcaaaagagcaaattcctctctattgatgaagtgttcaaaagattagatgaacagaaaaagaagaatgagaaaccagatttgatcagcctattcgaagaacaaaaaattatgaaacaagatttagaagaaataagaaagcgtctatacatgttagaattaaaagagggattccatatggaagaaaaggacgaaccaattcaagaagatgatcagcatatcactttaattgattctggtgctgatgtcaattgcattcgagaaggtattatccctcataaatatttccgtaaagccgcccacagaattcgtggggcagatggaggacttttaacagtagaatatcaaatccctgatacctatatttgcatatctgaagtttgcattaaaacatcttttctaatcgttaaaaatcttaagcaagatgttattttaggaacaccgtttttatcactcattcgtcccttccttgtcacaaacgaagatattcaatttgagataatgggcaagcaggtgagcctaagattttcgtctaacatagatgagattcttgaccagcttgttcagaccaaaagagaacaaattgtgaatacaatatatttacatgacaattctttcccatcatatcttccaaaatctatggacttgacaggtaagacatcatgggaagatagatatttattaaaagctactaaaaattttgaatatatatgcaaggaaatggcttcacagaagtctgaatggttcacgaatatgagttcatggagactgccccaactgcccagaggccatgaagaacgatttaatcacaatttcagagtaacagagctacaacaagggttattaaacctcttgtggcagacaaaaaacaaaaaagaaaaagctcatgccttaaatggcctagcatattatttcaaaaactttgtgacctcagatcaaaagataacagaaaaaagggctaaactacaagatatccctcatcatgaggagaggttactagattatcgcgaggagaaatcccgtgatggccaagataaacttcccatggaagttgaacaatctatggcaacagataagaataccaagccaaaagcaccatgtagatcttgtgcctacaaagattcttgccaaaagaaacttaaaagccaaaatcccatgagttctacatacgaaaatctccaacctagattaagcttcaagacggagcaaactttatcctgctttgggcaagacatcttcaatcttgtttggcaaaagtttaaggagagacaaatgaaaatattccttggactccaagattatttctttgatctcttagaaggaagagaaagaaacccagccataagagtaatcatatatatgctccctctcttaaggctagatgaccaggcaatctctgacccatcctatagattcctggttctcaaagctgagataaatctccaaagattctggaatctacccacatacaaccatgaagaaatatctctccaaaccattatagatcatggtcttgtgaattccatctatgcaaccctcgatcagatccttcaatctgatttaggaagcgctgtgaaagatgtctacaggagacttggacatggaagatacaggattatcttctcctccataccaccaaaattcacaccacctgttcgtccagcaattcattatatatatatcatgaatggacaatttaattttcaagaagacggtactagcaaactatcggatgaagaggaagaaatatatacaacaattgctaatcatgaaaattggagattattttctgaagctgcagaaattgaagaagctatcaccacagattatgaatatcagccggttttccaaaacaagatcacaaggatttttattagcaaatattacaaccaaagttatgaatacttcaagggagcagggcgcataattaaaccagattttgaaaatgaatgctccaagaaaagttactacagaagcctggctcagtggtttcagaaaacagagccgtcagagatcgacacggtgcaatcagcacccataataatcaacgaagataatgaataa

SEQ ID NO: 32694 - DNA, 450 bp, Oryza sativa
  Clone ID: PAT_MRT4530_36878C.1
atggagatggagaagaaggtgatgtccgggtgccacatcccggcgttcggcgcgtggaactaccgcgacgacgacctgcccatcacgcagtgcttcgacctagccatccaggaccgcctgatgaggcgcgccaaccgccgcggcgacggcaactgcaaacggcggctcgtcgtgcctttcgacgcctggccgcctgctccgcgcggagcagctcatggcaaggtgattaggagggaattggcacagaagcagtgggataatgttgccgaggagatgatgcaatggagagctgttggggcgtacgggacgaagcgtaaggttggcgacaaggctgtggatgaggacctgtacaaggtgccgcaaccgctgatatacccgaaacgtagaaagatgaggaaagttgtctggagcctgtggattggttgccttggtctggattgcattgcctga

SEQ ID NO: 32695 - DNA, 1629 bp, Oryza sativa
  Clone ID: PAT_MRT4530_36879C.1
atgagagaacaaaggaagaacatctttttctttgattggtatgaaagtagccaagtcagacacttcgaagaattcttcaaaggaaaaaacatgatgaaaaaagagcaaaaatccgaagcagaagatttaactgttatcaagaaggtttctatagaatgggagacaaccagtggaaacaaggtagactctgttcatcctccatttgaatccattcaattatctcataatggaggaaaagcttgtccactaaaaagtatttctaaaaatacatatagagaaacagcaaaggttgaacacataggacatttggtagaacaacaaaattatgcaaatatatctctacgttctcttggtcaacaaacagatcgaatagagacaacccttatggaaggctacaaaacaggaagacctgagatttttaaaccttctactcttacttccacaactaggaattattaccctcgaccaacttatgcagacctacagtttgaggaaatgcctcagattcaaaatatgacttactacaatggcaaagaaattgtagaatggaacttagatggctttactgaatatcaaatctttactttatgtcatcaaatgattatgtatgctaatgcctgcatagctaatggaaacaaagaaagagaagctgccaatatgattgtcattgggttttctggtcaattaaaaggatggtggaataattatttaaatgaaactcaaagacaggagattctttgcgcagttaaaagggatgatcaaggaaggccattgcccgatagagatggtaatgggaatccaaccgaattaaaagaaggattccatatggaagaaaaggacgaaccaattcaagaagatgatcaggttgttggaaccattcaaaaatatatgaagcaaaaatggtacacagaagttatgtatcgttttatagacggatcctactttcagtatatcactttaattgattatggtgctgatgtcaattgcattcgagaaggtattatccctcataaatatttctgtaaagccgcccacagaattcgtggggcagatggaggacttttaacagtagaatatcaaatccctgaaatctatatttgcatatctgaagtttgcattaaaacatcttttctactcgttaaaaatcttaagcaagatgttattttaggaacaccgtttttatcactcattcgtcccttccttgtcacaaacgaagatattcaatttgagataatgggcaaacaggtgagcctaagattttcgtctaacacagatgagattcttgaccagcttgttcagaccaaaagagaacaagttgtgaatacaatatatctacatgacaattccttcccatcatatcttccaaaatctatggacttgccagatcaaaagataacagaaaaaagggctaaactacaagatatccctcatcatgaggagaggttactagattatcgcgaggagaaatcccgtgatggccaagataaacttcccatggaagttgaacaatctatggcaacagataagaataccaagaagacggtcctagcaaactatcggatgaagaggaagaaatatatacaacaattgctaatcatgaaaattggagattattttctgaagctgtag

SEQ ID NO: 32696 - DNA, 1689 bp, Oryza sativa
  Clone ID: PAT_MRT4530_3687C.1
tcacaatggcacgtagaacacctcccagcgcagtatgagtatgacgacggccggagtgcaggctccgatggcgatgaccaggtacgccagccaccgctccgtggggaggacggtgaggtagacggacgtcatgagggagacgatcatggcgaggcaggcgacgacggtgaggcggtgtccccaggtgagctggtcgagcttgaacttgacggggtccctccacgcccagatgaagcagaagacgacgacgatggcgctgcacatggcgacggtgttggacaccacgaagatcttgaacggcgccctgtcggcgtggatggcgagccccgtgttctggttgtagccgccgggcatggtgaatgtggcggcgaaggtgacggtggcgatgagggtggccacgagggtgtaggtgccgacgctgagctcgaagtactcgtcgttgctgccggagcccggccgccggctgcgcagcgactggtacgtcgccaccggcggcagctgctggttcttgcaccgccgcgactcgtacttcttgagcttctcccagaggtagacgacgtaggcgtccatctcgccgccggcgacgcgctcctccacgaggctgcgcgccgagtggccttcgcggttgaggaggcaggggtcgacgcgggggtccctgagcagcatcagcgccgacttgatgcgggccatcttcgcggcgaggtggagcggcgtgtcgccggagttgtcgccgcggttcaccacctcggcggggcggacgcggccgaggaggcaccggagcgcgtccaccttgccgctcgacaccgcgacgtgcacggcgttccggccctcccggtccagcatctccgccgcgtcggggctgtgccggagcagctccgccgccgctgccgtcgagccgtagtaggccgcgacgtggagcgccgactgctgccgctcgttgcggcggtgggcgaggtcgggcttgtggtcgagcagcatccgcaccatgcgcttgtcgttcttctgcgccgcgaagtgcagcgccgtgttgccgacggcgtccgtcaggtcgatcagccccggcgccgtcttcatcagcaatatctccaccacccgggtgtggccgccgaggacggcctggtggagggcggtgccgctgacgttgtcggcggtgacgaacttctcggggacccatggctggtcgaggatcttgtcgacgacgtcggcgaggccctcgcgggcggcgatgtgcagcggcgtctgcatgtccacgttgggcgtgtgcccgcagttgggctccgcctccagcagccgcagcgccaccgcgctccgccgctgcttcaccgcctcgtgcagcggcgtgttccgtgtcttgttcatcatcatcagtggctcctcctccggccaacaaggcccagccatggtgatgaaggtgatgagcatgtcggcgacggccatcttgccggccctggcggcgaggtgcagcggcgtgtccccctggtcgttcctggcgacgaggaggtcgccgtgctcggcggcggcggcctcggcgaacgcgacgcgcccgagcccggcggcgatgtgcagcgccgtgttcccctgcggcgtcgtcgagttgaggatcttgccgccgccctgctcctcccccagcagcgccgccaggctcgccgtgttcccctgcaccgccgccttgtgcagccgtggatccat

SEQ ID NO: 32697 - DNA, 3615 bp, Oryza sativa
  Clone ID: PAT_MRT4530_36880C.1
atggacaacaagatttttaaaccttctactcttacttccacaactaggaattattaccctcgaccaacttatgcagacctacagtttgaggaaatgcctcagattcaaaatatgacttactacaatggcaaagaaattgtagaatggaacctagatggctttactgaatatcaaatctttactttatgtcatcaaatgattatgtatgctaatgcctgcatagctaatggaaacaaagaaagagaagctgccaatatgattgtcattgggttttctggtcaattaaaaggatggtggaataattatttaaatgaaactcaaagacaggagattctttgcgcagttaaaagggatgatcaaggaaggccattgcctgatagagatggcaatgggaatccaactggtaacatttctgatgccttagccactctaatctataacataatttatcactttgccggaaactatcatgatatctatgagaaaaatagagaacaattgataaatttaaaatgtaaaacaatgtcagattttagatggtataaagatactttcttgtcaaaactatataccctaccagaacctaatcaagacttttggaaagaaaaatatatttctggtttacctcctttatttgctgaaaaggttagaaattccctaagaaaagaagggggagggagtataaattatcactatctagatattggaaaaatcacacaaaagatacaattagtaggggttgagctttgcaatgacctaaaaatcaaagatcaactcaaaaaacaaaggattcttggtaaaagagaaatgggagatttttgctatcagtttggttttcaagatccttatgtctatagaaaaagaaaaacccattccaaacccatgacaaaaccaaatgataaaagcaagatgagctttcaagctaccaaaaggaaaccaaaaagaatttacaataagaatataagaacacaagacaccgaaagcaaagaaaccatttgttacaaatgtggcttgaaaggacacatagctaacagatgtttcaaatccaaagttaaaaaagagatccaagccttattagattcagaatcagaagacgttaaagaaaaacttgaagcaatactaaataatatagacaatgactcaagttcagatgaagaaaaaaatgcagagattaattgttgccaagacagtggttgctcttgttatgagccagataattcagaagaagagtctgatgaaaatatactcgttttaaccagtttagaagaatttgttctcgatacttttgaaaccattcaagatccagaagaaaaaagaagagtcctcgaaaaattcctttcaagagtcaagactgataaggataaactaaaaaaggatattcaaaagagtaaattcctctctattgatgaagtgttcaaaaggttagatgaacagaaaaagaagaatgagaaaccagatttgatcagcctattcgaagaccaaagaattatgaaacaagatttagaagaaataagaaagcgtctatacaggttagaatcaaaagaaggattccatatggaagaaaaggacgaaccaattcaagaagatgatcaggttgttggaaccattcaaaaatatatgaagcaaaaatggtacacagaagttatgtatcgttttatagacggatcctactttcagcatattactttaattgattctggtgctgatgtcaattgcattcgagaagtctgcattaaaacatctttcctactcgttaaaaatcttaagcaagatgttattttaggaacaccatttttatcacttattcgtcctttcctagtcacaaacgaagatattcaatttaagataatgggcaaacaggtaagcctaagattttcgtctaacacagatgagattcttgaccagcttgttcagtccaaaagagaacaagttgtgaatacaatatatttacatgacaattctttcccatcatatcttccaaaatctatggacttgccaggtaagacatcatgggaagatagatatttattaaaagctactaaagattttgaatatatatgcagggaaatggcttcacagaagtctgaatggctcacaaatatgagttcatggagactgccccaactacccagaggccatggagaacgatttaatcacaatttcagaataacagagctacaacaagggttattaaaccttttgtggcagacaaaaaacaaaaaagaaaaagctcatgccttaaatggcctggcatattatttcaaaaatttcgtgccctcagatcaaaagataacagaaaaaagggctaaaatacaagatatccctcatcatgaggagaggttactagattatcgcgaggagaaatcccgtgatggccaagataaacttcccatggaagttgaacaatctatggcaacagataagaataccaaggtattctcagataagattttgatctcaacagatcctgcttcaagcatggttgctttccacataaatatcaataacctattgcaatcttttccacataataaaccatcatcatccacaaaaaggcatgataccattccccaaacaccatacatactgcataatcatcccaattcattccttccacaatatatactccggacccagccaaaagcaccatgtagatcttgtgcctacaaagattcttacaaaaagaaacttaaaagccaaaatcccatgagtactacatacgaaaatctccagcccagattaagcttcaaaacggagcaaactttatcctgctttgggcaagacatcctcgatcttgtttggcaaaagtttaaggagagacaaatgaaaatattccttggactccaagattatttctttgatctcttagaagggagagaaagaaacccagccatacgagtaatcatatatatgctccctctcttaaggttagatgatcaggcaatctctgacccatcctatagattcctggttctcaaagctgagataaatcttcaaagattccggaacctacccacgtacaaccatgaagaaatatctctccaaaccattatagatcatggtcttgtgaattccatatatgcaaccctcgatcagatccttcaatctgatttaggaaacgctgtgaaagatgtctgcaggagacttggacatggaagatacaggattatcttctcctcaataccaccaaaattcacaccacctgttcgtccagcaattcattatatatatatcatgaatggacaatttaattttcaagaagacggtcctagcaaactatcggatgaagaggaagaaatatatacaacaattgctaatcatgaaaattggagattattttctgaagctgcagaaattgaagaagctatcaccacagattatgaatatcagctagttttccaaaacaagatcacaaggatttttatcagcaaattctacaaccaaagttatgaatacttcaagggagcagggcgcataattaaaccggattttggaaatgaatgctccaagaaaagttactacagaagcctagctcagtggtttcagaaaacagagccatcagagatcgacacggtgcaatcagcaccaatgataatcaacgaagataatgaataa

SEQ ID NO: 32698 - DNA, 3078 bp, Oryza sativa
  Clone ID: PAT_MRT4530_36881C.1
atgtcggtaaagaatgcttcatctatatcttttgaggatattgagaaaagtatttccaactggaagattcctaaggttaatattaaggaaatatatcatgtagaaagagaaatcaattctataagagctaaacatcaatatcactaccttcactttggtcttatacaagttgctatcagatccttgactagaaagggtttgaacgtctctgttctggcttgtctaagagattgcagaaataaaaggttcaaagattccttacttggcatgatggaagccagcctcagtaatggtcttgtttattttaacacctttcctgatttttctgtatccctctcagacacagatatccataaagttctcactctcaacttacaaacatctggttatgaactagaactagggagtgaaaacatctccgttacctacagagtttactacaaagccatgacaactttagcaccttgtgccaaacattatacaccaaaaggcctaaccactctccttcaaaccaatcctaataacagatgtactacccccaaaaccctgaaatgggatgagatcaccctgcctgagaaatgggttttatctcaagctgttgaacctaagtctatggatcaatcagaagtcgaatccttgattgaaacaccagacggagatgttgagataacatttgcttcaaaacaaaaagcctttctccagtctagaccttctgtcagtctagattctaggcctaggacaaaacctcaaaatgttgtctatgctacctatgaagacaactccgacgaaccttcaatctcagacttcgatatcaatgttatcgagcttgatgttggctttgttattgccatagaagaagatgagtttgaaattgataaagatttgcttaaaaaagaactcaggcttcaaaagaaccggcccaagatgaaaagatactttgaaagggtcgatgaaccatttagactaaagataagagaactttggcacaaagaaatgagagaacaaaggaagaacatctttttctttgattggtatgaaagtagccaagtcagacacttcgaagaattcttcaaaggaaaaaacatgatgaaaaaagagcaaaaatccgaagcagaagatttaactgttatcaagaaggtttctacagaatgggagacaaccagtggaaacaaggtagactctgttcatcctccatttgaatccattcaattatctcataatagaggaaaagcttgtccactaaaaagtatttctaaaaatacatatggagaaacagcaaaggttgaacacataggacatttggtagaacaacaaaattatgcaaatatatctctacgttctcttggtcaacaaacagatcgaatagagacaatccttatggaaggctacaaaacaagaagacctgaggtaaagataaatattccctctaattctcagtcttctagttctcagtctgttagtcctatgtttgtcccaacaattgatcctaacatcaaacttggaaaacaaaaggcttttggacccgcaatttctgaagaactagtcagtgagctagccttaaaactaaataatttaaaagtaaataaaaatatcaatgagatttctgataatgaaaaatatgatatggtcaacaagatttttaaaccttctacacttacttccacaactaggaattattaccctcgaccaacttatgcagacctacagtttgaggaaatgcctcagattcaaaatatgacttactacaatggcaaagaaattgtagaatggaacttagatggctttactgaatatcaaatctttactttatgtcatcaaatgattatgtatgctaatgcctgcatagctaatggaaacaaagaaagagaagctgccaatatgattgtcattgggttttctggtcaattaaaaggatggtggaataattatttaaatgaaactcaaagacaggagattctttgcgcagttaaaagggatgatcaaggaaggccattgcccgatagagatggtaatgggaatccaaccgattttagatggtataaagatactttcttgtcaaaactatataccctaccagaacctaatcaagacttttggaaagaaaaatatatttctggtttacctcctttatttgctgaaaagcatatcactttaattgattctggtgctgatgtcaattgcattcgagaaggtattatccctcataaatatttctgtaaagccacccacagaattcgtggggcagatggaggacttttaacagtagaatatcaaatccctgaaatctatatttgcatatctgaactttgcattaaaacatcttttctactcgttaaaaatcttaagcaagatgttattttaggaacaccgtttttatcactcattcgtcccttccttgtcacaaacgaagatattcaatttgagataatgggcaaacaggtgagcctaagattttcgtctaacacagatgagattcttgaccagcttgttcagaccaaaagagaacaagttgtgaattcaatatatttacatgacaattctttcccaaaatctatggacttgccagatcaaaagataacagaaaaaagggctaaactacaagatatccctcatcatgaggagaggttactagattatcgcgagaagaaatcccgtgatggccaagataaacttcccatggaagttgaacaatctatggcaacaaataagaataccaagaagacagtcctagcaaactatcggatgaagaggaagaaatatatacaacaattgctaatcatgaaaattggagattattttctgaagctgcagaaattgaagaagctatcaccaccagattatgaatatcagctagttttccaaaacaagatcacaaggatttttatcagcaaatattacaaccaaagttatgaatacttcaagggagcagggcgcataattaaaccggattttggaaatgaatgctccaagaaaagttactacagaagcctggctcagtggtttcagaaaaaaacagagccgtcagagatcgacacggtgcaatcagcacccacgataatcaacgaagataatgaataa

SEQ ID NO: 32699 - DNA, 556 bp, Oryza sativa
  unsure (1)..(556): unsure at all n locations
  Clone ID: PAT_MRT4530_36882C.1
aaaaaaaaaaacctaaattggggccaatgaatcatccaattacatactgatatattggtacaatcaaaccaatattagtgctcattcaacaccaaaaatttgcaatttgctatcttttttagatatctttccaactatttctcacatcacagtttacaactaaaaaaataacattctgttacactgaagttatatactggctacaagtgagaggaaaagacaaacaaatcaataaagggccctgtcgcgtccttgaatatcttgacgggatagcttcaaattgtttccgatggcatcaggacacttgccagataacgataatcttcgtacatgtctctaatccaaaaatgaaatccgataattgctttcataagctagaaccgtgaagttgttagcacttggctattagtgaacttgatagcacttaaggaaccagcgctggcttttccaagagtacttgtcctagaatgtacgaagattatcgttatctggcaagtgttctgatgccattggaaacaattagaagctatcacgtcagnatatcacggacgcgtgg

SEQ ID NO: 32700 - DNA, 3828 bp, Oryza sativa
  Clone ID: PAT_MRT4530_36883C.1
ttatgttatcttttgatctgtgggcacgaaatttttgaaataatatgccaggccatttaaggcatgagctttttcttttttgttttttgtttgccacaagaggtttaataacccttgttgtagctctgttattctgaaattgtgattaaatcgttctccatggcctctgggcaattggggcagtctccatgaactcatatttgtgagccattcagacttctgtgaagccatttccctgcatatatattcaagatctttagtagcttttaataaatatctatcttcccatgatgtcttacctggcaagtccatagatttcggaagatatgatgggaaagaattgtcgtgtaaatatattgtattcacaacttgttctcttttggtctgaacaagctggtcaagaatctcatctgtgttagacgaaaatcttaggctcacctgtttgcccattatcttaaattgaatatcttcgtttgtgactaggaaaggacgaataagtgataaaaatggtgttcctaaaataacatcttgcttaagatttttaacaagtaggaaagatgttttaatgcaaacttcagttatgcaaatatagatttcagggatttgatattctactgttaaaagtcctccatctgccccacgaattctgtgggcggctttatagaaatatttatgagggataataccttctcgaatgcaattgacatcagcaccagaatcaattaaagtaatatgctggaagtaggatccgtctataaaacgatacataacttctgtgtaccatttttgcttcatatatttttgaatggttccaacaacatgatcatcttcttgaattggttcgtccttttcttccatatggaatccttcttttgattctaacatgtatagacgctttcttatttcttctaaatcttgtttcataattttttggtcttcgaataggctgatcaaatctggttgctcattcttctttttctgttcatctaaccttttaaacacttcatcaatagagaggaatttgctcttttgaatatccttttttagtttatccttatcagttttgactcttgaaaggaatttttcgaggactcttcttttttcttctggatcttgaatggtttcaaaagtatcgagaacaaattcttctaaactggttaaaacgagtatattttcatcagactcttcttctgaattatctggctcacaacaagagcaaccactgtcttggcaacaattaatttctgcatttttttcttcatctgaacttgagtcattgtctatattatttagtattgcttcaagtttttctttaacgtcttctgattctgaatctaacaaggcttggatctcttttttaactttagatttgaaacatctgttagctatgtgtcctttcaagccacatttgtaacaaatggtttctttgctttcagtgtcttgtgttcttatattcttattgtaaattctttttggtttccttttggtagcttgaaagctcatcttgcttttatcatttggttttgtcatgggtttggaatgggtttttctttttctatggacataaggatcttgaaaaccaaactgatagcaaaaatctcccatttctcttttaccaagaatcctttgttttttgagttgatctttgatttttaggtcattgcaaagctcagcccctactaattgtatcttttgtgtgatttttccaatatctagatagtgataatttatactccctcccccttcttttcttagggaatttctaaccttttcagcaaataaaggaggtaaaccagaaatatatttttctttccaaaagtcttgattaggttctggtagggtatatagttttgacaagaaagtatctttataccatctaaaatctgacattgttttacattttaaatttatcaattgttctctatttttttcatagatatcatgatagtttccggcaaagtgataaattatgttatagattagagtggctaaggcatcagaaatgttaccggttggattcccattaccatctctatcaggtaatggccttccttgatcatccctcttaactgcgcaaagaatctcctgtctttgagtttcatttaaataattattccaccatccttttaattgaccagaaaacccaatgacaatcatattggcagcttctctttctttgtttccattagctatgcaggcattagcatacataatcatttgatgacataaagtaaagatttgatattcagtaaagccatctaggttccattctacaatttctttgccattgtaataaatcatattttgaatctgaggcatttcctcaaactgtaggtctgcataagttggtcgagggtaataattcctagttgtggaagtaagagtagagggtttaaaaatcttgttgaccatatcatatttctcaggtcttcctgttttgtagccttccataaggattgtctctattcgatttgtttgttgaccaagagaacgtagagatatatttgcataattttgttgttctaccaaatgtcctatgtgttcaacctttgctgtttctccatatgtatttttagaaatactttttagtggacaagcttttcctccattatgagataattgaacggattcaaatggaggatgaacagagtctaccttgtttccactggctgtctcccattctgtagaaaccttcttgataacagttaaatcttctgcttcggatttttgctctttttttatcatgttttttcttttgaagaattcttcgaagtgtctgacttggctactttcataccaatcaaagaaaaagatgttcttcctttgttctctcatttctttatgccaaagttctcttatctttagtctaaatggttcatcgaccctttcaaagtatcttttcatcttgggtcggttcttttgaagcctgagttctcttttaagcaaatctttatcaatttcaaactcatcttcttctatagcaataacaaagccaacatcaagctcgataacattgatatcgaagtctgagattgaaggttcgtcggagttgtcttcataggtagcatagacaacattttgaggttttgtcctaggcctagaatctagactgacagaaggtctagactggagaaaggctttttgttttgaagcaaatgttatctcaacatctccgtctggtgtttcaatcaaggattcgacttccgactgatccatagacttaggttcaacagcttgagataaaacccatttctcaggcagggtgatctcatcccatttcagggttttggggatagtatgtctgttattaggattggtttgaaggagagtggttaggccttttggtgtataatgtttggcacaaggtgctaaagttgtcatggctttgtagtaaactctgtaggtaacggagatgttttcactccctggttctagatcataaccagatgtttgtaagttgagagtgagaactttatggatatttgtgtctgagagggatacagaaaaatcgggaaaggtgttaaaataaacaggaccattactgaggctggcttccaccatgccaagtaaggaatctttgaaccttttatttctgcaatctcttagacaagccagaacagagacgttcaaaccctttctagtcaaggatctgatagcaacttgtataagaccaaagtgaaggtagtgatattgatgtttagctcttatagaattgatttctctttctacatgatatatttccttaatattaaccttagggatcttccagttggaaatacttttctcaatatcctcaaaagatatagatgaagcattctttatcgacat

SEQ ID NO: 32701 - DNA, 373 bp, Oryza sativa
  Clone ID: PAT_MRT4530_36884C.1
ataatattaaataattagaatgagtgaggcgtggagtccaaatcatctagtccatcaccttgtgaagccagccggaagacctctaacacatgattctgacaggaattgaagtgtaaaacagaggattgtaaaacacaagaaaaacataggaatggtcgtttgattggagcgcaggaaaagcgcaggaatcggatgagagaggtggactccaaggaaattttcctagaggtttgagctcttgctaaatttcttctaaaatccacatacaatgtgtcattccatagaaatttcataggatttgtaaagctttaatcctttgaatcaaagagcctttaagggagaaaaaaaaaaaaaaaaaaaaaaacccccaaac

SEQ ID NO: 32702 - DNA, 4905 bp, Oryza sativa
  Clone ID: PAT_MRT4530_36885C.1
atgacaactttagcaccttgtgccaaacattatacaccaaaaggcctaaccactctccttcaaaccaatcctaataacagacatactatccccaaaaccctgaaatgggatgagatcaccctgcctgagaaatgggttttatctcaagctgttgaacctaagtctatggatcagtcggaagtcgaatccttgattgaaacactagacggagatgttgagataacatttgcttcaaaacaaaaagcctttctccagtctagaccttctgtcagtctagattctaggcctaggacaaaacctcaaaatgttgtctatgctacctatgaagacaactccgacgaaccttcaatctcagacttcgatatcaatgttatcgagcttgatgttggctttgttattgctttagaagaagaagaatttgaaattgacaaagaattgcttaggagagaaataaggctccccaaaaatagagctaagactaaaagataccttgaagaagttgacgaatcattcagaatgaagataagagaagtttggcataacgaaatgagagaacaaaggagaaatattttcttctttgactggtacgagaatagccagattatacacttcgaagaattcttcaaaagaaaaaacatgataaaaaaagagcaaaaatccgaagcagaagatttaactgttatcaagaaggtttctacagaatgggagacagccagtggaaacaaggtagactctgttcatcctccatttgaatccattcaattatctcataatggaggaaaagcttgtccactaaaaagtatttctaaaaatacatatggagaaacagcaaaggttgaacacataggacatttggtagaacaacaaaattatgcaaatatatctctacgttctcttggtcaacaaacagatcgaatagagacaatccttatggaaggctacaaaacaggaagacctgaggtaaaaataaatattccttctaattctcagtcttctagttctcagtctgttagtcctatgtttgtcccaacaattgatcctaacatcaaatttggaaaacaaaaggcttttggacccgcaatctctgaagaactagtcaatgagctagccttaaaactaaataatttaaaagtaaataaaaacatcaatgagatttctgataatgagaaatatgatatagtcaacaagatttttaaaccttctactcttacttccacaactaggaattattaccctcgaccaacttatgcagacctacagtttgaggaaatgcctcagattcaaaatatgacttattacaatggcaaagaaattgtagaatggaacctagatggctttactgaatatcaaatctttactttatgtcatcaaatgattatgtatgctaatgcctgcatagctaatggaaacaaagaaagagaagctgccaatatgattgtcattgggttttctggtcaattaaaaggatggtggaataattatttaaatgaaactcaaagacaggagattctttgcgcagttaagagggatgatcaaggaaggccattacctgatagagatggtaatgggaatccaaccggtaacatttctgatgccttagccactctaatctataacataatttatcactttgctggaaactatcatgatatctatgaaaaaaatagagaacaattgataaatttaaaatgtaaaacaatgtcagattttagatggtataaagatactttcttgtcaaaactatataccctaccagaacctaatcaagacttttggaaagaaaaatatatttctggtttacctcctttatttgctgaaaaggttagaaattccctaagaaaagaagggggagggagtataaattatcactatctagatattggaaaaatcacacaaaagatacaattagtaggggctgagctttgcaatgacctaaaaatcaaagatcaactcaaaaaacaaaggattcttggtaaaagagaaatgggagatttttgctatcagtttggttttcaagatccttatgtctatagaaaaagaaaaacccattccaaacccatgacaaaaccaaatgataaaagcaagatgagctttcaagctaccaaaaggaaaccaaaaagaatttacaataagaatataagaacacaagacactgaaagcaaagaaaccatttgttacaaatgtggcttgaaaggacacatagctaacagatgtttcaaatccaaagttaaaaaagagatccaagccttgttagattcagaatcagaagacgttaaagaaaaacttgaagcaatactaaataatatagacaatgacttaagttcagatgaagaaaaaaatgcagaaattaattgttgccaagacagtggttgctcttgttgtgagccagataattcagaagaagagtctgatgaaaatatactcgttttaaccagtttagaagaatttgttctcgatacttttgaaaccattcaagatccagaagaaaaaagaagagtcctcgaaaaattcctttcaagagtcaaaactgataaggataaactaaaaaaggatattcaaaagagcaaattcctctctattgatgaagtgtttaaaaggttagatgaacagaaaaagaagaatgagcaaccagatttgatcagcctattcgaagaccaaaaaattatgaaacaagatttagaagaaataagaaagcgtctatacatgttagaatcaaaagaaggattccatatggaagaaaaggacgaaccaattcaagaagatgatcatgttgttggaaccattcaaaaatatatgaagcaaaaatggtacacagaagttatgtatcgttttatagacggatcctacttccagcatattactttaattgattctggtgctgatgtcagttgcattcgagaaggtattatccctcataaatatttctataaagccgcccacagaattcgtggggcagatggaaggcttttaacagtagaatatcaaatccctgaaatctatatttgcatatctgaagtttgcattaaaacatctttcctactcgttaaaaatcttaagcaagatgttattttaggaacaccatttttatcacttattcgtcctttccttgtcacgaacgaagatattcaatttaagataatggacaaacaggtgagcctaagattttcgtctaacacagatgagattcttgaccagcttattcagaccaagagagaacaagttgtgaatacaatatatttacatgacaattctttcccatcatatcttccaaaatctatggacttgccaggtaagacgtcatgggaagatagatatttattaaaagctactaaagattttgaatatatatgcagggaaatggcttcacagaagtctgaatggctcacgaatatgagttcatggagactgccccaactgcccagaggccatggagaacgatttaatcacaacttcagagtaacagagctacaacaagggttattaaacctcttgtggcagacaaaaaacaaaaaagaaaaagctcatgccttaaatggcctggcatattatttcaaaaatttcgtgccctcagatcaaaagataacagaaaaaagggctaaaatacaagatatccctcatcatgaggagatgttactagattatcgcgaggaaaaatcccgtgatggccaagataaacttcccatggaagttgaacaatctatggcaacagataagaataccaaggtattctcagataagattttgatctcaacagatcctgcttcgagcatggttgctttccacataaatatcaataacctattgcaatcttttccacataataaaccatcatcatccacaaaaaggcatgataccattccccaaacaccatacatactgcataatcatcccaattcattccttccacaatatatactccggacccagccaaaagcaccatgtagatcttgtgcctacaaagattcttgccaaaagaaacttaaaagccaaaatcccatgagtactacatacgaaaatctccagcccagattaagcttcaaaacggagcaaaccttatcctgctttgggcaagacatcctcgatcttgtttggcacaagtttaaggagagacaaatgaaaatattccttggactccaagattatttctttgatctcttagaagggagagaaagaaacccagccatacgagtaatcatatatatgctccctctcttaaggctagatgatcaggcaatctctgacccatcctatagattcctggttctcaaagctgagataaatcttcaaagattccggaacctacccacatacaaccatgaagaaatatctctccaaaccattatagatcatggtcttgtgaattccatctatgcaaccctcgatcagatccttcaatctgatttaggaaacgctgtgaaagatatctgcaggagacttggacatggaagatacagaattatcttctcctcaataccaccaaaattcacaccacctgttcgtccagcaattcattatatatatatcatgaatagacaatttaattttcaagaagacggtcctagcaaactatcggatgaagaggaagaaatatatacaacaattgctaatcatgaaaattggagattattttctgaagctgcagaaattgaagaagctatcaccacagattatgaatatcagctggttttccaaaacaagatcacaaggatttttatcagcaaattctacaaccaaagttatgaatacttcaagggagcagggcacataattaaaccggattttggaaatgaatgctccaagaaaagttactacagaagcctggctcagtggtttcagaaaacagagccatcagagatcgacacggtgcaatcagcacccatgataatcaacgaagataatgaataa

SEQ ID NO: 32703 - DNA, 443 bp, Oryza sativa
  Clone ID: PAT_MRT4530_36886C.1
cctagctgccctatgaatgaataaaagtgtgtggcttatgcgtggtttaaaaaaaaaaaaaaaaaaagggcggccgcgttggatgacctgcggggcgccgcggtttatcttttctttctggtctgtgttttcatgttgccttctacatgttcaatttgattttttttttcatggatcgatggtatatggtttttttcctgtgtgttttgaatcgtcctctcttgctcctgttaaggttggggaaccaatatctctgtggtgtcaccatctttgcaagaaggggatagatcgacgcgtcaagaaatcatttctgttgccatggctccagtaggcaatacgattgttgcttgcgtacaattttttcttgatgcagactagtttcttttcttgtaccctgttttagaaaaatctcactcttctctgtttaaaaaaaaaaaaaaaaa

SEQ ID NO: 32704 - DNA, 3090 bp, Oryza sativa
  Clone ID: PAT_MRT4530_36887C.1
attaaaaggaaaaaaaatagcaataaatcgcggatttcccaacgccgccgctcctctcgcggattccccaaccctaaaccgccggcggtttctgcggcggcggcggcggcggcgcgtcgagtcggcggagtctccggatcggatcgggttcgtcgctgatcgaggagagatcgcgtcgccgtcgtctcgggggagaggagcaggatggacggggagatgttcgggagtggccactggggtggttccttcccctacgcctccattcccaaggagagccagttcgtgtttgatgccaaggcctcgccgctgcagctgcagctcttcgggagcgccgcagttcctgcggtaggaagtactggttattataactacattgcaaacaaccacctctctgctatgaatcaagaaagaaatacaaacaacgatgttggtcatgaaaagcaactcaatcttcagatgtccctgaactactttcctgttgaaaatcttgatcggttagcacgtattggtaatccaagtgctgtatcaactgggctaagactgtcctatgagaacaatgagcacacttcaatcacatctggcagtggtaacatgtcatcattgcctatcatggcatcctttgttgatgaagtgatggctgaattagacaaagaaaacaaagagttcaactgttatttcggacttcaggtggaacaattggttaagtgcatgaaagatgtaaagcagaggcagatggttgaatttcttgcatcccttgaacgaggagtaggaaagaagctgaaggagaaagaactcgaggtggaggccatgaacaggaagagcaaggaactgaacgaacagatcaggcaggttgcattggaagtccagtcatggcagtcggtagcactgcacaaccagtctgtcgctaacagcatgaaaagcaagctcatgcagatggtagcccatagcagcaatctcaccagggaaggctctggcgacagcgaagtggacaacacagcttccagtcagaatgtcaatgctgtgcctggggttttcttccagtcaggcctcctcggcatcaacagcatggctgatggtgggctgggagcatgcaggttgtgcagaatgaaggaggcagcggtgctggtgatgccgtgtcgacacctctgcttgtgtgctgattgcgagaaaaatgctgacgtgtgccctgtctgccgcttccccaagagttgcagcgttgagatcaacatgtcatagctagcaacagccttataatcatcagcttagacagtggtacactgaagccgtatatacaaagctaaatctctctgcccctcccccccttccagttgtcattcttacatggtgtgtagatttgttgattgggactatggaagctatggtcctccagagtctcttgataaccatatatatagttttagaagctgttacatgtcacatccatatcagataaactgttttcgggtcccccagctgatccaacgtggcatttgcacatacagctgttgattgtttatccctatgtataagccagcctccgcgtcgctctcacgcgggtggctcggggcgaaaccctagccgcccgcgccgccaccttccccacccgctctagccgccctcgccgccgccggagcccgccgccggaaaccgcgcggccggccaggaaggcggcggcggggaaaaccagccggcgacgatcctccccctcggcgtgggaggtggagtggcgagcgtcaggcggaagacggcgtccgaagaggtccacagggcgaatccggccacgccggaggcggattcggccccctcggcggctgatctggcctccccgtggccggatcgggagctggcgactccggtggcggcggaactcgcggggcggtgcgtcgactggcagaggaggctgacgtcatcgccaagcacgtctctgaccggcggagctcgcagcgacggagatggtagcagctggctggcggcgggaggcgcgggagaaggcagcaagtggccggcacggctggcggcggcggagggcggcatggcgcgcgcgaggaggcacgtgcggtgagaggggacacgcccggcggcaacgtaggctggcgaggaggcgcagacggcggctgtggaggctggcgcggccggcacggagggaggtgaggccagcggaaggaacgggccgttggcggaggcttggaggctgtgaggccagcgtgggcgcggtggcttcgctgagaggccggcgcggacgacggcatggaggccgtcgtggcgagtcctccagaggcggcgaccggcgaggtgcacggcgagcacggcacggtgcggcggcgagcctaccgcattgggaggtcgggtggtcagaggcggtggcgatgcgaccaagtggcccctcaagggcagcttggttgaggcggcgacggcggtaacgccatgaggtgggagttgaaggctgcggcgatcttttctccaggcgtcagtcctcttgcggtggcggcttgccgctgcaagatgaccacgttggacgggccagtgtgggggagagaggattcatccttctctctcaccctttccctttccaacccgcccgcgtggatggagccggagcgagccgaagtttgagatcctttctgatggccgaccggcggcgaggcgtcggcgcggtggccacgcgttgaagaggattagctggtggtggctgttgattctgacgagcactcgttgacgcgggggaggaggaaagcaatgggtgaaagcctagccttcgggccggcaacggcgacgcctgcggggcgttgttgcgctttcctcctttggtcctttaggtgaaaaccacatcctgttctaggacgggcgacggcggtgctctttggcgtcgcttcctccttggaggcgtcgtttagaagttccattcgtgttgtgtgcttgttgggtttctgcagtgggatcagacgtagacgcgtggtgtggttgtattttctttttcctgactgcagtctcccaggatcgtaatcttgtattttttttcttctatatcaatagaaacgtcgcaatatcttgtgctggttgtttcaaaaaaagtggtatttgaataaaaaa

SEQ ID NO: 32705 - DNA, 164 bp, Oryza sativa
  Clone ID: PAT_MRT4530_36888C.1
gtcataactaccactccctgtccggaccgtgtcgaagaccttacacctcgagcgttgataaggaacccgaaacggacatggctacagacactaatgcgcaatttcatctaagctcacaggcgacccaacccttattgggcattaacgagcacacgtggtgctat

SEQ ID NO: 32706 - DNA, 184 bp, Oryza sativa
  Clone ID: PAT_MRT4530_36889C.1
agacgcgacagcttcctcttgcttctgtcccgggagtccgcaacgcggcgagatcgttctcttcgggggcagcaggccgaggcgagagggttcccgccggcggccgctgctaaaggccaatagcttcgggcacagggacgctgctaaagggtatcatactaagcgacaggtgggcagggaagac

SEQ ID NO: 32707 - DNA, 291 bp, Oryza sativa
  unsure (1)..(291): unsure at all n locations
  Clone ID: PAT_MRT4530_3688C.1
cttnttcctcagcacgccgctgcatgccgacgacgacggcgnccgaagcatgccggcgganggcggctgcggcaggccntnggcgaagggatccacgaggagcggaggggcgggcggagagncggcggcggcagggcgcgggcngcggangtggccggaggaggaggaggtcgncgccgagtttctgagcctttcttgcccgattcatgcatcaaagaagagattttnacgctgcccttcctgtttnattcggttttcttgatctgcttgtttcgatttgtccccgtgtaa

SEQ ID NO: 32708 - DNA, 200 bp, Oryza sativa
  Clone ID: PAT_MRT4530_36890C.1
tacatgcctagactgtgcctgatgcctgaggggtgctctaacggccatgcccggtcgctgaactctggatatagcttagatcgaggtctaaaaagttgtagctgcaacccgcgcaaattgatagcagactaggccttgtaccggtgttacatttctgctgatgagaacgttcgcttgccttgcgtaggcaactgccagag

SEQ ID NO: 32709 - DNA, 779 bp, Oryza sativa
  Clone ID: PAT_MRT4530_36891C.1
cgcaactgatcgataacgaccgtcaacaccgattcacagctagtcgatttggctttccagtgattgattgggtcgataagagagaaattttcatcacaagactttgagagcttagcacatctggctcagaaggtatcggctcatgagcaacgttttcaggaggccaagaaggtcaagaaggttaactacgtctatagatatgtttatgattctgaggaggagactgaagacctagagatcagtttggcagagtggtccatgatcaagaagacaactatgtgtcaatgggttaagtatataaacaaggaagaggaatatgactttgatatcaataaagccaacaaaatctttgatttactgttgcaagaaaagcaaatccagttgctagtaggtcatgttctaccatcggctgaagagctgaagaagaggaagttttgcaagtggcacaatacaggatctcatcatactaatgggtgcaaggtgttcaggcagcaaatccaatccgccatcgaacaaggaagaatcaagtttgatgatggaaaaaggtcgatgaagattgatggacatcctttttcctgtaaatatggtgtatgccatgattgatagcattagattgattaacaagtaccagaagagacatgacaaacaacaggatgaagaatattgtcaaggtgataagtttgatcctcattggagttgtgagttctttagattttgttggaacgaaggaatgaggttactgttgacggtccttaaatcataatatctgaccgtcaata

SEQ ID NO: 32710 - DNA, 219 bp, Oryza sativa
  Clone ID: PAT_MRT4530_36892C.1
atgtggccggtcagaccgtgctactctgcaacggctagaaaactagccgttgaagtgctgtcagagggccccatcggcctggccgggggccggtctgatcgggcaagtgccgccggtcagaccgggcttatgcgccggtcagaccgcccgcttggggtcggtcagaccggccagggcacgccggtcagaccggccaagtggcccaagtggccggtctga

SEQ ID NO: 32711 - DNA, 468 bp, Oryza sativa
  Clone ID: PAT_MRT4530_36893C.1
atggatgtgcatcggctcgggttggagggcgtgggtccggggcggtggcttgcgccgtgggcgagggcggccgggatgtggtccagagaatcaattattatgggctctgcatgtgtggctcatgtgtatgcctgcctggcctatccgggcggagggggcgagggagaaaggcggcggacggcacgggtgggcgacggagcaggcgagcgaggcgcgctgtccaacgtcgactacgaccgcctgctcgcccccgtcaaggcgtcgccgcagccgctgtccagggagggcgaggaggaggagggggacatcgccatggtcgccgcccagagcttcgtctccacgcaggactccgcctccgacaccgtggtcgactactccggcaacgaggacgaattccacgagccgtgggagaggagatatacagctacaagattacaagtcgatgtatacagcaaacccatgagctga

SEQ ID NO: 32712 - DNA, 519 bp, Oryza sativa
  Clone ID: PAT_MRT4530_36894C.1
atggaccaggaagagcggcgggagtcgtcgtcgtcgccggaggctcgagaaggaggggggaagagggaggggagtggtgggctgtactccggcccttttgtaatcggcccctcctacccaagcttcgatgtcatcataagctctgagatccgctgccactcgtcctatccaagtgttgctgtcatcgtagacccagagctctcccccccccaacacccacttgccgaggtcagagaagacaagtgccagcagcacaacctcgatcccacgataagctcaatgaaggagccgatgccgctgggcctgctacacaagctcagggaagtcgtcggcactcgcctcattgagctcagggaggccctttaccacccctacatcgagctcatccgcagcgagctgccttacgaggtgaggaagatcaatggctacaaagcactgacctccaaagtcttgcaccaccgcttcatcggatggtaccgacaaggattcgatggaggtggatggtgcaggaggctctga

SEQ ID NO: 32713 - DNA, 324 bp, Oryza sativa
  Clone ID: PAT_MRT4530_36895C.1
cctccccgtgcgcgcgcggcaccgtcgcccccaactggtccgcccccggccgttgccgtcctcggtccccctccgctaccccggccgtcgctcaagcagctcctcgccgaggcccacgccgcgctccaccgccgtgacgcgacccacctcgcctccacattgcgtgacctctccgcttccgccgcaatgacgtccgactccggcgaggccgcactaccgccgctgcctccgcgtcaccctcatcccccaccgccggccgcagctccgtgtgccccgcctcccgcccgtgagagagagaagaaagaggaagagtatgacatgtag

SEQ ID NO: 32714 - DNA, 411 bp, Oryza sativa
  unsure (1)..(411): unsure at all n locations
  Clone ID: PAT_MRT4530_36896C.1
ttctctncttttgantgagggaggtttntggaataataaaaggcncctttnntccaatgaaggggccgncaggtntggtcgctcgactggccctanctaagtgttttgttttgtttggnccagctctntaataatccagccntcncattntttgnaatgtttgttgttgatccntaaaatttggnnccggtncgaanannancatgtcncgtctgngtgtgngtganactgttncntntgangcntntangnacattgcaaacaanctgctgttggttaattgtgttgcggacgtactacgtnctgtatttgtgtgcaaaaatatntttgcatnncaanacttttntncctntnggnttcccccnaaaaaaaaaaaaaaaaaacannaaaaaaaaaaaaaaaaaaaaaaaa

SEQ ID NO: 32715 - DNA, 379 bp, Oryza sativa
  Clone ID: PAT_MRT4530_36897C.1
gttgggctaaaaaatggttggggcttggactaacaccaaacaactttaaagttttttgtcccatttttttatttataaattatgagtgaaatttttacaatttgtgggctaaactaaataattcccatttttttttcaaaagatcaacacttttatccccattttccacctattaaaaagaaatcaaattttattgaaaacaaactttttaaccccccataaaaaacataaaaatttttcttatgcataactttttgggggcattataaatttcctttttgtcctcacaagttttacattataccaaacagccggaatagcccttcacttgacaattccacctttttcttaaatatttgaaaggccaaactttttccac

SEQ ID NO: 32716 - DNA, 258 bp, Oryza sativa
  Clone ID: PAT_MRT4530_36898C.1
acgccgccgcgtcgtcgcatagagctgccgcgccgcgctttggccgtgcgcgttccccgccgccgtcgcagtcgccgtgcgccgccgccgagcccgagggagttgcggatccaagcgaaggccgagacctgcaagactctgagcaaggcaagtcatcactattcctcgaacatgttgatcctaattacgaaattgttttgtttacaaataaaaattgcatgaaataatgaacatcctacttgtgattatgccatgcct

SEQ ID NO: 32717 - DNA, 377 bp, Oryza sativa
  Clone ID: PAT_MRT4530_36899C.1
caacaggtctcgtgtcgtttccttcttctccgccgcggcccccgtttcgtgatcaagtcggtttaacggtacgagctatggtacgctgtctgccggcgaccagacggtcccatgggcggcggcggcccagccatgtgtccaaccatcacctttcgtcctccactcccaatgagagagacggcctggaactgatggatgccgcgccatgagaacccaccggcgacgtgcgacgggcggcgggcggaacaaaccgggaaagggcggtcccgttacttttcgaactttccctcgggccgttccgggccggtgttaaccccccgttcccccggccggccgggcggaacccggaagaatgggaatcgaattaagttttaatc

SEQ ID NO: 32718 - DNA, 171 bp, Oryza sativa
  Clone ID: PAT_MRT4530_3689C.1
atggcggctttcaggtggaatcattggccggagtgcacggcgcatggcggcgggcgaagtgggaggagaggggaggcagctgcagctgtaggggagttcagggcggtcaaccggtcaatggacagcagacgtgggtacaaatggaaggagcagatgtgggcttgcttgtga

SEQ ID NO: 32719 - DNA, 132 bp, Oryza sativa
  Clone ID: PAT_MRT4530_368C.1
aatatcagtggggtaagcatccggaacaacaagagtaatatttccttaatctgatattcccagtgtttaaaccacttcttgacattgcttttcaaggttcaagactaccaaaatcatatcttaaaaataaag

SEQ ID NO: 32720 - DNA, 420 bp, Oryza sativa
  Clone ID: PAT_MRT4530_36900C.1
atggacaacatctactgtgatgaggtccagcgccgccgtgtcctgctcgcgcgccggcttgagctcccgagagcgtcgccgtgcccctgctcacgcgagcgccgctgcagccgcgcgcgcctccgcagcccacgcccgcgggcgctgctgcagccgcgcgccgcgccgccctcaccgcagtccgacccgcgccgcctaaccgcagcccctgctcgcgcgccggctcgagctcccgctagcgccgctgcagccgcgcgtgcctccgcagcccacgcccgcgccgccacagccgcgacccgccgccgccttgcccctgtgcgccggctcacccaggccaagcacgcgccgccgccacccttgcaaaccctaggaaggaatagacagagaagagataagaagaaggggaaaaaagagaggtga

SEQ ID NO: 32721 - DNA, 536 bp, Oryza sativa
  Clone ID: PAT_MRT4530_36901C.1
tttttttttttttttttttgctggtcttatgtataaggccttctcattacgagcttataaataagcaaatgcctacaaaattttttagccttggcggcaacccaaacatgacaaacccaaatacccaatgtctaagacgtttgtgctcagttcatcatagatctggcttctgtggtgcagtctgctcctatcctacctttgggctaagaaaaggtatgcctagaattgcaagcacattaatccttccatggatcactctcgggcctcacttcagagggctcaacaacttccgtcgcggaaccttcagaagactctacctcaacgttggattcgctggtggcggcttcagactcctccggtcttccccatctcccgccaagagcgatggtcatcatctcgtagatcttgccacccaactcagctgggctgtcaggagtatatccactggagatcagcgcagtctcgtacaacagctcaacggccctcttggcttcggtactttcaggctcgtttttgcaagcagcactcaagtcctt

SEQ ID NO: 32722 - DNA, 2378 bp, Oryza sativa
  Clone ID: PAT_MRT4530_36902C.1
cccacgcgtgctcactccaccattccaccaactagctagctagctagccacgccatccctttctcctcctccttcttcttcttcttcttcttcttcttggtccggagagagtagagaggagggcgcgcagcgagatggcttgcccggcgcagtcgatgctgtcggcgagcaccaccagctgctgcgcgttcctgaggagcagcgccgccgccaagccacaggccgcggcgtcggcggcggcgagcctcgcgcgaggggggaggctgttcctgctgtcctgcaacgcctcgtcgtcgtcgtcgtcgccgtcgccttcttcacctccgccgccggcgccggcggcggaggactgcaacgaggaggagtgcgcgccggagaaggaggtggggagcctgagcgcggagtggctggcggaggagcggaccaaggtggtcggcaccttccctccaagaagaagggatggaccggctacgtcgagaaggacatccgccggcgagaggcgggtcgggcctcacctcgccagcccacatctcctcgccccggcacccccccgggaccgcgaatcccacactcatatatatagacggaacgccctggccgtccgcgctcgcggctgcaggagtcttcttgatctgatcgtcggacatggcgtcgcccatgctctccgccgccaccgtgccactccagggaggcggcttgtcggagttctccggcctgaggagctcgtcgtcgctgccgctgcggcggaatgccacctccgacgacttcatgaacgcggtctccttcaggacccacgcggttggcacgagcggcggggcgcggcgggcgccgacggaggcgaagctgaaggtggcgatcaacgggttcggccgcatcgggcgcaacttcctgcggtgctggcacgggcgcggcgacagctcgcccctcgacgtcatcgccatcaacgacaccggaggcgtgaagcaggcgtcgcacctcctcaagtacgactccacgctcggcatcttcgacgccgacgtcaagcccgtgggcgacaacgccatctccgtcgacggcaaggtgatcaaggtcgtctccgaccgcaacccgtccaacctgccgtggggcgagctcggcatcgacctcgtcatcgagggcaccggtgtgttcgtcgaccgcgacggcgcgggcaagcacatccaggccggcgccaagaaggtgctcatcacaagggcccggtgaagcaccacccactcctacaccggcgaccagaggctgctcgacgcgagccaccgtgacctccggcgcgcgcgtgcggcggcgctgaacatcgtgccgacgtccaccggcgcggccaaggccgtggcgctggtgctcccgaacctcaaggggaagctcaacgggatcgcgctccgggtgccgacgccgaacgtgtccgtggtcgacctcgtggtgcaggtgtccaagaagaccctcgccgaggaggtgaaccaggcgttccgcgacagcgccgccaacgagctcaagggcatcctcgaggtctgcgacgtgccgctcgtgtccgtcgacttcaggtgctccgacgtgtcgtgcaccatcgacgcgtcgctcagcatggtcatgggcgacgacatggtgaaggtcatcgcctggtacgacaacgagtggggatactcgcagagggtcgtcgacctcgccgacatcgtcgccaaccagtggaagtgagaacgtagaagctgctgcctgcgctgcctttgtaactccacctcgctccaaaaattttccccagacctcttccttcctcccctaggacctttctaaggtggatttcaaatttccgcgcgcccaaaaaagattgacctgtttctttgagaatttcacccccgcccaatccaacttctcctccgtcgagccgacgttttatgtggcggagagcgccataagctcgggggcggcgggctcttcgtgtgaaataccgtataaaacagcggacaccggttgccaggttgtgatagaatatttcagcatattgtcggacaccaaaaaaaaaaaaaaattcttccttcttcctctcgatcctttgtaatgagaatttcgaagtttcgagcgcccaacacagtttcttgtttctttctttgcttttcttccccacctcatctgacttttcactgtccggcacggattattatcgacttccggcaattggaaatcgcaatgctgtgtaatgttcatgtgtaataccgtatatactaccggacaccggttgccaggttctggtatagaatttcagcatgttgcttgggaccagcatgcactgctgtgtaatgttcatgtgtaataccgtatatactaccggacaccggttgccaggttctggtatagaatttcagcatgttgct

SEQ ID NO: 32723 - DNA, 563 bp, Oryza sativa
  Clone ID: PAT_MRT4530_36903C.1
gaggaggtgaaccaggcgttccgcgacagcgccgccaacgagctcaagggcatcctcgaggtcttcgacgtgccgctcgtgtccgtcgacttcaggtgctccgacgtgtcgtgcaccatcgacgcgtcgctcagcatggtcatgggcgacgacatggtgaaggtcatcgcctggtacgacaacgagtggggatactcgcagagggtcgtcgacctcgccgacatcgtcgccaaccagtggaagtgagaacgtagaagctgctgctgctgctgcctttgtaactccacctcgctccaaaaattttccccagacttcttccttcttcctctcgatcctttgtaatgagaatttcgaagtttcgagcgcccaacacagtttcttgtttctttctttgcttttcttccccacctcatctgacttttcactgtccggcacggattattatcgacttccggcaattggaaatcgcaatgctgtgtaatgttcatgtgtaataccgtatatactaccggacaccggttgccaggttctggtatagaatttcagcatgttgcttgggacca

SEQ ID NO: 32724 - DNA, 475 bp, Oryza sativa
  Clone ID: PAT_MRT4530_36904C.1
cccacgcgtccgtgatgatatgtgattcgatgacttatttggaataatcctttgagtttcatctgttctattgatatctatactacatcagtttctgtccaaatgtttatttcaggtgaagaatcttacactggcatttgctgttcgagtagctgcgtgactcttatcagaactccggcatatcaattgatgaggcccaacttggtgagaatcttcctattttgggctatgcggtgataatctaaagatttcctttaatggttaatatgtaagcggcagactccttatctaacttctagtttacaatatctctatcaaagttgtggcaattgtaagtatggtctgtgaaaatgacccctcaaaggccaacccacttgtatggctggaaagttacaggaatttttatgctcatatgttcctatcagtcaacagtaacgtttcaatatattgggattctttattgcaaaaaaaaaaa

SEQ ID NO: 32725 - DNA, 206 bp, Oryza sativa
  Clone ID: PAT_MRT4530_36905C.1
acgcgtacgatcattgaattagtcttcctgacggcgacaatggcgtcaaataacagcaagatctaggagtaggcggtggcggtggcgctggtggcactgatggtggtggcggttggggccagcaatctgatttaatgctggcggcgatgaatactacggaggctgctcgcgctgcggagaatggttgctagcctaaacagggcgaa

SEQ ID NO: 32726 - DNA, 521 bp, Oryza sativa
  Clone ID: PAT_MRT4530_36906C.1
gatataaaacgctctatatgttattcatgcttttcaaaccatgatggaccaccaatgtccgcacggtccaaggaacttaagcacactcactacaactctgggcatatgtctcaagctgttgctcagacgaccccctgactacagcgccctatgagacctatcagaatgaagcaccctgttgtacacttcaacaggaactataggatcactgacttgaaagaactgcaccgacttaattacctgaaatcttgactaacatgccctactctgtgctaccgagacatccacacttttgaagtactaggccagctgatccagaaaggtgggcctgactcctgagagcataacggtctagctcccgcttgacgttgtgcaacctgaccttcctatttcatgagggacgtggtctgtatatgccactcttacgaaaacgacacgtggccaacgcccgagcccttgtttcatcaaggaacagttctgcatcaagtgcaactcagactgcccacccggcaagaacagca

SEQ ID NO: 32727 - DNA, 546 bp, Oryza sativa
  unsure (1)..(546): unsure at all n locations
  Clone ID: PAT_MRT4530_36907C.1
gctgaggaatcggcacgagggcacatccatcaacgagggtcggtccatcttctcctcgtcgtctcagactatcgactgggatgactggtgctgcagccatccgaggcacaactgaagagaaaattgtagtccgtgtggattgatgccaattgtatcgcttgcctcaaagaaaatgttcgattgtgtctggtgtgccaggacctctgttcttcgtgcatggcgcaaagtaccaggaaattgtaaacatccgattgggagatggaaccactcggtgtggccaaattctggaagttgatggtgaaagaggctgttgtgcaggtctttgaagacacttcaggagtggacaacaaatacaccattgtgcaattcacaggtgggttctggggtggggccgctgagggtcgctggtggccacccacccggtgcttcttggtcccacgcaggagccgcccgtncttaagttacccacaatgatcaatttagtgcttncaaagctatctatctctcaatatcgaaatcntcgcggatcctcatgcnaatagaccc

SEQ ID NO: 32728 - DNA, 409 bp, Oryza sativa
  Clone ID: PAT_MRT4530_36908C.1
ggcaaaggaaaattaaaaggctttaaagactgttttggtcaaacgccaaaacccgaaaacggggattacattgctttttgggtttttaacccccccctgtttttacccttgttaaccggccaaaccccattctaaaggtgcttgtgaaaaccggaattaaaacgggggagccagggggggaataaaaatcgtgcccctgcccttgcttgcggatacaccccccaaactgtttgggcattttaaaacccaacccagttgaaggcgggggattccccccccttctcatgattgcgcgtctccaagaggatcttcgtcgggatgaacagggccccccttggcggggtgggcgctcagagtgatgtccctcaaaaaacacacccggaggggctccaagccctacagggggggg

SEQ ID NO: 32729 - DNA, 370 bp, Oryza sativa
  Clone ID: PAT_MRT4530_36909C.1
gggcaaaaccaaaatttctttggcgccggtttcagatttgctctaggcatcattttacatgggtccgtgggtttagccggggattttgctttcacgtgccctgtttcaccgtcaccgaacgatagaccgattgttgtagtagttcttttgcaacaaccgcaggtcggagcgcgagaaaacaatttcgtgcagtttaacccggccccccaaaaaaaaatggaaagggtgggtccttcccgaggggccgaaggcctttttttgccccctgtcttcttgaaacccgggggttttttcccgttggagttgttttactgcccctgcctaactttttcaaagcccattgtgcgaaccaggggcttaggtttgcctt

SEQ ID NO: 32730 - DNA, 1411 bp, Oryza sativa
  Clone ID: PAT_MRT4530_3690C.1
cggacgcgtcccacgcgttctcctccgcctccctttcccccctctcctcctcaaccctatttcaccaccacctccaccgctgccgcggcgagaattcgatcggttcttggcagccgtagtgcagttttgtgcagttttcttctctcttgttgttgaggatgaagtttgggaagagcctgagtagccagatcgtggagacgctcccggagtggcgggacaagttcttgtcgtacaaggatctcaagaagcggctcaagctgattggtgggggtgggggtggggaggagaggcaggcgaagcgggcacgcgttgcagcggatggcggcgaggaggaggccgccgccgcggcgatgacgcccgaggaggcgggcttcatgcggctcctggaggccgagctcgacaagttcaactccttcttcgtcgagaaggaggaggaatacatcatccgccagaaggagctgcaggacagggtggcgagggcggcggggagggagtcgaaggaggagctgatgcgggtgcgcaaggagatcgtcgacttccatggcgagatggtgctgctcgagaactacagcgccctcaactacaccggattagttaagattctcaagaagtatgacaagaggactggggctctgatccgtctgcctttcatccagaaagtgctacagcagcctttcttcaccactgacctcctgtacaagcttgtgaagcagtgtgaggccatgctggaccagcttctaccatcaaacgaactgtctgtatcgagtgaagatgggagaggcgatagcactaacgaggacaagccttcgaatcccagttcatccttggttaatggtggcactattccagagttagatgagatcgagtacatggaaagcatgtatatgaagggcacggtcgcggcgcttaggtctctgaaggagatccgaagcggaagctctactgttagtgcattctcattaccacctctccagggcgacagttcgccagaggagcagcaggaactgtggaataagattccggtgattgagcaggccgccaaatgacacgaccggcatgcactacatggttatgtacactgcatgaccttgatcttgacatttgctggagatagtaccggggatctcattcccctgtcatatattcagtaatttgtatgattccaggattcctaacagttgtaaaatggtggacatgttcagtatacattgtaaaatcatagaaacccatcataaccatcagacagaactgagatgttttgattcactattgtgagttaaatcctgtactttttgctgatctacatcctctttcatgaactctcggtacagaattagttaatgttgcagtataacaattctgattttgacaatctcgattcggagatgattttgttaaaaaaaaaaaaaaa

SEQ ID NO: 32731 - DNA, 446 bp, Oryza sativa
  Clone ID: PAT_MRT4530_36910C.1
gttagccgtgtaatctgcgtgggccgccatgctagttattattatttaagtaaagtccatcaccagtctctaaacttgtaccgctgtgtcatccctgtccttaaattcgcaaatcgaccgttcaggtcctcaaacttgttctactgtgttatcccggtccctatacttgcagatcactcgtttaggtactccaacttgttcagttgtgtcaccccggtccctaaactttgatttgagtatcatctgggtcaaataggacgggactggggtgacacaactgaacaagttggagaacctaaacgagtcatctgtaagtttagggaccgggatgacatagttgaacaatgtgctcctaagtgtgaaaaaatatcaaaaataaaaaaatcaggaggagggtgccagccacattggcgtgctccccctaccacctcagtgccaacccacca

SEQ ID NO: 32732 - DNA, 2718 bp, Oryza sativa
  Clone ID: PAT_MRT4530_36911C.1
gaggtcttttgaaagcatcatcctctctctctcctcccccatcgacttccccccacacccaacggaagccgtaggagagagaggggaaaagcttgctcttttataccctcatctagggttccgagcccaccggctctctccccccttgcgggcccggcgccatctctcccgccaccgcctccccccctccccccctccgcctccgatagattcgcgctcgccctcctgacccacggattcggttcccacgaaaccgctcgatctgggggatctgctagattcgtaaggcggcgtttcgatcgatctgttcgggggtttctgccgtggggaattttgatctataaagttagttttttgattttgtttcttttttgctttttggtggcggtttcgctgtgttaggtttgtggtggtggtggtggtggtgaggatgtgcttgtgccgttagatgggggccatggcgatggtggagcaggaggggtgcgtcgagaaccggcagcccctggcggcgccgagccgtccggtttccgacggaagcagctatggcggcggcggcggcgggctcgcgcagatgtcgccgccggtgtctagctcggcgaattccatctccggtcttaggcggacaagcgggccaataaggagagcaaagggtggctggacaccagaggaggacgagacattgaggaaggcagttgaggcttataagggtagaaactggaagaaaatagccgaatgttttccatacagaacagaggtacaatgcttgcatcgatggcaaaaggttcttaatcctgaacttatcaaaggtccttggactcaagaggaagatgatcaaattattgatcttgtaaagaagtatggaccaacaaaatggtctgtcatagctaaggcattacctggccgtatagggaagcaatgtcgagagaggtggcacaatcatctaaatccagaaataaggaaagatgcttggactactgaggaggaacaggcactcataaatgctcatcggatttatgggaataaatgggcagagatagcaaaagttcttcctggaaggactgataattctataaagaatcattggaatagttctctcagaaagaagcaagatatgtacaataccagcaataatatggtagttccgaaactgcttgtgcatgataagttcaaggataaaccaaagctgatggctatggagggtcatcttgatttgaacaaggcacccattatcaattcaaaagaccaacctggaacagctcatcggtctaattgctcagggtttctatctcgttcctcattaccaactgctcagccacttacttcccgtgaggcatctgtagttgatggttccgctgtcactttagtggcgcaagctctggaaagtgattctgtccgtggtaagggcttggaaattgattctgttcatgagaaaggtcttgaggttaactcggcacctgatcataccgggaactcttggaccattcaactagaagctgcaccatccaaaggtgaagcagaattatctttgaagaatgaggcacgctctcttggtccactttgttaccagatccctaacatggaagatgtagtccctgtgagttcctcactcttttctgaccatcttactgggaaccatacatctgaacattgtggggatgatatattgtcacctgctggctgcactactccccctccaacaaagggaaaattaacaagccagcttagtgttgattcaattttgaagagtgctgctaacagttttccaggtactccttcaatattaaaaagaagaaaacgggataaatcaacacctgtttcagctagtgagatgaagatcagtggatcaaatactgatagattttacactcccatggggatggaacctgctacagctacaccagagtcattcaaaactacatcttttttgtcattgggttctcttgatggttctgtaaagagctttgatgtttcaccacaataccgggcaaggtcaaaaagaatggctctcacgaagacagttgagaaacaactggatttttcatcagatggattagatacttgtggttctgagattctgaactcttcctgcaataattcccaaagcacactttctattaccgaagccccaaaactgaaagaaaaggaacatgctgttcaattggaaaatggaaccaagaactttgcgcatacaaccaatttggatgtaacctaatcttggaaaatgcaggaactgacatcaatctgatgaagtaggacagatgagctgaagtgtctttctgagctgatgagctttttctcaaagtatcacgattaaaccacaacaagatcaaacaaaaccggtggagaagaattccagaattgaagctttgtactgagtacagaaggtccaccaatcattctcccatctcttctaaccaaggtgtacaaaagatgagcgacactctgtagaagaatacattgctcgctgcactttgtgaatttacagttagaaaattcagattgtagaagccacaggtgtgtacaaaacaacaacgaaaaaaaattatagtgttagaacgtcattatagctgaataagagtattcctcattggattgtcagatttattttgtcttgtgctttccctttgtcgcgaaacagccagggtctgctctgtgtaacaataataaaacccgtttttgcaaaatcattgccagagatagtcaagaaaccattttgac

SEQ ID NO: 32733 - DNA, 373 bp, Oryza sativa
  Clone ID: PAT_MRT4530_36912C.1
actacaaaggttaaaatagttagatcaggaaaaattgaaatatatgcaaccacatgcttcatgacctatttagcaaaacaatatgctctagcatattccactttgaatgtcctgcttcacttgggctgcagagaagtgaaaaaagtatattaaaaactattaaaaggtggtttgaccataattaaacaaatcaaaaggctaaggcatggatcaacattaatccgttcatttgagtttagcttcagtggtgttttccaaagcttatagttaccatatcagcctacattaaacataatcatataacaagtcccacccctactatgtttaaatttcaagtagggaacaatgcaatgttcgacagtgccactaaatt

SEQ ID NO: 32734 - DNA, 423 bp, Oryza sativa
  Clone ID: PAT_MRT4530_36913C.1
atgaagaagaagaagaagaaggcgacgacgacgacgcaggcggagatcgtagagagtaccccgtctgtcgctgtgtcgtgtcgtgtcgcgcgcggcgcccagcagcgcagcgggatatccacccaaatctggggactcccggattcctccggcatgcagccgcgccgcgtgtgtaccagccacacccacaaactccttctcccccacgtgacgcgcgtggtgcaccgccccgccgccaagcccaatgcccccacgcgtactcaccctcaccccgccgacgacgtccacgcgttggtaccaaaagagaagtgggcccccaagtccggtcaccctcttccaggtggggcccacgtcctgacgccgacgtcgtcgggacacgtggaccactggcgtgttcgtcggaggaggattgaggacgaatag

SEQ ID NO: 32735 - DNA, 134 bp, Oryza sativa
  Clone ID: PAT_MRT4530_36914C.1
attcgtgattttgacgtctcattttgggatattggaagatgatctgctctcatatggcactaccaaattccataccatgaccacacgtacatagtcacgttcaagatgccaaggttgtaaggtttacaaagcaa

SEQ ID NO: 32736 - DNA, 723 bp, Oryza sativa
  Clone ID: PAT_MRT4530_36915C.1
atgccgtcacctttggtgctgctgcttcagtgcttcggagacgttgcactgacggacctcctcgtcggacttgcgctgctgctcagctgccttcaaagccgccgccgctggttggacgcccgctcgaagcagcagccggcgccgctggagagtgagcgcttcgaagttggaatggatagtgtgctgctgggagcttacgagctagggtttgcagcactttacccacctctcgactctggtctagttgggccgacggccatggcgctcatgaaagaagcagagcgcctcgacgtgcccttccagttcaacccggtggtgtcccgcctggatgccctcgacgtggagtccctccgcgtgaagaccggcgaggagtctgggctgtccccgtcgaagtcacgcgcggacgcatcgccgaaggtgatggtggtgacgaagcaggaggcgagccacaacgcggcgttgctgacggagcggttcgtggaggcgctcaactactacgcggcgctgttcgacggcctggaggagtggcacgagcggctggaacggtgggtggggcggctggagggcgccggcttcggccgcatcccgctcagctactacgcgctgcttcaggcgaggcgggtggcgcagggccttggctgcgatggcttcaaggtccgggaggagaagggaaacttattcctcttctttgtttccacatggcgcggccgccgcttcgactga

SEQ ID NO: 32737 - DNA, 242 bp, Oryza sativa
  unsure (1)..(242): unsure at all n locations
  Clone ID: PAT_MRT4530_36916C.1
ggccgagcgtgagagaggtatcaccattgatatcgccctgtggaaggttcgagaccaccaaggtactactgcacggtcaatngatgncccctnggcaccgttgactttnatcaagaaccatgatcacgggtacctnccagggctgactntgcccgtgctcatcattgactncaccactggtggttttnaggctggtatctccaaggatggccagacccgtgagcacggtcttcttgctttca

SEQ ID NO: 32738 - DNA, 1735 bp, Oryza sativa
  Clone ID: PAT_MRT4530_36917C.1
tcagatatccaaatatgatatctggagtactagtatgaagaacatgaagaataagtagaatccacagtggctgcaggctgcagctatgcggttaccgtggaaagcaaagcagggacgcttttgaggttggagctcccaactttggcagaagtttggtggaatttggaaacgccacgccaccggctgccgattccgtggaatttccgacaaggtgagctcgatcttggccgcttcttccgacacgttgaaattgctacgcccaaagttgaattcttgaagccgtcgcagccgaggccctgcgccacccgccgcgcctggagcagcgcgtagtagctgagcgggacgcggccgaagccggcgccctccagccgccgcgcccaccggttccagccgctcgtgccgctcccgccgctcgccgccgtcgcacgccacgatgttcttgatctcctccccgagcagccaccgttccacgcgcgcgcgctccaccgacccgcgcgccgcccccacctccaggcagtcgaacagcgccgcgtagtagttgagcgcctccacgaacctctccgtcagccccgccgcgttgtggctcgcctcctgctccgccaccaccatcaccttcggcgacagcccccacagcgcgcccaggaacgcgtccgcgcgcgacgtcgacggcgacagcccggactccgggctccgcctctccttgtcgccgcccgccacggcggcggcgtcgtcgtcggacgccaggaggcagtgcagctggaggctggagcagatggcgagggcctcgccggtcttcacgcggagggactccacgtcgagggcgtcgaggcgggacaccaccgggttgaactggaacggcacgtcgaggcgctctgcttctttcgtgagcgccatggctgtctgggtgaggagttccttgtgctcgtgcaccgacgtgaggcgcaggtgcggcgggccctcggggcgcgcggcgaggaggtggaggagctccagccattgcgtggcgtcggcgccgccgaggtcgatgacgtgcacgatcttctcggactccatggcctccagtatcgactggttggcggcggcgccggcgaggcggaggaacgggcagaggtcgaggaagtggcggcgcgcggcagcgacctcggccggcgtgggcgacgcgcggggcaggagcagcgcgcggcacagcccaggccacgccctcagcgcgcgccgcgccagcgcctccgcgaaggcggccgccacgcgctgcatggcgtccccgtcgggcgccgccagcgacgcgatgtgctcgagcgcggcgttcgcagcatcaagccgcccggccgccgccgccgcggcgcagttgagcaggagatggatgaggcacagcccgcgctcgtcggaacgcagctcccgcaccatccatggcggcgtgggcgacgccgccgcggccgggtggagcggcatgttggagaagttgtggagcggggaggatgtcaccgacgacgacgagccttcgtcctggaccatcagcctcgccagcgctacccccccaaaccttgaaatacaaaaaagctacaacctttgatccaatcgattctacgagcacgggcgcatttgaggttttgtgatgagtggagcccgcgaggtgagggtgcaaaaggctgcgagctctgcctcaaggaggagcagcagcagcgtccctagtccgtcccaagagaagagagaggatttcacaatctttcccggccgg

SEQ ID NO: 32739 - DNA, 315 bp, Oryza sativa
  Clone ID: PAT_MRT4530_36918C.1
atgcgcgcggccgacgatgacgatgacggcgaggcggcggccgggagcagcgtgcgcacggccgacgtcaacgacgagacggcatccggaagtggcgtgcaagacggcgagccggccgcagcagcgagcgggcgaggcggcgactgggcgagccgggcgctgggagctaggcgcggccgcgcggcgaccaggccaggcggcgagctgggcgcggtggcggctgggcgagtcgggcgaggcggcgaaccgggcgcgtcggcagcccagatgacgacgtcaacgaggaggactgttgacgtaaaacacgaggcctag

SEQ ID NO: 32740 - DNA, 464 bp, Oryza sativa
  Clone ID: PAT_MRT4530_36919C.1
accaaaaaatggcatccacaatctagattacaaataaataaggagttgtggtacagtacataatcatctcgcattccaaaatttgagaggctgccgaacatgacgcccgaatcagcggaacacgaaaatgctcttatctgaagaaaccaacctttgtgcagcaaacgtcccaacaattcgttctaacttcagaagatccagacgtgaaaaaaagacggtgcatttcctgttttctgattcactgagcatgtttacaagctctgggtaaaattcctttctccctggcaaagagtagataatcaaatggtgtgctcccctgatcttgtatctgtggtagaaatgagatctctcactataaagtaagatttttttcttgccctcaaaaaaccagagtcttgcacgtgatatatcttgttgcgatgttgtctccccaattctacaaaacgatgcttcctgagatttta

SEQ ID NO: 32741 - DNA, 363 bp, Oryza sativa
  Clone ID: PAT_MRT4530_3691C.1
atggatgctggtaataacgcatacgctgcggcgatcttcgccatcgtcgtgcttgtcaccgccaccgtctacattttagcggcggcggtgccggcggtgtacgtgctcggcgactcgctggcggacgtggggaacaacaaccacctgctgacgctgctcaaggcggacttaccgcacaacgggatcgactacccgggggggaaggccaccggccgctttagcaacggcaagaactttcccgatttcctcggtgcgttatcgtcgcaaggggcgaataggcggaaatatggtggaagtttgtgtttgaaagggacaaaaaaccacagaagaaggaaggttgtttctgttgcaagaaggggatga

SEQ ID NO: 32742 - DNA, 487 bp, Oryza sativa
  Clone ID: PAT_MRT4530_36920C.1
ctcgactcccacgccatgcctcctcctctccttgcagcagcggcggccccctttgcgaatagtggcgattgccacctcttctttccctctcttcatcatgtattgagcgcagcaggggcaggtggcgattggagcgggcgtggcagtagcgggcgcgatggcaatgagcggttgcgcgcagtgggcacgctgaggccgccaccactcggtcgtcacgggtggtgcgtcctcctcctgttctctccaagcggcagcaggcaaagtggcgcgcgtccccctcctcctcctcggtcgctagattcgtcggttggagtttgggggccacgaatccgactgattctggaggtccctatcggttactgaacaagagctgccacgacaagcagtgatggcggcggctgcgcgccttggcctctagccgccggtccaagtgattttccctcttcatgtgattgaatttgtgatgaatgttttaagaaaaaaaaaa

SEQ ID NO: 32743 - DNA, 385 bp, Oryza sativa
  Clone ID: PAT_MRT4530_36921C.1
ccacctcctcgaatatcgcggcgagctgctctgggcgttcgtcctcgccgacagcggctactgcagcgacgtccggggctgccgtgtcgccggcaggccgctggcgagcgcgttgtcggtgtcggtgtacgcgctggaggcggagggcggcggcagctgggtgtgggtgaggaaggacggccggagcatggacgaccgcgcgctgttcctggggcgcccggtcagcctcgccatggacgccgcgcagctgggcgtgggccgcggcagcgggtgcgcctacttcgtccacagcttcggcgacgccacgtcggaggtggtggagctgcttcctcgcgcggtagcccagtggtggagcgaaggcggcgacggctgcatcatatcatag

SEQ ID NO: 32744 - DNA, 522 bp, Oryza sativa
  Clone ID: PAT_MRT4530_36923C.1
atgcagattcgtggcactaggccctcttctccggcgtcactgtgccggtcgctgccatgtgggcccggggaactgtatgctgaggctgacgtgtggctccccatcactccctcccgatggacgggccgccacgcgcagccctgccgggcacttcatgagccgagaggccagtttttagaaatcgcgattgaagtttgtgtagaattgctcggtgtacacacctgggcctccacgactccatctcatgcgaaagtgtaccgagcgctgaaagccatggcggccgtgagcatcgggatgcacgaggaggacaacgaggcagcaggcaagccgcgcttttcgaccgcacatgacgcgggggcgcaggcgagcaggaagcagaggcagaggcgtcagaaaccaaccaagcaacggccgtccgtttccctccagttgtggtcggccggggggccgcgcggcgcggtggattcccccacttttcgcgtcggacaaggcggcccggcgtcgttggtggacctgacctga

SEQ ID NO: 32745 - DNA, 306 bp, Oryza sativa
  Clone ID: PAT_MRT4530_36924C.1
atttggctcgaggagcgcacacacactcaaccagatctcccccaaatccacccgtcggcacctccgcttcaagatgcagatctttgagaaaaccctgactggcaagactatcaccctcgaggcggagtcgtctgacaccattgacaacgttaaggccaagatccaggacaaggagggcaggcgcccagaccaccctcttggtggattccacgcaggcaaacagctagaggacgggcgcacgctcgctgactacaacatccagacggcagagcaccctccaccttgcgctccgccacaggggaggca

SEQ ID NO: 32746 - DNA, 498 bp, Oryza sativa
  Clone ID: PAT_MRT4530_36925C.1
aatcggccggcggctgatggtccacgtctggctcaggctcagctgcgtgccgctggccacactgtgaacgagcaccggttggtgatggtgaaggtcgccgcgttggcgccgccggcggcgagggtcgccacaaggaccacgatgacgagcactgcagaagaggcggatatatcaatgtatccagccggcggcggctgtatcaggaggtggaaggggacgcgcgcagtcacggtgctactgctaccaccaccaccattggggctgggtgtggcgggtctgagagctcgaggattccgccgtcggccattccgacgtcgctgtgctcgccgactccgacctcccggcgcgcacgcctctgcggtcacccaccgcctacgccgcgctgtccgcggcgctccggtcggagggccggagctcgcctgctgcgccgcctacccgcgtcgtctgctgcgagagagaggggaaagggaagaagagagagaagggagaggaaagaag

SEQ ID NO: 32747 - DNA, 399 bp, Oryza sativa
  Clone ID: PAT_MRT4530_36926C.1
atggactgctccctcggccgcttcaggtcccactttcctgaccccttcgccggtagcaatcaatctggcgactgctctacccgtccatgctgcaaggtgccgtgccaagttggggctgacgggctcaatcttgctgtcaccccgcaggcagcgccgcagcttcgggaggtggagaggcaggtgcgagagatcgccgggagatggaggctgggctcagagaaggagctaggcggcctatcctccgccagatctggcgggaggggaggccaggcgacggccgcagcgtacaaggcagtggtggcggtcgggcgaggcatcgacggcggccgggccacggactccatggggttacgaaccgtgattgaagatcctttctccagaagtgctagattcgtgtag

SEQ ID NO: 32748 - DNA, 1847 bp, Oryza sativa
  unsure (1)..(1847): unsure at all n locations
  Clone ID: PAT_MRT4530_36927C.1
atggctgcggcggtggggagggcgcggggggcggcgagcctggcggcggcggtgagggtggcggcggcgacggcgaggccggcgtcgagcgtcgccgcggcggccgggctggggttcgcggggctggtcgtgcagggggaggacacgccgttcgggtcggtgtggtggtgggcgtacgcggggatatcctgcttcctggtgctcttcgccgggatcatgtcggggctcaccctcggcctcatgtcgctcggcctcgtcgagctggagatcctccagcgcagcggcaccgatgccgagaaggcccaggctgctgccatcctcccagttgttcaaaagcagcaccagcttcttgtcaccctgctcttgtgtaatgcttgtgccatggaggctcttcctatattccttgacaggatttttcatcctgttgttgctgttatcttatcagtaacgtttgttcttgcttttggagaggttataccacaagcaatctgtactaggtatggattggctgtgggtgctaactttgtatggcttgtacgcatcctcatgatcatctgctatcctatttcttatcccatagggaagctcctagattgtgctcttgggcataatgaatctgcactttttaggcgagctcaacttaaagctcttgtctctatccatagcaaagaggttatatcacagttcaatgcttttctgccattgcaggctggcaagggtggagagcttacccatgatgagactacaatcataagtggagccttggacttgactgagaagactgctgaggaggctatgacacctattgagtcaactttctcattagatgtggactccaagttggattgggaagcaatcggcaaaatccttgctcggggtcatagccgtgtgcctgtatactctggaaaccctaggaacattattggtctcctgctggtgaaaagtcttctgacagttcgtgctgaaacagagacaccagttagtgctgtttccattagaaggattccaagggttcctgcagatatgcctttatatgacatactgaatgagtttcagaaaggaagtagtcatatggctgctgttgtgaaggctaagcccaaaattgtaccactccctgacaaaactgaaccaaacagggaagtaagtggggcaccacagctgactgctcccttactatccaataatgaagaaagggtggaaagtttggttgttgatattgaaaaaccacagagcaggcaggttaatggaaacaaaccctgttccatgcagcagaatgagatgccatatgcaatgtctcggtcatcagaggatatagacgatggtgaggtcattggtatcatcacacttgaagatgtatttgaagaactattgcaggaggagatagtggatgaaactgatgagtatgttgatgttcataagaggatccgagtggccgccgccgccgctgcatcttcggttgccagggctccatcaattcggagattaacgggtcaaaagggcacaggtacgcagaataggcaaggacagccaactggaattttgaagaaacctactgaaggtgattccaatccatcaaaacatcaggtgaaccttgttgaacctcttttggaaaataagaggtaactttagatgtatgcatgaatatagcgatggaacgcaaaatcaaattcagaaggcttggctaacagtaaatatgagcgaactcgtaaattcggatttgttgtcatggtctcatggaccttagcgttgaattttgtgtttatggatgatgaaagtagataacaattccggaatcttttgatacaaaaaaaaaaaaacgaatagtactcttgcngtctgtattaaaa

SEQ ID NO: 32749 - DNA, 954 bp, Oryza sativa
  Clone ID: PAT_MRT4530_36928C.1
atggagcgcacacaacgaggacaggcggtgggcgcgggcggtcagcgaggacggcgcggggatgagtggtcggcgtgggcggtcggcgaggacagcgcaaagggtggcgcggacggcgtggatgtcggcgctcaggacgttggtgcggaggaggaggcggaggcggcggaggagcgtgggggcggtgaggggaaaatcgagcacatgaagaaccaaaaatggtggtggagggagcccaaggaccacacaggcaaagaactaaagcgaaggccgaccgggcgatcggggacgtgcggtgggcggtgggctcctcctcgtcgtcgttggcgcacggggaccgcccgcaaccgcctccgcgcccgcggcatgcagccaccgccagccttggctcctctccgctcaccggggctcgagaaacctcggctcctcgaccgccgcccgcccgccgcccgctgccgcctccgcccttgcccgtcgctagcctcgcgcccacccgccgcccgctgccttctccgcccccgcccatcgccggcctcagctcctcgaccgccgcccgccgcctcctccgcccccgcccgtcgccatccttgcgcccacccgccgcccgctgtctcctccgcccccgcccacgccagcctcagctcctcgcccaccgcccgtggttgcccgccgccgccgacccacccatctggatcccactaccccgttcacagtggggttcttcttcccgggctgggccttcaactgatacagatagaggaacaaggcgaagtggggtatgatcccacaatacaccttgcaaagatgaacggagatgatgatttgagggatggagttgagattaaggtggtggatgttgatgccatagaagtggaggagtcctcagaagaattcgctagtcgggaactcttcactggcagcggcctgccaatcgatgagctcgcatggaggtag

SEQ ID NO: 32750 - DNA, 630 bp, Oryza sativa
  Clone ID: PAT_MRT4530_36929C.1
atggcgcgggcggccgttgtcctcgccgtcgtcgtgttcttggcggccggcgtgcaggctgggagcggcggcggcggaggaggggcggcgtggacggcgctggacggcgtgtgcggcgacctgggcggatactacgtcaccccggagctctgcaagtcagcgctctgcggcggcggcggcggcggggacacgtcgtcgtcgtcgtcgccgtgccgcgccgccagcggcgcggggaaggtggcggcgctggcggcgaggctggcggcggcgaacgcgaccgcggcgagggccagcgtcgaggccgcgtcgcgcgccctggaacagaatcccagcagcagcagcaacggcacggcggcggcggcggcggcggcgaggaggcaggggatgcggtcgtgcctgcagctgtacgccggggcggtgccggcgctggagtgggcggcgcggtcggtgtccgccgggcggtaccgcggcgcgcgggaggtgctccagtcggcgcagtacgtctctctggggtgcgagggcatggccggcggcggcggcggcgcggcggcgcttccccgcgagaacgagcggttcagcgtcatggccatcgtcgcgcacgccgtcgtcgcctccatgctgggaccctag

SEQ ID NO: 32751 - DNA, 159 bp, Oryza sativa
  Clone ID: PAT_MRT4530_3692C.1
gtgacaagtctcactggacgtgtagcgtgacaagtcatgtagaataaagctacgagtacccttgtggatatatccagctgatgcatgtacgtatactatggattgatgatgggtgtaacgtgacggatcgtatactcccaaaaaaaaaaaaaaaaaaaa

SEQ ID NO: 32752 - DNA, 622 bp, Oryza sativa
  Clone ID: PAT_MRT4530_36930C.1
ctagtggatccccgggctgcaggctggtttttcctaacacgcagcactgtttttcctattggcatattctgaaaaatgcacagtctcatttaggcacggtaaatacctctcaaacatttcaaaatatgtttattaagtgcatgcaaggacctaactcagaaacggagcttgaggaatcatgggccacaatgttaaatgaatataagttacaggagaatagctggcttagcgacctttataggtcccgcaataaatggtgctcagcatttaataaagatactttcgatggtgggatcaattcatctcagtggggggaggtctcaaacaatacatttactggaatatctgatgaatctacccctcttacacgatttgcccttttactagaaaaggttttcaagggtctacgtagaaatgaatctgaagaggattttcgctgtagccaaactgctccagttcgtgcaattaaacacagtacagttctgaagcaggccgcagaatcctacacgcataagatatacaaattatttgaggcagaatttctggatgggtgcggagcaacttcatgccatgaaagttcttgtggtgggaacttgttgaggtttgaaattactatgcaggg

SEQ ID NO: 32753 - DNA, 567 bp, Oryza sativa
  Clone ID: PAT_MRT4530_36931C.1
atggctgaagcccgctgcccacacatcggagaaagagaaggaaaccctaagccggccactgcgtcgcgtgccacaatctcctccgtcgtcgcgcccgccggccaccgcgccgctcctctcccgctaaccaccgacaggacctgcgttgccgtcttgggctcagtcggcacggtgactgtggtggggatggagatcaacgagccggtgaccaaggcggcgggagagcaagaggaggagccgagctccgccgagcctgaggttggcgccacccctgccgtcgtggtcttctcctcatcccacatgttcgccggagaagagaaagaaactgttccctccggagctccccttccgggctccgggttcccctctgggcttcggagctcggtcatttggagtggcaccggagcccgtggcgctgtgacctcccggagctcctccggagccgatcagccaccatccggagcctgcttaggtctcattcctctcgcccccaatgagatccgattctcctggatctccggaggcctccggagcgagggggccatccgcgaaccgacatggccctga

SEQ ID NO: 32754 - DNA, 289 bp, Oryza sativa
  Clone ID: PAT_MRT4530_36932C.1
cccatttcgacgcggatgagcccaaagagcgagggagggggaaccaggaaacgagcggcgcaaggatgccgcaaacgcagctccgataccgggagcaccaagagggcccgcggacgcaccgaaagcagcgcgaagcacggcggaggcaagcgccgcaggaccgaggggggagacaagagcgcacaggggagcacggacaagagcaaggcccatggagggggcaagcgaagcgcctggagcaccggccgcgacaagtccgcgaggggaaggagaggccaatgcgcagcgc

SEQ ID NO: 32755 - DNA, 288 bp, Oryza sativa
  Clone ID: PAT_MRT4530_36933C.1
atggcagcgacggtggcggctacggcggggacggtgctgttgctgctgttcgtaataaacgttgtcagcgtggttgccgtcgcggcgaggccgttggaaggggacggctggctggagagcggaattgggatggttacggaggtgctccgtgcggcgaaatcagggccccacgccacgcctcctcgcgctcttagcctcaccaccatcgacatcgccgtcctgctccacgaggccccgacgccttgtcccgctccagccatggcgagcctcccgctctcctcgtgctag

SEQ ID NO: 32756 - DNA, 326 bp, Oryza sativa
  Clone ID: PAT_MRT4530_36934C.1
cccacgcgttcggcggtcagggtggccatcttcggagcgcaggtgatctggtctgagatgatgctcagggacatgcagtgccagcgggaggtgcacgacatacctatggacgcgtgccggtaagtgctcgactggccgctcaccgaccaggagaggtgcagtcgatgatccgccgacatggcgcgctcgtgctgcggatgctgtgttgccatgagctgcatgacgtgagcctcgagtgcctgctgctccgtcatccgccggatggtgatgatctacgacgagagcatgccgatgcccctggtgcaaggctggtccctgtcgtcgta

SEQ ID NO: 32757 - DNA, 373 bp, Oryza sativa
  Clone ID: PAT_MRT4530_36935C.1
ggataaggaaccaggggtttattatatatgaacaatttaaagatagaacccctatttggctatctacaaggaagggttctttcccattttttaagagggattttatacttaacaagaacggaagacaaccccctttaatgaagaaatttttttttaccaagggaaacagaaagaattgatccgccagggggacaaaattttgcaaaacgatgcgtttgttttgcagtttttttggctaaacaatgcttcccgccattaagtttccaatgaagacgaaaaacgcaaagaccaaaggcccaaacagggctttgaaacccccatcggaggaagaccttttttttttaagaagatccagttcttggcgaagcttctg

SEQ ID NO: 32758 - DNA, 218 bp, Oryza sativa
  Clone ID: PAT_MRT4530_36936C.1
tggcagaggcaatgtggacatcatgactggaggaaacattacaaatgcaaatggcaatgttgattgctctgctattcaaccgagtcagccctgctaccagcctgatacattggcatcacatgcttcatatgccttcaacagctattatcagcaaaatggagctaacgatgtagcttgtgactttggcggtactggagtgcggacaactaaagatccaa

SEQ ID NO: 32759 - DNA, 1807 bp, Oryza sativa
  Clone ID: PAT_MRT4530_36937C.1
atggcgcatgtggcttttgttgcgctcctcttcttgctgctcgtcgggcattgcctcggaggcaaggttggcatctgctacggccgcaacgccgatgacctgccggcgccggacaaggtggtgcagctcatccagcagcagtcgctcaagtacgtgcgcatctacgacaccaacatcgacgtcatcaaggccttcgccaacaccggcgtcgagctcatggtcggcgtccccaactccgacctcctccccttcgcgcagtaccagtccaacgtcgatacctggctcaagaacagcatcctcccctactacccggccaccatgatcacctacatcaccgtcggcgccgaggtcaccgagagccccgtcaacgtgtccgccctcgtcgtgcctgccatgcgcaatgtgcatactgccctcaagaaggccggcctgcacaagaagatcaccatctcgagcacgcactcgctcgggatactgtcccggtcgtttccgccgtccgcgggggcgttcaacagcagctacgcctacttcctgaagccgatgctggagttcctcgtggagaaccaggcaccgttcatggtggatttgtacccctactatgcgtaccagaactcaccaagcaatgtctcgctgaactacgcgctgttctcgccgcagtctcaggatgtgattgaccccaacaccggactggtttacacaaacatgttcgatgcgcagatcgattccattttctttgcactgatggctctgaactttaagactctgaagatcatggtcaccgagacagggtggccaaacaaaggggcagctaaggagaccggagcaacacctgacaatgctcagacctacaacactaatctcattcgtcatgttgttaatgacagcggcacacctgcaaaacctggggaagaaattgatgtgtacattttttcattgttcaatgagaacaggaaaccaggaattgagtctgagaggaactgggggctgttcttccctgaccaaagctctatatacagtctagattggactggcagaggcaatgtggacatcatgactggaggaaacattacaaatgcaaatggtacttggtgtgttgcttctgctaatgcgtctgagacagatctacagaatggtttaaattgggcatgtggaccaggcaatgttgattgctctgctattcaaccgagtcagccctgctaccagcctgatacattggcatcacatgcttcatatgccttcaacagctattatcagcaaaatggagctaacgatgtagcttgtgactttggcggtactggagtgcggacaactaaagatccaagttatgacacttgtgtttatatggctgccgggtatggaaaagctttctcatatctttgttcaatttttttgaagcattttttcaccacctccttttacaacaaaaacttctacctgttgttctccatgctacccattatgattgctgcatgcattgtgtgatatgttcggagagagatcttgcagaagccttttgccatggaggatggaacggtaatcgcctgatactggaaaccagtactggtttgtttgtcatagttagcggagtgttgtagtatgactatgtagtaggaaactaggaattctcttgccttgcgcggacagcatatatgagttagcattatgaactaggaacattgcagatgatgtctcttggtagttataatcctattatgctcgctggatttttcagtgccactaattctttgctgctaccaaaaaaaaaaaaaaaaaactcgagactagttctctctctctctcccccgtg

SEQ ID NO: 32760 - DNA, 275 bp, Oryza sativa
  unsure (1)..(275): unsure at all n locations
  Clone ID: PAT_MRT4530_36938C.1
ctcgcctcgcctcgcctcctcctcgaagcgcgaatttgaagcggcggctcctcccctcccatggcggcggcggctagggttttccgcgggtgcaggttcctcatggcggcggcggcgggcaagaggccccgcgtngggctttccgcgtccggcgttagcaggccgggggcgaaggctgaccaatnacggaggccggntgcatgcgaaggagaagcgagggatcatgcagccccgtggcccggtctacgacgcccctcagcagcgttccgccggtc

SEQ ID NO: 32761 - DNA, 423 bp, Oryza sativa
  Clone ID: PAT_MRT4530_36939C.1
atggcgcccgacggtggaggggaagagaaagacagaaagggacggatcggagggggaagaggagggagccggagaggaggaaggagtatctccgcccgcgccgctttttgtgctggccgtcgcccgcaccgctttatctgccagccgtgcccgtgccgctttctccgtccgccgctgcccgccgctatctccgtgttggccgccacacgagctgctctctacgccggccgccggccgccggccgcgccgctttctcttgtcgatctcgcaccctccatgagatggggaatagaggaggagaggggggaaggggaagaagaagttgaggtggtactgacatgtggatcccacgtgggtcctacgctaactcagctgccacgtaggataaaaccggggtcaatgccgcttaaggacccagagtga

SEQ ID NO: 32762 - DNA, 737 bp, Oryza sativa
  Clone ID: PAT_MRT4530_3693C.1
gctctctctctgtcttctctctaccatgaccggccaccaccattgccaccggccgatctcctcttccacagccctacatcccaaaaccttgcgccattagctcggcctcgatgaggtgaatccattttgcccctttcccccttctctccccctttgaatcaagccatcaccaccaccatccatgtcggccggaggtaagcacttgccgccgccgttccggcctcttccctcactccctttgccatacgactgcctccttgggtgcgcgtctctcgggaacatgtttccccgtcaacgtcgtcgttccccgccaactagagcaccggcgcccctcctctccctcttctctgtgttcggctggaagaagaagcagaaggagagaggatacgggaggaagaagaagagaaaaagaaaagaaaagaatctccctgacagagtctattttattctggatggcaacatgtggcatttcgagcatcggataatcaggttgcctatctcggatttatttgcgttggagcaagagtccatttgatgttcttgccgaagtcaggagttcaatcacataagttaattcccttttaacttaatcttcaagtttaggttatttagatggtttaagtctatagtaaaacagcagagttaggtcattctaaagcttctgttgtaatagttagccacaatctcgtaaacaccctattactttatgtaataatatctccttcaaagctatgtct

SEQ ID NO: 32763 - DNA, 594 bp, Oryza sativa
  Clone ID: PAT_MRT4530_36940C.1
caaatactgggttcagatggtgccatttcaggttttcatcagacgtacagaaggaaataactctttcctaagagtaacatactcatagggaggccacgagggcatgctctctggatgtgaagcagcaccttcatctaacatcagaataatcagaacctaatgtggcacaagctgatcatcacatcttatagaaatattaggaatgtagtcatgttacatcacagatcttgtagcagataacacttgcactcgctttctcgtgagccgtgacctagcttgaaattatagtctaatcaagagcacttctccgttcgttgacatgcgaattctttcgttttttcttgtgtaaatgcccgattagtgaaccttgaaggtaaagaaaaaagcaacctggggatcattctgcatgttttgtcacctcccattactgtggttgttaggcatcataatcgttgcagatccagaagatcttcagtaattagtgatgaagtagatgcttgcacagcactgaagatgaaacatggaaaacgaaatcttggaccggtaaatatacctggccactcaatttctgttgaaaaaaaaaaaaaaaaaaaa

SEQ ID NO: 32764 - DNA, 354 bp, Oryza sativa
  Clone ID: PAT_MRT4530_36941C.1
atggcacccctaccccagctatcgttgccaccaccaccgctggtctgtgcatttcccttgctccagccgctcctcttctgcctgaaccccgcccactcctccacccaacccccgcccactcctcctggtctcatccactctcacgctccttctctacttggcctcccacccgcagctaccaccctacttctcgtcgtccgccaccccctctctacattgcccgttgtgtgtcgccctgaagaagatgggaaaagtgaggaagagaggtgggaagaggagggaaaacaattggctgctggcatgtgggtctcaccacgtcaaccaaaatcaaccactatatcgtcgaggaactaa

SEQ ID NO: 32765 - DNA, 321 bp, Oryza sativa
  Clone ID: PAT_MRT4530_36942C.1
gcgtgaaatgtccattctttatttgggggttgggtgcgtttactatggatggcagtggcacccgggaaatgcgtttttccactccaaggttgtcacattattggaggatgagcagagcagatgaggccatgagggtctatgggagcttcattggatccgtcgaatttggccgcgcgccccattattgaggatgaatggaggctgaagagaaacaatcatgagatctacagttattcaacctgaacagattccagaaggtccattactgattttcggtcaggcatgctgggtatggctccctttacttgaacacataaagat

SEQ ID NO: 32766 - DNA, 288 bp, Oryza sativa
  Clone ID: PAT_MRT4530_36943C.1
atgggcgtgtctaaccagagaggcctgcttctgccgctgccgcgccccttgcctgcgcctgcacgctccgtgcaccgcgcagccaggcgcccacgatgtgacgtcgtcgtcttgctgtcctcggcgcagcttgtcgtcgccgtgttcgcgcggggaagggaaggccttgagctgactgatgttcaggtagattcctggccaggctacagtattcccggggaggattcttgcaagcacaagcggacagacggagttgccctccagtccgaggtgttcgcatatacgtag

SEQ ID NO: 32767 - DNA, 376 bp, Oryza sativa
  Clone ID: PAT_MRT4530_36944C.1
ctaaaacattcctctaccgaccaaaaatattcttggcgggggggggaaaacccaaggttggccaaaaaaaattaaaaagaggaggcaaaaattaaggaaaaacaaagaaaaaaaatggaggggcgccctcccaaaaaagttacaaaaaactataaaaaagggggctaacaacggacaaaaaacacccgcaaacgttggtcgggcccgaaattacgggccggtaccggcaggcaaacaagctctacttaaagggggggtaataatagcttgccaaaaaacctccataaattccctcctgaaaaaaagaggtatcccctacaaaaaacaaaaaaaatactacccagaagcttaaaaaagaaagccgggggatctaaaa

SEQ ID NO: 32768 - DNA, 846 bp, Oryza sativa
  Clone ID: PAT_MRT4530_36945C.1
atggccgctgccttcggccagcgtcttcgccctctcccattttcctctctccctctaacccctctcatcttgttcgctaggtggttccagagaccgtccgccattcgccgtcgtcccccggtcaccttgccgccgttcgccatcgccccctcgttccggccgaacaccgtcagtcgggatctgcaacatggcataccgcttccaccctcgcccagcaatggcgacgacatcagcaccttccgcccgacagtcggcgagaacgaccccaccttcggccacatgtgcaccgtgatgaggggaatggacaggatgcactccgacctgcacaaggcatccaaggccttgaatgatggaaagcttgtgaggatcatagctctgatggatgagatagcacgcctgaagaaggagaacgctcagctgaagggtctgcctgctcccggaggagtccggatccgcaccacgcctcgcaagtcgacgactgcacccgtgcgcattaagcttgcgcccaggaacccacctccgcccgcaattcccgcagcacccgcagctcctccagttcctcccgcagcagctccaaccccagctccagttccagtgtcagctcccgcgtccgctctctccttcgctccagcgtcagccaccaggggtccagccagtggcaacggtggttggttgcctgctattcccagtggcagccgcgaccaaagcagcagcagttcgagtggctcagagcttggtagcagcgagacgtatctgccagactccaggagccgctcagagggacctggcgacaagcaggagaacgccttcaactccaccgaccgcaggagccgttccgagcattag

SEQ ID NO: 32769 - DNA, 129 bp, Oryza sativa
  Clone ID: PAT_MRT4530_36946C.1
gggggacaattggaacactccgggtgataaatgaagcttgtcagttctccagtccacttaaatgcactcaatcaacgactgaaatcacattagttctgtcccactactaggctcacagttcaaacccta

SEQ ID NO: 32770 - DNA, 1801 bp, Oryza sativa
  Clone ID: PAT_MRT4530_36947C.1
gcgtcctctacgaatctcgcgccgacatgccgcccccgatccacctctccgcggcggccctctcgcggccggcgaagtgccgagagctgaggcggtagtgccggatgtggccggccgggagcgaaggcggcaacgcttctgccgggggagcagcgcaagagggatggggatgaaggcggcgccggcgggagcggtgcgggcggcagaggacgactggagcgcggcgcggggatggaggcggccacatcctgcgagagcccgccgcttctcggcccagcgtcctgctgcggtggccgtctctcatcggagctctgctcgtcggtgcccgcgcgccgcaccattgaagtcaaagagagaggagagattggggtggggggagcaatgtggggcccaccactagcaactggtttggctaggcaggcaggatggccaaatttagctagctaaggagccaatttggccagctagatggcttggccagctggatagagtctgttagagtgctttttcctcctaaatttgctagaatgtcatctagccattctctcttggagatgctctaaaatagtactcaatcatggctatccttatggagctccttgttatgattttcatgaattccttgttaccatttgacgaggaggacgtggttaaggaggcaaaatacctgagagagaccaacgagaggctgacgcggcagatcgagcagctgcacgccgaccactgcgcccacgtcgaggagctcgtctacctcaagtgggtcaacgcctgcctccgctacgagctgcgcacccacgacggcgacgacggcgccggccggatttcggcgagggacctgagcaagagcatgagcttccggtccagcgagaaggccaaggagctcatgctcaagtacggcacccatggcctcgacggcttcgacccctccatcttctccccgctccacgagtccgtctacggcgacggcgacggcgacgacttcgagcagcgaagaccgaacggcgacgtcgtcgtcgacgaggcgccgcggagcccgagcacggcggtggcgatggccgccgcagctgcgggggccgagtcgccgtcgagacgtggcaacaagctcaagttcttggggaacatcaagaagctgctcccgaccagcaagaaggggcacggccgcggcgaccggaggagcagcaggaagcagtcggcggcggcggaggcggagccaccgcgggacgagcacctggagaaggcgctgcagtggctgtccagccacgacgtgctggacgacgacgactcgtacgagagcacgccgctgtcgtcgtgcgagcggacgccgctgagcagcgtcacgacggcgggctccacgcacgcccgcagcaccggcggcgccgccggcgagacggccgccgcggccgcgtcgaggctgctggaggcggagacggcgcgggcgaggagcgacgtcggcgcgtcgtcgtacgggcgggaggcgccgagccggtaccacgcgctccggccttaccaccccggcgccggcgcaggcaatgtcggcggcgacgggccccgcgcgtcgccggagaagcgggagctgaggcggcggtcggaggagctgagaagccccgcgtcgatgttcgcgggtgcaagggataatcgcatgcatcagctgcagagcaatgcttaattaaccactactactattactgaagtatttacagattaacagaaacctgctgcatatgcgagatgggatataatgcaagtttttttttcaaaaaccaaaaaaaaaaaaaaaaaaaaaaaaaaaaaaaaaaaaaaa

SEQ ID NO: 32771 - DNA, 360 bp, Oryza sativa
  Clone ID: PAT_MRT4530_36948C.1
aaaaaatccattattttctctcctttttcgcctcggaacagttgagctgatcgatcgccggatcagagtagattatctccggagccaagtgaccggtggcggccattatttttcctttttagtttatatttttttgaattatttttatttttacgctcatcgtcatcacacgtcgccgtccctttcggtttcatcatcgatcggtttcatccaggtatcttcccctccccaataagaattcgatctttcggttctcggtgaaccaccccccgtgttttcttcgtatatagcggatcttctgggtctctgatcctgtgaatttcgggaatttttggtgatcgatcgatcgatccatggcgg

SEQ ID NO: 32772 - DNA, 1248 bp, Oryza sativa
  Clone ID: PAT_MRT4530_36949C.1
gaaagaaaaaagaatcaatacaattcaattcaattcaatttcaaatctatgttagtatgcagataatcccaaagctcatcgcggcttggaataaggattacggtgcggcgaccggtgcgcagcgggcggcggcgcccgcggcggcagcttcgccgccgccggccgcgcggtgccgacggactcgatctcctggagcgcgacgacgacgtcgtccatggacggccggctcttggggtcgccgcagaggcacttgtcggcgagcttggcggcccgcgccgccgccttggccgggtagtccccggcgagccgcgggtccatcagccccgccagcttcttgccgccggcgatgtacggccgcgcccactccaccagattctgctggtggctcggccggttcaggtcgtgagccctcagccccgtgagcagctcaagcagcaccacgccgaagcagtacacgtcactcttcacgtacagatggccggtggcgacgtactccggcgcggcgtagccgtacgtgccgatgatcctcgtcgtgacgtgcgatctgccggcgaccgggccgttcttggcgagcccgaagtccgacagcttcggcgtgtaatccacgtcgaggaggatgttggatgccttgaaatccctgtatatgatctgccgctcagacgagtgcaggaaggcgaggccgcgagctgctccgattgcgatcttgagccgtaggctccatgacagagggtcaaatgctcctctcctgaagagatggttttccaagcttcctttgggcatgaactcgtaaaccagcagcagctccctctcctctttgcaatatcccagcaacttcacaagatttggatgcacaagtctacccaggaagttgacttctgactgccattcgtggaggccctggacgctctccgggttgagcttcttgacggcgacgacgacgccggcggagctcttggccgggttgagcgtgcgctcgtcggcccaccccttgtacaccgtcccgaacccgccctcgccgagcaccatctccggcttgaacccccgcgtcaccgcccggagctccgccagcgtgaacaccctcagccgcggcatgtccagcaccctccccgtctccccgccgccgctctccgccgcgatcggccaccgcctgtactcctccctccctcctcctccgccgccgcccgacaccgccgctgccgccggcttctcgtcgtcggcggcgtcatgacagcacaagcgattccccat

SEQ ID NO: 32773 - DNA, 493 bp, Oryza sativa
  Clone ID: PAT_MRT4530_3694C.1
taacttgccttgctccaatgcaaataaatccgagataggcaacctgattatccgatgctcgaaataccacaggttgccatccagaataaaatagactctgtcagggagattcttttcttttctttttctcttcttcttcctcccgtatcctctctccttctgcttcttcttccagccgaacacagaggagagggagaggaggggcgccggtgctccggtggtcgagaggctgcgacgtcggcggaaaaatatgttcccgagcgacgcgcatccagggaaccagtcggccagcgaaggaaacaagcgaggaggccggaacggcgacggcaagagcttggctcggccaatttgggaggtggcggtggcggtttatctcaagggctgtggaagaggagatcggccggtggcaatggtggtggccggcaaggagaggcggtggagagaggcggttctggagacggtcgacggcttggccacggcgatgctggcgtga

SEQ ID NO: 32774 - DNA, 1134 bp, Oryza sativa
  unsure (1)..(1134): unsure at all n locations
  Clone ID: PAT_MRT4530_36950C.1
cattctgttctgaagaatgatgatatgctggagacgcatgattcaacctgcagcaaggtgctcagatgtctggggntgtgggcaactttcatttgctgctatcagaagcaatgctccatccatgatagcagctccattaagcatcgtagccatgagaatatcgtgtcccggacaatcaacaaaagaaacatgtctcagtagcttcatcctagtgttttcaaacccaggcacatcacagtgagggctatcttcttttccgcttccataagccttgtagcacattggtcgtggacatttctcgtcttcacatttgtagattttcgcattagcatagccaagctttatagtgatgttacgctccagctcattcttgaagcgaacggtctgaactccagatatagccttcacaacagtggactttccatgggccacatgccctatggtaccgatattgatcgtcgcctggcgtgagataacttcaggtgataaagggtggagcttcgtcacgtcaagcttgcttaagtcctgcttcatcagtcctcggccagacatatttgaaactcccggggtcgacgacgaaaccttcggtgagcctttatcggtgaggggagctcgacgggcggcaagcgcgagtaccaacggcggcggcggagaggaaggcggcggcggcgatggcggcggagagcgaaccagtggttgcgaggatgcggcggtgggctgggctgttcgtatttacggactccggcgctattttgggccgagcctgccggcccgttctctcttctattccctctctaggcctacaggcccaagttggaatccatctcgcgacaacgactcaacgctactactggctccggcgggcatcgctaatgagcgggtgttgccccaaatccaagcgcgcctcgctctagccatggcacgacggaagtgcaacccctctccatcgtcgaagcagcccgcggcggaggctaacgatgataacgactacggctcctacgacgcactccacgccaccgacgccgccgctgccaacgccgacgcgggaggcggaaccctgatggaggcgatggcgtccccgtgctccacctccgcagggctcttccggtgggagttgctccacccatggccaag

SEQ ID NO: 32775 - DNA, 2048 bp, Oryza sativa
  Clone ID: PAT_MRT4530_36951C.1
tgcctcccatggctccccctctctgacctcgccggagcgccgccgggatctcgacggtgatgccgccgccgccgcctcccccaccgcccccggcggcgccggatccgccgcagctccatggcgtggtcatcatcaccctccctcccccggaccagccctccaagggcaagaccatcaccgcgttcacctacaccgacgacgacgtcaccccgcccccgcctacgcctccgccgacgcatctgccgacgcgggctctagtgcccgcgggggcgggggcgggggcggaggctaggcgatcgaggcgggggttctcgccgcggcgggcggcggcgatggtgctcgttctcggggcgctcgccgtcgcggcatactactccttctactcggacgtggccgtccagttcttggggatgcaggaggaggcgcagaatgagaggaacgagaccaagtcgttcctgctgccgctgtaccccaaggcacggcaggggcgcgcgctgcgggagtttggagacatcaagctcgcggccagaagattcgataatgacggcggagggggcgtcggcaggaaatctaggaacaaattggaggtcaagaaggcagctgcggcggggacgaactcgacggctctgctcccgatcaaggggaatgtcttccctgatgggcagtactacacatctatttttgtgggcaatccacccagaccttattttcttgatgttgatactggaagcgatttgacatggatccagtgtgatgcaccatgcacaaactgtgccaaaggacctcatcctttatataagccggcaaaagaaaagatagtccctcccaaggatttattatgtcaagagttgcaaggcaaccagaactactgtgaaacatgcaagcaatgtgattatgagattgaatatgctgatcgaagctcctccatgggtgtccttgctagggatgatatgcatattatcactactaatggtggaagggaaaaactagattttgtgtttgggtgtgcatatgatcagcaaggccagcttttggcctcaccagctaagaccgatgggatccttggtcttagtagtgcaggaataagccttcccagtcagctggccaaccaaggcattatttccaatgtttttggtcattgtatcactagagatccaaatggtggaggatatatgtttctaggggatgactatgtacccagatggggaatgacatcaacacctatccgaagtgctccagataacttgttccacacagaagcccaaaaggtatattatggggaccaacagctcagtatgcgtggggcatcagggaactcagttcaagtgatttttgacagcggaagttcatatacatacctcccagatgaaatatacaaaaaccttattgcagctatcaaatatgcctacccaaattttgtccaagatagttcagatcgtacattacctttatgcttggcaactgattttcctgtgaggtatttggaagatgtcaaacagctcttcaagcccttgaatcttcattttgggaaaagatggtttgtaatgcccagaacattcaccattcttcctgataattacttgatcattagtgataaaggcaatgtctgcctgggattcctcaatggaaaggacatcgatcatgggtcaacagtaatagtcggagataatgctctgcgcggcaagttggttgtgtatgacaatcaacagaggcagattggatggactaattcagactgcaccaagccacaaacacaaaagggctttcccttcttcctctaacaagtattgtgcaataaacatatgtaaatgatacatagagactaccaatagagctgcttacgaatagcatatcctgttatgtgccgccctatctcctctacagtccatagtataaatcctggttgtttgttgtatacttgggtactttttgtaatatagggtgttgtatacccaagaagcagtgtatgtatattcggattaatggagtttcagatataataatcattatcgttattaagactataaaaaaaaaaaaaaaaaaaaaaa

SEQ ID NO: 32776 - DNA, 2549 bp, Oryza sativa
  unsure (1)..(2549): unsure at all n locations
  Clone ID: PAT_MRT4530_36952C.1
atgggtggagatagtgtgttttctgttttacctgctgcaattggtattaaggccgtaggtgaccttgcttttgcaaacccgccgccgcttcgtcttctccgtcgccgacttctcctcctctccgatccaccgccaccgccgccgccgccgccgcctcgcccctccgatccgtcgccgccttcatcccctcccacacctcgatccgcccccgcctccccgagccggagccgccgctgccacctcctcctcctcgatccgccgctgcctccccgagttcgtcgtccaccgctgatcggccaacccgaggaaccttcgacgtttcaaacatgtctcgccgaggattgatggagcaggacttaagcaagcttgacgtgacaaagctccacccgttatcgcctgaagttatctcacgccaggcgacgatcaatataggtaccattgggcatgtggcccatggaaagtccaccgttgtgaaagctatatctggagttcagactgttcgcttcaagaatgagctggagcgtaacatcactataaagcttggttatgctaatgcgaaaatctacaaatgtgaagacgagaaatgcccacgaccaatgtgctacaaggcttatggaagtggaaaagaagatagccctcactgtgatgtgcctgggtttctgatgaagcaggacttaagcaagcttgacgtgacgaagctccaccctttatcacctgaagttatctcacgccaggcgactatcaatatcggtaccatagggcatgtggcccatggaaagtccactgttgtgaaggctatatctggagttcagaccgttcgcttcaagaatgagctggagcgtaacatcactataaagcttggctatgctaatgcgaaaatctacaaatgtgaagacgagaaatgtccacgaccaatgtgctacaaggcttatggaagcgggaaagaagatagccctcactgtgatgtgcctgggtttgaaaacactaggatgaagctactgagacatgtttcttttgttgattgtccgggacacgatattctcatggctacgatgcttaatggagctgctatcatggatggagcattgcttctgatagcagcaaatgaaagctgcccacaaccccagacatctgagcaccttgctgcagttgaaatcatgcgtctccagcatatcatcattcttcagaacaagattgatcttatccaggaaggtgcggcgatgaatcagcatgaagcaatccccaatctattccagggattgtttcgctctatgctgagcagaatgtgctccggtggtgccaatatctgctcagctgaagtacaacattgatgtgatctgtgaatacattgtgaagaaaatccccattcctgaaaggaacttcacttcccctccaaacatgattgttattcgctcctttgatgtcaacaagcctggttcagaggttgatgaaattaggggtggtgtagctggtggcagcatcctcagaggagttttgagggtgaaccagaacattgaagttcgcctgggaattgtaatgaaggatgagagcggcaacatcaaatgcaccccaatctattcgaggatcgtttcactctatgctgaacagaatgaactccaatttgctgtgccaggaggtcttattggtgttggaacaaccatggatccaactttgacacgtgccgatagactggttgggcaggttctgggtgaagttggatcccttcctgatgtctatgtggagcttgagatcaacttcttccttcttcggaggctattaggtgtgaggacaaaaggcacagagaaggctgggaaggtctccaagctcaccaagggtgaaatcctcatgcttaacatcggatctatgtcgactggtgctcgcgtggttgctgtcaagaacgatctcgccaagcttcagctcactgcccctgtctgcacaagcaaaggtgagaaggttgccctcagccgccgtgtcgagaagcattggcgcctcatcggatggggccagatccaggctggcacgacgctcgaagttccaccatgcccgctctgaattgtgtttctccaggcagaaatcctaatctttgagagaagatagaagagatgtggaagggcagagagctcctaggcactatttttgtgaggtggatgagaaaacatgaatttgatttggaagccatgtcattgcgtgctatcgaattcagctatgctacaaaagttttgcttacatctgcattctgaattatggagaatcgttttttcaccatgttataatgaatttgaagtggggagaaacctactaattgatcagaattgcattattgcatttctcactgaatccaatccgtgatgtattattgcactgaacaaatgcaaaagggtgcatctccctcggggggggncgggtnccacntncccccnaangttggantcntattaanaatccangnggccgtcgttttacacccttcttaannggggnaaatccctnggntttnccccaccttnaatcgcnttggnggnannnccccccngnggncnccgggggtt

SEQ ID NO: 32777 - DNA, 199 bp, Oryza sativa
  unsure (1)..(199): unsure at all n locations
  Clone ID: PAT_MRT4530_36953C.1
acatctcccccaaatnccaatctctcggtgatcggagcggctagctgcggcgatgtctgcgctcggaagggaggcaaggggntgggcaagggcggtgcgaagcgccactcgaaggtgcctncgcgacatcattcatgggatnatcaagccggcnatccggatgnaggcgaggaggggcggcggggagcgcatctncggg

SEQ ID NO: 32778 - DNA, 300 bp, Oryza sativa
  unsure (1)..(300): unsure at all n locations
  Clone ID: PAT_MRT4530_36954C.1
gggggggggggggnnnnnnnnnnnnnnnnnnnnnnnggacaaccgcaccggacggctnaaatcccccacaagcaaaaaaggagacccagggccaaatcaacagcatcggtacaacctacaaggagggagaagggaaaacaaaaggcaacccaggggcccaaccagcattaacagagggggggggccccgaagaacaccggccacggtttattcccagcatagacaaagcaaaccgggatccccggcccggcggccattggaaaaccaggggcaagcaaaagggaatccaccgggggccgg

SEQ ID NO: 32779 - DNA, 105 bp, Oryza sativa
  Clone ID: PAT_MRT4530_36955C.1
atggcttctggtgatgcgggccggtggatcatggatggacggctgagatttcacggcttcgaagaggataggttcttcccgcgaatcaataccgacggcgactag

SEQ ID NO: 32780 - DNA, 648 bp, Oryza sativa
  Clone ID: PAT_MRT4530_36956C.1
atggaggtggcggaggggaggacggtggcggcggcggcggcaggtggtggaggattgggaggaggggcgaggacggaggcggaggggttggcgtgcccgaggtgcgagtccaccaacaccaagttctgctactacaacaactacaacctggcgcagccgcgccacttctgcaaggcgtgccgccgctactggacgcgcggcggcgcgctccgcaacgtccccgtcggcggcggcacccgcaacaaggtcgccccggcgccgtgcaccggccgccgcaagcgcgccgcccacgccgcgcacgccgcggcgccgccgccgacgacgacggcgtcgtccgcgccgctgccgctcatgccgccggcggtggcgtacgagctgccgttcctgccgccgccgccgccgctgccgctggcggccgtggaccccgaccgccgcctgctcgacctcggcggcagcttcacctcgctgctcgcgccggcccagctgcacaacggccacttcaccaccggcttcctgctgggcaccatgtcgtcggcgccgccgccgccgccgccgccggccacttctacaccgtctcccgcgccggccgcacacccgccggtgtcggacagcatctgggccatggggtggccgcacctctccatctag

SEQ ID NO: 32781 - DNA, 318 bp, Oryza sativa
  Clone ID: PAT_MRT4530_36957C.1
atataatatttttaatgtttatttaattgggagattttgattgttgtttttattttttttatttatattaatttattatttttttttatttgctatcaatttgattaaagaactaaaaaagggggtgttttaaaaaaaattttttttgaaagaaaaaaaagcacagtgctgaaaaagtttttttttaaaaaaaataatttgggaatatttggggagcgattttaataggagaaacttgagctagtggttatttaagggggggaagattttaaatacgaggttttgtttgaataaaaccggagagagagtttattaaaa

SEQ ID NO: 32782 - DNA, 516 bp, Oryza sativa
  Clone ID: PAT_MRT4530_36958C.1
atgagagttcgattcaaaggggtgggagcatctccggggttcaaggaatccgtttccggcgccggatggaacggaggagcaccaaggagggccggcgacgagcggcggcctccgggagcggacggtaatggcagcgaggccatgccgatcgacggcggtgctaggaaatggtttggggaggtcctagggagctcaaggacggtgtttgcgagggtggtcgatgagctggggcccgacgacgcgcgaaacatggcgatggcgtggatgtgttgggcggcgaaggcggtggatcagacggccgaattttcgagtcgtgagtgcgggctggcgcggtcagggagcgagagttggcagccgtgctcggagctagcggccatgcggcggcagagcatgacagtggctgaagttgagttggactcaggaaacagggaggagtcaagggatggattcaaggtggactcggatattcgtggaatcgggacaagtatttggcgacgattcaaaggaggcgattga

SEQ ID NO: 32783 - DNA, 478 bp, Oryza sativa
  Clone ID: PAT_MRT4530_36959C.1
gccaacaggggaacaccacacggcaaaaacggtaacaggaacacaaatggacatttggaggaacccaaaaattttgatggtacaggacaagccaaagaagaaattcagcaaacaggggagcccccctaccccccaggagggaaaacaggttatacaaactacacgaaggggtccctttttagtttttgaaaccaaaagaacagccagttgtataaagggggcgccttgggtaaaaaaaaattttaactggggagggaaacatttaacttccacaccccaagcactcctcccgggtggtcaaggaacaaaccatttgagccattttaagttccacggcctttttctttggaaccttgggggcggtttttccattggccctcaaaaggggaggatcaacggggaacttgattgggtcaacaactgctcgggttcgaaaataaaacaacccaattttaaggcccttggaccaagcctggaa

SEQ ID NO: 32784 - DNA, 1986 bp, Oryza sativa
  Clone ID: PAT_MRT4530_3695C.1
atgtgggtggcggagcgggtggtgggggagcggcggatgcgggagatccagcggttcgcgaggaacgcgaagctcaccgtagtgtgcctgctgctcaccgtcgtcgtgctccgcggcaccgtcggggcgggcaagttcggcacgccgcagcaggacctcatcgagctccgccaccgcttcatctcgcacccgcaccgcgcgctggcggagcaccacgacgcgctgtcgaggggcggcggctcgtcgtcctcctccgggcgcgcggcccagcgggacgacgagccggacccgccgccgaggacgctccgggacccgccctacacgctgggccccaagatctccgactgggacgagcagcgggccgcgtggcaccgccgccacccggagacgccgcccttcgtcaacgacgtcaagccgcgggtgctgctcgtcacgggctcctcgcccaagccgtgcgagaaccccgtcggcgaccactacctcctcaagtccatcaagaacaagatggactactgccgcgtccacggcctcgagatcttctacaacatggcgctgctcgacgccgagatggccggattctgggccaagctcccgctcctccgcgcgctgctcctcgcgcacccggagatcgagttcctctggtggatggactccgacgccatgttctccgacatggcattcgagctgccatgggagcggtacggcccctacaacctcatcatgcacggctgggatgagatggtctacgacgacaagaactggattggcctcaacacaggcagcttcttgctgcgcaactgccaatggtcgcttgatttccttgatacatgggcaccaatgggaccaaagggccctgtccgtattgaggccgggaaggttttgaccaagtacttgaaggatcggccggtgtttgaggctgatgatcagtcggccatggtatacatccttgctacagagcgtgagaaatggggtgacaaggtgtaccttgagaatgggtattacctccatggatattggggtatcttggttgataggtatgaggaaatgcttgagaattaccatccaggacttggtgatcaccggtggccactggtcactcactttgtcggatgcaagccgtgtgggaagtttggggattaccctgtggagaggtgcctcaagcagatggagcgtgctttcaattttggggataatcagatcttgcaaatgtatgggtttacacacaagtcgcttggcagcaggaaggtgaagaggatcaggaatgagactagcaacccacttgatgtcaaggatgaactagggttgctccacccagcattcaaggccatgaagactacttctacgtgataagtgataattagagtacaatgccacgcgttatttcgttcattgtagatccttttgggtctaaaatcttaaaaaggtgttctttttgtagacttgggttgacaagggagtttgggttgggatcaaacatcaaaggatggatatctatgttgtaatgtgaaattttaggagaacaatggtatgtttattgctggcataatttatgtcttacacttctagaaattgagttagtgaagggaactctgttaattgatcaccactatatatttctatagaatttcatatttcttattcgatgaatagtattcttccggtgcctcgcgccgaatggtttagatttttcttttgtcacaagtgttttggttatgtcttactcaaaagaatttttcatgtgcttattggtaccttcagaaggatatggttgtcggcctctctgctcgctattagtggtagttaggtagcaagatatccagttcgtcacatatgagaggctcggagctctccaaagtgtgcttggctgtaacctacttttcagtttctatactcctgtttcgtcctagcgttcatcgttatccattgtttgtttaaatcattgaagagggcctgatgcaatacatcaattcgtcagctgtcatcttt

SEQ ID NO: 32785 - DNA, 137 bp, Oryza sativa
  Clone ID: PAT_MRT4530_36960C.1
ggtcctacaattgtgtgattgcagattcatgtgtgggtgctgtctgctgtccaaatgggagaaagatatcctcacatgttattcaaccctggtactttttcatggagcccatgccgatttgaaagatcgcagacaga

SEQ ID NO: 32786 - DNA, 1367 bp, Oryza sativa
  Clone ID: PAT_MRT4530_36961C.1
ccgccgccgccgccatggtccaccacctccggaggcatatgatttctctcctcctccggccagcgtatcctcatcccaccgccgcaatctctcccctctcctccctccgccgcctcctcctcttctccaccaccgccgcgcccgtctcccccgaacccttcgccgtcgaggactacctcgtcgccacctggggcctcaccggagcccaagcgcgcaaggcctcgaagaagctctcccacctcaggtccccctccaagcccgacgccgtcctcgccttcctctccgacctcggcctcccgccccgcaagatcgccgccgtcgccaccgcagacccgcgcttcctctgcgccgacgtggagagcaacctcgccaggcgcgtcgacgagctcggcggcctgggactctcccgctcccagatcgcgcgcctcgtcccgctcgccctcacctgcttccggtccagctccgtcggcacgaatctagggttctggctccagatcgtgggctcgttcgacaagatcctcaaggccctcaggatgaactcctcgctactcggctccgacctcgagaaggtggtgaagccgaacctggaattgctaaagcaatgtgggatgagtgattttgccactagtttccccttgtacaccagcaggctcttcaccgcgaaccctatctatctccgggacgccgtggcacgggtggaggagttaggcctggaccgcagctcgaggatgttccggcatgggctcatcgcggtggctttcacgagcaaggagtccgttgcgaggaagatacaggtgatggaggagcttgggttttcgcgggatgaattgttgatgatcatcaggaaggcaccgcagttggtggcctcatcggaggaaaagatacggcaagccgctgaattcttgaagagggatgttggtttggagggacggtacattgcgcataggccagtgttgtttttgtacagccttgagcggcgattgttgcctcggcatcacttgctcaaggttctcaggatgaagggattgctggattgtgagttggattactacaacacagccgcgatgagtgagaggaagtttgtgcggaagtttgtggatccttacaagtgccacattccaggcctcgctgatgcttatacgtccagttgtgccggggaaacagcaaatggagttgcttcactgcttggtgtgtagacagaaatggattatgcgctacagtttgtggagaattcggctcaattactgcggaagaatgcaagatattacggtttgtcccctgttacttcattttgtaatgtctaatgttgactcttctggtgaaaaagcatgtaggttgtttggtaaaaaaaaaaaaaaaaaaaaaaa

SEQ ID NO: 32787 - DNA, 923 bp, Oryza sativa
  Clone ID: PAT_MRT4530_36962C.1
cggacgcgtgggcggacgcgtcggggagaatcagctgagccttgattgtttcttcatagctccttcctctttccataatcaacaaacccaaaaccagttgtgccgaaaaaatggcctattatgagattgctcctgtcgagtgcccacttcagcaaaacgagctgtacatgcacctgtacctacgccaagctgacaggggaccaaaccgtgaccaagaagtaatactgaacccaaaagtgcgacccaacgattttggtctcacagctgctactgcatggacaatatctgattctcttgatcccagtgcaaagattgttgcaagggcagaaggtttccatatgcagactagttacaacaatacaagctggtacgcttccttcaacatagtgtttgaggacgacaggtttaagggatctatgcttcaggtgatgggcactactccggcagaaggtcagtgggccatctctagtggaacaggggaatttgccttggctcatggcattatcaagcagaaagttatccagtcaactcctggcgaaaatgttaaagaacttcatgtccatgcattctacactccaatgaatgattctgtggttcctggcgctaccgatgggaagtcctggacactcggggcttaaaaccaaaagctacttccatgcatggttttgtgctgttccagtgtgttactttgtattgtgacgaacaataatttgggcaccaaagcattatttctcaagagtaggaaaaaatcatatcctacttctcaaatcgagtaaaatttgaagaatggttcatggaaacgacaggttctatatcgatcctggcctactcaaagatccgttgtgtagttgtaattgtcatgttgatttcaagctctatggatgaaactagtaataaattgaagtgcagtttgttgtgtcgac

SEQ ID NO: 32788 - DNA, 2382 bp, Oryza sativa
  Clone ID: PAT_MRT4530_36963C.1
atggcatcgttgcggctattggccggagtgctgctcattctgatgtcctccgccgccgtgggcatcgccggccggcctgccggctgccaggcgaggtgcggcgacgtcgacattccatacccgttcggcatcggcggcggctgcttccgcagcgcgggcttcgagatcgcttgcaacacaagcaacggcggcttggtgcccaccctcgccgccgccaacgacaccatccaggtgcagaatctgacggtgttcccacggccggaggtgaaggtgatgctgccggtggcgtacaggtgctacaactccagcggcaacgtcaccgagcagttctacggcgacgtggagctgaacaagaccggcgtgtaccgcatctccgacgagcgcaacaagttcgtcgtcctgggatgcaacaccgtggcatggaacaagcacggggacagcgagggaaaaggcctctacacaagcctctactacgccggctgcgtcacctactgcagcgactcgctgagcgccaagaacggcaagtgcgccggcgtcggctgctgccacgtcgacatcccgccggagctcaccgacaacgtcgtcaccttccagcaatggccgcgcggcgaacaggtggacttcagcccctgcgactacgccttcctcgtcgacaaggaagagtaccaattccagaggtctgatctcaacatggaccggaaacagaggatgccggtgtggctggactgggccatccgcgacgtggcgtcctgcccggcgccggaggtggagacgtcgaagaagaatatgccagctggatacgcctgcgtgagcgtcaacagcacgtgcgtcaactccaccaacggcctcggatactactgcaactgcagcagtggctacgagggtaacccttacgacgacgatcccaataaaggatgcaaagacatcgatgagtgcgcacaccccaacaagtatccttgccacggtgtctgtaggaacactccaggagattacgagtgccgctgccacacgggttaccagccaagtggtgatggtccaaagaaacaggagtgcagttcaaaatttccttttccagcacggcttgctgttggtatcactttaggattatccttcctgattgttgttgttcttttcacactaatgatgcttcaaaagagaaaaatgaacaaatatttcaagaagaatggtggttcagtattacagaaagtggacaatatcatgattttctccaaagatgaggttaagaaaatcctaaagaacaattctgatattattggtgaaggaggatttggtaaggtttacaaagggagactaaaagatgataccctggtggctgtgaagacttccattgaggtaaatgaagctcgaaaagaggatttcacaaacgaagttatcatacaatcgcaaatgatgcacaataacattatcaagcttttgggttgctgcttggaagtggatgttccaatgttagtgtacgagtttgccgctaatggcagtctcaaagacattctccatggtgatgcgaatcgtctagttcctctatcactagacctacgcctagatattgcagttcaatctgcagaaggtctaaggtacatgcactcgtccataagtcataccatacgacacggtgatattaagccagctaacatacttctaactgataagttcattgcgaagatctcagactttggaacatccaagcttcttactgcagacaaagaatttaccatggttgtggcagggagcatgggctacatagacccaatcttctatatgactggtcatttaacacagaagagtgatgtatatagttttggagttgtgttgttggagctcattagcagaaagccaacaatatatgacaagaactatagccttgtcattgagttccaaaaggcgtatgatcgagaaaatagtgggagagcattgtttgataaggagattgcaattgaagaagatgtcttgatcttagaagaaattggtaggttggcaatggattgtttaaaagaaaagattgaggaacgacctgatatgaaggaggtagctgcacggcttatgatgctgcgaagatctagaaaccttggacaagaaaactacaatagattttctaaatcgagattgttggagctatgccacgaagggccttcggccggacttgccgaaaccaagaacttgggcaacaggctcagaccggaggcaagcggtgaaggtcgagaagaaaaccatatgggcgaaagccacagggtgaaagccgtggcaaggcattacacgggcctcaccagtcaaggacctcatcggagggcctcacgggcggagacggtgaggcaaaagcctcggcgcgaaggcacgggcttcgccaagtaccaaaccccaccgtga

SEQ ID NO: 32789 - DNA, 1234 bp, Oryza sativa
  Clone ID: PAT_MRT4530_36964C.1
atggcgttctggctaattgccgccggcggcctgctgcttcttctccgtttcgctttcgccgccgacggaatcaccggctgcccggataggtgcggcgacgtcgatatcccttatccattcggcatcggccccaactgctcccgcggggacggcttcgacatcgcctgcaacaccaccaacagcaccggtgtcctagtgcccaccctcgccgccgcccgccgccatgccatccaggtccagaagctgacggtgttcccgcggccggaggtgaaggtgatgctgccggtggcgtacacgtgctacaactccggcggcaacgtcaccgggcagttcgacggcgacgtggagctcaacaacgccggcgtgtaccgcatctccgacgagcgcaacatgttcgtcgtcctcggctgcaacaccgtggcgtggaaccagcacggggacagcgggggcaaaaggcctctaccccagcctctactacgccggctgcgtcacctactgcagcgactcgcggagcgccatggacggcaagtgcgccggcgtcggctgctgccacgtcgacatcccgccggagctcaccgacaacgtcgtctccttccagcaatggccgcgcggcgaacaggtggacttcagcccctgcgactacgccttcctcgtcgacaaggaggagtaccgattccggaggtctgatctcaacatggaccggaaacagaggatgccggtgtggctggactgggccatccgcgacgtggcgtcctgcccggcgccggaggtggagacgtcgaagaagaatatgccagctggatacgcctgcgtgagcgtcaacagcacgtgcgtcaactccaccaacggcctcggatactactgcaactgcagcagtggctacgagggtaacccttacgacgacgatcccaataaaggatgcaaagacatcgatgagtgcgcacaccccaacaagtatccttgccacggtgtctgtaggaacactccaggagattacgagtgccgctgccacacgggttaccagccaagtggtgatggtccaaagaaacaggagtgcagttcaaaatttccttttccagcacggcttgctgttggtatttgccttcaacatactttttaaatcagttatgtaacattgatgttattagatttatcattaaacaaactatcacaatatgtaattctttttatttaaaacatcttacttttataaatatcattggtcaaagtagca

SEQ ID NO: 32790 - DNA, 346 bp, Oryza sativa
  Clone ID: PAT_MRT4530_36965C.1
gttggggaaccctgccttcgaagccaattatgccatacaaaacaggggggggcctttccagcgtaaccaagggtaaccaaccacggggtaacccgaagggccggcatacaacatgggggattccccttcaaaaaaacttaaactttgatcttcccggggaattcaaggacccgggggaatgaaatctgaacctctcggttttggactcttccttgggcccaagctggtctttggggccccacttcttatggcggaaacggacagccctgggggcaacccaggcctagcagtggggggaaaacaaataagcctaaattgccttgggggcgagggcctgcggggaggg

SEQ ID NO: 32791 - DNA, 774 bp, Oryza sativa
  Clone ID: PAT_MRT4530_36966C.1
atggcaaaggacaggaggtgcacggatcgctctgggtaccgcggccgcggccgcgactcccccgccctcacggcagtgtcctccggcatgatcttgcgggggaggctaaggtgcctctccgccgtgatgcgcgacgccgggagcacagcgtcaccagcgtcttgggcgatgatgactggtgatgaggagctcgtcggcgagaggaaggaggcaaaatttccacctcctatccttttatccctgcctcacccgcgcttgcctcctcgtttcacgcccccactattgcccccacgattctcgcgcatggcgtgcaatgttcacgggtgcaaactaggcaggctcgccgtcagttccatcgcgtgcaaggcgggcgagggagtcgaggcgtggtcttgccgaccccccgattttcgcgccccaagcgcccccgtcgtcagcgcgactgtcctcaaggggccaatgcccgacgtggtgtcgggggctactgtcagagatatgggcccggggaatgaccggtctgtgaccggcctgtcgccggtcgcatctgactggacgggcgaccatgccctcacgtcgcctctgttcccggcggagtggaggagcatcgctgatgaagcgcccatgacaagagcggccagcgtgcacctcaacacctcctcctccaccgccggttgcctcgcggcggtcgaagccagtgtcggcgtccctacgatgccgccagcagcagcattgaagcgatggatccgctggcttcagctggcggcggtggggtag

SEQ ID NO: 32792 - DNA, 277 bp, Oryza sativa
  Clone ID: PAT_MRT4530_36967C.1
aaaaaaaaaggatttaggaaaccccttaaataacaaaacaggcggggggaacaaactcccaaactgaaacgggcttcacagggggggggccatatgagttaaacggggcacaacagccctaaaaaggccattcatacttcgttgggggggggggggggacttgatgggtatttaggggaaaaccccggggggtttcgacacccccaccagttggggtgggtttagcccagggggtacttttggggccaggagcgggggggggattaatactgggccc

SEQ ID NO: 32793 - DNA, 2345 bp, Oryza sativa
  Clone ID: PAT_MRT4530_36968C.1
tagggaaagacgcctgcgcctgcaggtacccggatcggcaggttcgaggtcgacccacgtttctttttcctggcgccgggttcctttccctggcgccgccggactctctgccactccaccggacggcgacggcgaggcgggtgagctctctcgccgcctccggctctcctgccaccgggcctccacattcggggacgcactccttcgtcttcgcgtgatccgcctggcagatagggatccactaagcattggccctttgcaaggtttgaagggcatttcaccgttgcttttgtcttgagcaagagtttatagagccatacagctccgacaaaaggattcacctattccagaatgtctgctttgctccgtgaaacttcgtgtggatcattgctgcaaaaactgcagtcggtatgggatgaagttggtgaaagcgaggaggaccgcgacaaggttctatttcagctggaccaggagtgtttggatgtctacaagcggaaagttgatcaggcaaccaaatcaagggatcttcttctccaggcactggattactcaaagacagagcttgctaggcttgcttctgcccttggtgaaaaatccatagatataagtcctgagaaaacagcacggactatcaaggaacaactaactgctatagctccaacacttgaacaattgggcaagaagaaaaaggagagaataaaggaattagctaatatacagtcaagaattgagcaaatacgtggtgagattgctggtactctggagatgggacagcaagtggcactaccacagattaatgaggatgatttgacagttcggaagcttcgagagttccagttacagcttcaagagcttgagaaagagaagagtcgtaggctggaaaaggttcttgagcatgttggtatggtacatgatctatgcaatgtgcttgggatggatttttttagaacaataactcaagtccatagcagtctagatgactctattggtaacgaacacaagaacataagcaatgaaaccctgtcaaaacttgataggaccattggtactcttaatgaggacaaaaggttgagacttgagaagcttcaagagcttgccactcaactctatgatctatgggatcttatggacaccccggtggaagaaaggagcttgtttgatcatgtttcgtgcaatagaacagcaactgttgaggaggtcatggttcctggtgcacttgctgttgatgtgattgatcaagcacagactgaggttgaaaggttggatcagctaaaatacagcaagatgaaagaaatagcttttaagaagcaagccatactggaagatatttatgctagcactcatgttgtattagacacagcagttgcccatgagaaaatacaggcactgattgagtcagggaacatggaaccttcagaactgattgctgacatggatagtcagatactgaaagcaaaggaggaagctctgagcagaaaagaaatattagataaagttgagagatggatatcctcatgcgaggaggaaagctggcttgaagactatagcagagatgacaacaggtataactcaggccgaggtgctcacctgaatctcaaacgtgcagaaaaggcccgtattctagtcagcaagattccagcccttgttgaaactctggtggctaagacgagagcttgggaagaaaatcacgggctgccatttatgtatgacggtgtttctctgctagcaatgctggatgagtatgtcattcttaggcaagagagggaagaagagaagaaaagaatgcgggaacaaaaacgccagacggaacagctactaaacatcgaccgtgaggggccattcggaacacgggtcaatccctacagagtgaccagtgcaaagaaggtggctggcacaaagccaaacggtggcgcatcaaacgggacaccgagtagaaggctatcaaccggcaatcagctgaacgagagcaagagtactggccggtctgctggtaaggatgacaagaaaggcgcgtcgaagaacacggcaacttcactgaacgaagcagctcctgcagacaaggaagctgcagactcatccaccgaaaacttcgacgctgatccggttcctggctcgacatgatctcgatgtggtacagatgaatggtgatttctgtcttttttgacaccctttattgtgttcgttgtagtatcttgttgttaggttttagacctgtcgtttctttctgttgactggtggttagtgcctgagtggtgttcaaacatatgggcggtttatattagctgtttagctctaatcttgccgtcagaagtaaaattagcctctcgtaagttttatgggttttc

SEQ ID NO: 32794 - DNA, 1700 bp, Oryza sativa
  Clone ID: PAT_MRT4530_36969C.1
ttacttcattggtgattggtgcagctggtattcagtgccttgacctgcttctgttttttttttttttttttgtagccaagggaccctcttatttaaaccaagagatacagctacgtacaccaagcaaggttgaaagggatccagggtgcttctaacagtcaagaagaattaaaacataataacgtggagaagcaaaagcaaataaaatctaaaaacaccacaatgtgaatatatagagtacagagacgggttacttcattggtgattggtgcagctggtattcagtgccttgacctgcttctgtaccttggagagcgagaaggcgaacgggaatgagactgggatcgtgaatggtacctccttggacttctactcctactacggcttctgctataatgtcgccttcttggtggagatcggctaaggctcctgcttcgacccctgtaccgacctacctccgcaagtttttcctgcctttggcgttcctgttctcgtttcttgtgctatctcagcagcagctgtcctttcgaatttgcttgttaagcttgtttcgctcatgtattcaacccttggagtctttggcttgcttcggtagttgcttttagcttgtgtactggacggttttgctcagggccccccaggcgaggcacccttgcttagtttcgacgtagtgctgatgtgctggtagggcgcttttgacaaattttttgtacttttcttcctgctccacagacaaagaagatgcaggatcactgtgaagtgcctcaagaatttggccacctgatgacctgcaggaaagaaatggtattataggcaaaacgaattggaagagtaaacaaacttagtccagaagctccacacgagttcctcttccttggccttcttgtccatgtaaacaagccagttatatcgttttacaccaaattccttggctatactttccattcgttcatcactgctgtcatcactactgaagcccttttcatcctcttcatcttcttcctcttcatcctcctcatcactctttagatcttcagattcttcatttccatcccctttatatgagtaacccacctgtgaatatgtgcctttgctagcaggggtctgtgaggattgaggtttctcaaagctaaaaggaagaatagcctttgcctccaactcttgcgaaacatgctgcaaacccgcctcatcagaaagtcgatgcttaatcaaatcccggtaacgttcaaaattaacaaactcctctaactcttcctcttcttcagacttctcttggacccggaaaggccgagagctagagtcacggatgaagtcaagtagtgcgcggccatcaaatctgtcaatcaaaacatcttgttttccattccatggtatcagtccctgctggtcctcggtggcctggtagagcgcgtcgtcgcggtggacgcggcagcgcgcgccggagacctggagggactggtgcgggtccccgcggcggcgcgcgaggtaggcggcccggcgctgcgcccgccgccgcgcggcgtccatgaggtcgtggaccttccgctccgacttccgcgcctcgtgccacatcgcggcgggggtcggttggtttccttctggaaggttctggaagggcgagggggttgggttgggcgttgggagggggggaacctaaccctagacgagacgaaggtgctggaagctgccggacgcgtggg

SEQ ID NO: 32795 - DNA, 306 bp, Oryza sativa
  Clone ID: PAT_MRT4530_3696C.1
atgatgaggggaatacggcaacgacggcgtggacagaggatcgacggcgccggctttcttctctcattggtcggcaatggcggcgtgcacacgcgtcggctgccagggagttgggcggcggggaaggaggaacacggcacgacgtcgactttccgtggccagcaagtcgatggtgtagactgtgggcggcggcggcgcaaatcacggcgatggcggcggtggcgtgtgcgcatgccgcgcacgcccacaggagggaggagccggcttggcagtggcttgctgggccggcttgggccgtgggagtga

SEQ ID NO: 32796 - DNA, 982 bp, Oryza sativa
  Clone ID: PAT_MRT4530_36970C.1
aaagagacattatttgtaggcagcagctagaaattaaggacgattatcgatggagcagaagccaccagcagttgctgctaataataatcagctgctgctgatgatgataatggtggtggtggcgtgcagtaattatatgattagtggcgcaggagcgcagccatcgccgggatactacccgagcaagacgatccgatcgatggcgttcggcgaagggtacgacaacctgtggggcgggcagcaccagacgctgtcggcggaccagacggcgctgacggtgtggatggaccggagctccggcagcggcttcaagtccaagcgctcctaccgcaacggctacttcggcgcctccatcaaggtcccctccggctacaccgccggcgtcaacaccgccttctacctgtcgaacaacgagctgtacccggggcagcacgacgagatcgacatagagctgctggggacggtgccgggggagccgtggacgctgcagacgaacgtgtacgtgcacggcaccggcgacggcgccatcatcgggagggagatgcggttccacctctggttcgaccccaccgccgacttccaccactacgccatcctctggaaccccgaccacatcgtcttcctcgtcgacgacgtccccgtccgccgttacccgcgcgccgccggcaacacattccccgaccgccagatgtgggcctacggctccatctgggacgcctccgactgggccaccgacggcggccgctacaagtccgactaccgctaccagcccttcgtctcgcgctaccgagacctcaagatcgccggctgcgaggccgccgcgccggcgagctgccagcccgtgccggcgtcgccgtcgggcgccaccggcgagctcagcgcgcagcagaaggcggccatgaggtgggcgcagcagaggtccatggtctactactactgccaggactactccaggaatcacgccaactaccccgagtgctag

SEQ ID NO: 32797 - DNA, 461 bp, Oryza sativa
  unsure (1)..(461): unsure at all n locations
  Clone ID: PAT_MRT4530_36971C.1
tcggtggaggcggttcgctgtcgccgcacggctcgtcgtcgacgaccaccacctaccccaccgatgacgccgtccgccacctgcttaaacccgcggcctccacctactgccccgcgcgcttacttggatcggcgagatggggtggaagggcatcctggggttcgaccacggcgttgtgcaggcgccgctcgggcccgacatctccggcccggagctcgccgccgccgtcgccaacgccggcggcatcggcctcctccgcctccccgactggccggcgccggatcgcgtgagggatctgatacggaggacgaggagcctgacggagaggccgttcggggcggccattgtgctggccttcccgcacgaggagaacctacgngtggtgctggaggagaagctcgccgtgctgcaggtttactggggagagttcccgagggagcgagtcgatgaggcgcacctcg

SEQ ID NO: 32798 - DNA, 455 bp, Oryza sativa
  unsure (1)..(455): unsure at all n locations
  Clone ID: PAT_MRT4530_36972C.1
aaattaacccctcacttaaagggaataagnncttgcggcccgctgcctgttcttgtctatttcttctgtttacacaatacgctcgagacctcgcaaactaatccgacaaacaaaaaggggaaccagtcccttccgatagccaaccctgattgcccttatcggggctttatactagcccgcctgaggcaaccgcacagacaacttctttacctagctaaccgctaaaaccccttgcacaatcgtgaaacataaaaactatactgacttgtcccagcaatgcactaccattgcattgcagttacaaaaacagctacttctcttctatcatgagaaggtctctggcacatgcctttcctgaaagaatgccctgaagagcaccagagaccgctcgggctgcgagaactgcgctgcgcgggaggcccctcttatggtggcacaggaccctcgtgccaaag

SEQ ID NO: 32799 - DNA, 720 bp, Oryza sativa
  Clone ID: PAT_MRT4530_36973C.1
ggatcccccgggctgcaggaatcggcacgaggcacctttattcaacattaagtagccaattgcagctagtaattgattcctggagtcctggtcagtcaacattctagctttctaagccattcaaaatgtccaaagcaaactcatgaatgtggcgagcacattttccaccatgccgttgatgctgacagcattgggaactgagtgccaaccagcgtaagtttctaacccatggagcggggagtcgaacagtttgatcgtgggagtctggatctggcttagtgttcaagtacatgatttggacaggtagagcaaacactcgacacatgtttacatttgaagaattagtttagattgctgaaatatgttggagaatattcttttagcaatttttacagagtcattaatagaacaataaccttagcaattttgcttgtgttgtctattgctcgctatttctgagcctggatggaacactaatggtgaatatcgatgcaaggtttttatccggttcacgtcatactgcaggatatagtgactgaagtgtgaaactgtctttcctggagattacccctgcattgctcatccagtggaggaaacagagttcactgcttgttacttgtgaagtcgatgaaggcagttgatggtagcagttcaccaaggtcaggcagagtgactgacccagcggctattcagcaatccgtgctaattaagtgattgtaa

SEQ ID NO: 32800 - DNA, 3119 bp, Oryza sativa
  Clone ID: PAT_MRT4530_36974C.1
ttatccctgctgaaaatgggctacatgcatggcaatgtcttgaagatctgcaaaaccacattgaccttgtattgaccgaggtcgtaatgccacgtctgtctggcattggtctgcttagtaagatcacaagccacaaaatttgcaaggatattcccgtgattatgatgtcttcgaatgactcaatgggtacagtctttaagtgtttgtcaaaaggagcagttgactttctagtgaagcctatacgtaagaatgaacttaagaacctttggcagcatgtttggagacgatgccacagttccagtggcagtggaagcgaaagtggcatccgaacacaaaagtgtaccaaaccaaaggttgatgatgaatatgagaataacagcggtagcaataatgacaacgaggatgatgatgacaatgatgaagatgatgacgacttaagtgttggacacaacgctagggatggcagtgataatggcagtggcactcaaagttcatggacaaagcgtgcagtggagattgacagcccacaacaaatgtctcctgatcaaccatccgatctaccagatagtacttgtgcgcaagtaattcaccccacatcagagatatgcagcaacaggtggttaccgactgcaaataaaaggagcggaaagaaacataaagaaaataacgatgactccatggggaagtacttagaaataggagctcctagaaattctagtatggagtaccaatcttctccaagagagatgtccgttaatccaacagaaaaacagcatgaaactctcatgccccaaagtaaaacaacaagagaaacagatagtaggaacacacagaatgaaccaactactcaaactgttgatttaattagttcaatagccagaagcacagatgacaaacaagtagttagaatcaataatgctcctgattgctcctccaaggttccagatggaaatgataaaaatcgtgattctctcattgatatgacatctgaagagttgggtttgaagagattgaaaacaactggatctgcaactgaaatccatgatgaacgaaatattctgaaaagatcagatctctcagctttcaccaggtaccatacaactgtggcttctaatcaaggtggagctggatttgggggaagctgttcacctcaagataacagttcagaggctctgaaaacagactccaactgcaaggtgaagtcaaattcagatgctgctgaaataaagcaaggctccaatggtagtagcaacaacaatgacatgggctccagtactaagaatgccatcacaaaaccttcttcaaacaggggaaaagtgatatcaccatcagctgtcaaagctacccaacatacatcagcattccatcctgtgcagcgtcaaacgtcacctgctaatgttgtagggaaagacaaagttgatgaaggaattgctaatggagttaatgtgggccaccctgtagatgtacaaaatagctttatgcagcaccatcatcatgttcattactacgtccatgttatgacacagcagcagcagcagccatccattgagcgaggatcatcagatgctcagtgtggttcatccaatgtatttgatcctcccattgaaggtcatgcggcaaactatagtgtgaacgggagcttttcaggtggccataatggaaacaatgggcaaagaggacctagtactgctcccaatgttgggaggccaaacatggagactgttaatggtatcgtggatgaaaatggggctggaggtggcaatggaagtgggagtggtagtggtaatgacttgtatcagaatggggtctgttaccgagaagctgcattgaacaaattcagacagaaacggaaagtgaggaactttggaaaaaaggtgcgctatcagagcagaaagaggttggctgagcagcgccctcggatccgcgggcaattcgtgcgacaatctggacaggaagatcaggcaggccaagacgaagacagataactaagaaccacctacatatccaacatggcatctgctttgacagctggagagctacgcaattcattccatagctgaaagcagctcatcgatccccacattggagtgctcaataaataaaacccatatgattattttctgtgcctgactccagatgaaatttgtgctatggagtggaccacgcatttaattttaatatggcaatcggtaacaacttagatgcgatggttatttgtgacctccagttcccttgcagagatccacttggacactttgtcgagtctaaggaggagcaaaccatctgacgtttctatcggatcatgaatgctaaatctttactctactactacatcgagctgacatcagtgagggttcaactattcattgcgagacattattttcaagtcaaatagtacatacttttctgctggctgcatttctttttcatgttaatttccgctggctccaattttgtggttgactactgttatggagtaatggcaaccccagtgcagtaatgacggtttctttttaagttttgctttagctttgtcttgtaatgaacctctgtgatgtttgggatttcttacaaagccggatgctgacgatctttcctctaaaaaaaaaaaaaaaaaactcgagactagttctctctctttgatcatagtggcccacagaaagcaaagaagattcagacatcccagccctatgggcctgctggaggagtggtgttcaaggaaggtgttgatgcatctggaagggtagccaagggaaagggtctttaccagttttcccacaagtatggacgcacaatgttgatgggtacagccccaatatatacccccagaagaatggtcttcaactggtgatgtctatgttggaggaaaggcacggtttacttctctgggcaatcactcttgctggaattctagttggcggcgctattcttgtctacaacactagtgcactggcttagctaagtgcagcagaccacagctgtgcctgcttccatgtatataatcttcactaggaatgtaaccagttatgtacctggactggacttgactgccagcgttggtaatgaataaggccgagtaatgttaattctaagttaaacaaaaaaaaaaaaaaaaaaaa

SEQ ID NO: 32801 - DNA, 480 bp, Oryza sativa
  Clone ID: PAT_MRT4530_36975C.1
ttatttcagagatagagttagtgatcagttgagtgtgttgcataaacatggctgcctctgtcagtggcttctctggctctgaaaccatctgcatctccattactagaacgttcgaagcttcgagggaaagggacaatggcaaggccatctttgatcatagtggccaagaaagcaaagaagattcagacatcccagccctatgggcctgctggaggagtggtgttcaaggaaggtgttgatgcatctggaagggtagccaagcccaatatataccccagaagaatggtcttcaactggtgatgtctatgttggaggaaaggcaggtttacttctctgggcaatcactcttgctggaattctagttggcggcgctattcttgtctacaacactagtgcactggcttagctaagtgcagcagaccaagctgtgcctgcttccatgtatataatcttcactaggaatgtaaccagttatgtacc

SEQ ID NO: 32802 - DNA, 1485 bp, Oryza sativa
  Clone ID: PAT_MRT4530_36976C.1
tccccgggctgcaggaatcggcacgaggatacaactgtggcttctaatcaaggtggagctggatttgggggaagctgttcacctcaagataacagttcagaggctctgaaaacagactccaactgcaaggggaaaagtgatatcaccatcagctgtcaaagctacccaacatacatcagcattccatcctgtgcagcgtcaaacgtcacctgctaatgttgtagggaaagacaaagttgatgaaggaattgctaatggagttaatgtgggccaccctgtagatgtacaaaatagctttatgcagcaccatcatcatgttcattactacgtccatgttatgacacagcagcagcagcagccatccattgagcgaggatcatcagatgctcagtgtggttcatccaatgtatttgatcctcccattgaaggtcatgcggcaaactatagtgtgaacgggagcttttcaggtggccataatggaaacaatgggcaaagaggacctagtactgctcccaatgttgggaggccaaacatggagactgttaatggtatcgtggatgaaaatggggctggaggtggcaatggaagtgggagcggtagtggtaatgacttgtatcagaatggggtctgttaccgagaagctgcattgaacaaattcagacagaaacggaaagtgaggaactttggaaaaaaggtagcctgttttcagttacacgcctatcaaagtcatgagtcctaaaattagtagtattaatcacttgaactctttgagggggctatgaattctactcagtatagcaaaaacgagtggtagtatattctaatgattgggtaaacaaaatgacaattgatacaatttcttcgtacggatgtgaacactacttttgaaaagagtataaaaaagtgttgtttcttccaagggtgggccaaactttaataagtaccaggatcgaaccagtgaattactacattccacaaagtaattcataatgtctaatgaggggagtatgatctttaggcaataatcggttttgacactgttgtttcacttttgaggaaaaagacacttttttcttgctggtgtgccttgactaacgttagcattgaaccggtatttttttgatggctttgtccgcctattttcaggtgcgctatcagagcaggaaagaggttggctgacagcgccctcggatcccggcaattcgtgcgacaatctgacaggaagatcagcaggccaagacgaagacagataactaagaaccactctacatatccaacatggcatctgctttgacagctggagagctacgccattcattccatagctgaaagcagctcatcgatccccacattggagtgctcaataaataaacccatatgattattttctgtgcctgactccagatgaaatttgtgctatggagtggaccaccatttaattttaatatgcaatcggtaaccacttaaaaaaaaaaaaaaaaaaaa

SEQ ID NO: 32803 - DNA, 411 bp, Oryza sativa
  Clone ID: PAT_MRT4530_36977C.1
atgcgtggtggagccgtggacactgcgctgcatcagtgcatcgcatcgcaagaaccaaagcagagctctcggtttcggttctcttctcacacgcgcgcgcacggcgcgcacacacatgttgcaatggtcaaagcgtcaagattcaagaacctgatcatttctgggtttttgtcatcacaccgcatcggcactgacaggcatcagaccgtcagaggagacgccctgcacaggaacacatcgatttcctgcttggccctgcagaagaaactcatcgatcacacatcttcagagccatggaaggcagatattggacttggagtacttggaaatgatgaagcagtcaagctgaccaccaaggaagcatttgcaagcaaagtgaagaaggaagagggcaatgcaacatgtctttga

SEQ ID NO: 32804 - DNA, 1344 bp, Oryza sativa
  Clone ID: PAT_MRT4530_36978C.1
atggtgaacgtcgaatgtgatttacatatgaccagtggggaaggagaaggtagctatgccaagtactccaggcgtcagggaattgaccccgatagcaaggatctggtgggaccctctttcagtgagttccgccgtgcaattggtgcaagacatggtagtcaaccgtcccctccagttcaccatgactgtgttaggtctgacagcaaagtgatgggcagtacctaccgtagttgctgccctgcgttccatgctttttgcccctgggtcaataacactcccatcaaagtatcaaacatacgaacaattgttacaaatgaaactaagccagtcatcgagaaagctacaatagaagtgtacaaggctcttctcccgaaaaccatggtcattgcagacttaggttgctctacaggaccaaatacaatgctcttcatgtccaatgtcatcaacatgatagcacaccactgcagtaagttggatgaacatgatcatgttgaacttcagttcatccttaacgacctaccaggcaatgacttcaaccaactctttcgatcactcgaaaatatcaaaaactcaactacaacaggtcacaagggagatttacctccatcatattatatatccggtttgccaaaatcctattactctagacttttcccacgacaaagtgttcatcttttccactcctcctacagtcttcactggctttcccaggtgcctgagggactagaggctagtggaaaatctctcttgaatcaggatgtatacatcagctccaccacatcaccattagtggtgaaattattccaagaacagttccagaaggacttttcccttttccttcagctccgccatgaagaactagtaaatggaggacgcatggtgttaatatttctcggaaggaaggatgaggatgtatataaaggagatctcaatcatatgtatggatttgtcacaaaggcgttagaatcacttgttgggaagggcctgctgagcaaggaaaagttggaatccttcaacctacctacctatgggccatcagttgacaaagtgaaggaaattgttacgaaaagccatatgttcgacttggatcacatcaaactctttgaggcaaactgggatccttacgacgattcagaaggtgatgttgttcttgacggtgccaacagcagcctgaatatcagtaatctcattaggtcagtcctggagtccttgatagcaagccattttggaggaaacatactcgatgcgttgtttcaagagtttaggtcccttgtggcccagcaccttaagagggagaagacaaagtttgcacttatcgttatgtccttgaagaaaatatactag

SEQ ID NO: 32805 - DNA, 588 bp, Oryza sativa
  Clone ID: PAT_MRT4530_36979C.1
cggacgcgtgggctgacgcttggggaaggagcaccaagtgcagattgtccggtgggagaggttcctccctgtgaagacactgagggtcttgctggtggagaatgatgactctacccgtcaggtggtcagcgcactgcttcgtaagtgttgttatgaagttatccctgctgaaaatgggctacatgcatggcaatgtcttgaagatctgcaaaaccacattgaccttgtattgaccgaggtcgtaatgccacgtctgcctggcattggtctgcttagtaagatcacaagccacaaaatttgcaaggatattcccgtgattatgatgtcttcgaatgactcaatgggtacagtctttaagtgattgccaaaaggagcaggtgactttctagtgaagcctatacgtaagaatgaacttaataacctttggcagcatgtttggagacaacgccacagttttctgtggcaaatgggatgcgaaaggtgtgtttccttaacaccaataagttgttacccaaaaccaaaaaagtctggtatagatttacttttatgataaaaagaaacaagttcgtgttagccaaattaaattga

SEQ ID NO: 32806 - DNA, 254 bp, Oryza sativa
  unsure (1)..(254): unsure at all n locations
  Clone ID: PAT_MRT4530_3697C.1
atcancaacaacaaaatcgtggttttttaaataatantacacaccacaactaanaatatttcaaggtatccaataccaacatacaactacactatcaatatatcatcatgtgttacccttttaacctatataattatatatacaatcacttttttattaaccctatactattaactacaaaatgtctaatatattttctaattcaaaatatttacttcatcttatacacttgattaaactccagtacattttcc

SEQ ID NO: 32807 - DNA, 798 bp, Oryza sativa
  Clone ID: PAT_MRT4530_36980C.1
atagtgacactgcgcctgcctccggcctgcaaaatccgaccagccagcgttagctcggagaggcgaggcgagaatgtcggccgcggcgggcgggtacagggcggaggacgactacgactacctgttcaaggtggtgctcatcggcgactccggcgtcggcaagtccaacctcctctcccgcttcaccaagaacgagttcagcctcgagtccaagtccaccatcggcgtcgagttcgccacccgcagcctccaggtcgacggcaaggtcatcaaggcccagatttgggacaccgccggccaggagaggtatcgtgctatcactagtgcctattaccggggagctgtgggagcattgctcgtctacgatgtcacccgtcgtgctacattcgacaacgtgggacgctggctaagggagcttagagaccacactgatcctagcattgtctgcatgctgattggcaacaaatccgatctccgccacttggtggctgtctcaaccgaggacggcaaagagtttgctgaagccgaatcaatgtacttcatggaaacttctgcgctcgacgctaccaacgtcgacaatgcgttcgcggaggtcctgactcagatataccagattgtgaacaagaagccggtggaggcacctgaggatgggtcggctggcccaggaaaaggagagaagataaacgtgaaagatgatgtctcggcgatgaagagagttggatgttgctcaaactaaagacaagagggacacaatttattcaatttttcaaggtgggatgctcagggtatactggaata

SEQ ID NO: 32808 - DNA, 985 bp, Oryza sativa
  unsure (1)..(985): unsure at all n locations
  Clone ID: PAT_MRT4530_36981C.1
gcacgaggctccttcctccctcgtccctccagatccagcaccttcctctcctcctcccctcctcccaggcggcgtcggcagcagcggcgacttcggtagctttgcacggcggcgacggcgacggcgacggctgcgtcaagcgcaagagcaagccgcggcaacagcaagagcaagctgcgccaggcggcggggggcggctgcggccgccgcggcgagggaggcgacgagcaggtgcccctgccgtcgaggtgacccggaggtgctgcgggcggggagggcgtgctgtgcgcgcctcggctgctcggtggcgcggctgcgacgaagggaggcggacgtcggggggcgcgacgatggcgactgcgacgggatggcgacgggggccgcggcgaagggaggcgtggggcgcgacgatggcgactgcgacggggcgcgcggcggctgcgccgacggctactgcgacggcgatgactccatccgagtcccctgcggatccggccacttcaaggacgacgacggcaacctcgagcgggttcgctggcaattcgatcaatccttgggttcagcagctgctgttcttctcgcgatgaggcgatgggtgatgctgggattgaaacgtttttttgttctgcaatatcgttggcaaaattaattttgatttgtgatgttgaanatgcactgtgaggccagcatatttgaatcgataaatgaatttttgattggggtttgtnnnnnaaannnnnnnnnnnnnnnnnnnnnnnnnnnnnnnnnnnnntnnnnnnnnnnnnnnnnnnnnnnnnnnnnnnnnnnnnnncccgggggggggccgcggccccaaatccccctaaagggagcgtattaccccccccctgcgccggtttataaacgttgggagtggaaaacctggggttacccaaattaatatgtttgaggcaatccccttttgccagtgtgggtaaacaaaaagagccccccccgtccccttcct

SEQ ID NO: 32809 - DNA, 129 bp, Oryza sativa
  Clone ID: PAT_MRT4530_36982C.1
gttgacggtgcactcaatgtggtagtagtaattgaaggagtaatcagttcgttcgccgcttacgactggccgtccaattatgtggcctgtgcaggcaactattaccaccctaatgccatctataacacg

SEQ ID NO: 32810 - DNA, 294 bp, Oryza sativa
  Clone ID: PAT_MRT4530_36983C.1
attgccgccaccgcccgatctccctcaccagagctccactaaccaaatcctcgcgccattggcttcgcctcgacgtggttcttcttaagtcctcgcgcaggaggcaaacttacgccgagcagggcgattgtgatatttaccgaggcgcagttctctctaaaaaccccgggaacaccagaactcctctcgctgctgataacgttacgttcagagcgcatggggactagggttcatggaacagttgatacagtctaaacatgtcggtttccgaatcattagttttgggacccgaca

SEQ ID NO: 32811 - DNA, 240 bp, Oryza sativa
  Clone ID: PAT_MRT4530_36984C.1
atggcgcagctctgcgacgaccgcacgacgttcgtgttctgggacgcctaccacacctccgacgccaccaaccaggtcatcgccgaccgcctctacgccgacatggtgagcgctggcgcggtgcaggggaacgggaacgtcaccaccgcctccaaagccttgaagtacagacaacagatcaatcggccgctgtgcgccggcacaacgccgtcgcctattcggtacgacggcgacgagtag

SEQ ID NO: 32812 - DNA, 2078 bp, Oryza sativa
  Clone ID: PAT_MRT4530_36985C.1
atgatcaatttcggaggagtactctgtgcagttacccttgtggtgttgctccccttcttagaggctgcagatggaaaatctactgatccttcagaagtcagtgcacttatggctatcaagggaagcttagttgatcctatgaacaacctcaagaattggaataggggagatccatgcacaaaaaattggacaggggtcttctgccatgatttgggtgatacatatcttcatgtaacagaactgcaactgtttaggaggaacctctctggaaatttggtaccagaggtcagtcttttatctcagctgaaaatattggattttatgtggaacaatttaacaggcaacatcccaaaagagataggcaatatcactacgctcaaacttatattattaaatggaaatcagctctctggtcttttaccagatgagattggcaaccttcaaagcttaacaaggttacaggttgaccaaaaccatctatccggcgcaatacctaaatcatttgccaacttaagaagtgtgaagcatctgtaaatgaataataattgattgagcgggcaaaacccgtccgaattgtccagactgaatacactttggcactctcttgacgataacaacaatttgtctgggcctcttcctccagaactagctgcggcaaaaagcttgaaaatacttcaggctgacaataataacttcagcgggagttccatccctactctgtattacaacatgtccggactatttaaactgagtcttcgaaactgcagtttgcagggtgctattcctgatctgagtgccatacctcaactggactatttggatcttagctggaaccagctgacaggatctatcccaactaataagcttgcttcaaatatcactacaattgatttgtcacataacatgcttaatggaactattccatcgaacttttcagggcttccttatcttcagctattgtcacttaaaaataatcttttagatggttctgttccctcggaaatttgggctggcgtcaaccctaacagaaacggaagccttgtactggacttccaaaataattctctcaatatgcttccagctgaaattagtcctcctccaccaaatgttactgtcgtgttatatggaaatcctatatgtgagaattctagtgaaactctgataatcaacctttgccgcctccagtcaataaacctggaaaaatctaaacaggaaacaagcactgccatggtttgtggagcttgcccgacagaaaaaaattatgagtacaatccttcattctcggaccaatgtttttgtgcggtgccacttggagttggacttcggttgaagagtccaggagtcacagactttcatccatacgaaaatgctttcaagattgacctaacttctttgttgcagttgtttccttaccagctatatattgagaactacatatgggaagttggtccaaggctaaatatgcacctaaagttatttccaagcaatacaagtttgttcaacatgtctgaggttgtccgactcagacacgtacttgctggatgggaaattacacttttagatgtatttggtccatatgagcttctcaatttcacacttggttcctatgaagatgaatatccaaatctagcttcatcaggtttaagcaaagctgcactgggtggtatcttggcaagcacaatagctagtgctattgcactttctgcagtagttactgctcttataatgagaaggaattcaagaactaatagaatttcaagacgttcattgtcgagattttctgtcaaaattgatggggtcagatgcttcacatatgaagaaatggcttctgctacaaataattttgatatgtcagctcaagttggtcaaggaggttatggaatagtctataaaggaattctagctgatggaacaattgttgcaatcaaaagggcacacgaggattctcttcaaggttcaacagagttttgcacagaaatagagctgttgtctagattgcatcatcgcaatctggttgcgttggttggttactgtgatgaagaaaatgaccagatgctagtttatgaattcatgccgaa

SEQ ID NO: 32813 - DNA, 2303 bp, Oryza sativa
  Clone ID: PAT_MRT4530_36986C.1
atgagccaatcgccgccggactacgccagttattaaaaactgaaattgtactgtcaatactcaacacctataatgaaaactagaggatgccaggaatccatggaattacctttaactgaaaacattctatgtgactatatcagtgaatacaggataacgatagctgaaacaactaagtagactatgcatttgccatcatggttgaagagttcttttctttaatataaggttttgcatgtttctattccctgttactgttctgacaaaattttaaaatagaataattcttgctggattttatctcttcatatttttttcctcgataatatatttattgctccctcctatcaagtgctctgtgacaagctcgtcgggatgaagaagacgctcgtcttccactccggtagggcgcccaagggccagaggaccaactgggtcatgcacgagtaccgcctcctcgacgccgacggcacccaggatctgcatgtggtgtgtagaatcttccagaaaaatggatctgggccacaaaatggtgcacagtacggtgcgccatacttggaggaagattgggaagaggaggatgatgcaattgagaacatgcctgccagtggcgctttcgctgaaatggctgcagtcacagatactgcagatgagtcgactgaggaagatgggaatttctcccttaaaactaatgatgagcctttacaaacccaagaataccagccagagataactcctgtgaaagctcaaggttcaaatgaggagaccaatggcggtggttacagttgtgatgttttttctctggatgagattttgcaggaacctgaaaatgtctgcaaaaatgaagagcagaatgccattgatgacaagttcactatcgcagagttatctggatacccaaggcaagatgatggctatgtaggcgagaatggtcctgtgaattggattgacccttcaaatggtgataatacaaactggcctttgagagcatatagtactcagaaccatgtcaatggaacacttagcgctgatggtttctttgacacggtgaatggtaccaactcatattcaggtccttcagataaccagaacctgtatttgcaagatgatggcttgacttcttctcatcaagtgggcgataacatgccattttatgacgcatcatctaatcacaaatgggtagatggaaaggatgattatttgaatttgaatgacctcctctacccgccagcagaaaatcaacccctgtttgatgctggggatgacctgatggcttacttcgatgccacggaggatgatttcaaatttgatattatgggcacagaagattctaattctcaacttccagacatgtcgaactttgtccaaaaggatgataacaacaataagtttacattagatgggatctctaataccgctttgtatggtgcttcttcatctggatcccatggcaatatgtatccagacactgcagtaccagatatgccgatggatgacactgttgacaaaagtttcggaaagcgccttgccagcatgctgggttcaattccagctccacccgcaatggcttcagagttcccgccgagcacaggaaaatctgttgtcccacttagtgctgtcaacccgagtagctctatccgtgtcactgcaggcattatccaactcggtggtatcacttttactggtagcaccgagcacctgcagaagaatggagatttcaatttgctcctctctttcactgtcgagggcgacgtctcaaccaaatccattggttttgaaccggatacgcagatgagcaccacgccaatggtgttgcgcagcggcatgtatcttttcttcgtatcggcgatgattctcatgttgagctacaaagttgggctgtgtatctacagcaggtaagttatagtagtttttgttgccccaggctgtttattaaattgaaggagtcatacagagtccactcgacgtagagggaactgcctgcgatttggacagtttggttctttacattgttatagttggtataccgttctgacagttgaaagatacatagcaataaactctggaattggagaaactagagttacacgaatttggtgctgaaacttttgttggtggcatgtactgtataatttactctatttatttatttcacccaattctgggaggctgtaagcgttccccgatcgatgtaagctgatctgaaacctgaatacgcgctcttcatttttcatacccaaagggccgagaggcacagtttgcagttaaaaaaaaaaaaaaaaaaaaaaaaaagggcggaccga

SEQ ID NO: 32814 - DNA, 833 bp, Oryza sativa
  unsure (1)..(833): unsure at all n locations
  Clone ID: PAT_MRT4530_36987C.1
ataccccaggacaacgcacatgccccgcagctcgnnnnnnnnnnnnnnnnnnnnnnnnnnnnnnnnnnnnnnnnnnnnnnnntcaggccggtccgactacacctctgtctatcgctactattaatcctcaagttcccccacatatacctaatgcttacaatgattctaataggggatatcctgaagatgttagggttcctgagtttactaagtttagtggtaaggataatatgactacatgggaatatataggccaattctcagcacaatggggtgaggctagtaacagggatgcttttaaattacgcttgttttctttatctttatctggtactgcttttacatggtttacttctttaccggtaaattctattcatacttgggctcaattagaacaaaaattccatgattacttttacactggtaaaactgagcttagattatgtcatttgacatcggttagacaaaagtataatgaatctgtaattgattacattaaaaggtttagggatgktagaaaccggtgttttagtttgaatataattgatagagatttggctaatcttgcttttaatggtttacttgctcctattatagaaatattagatggccaacaattgcttgatgttagtcacctcatgcaaaaagctctagctcarraaagccgggttagggagagtaagaaattttttaggtccaatgacaaaaagcctaatgctagtattgttgattgccctgagtatagtgattctgataatgatgatggtgatcatgatatatatattgccgagtggtcatggactaacaagaataagccatttatatgttctact

SEQ ID NO: 32815 - DNA, 185 bp, Oryza sativa
  Clone ID: PAT_MRT4530_36988C.1
aagaaaaatgaaaatgtgtggtttggttgggttttcccctccgataattataccggttttcttgaccaaagaaccttgtcccccaatcgggcagatttggtggcccctcctggggggccgaaaaactggcttgataatggttcaagggggggaatttatgctcccaaaggggccgttgaattgct

SEQ ID NO: 32816 - DNA, 345 bp, Oryza sativa
  Clone ID: PAT_MRT4530_36989C.1
atggagcggcggcaggccgcaggtagagcagcaggtcgggtggatgagaaggatgtcgccgtgttcatcgacctcgccggggcgggagaggagatgcaagcgccggccggcaggaagagaggagccacggatccctgccccctcggctctggctctaccaagctcaccgcccgggttgggtcttaccgcctcggcctagacccgcgttgcggcagggaccgggaccaccgggtagctggatggcacgcgactcgcgctcgtgcgagcggccaccgcccgtacgacatgcggtgcgtgcgcgcgatcgccaggttttctggcgaggtgagcgttacctccgcgtga

SEQ ID NO: 32817 - DNA, 1518 bp, Oryza sativa
  Clone ID: PAT_MRT4530_3698C.1
ttacttgtatattagagcatccctcccaggtccaacaccaatgtagtggactggaacaccaacaagctcttctatcctctcgacatagcgtaaatactataaagcaacccaaaattattgcatcattgttgacgtcttggaagattcttagaattattgcaggcaattgcatcacattaccagtcagtagcttttcccatgtattacaggtaccaacgaaatagcggtaaatactgatgagcgtcgctcaaggccaagttagggctgaaatattttggttcaattgatgaccaaatggagttgcttttacttgtatattagagcatccctcccaggtccaacaccaatgtagtggactggaacaccaacaagctcttctatcctctcgacatagcgttgggcagctaggggaagttcactgtaactccggacagacgaaatgtcactttgccacccaggcaacacctcatatttgacctgtacttgctccagagtatcaagatcccctgggaaggattgtagcttctgcccatcaggttggttataagaaacccccagcttaacttctggtaatccagacagaacatcaagtttggtcagattaagagatgaaaacccattggtcactcagcagttcaatatccaacattgttgcttgaccaccttcaaccagaattttcttcttctgttggatagattcattcctgagttcctaaaggagatcaccttcctctccaaacagttcagttggaaaaggcccagaaccaacccttgtcgtataagcttttttgctgtactcaaagccttcaaaccttgaagtggcatctttaaacaagacatcaagcttatccccaaaagtgtccatgtgccttagatcacagactcgcagtccgtttcgagtgaccttgctggaataacatggtccaatgcctctcttagtcgtccctataaaggaattagcaagctctgcttccctaagtccatctacagcctgatgcagatcaaagagtaaatgtgcccggtcagagaccaatattcttccattgcaattgactccattggattcaagaccatcaatttcattaaaaaatcctggaacatggatcaccgctccattgccaacaacacacagcgttccttcatggagaataccagatggaacaagatgaagagcaaatttctttccttcagaattgtaaatggtgtgtccagcatttgctccgccctggcaacgcgcgacgatgtcgaagcgaggggcgagcacgtcgacgagcttccccttcccctcgtcgccccactgcgaccccagcaccccggagacctggctcagcgccgacaccctgtccgccgcgcggtccgcccccacagccgccgcggacaccgcggcggcagcaggagcccgtgtccttggcaggcgcaccgatggcgccgcaggcgcagccgcggagaaggatttccccggccccgctgcggcggcggcggcggcggcggcgtggttgacagtggagagcgacatgg

SEQ ID NO: 32818 - DNA, 469 bp, Oryza sativa
  Clone ID: PAT_MRT4530_36990C.1
ggatgggacaaatccccaactcttatttattattgactagcgttaaatcacataaaatattttagctagcaattcttatggaactacgtcacccatagtggaataagaaacccttggctaccgattctaagagtgtagcaccattgtgcatagtatcctgctccaaataatatagtactgtacaacatcagctttatgttttattctcggctcttcccatcaaggcagagtggagggaaacatgacacagagtagcaaatcaaacataacccaggcaggaatatgcaacaactccattttttcctttttggggacaactccagttgaccgaagtacttcccattctacgcgtccaatagccaacaataacgccaaggtacctccaacttgttacattctgtctcacttgtttctccttttttcaataatgcaatagagcatcatagccttaaaagaaacttaaaagacg

SEQ ID NO: 32819 - DNA, 543 bp, Oryza sativa
  Clone ID: PAT_MRT4530_36992C.1
atgagccaccgccaccatgcggcgctggtggcgtccgcgagcggacggagcccgagctggggttccgccatctcgcagtcgttccggcaggtggaggcggaggacccgttccggcgtgcgcagtcgatgaggggccacgacgaggaggaggaggacctgcggtgggcggcgctcgagaagctgcccacctacgaccggatgcgacgcggcgtcgtccgcagcgcgctcctgcgtgatggtgatgacgaccacaaggacgacgacgacgcgggcaccggcaaggcggtggagctcgtcgacatcgggaggcttgccaccggcgacgccgcccgcgccctcgtggaacgcctcttgcaggacgacagcgagcggttcttgcgccggctaagggaccgcatagacatggttggcattgaacttccgaagatcgaaattcggtacgaggagctctccgtccaggcagacgccttcgtcgccagccgcgccctacccaccctttccaactctgccatcaactttctccaggcacaacgggtgctatag

SEQ ID NO: 32820 - DNA, 943 bp, Oryza sativa
  Clone ID: PAT_MRT4530_36993C.1
cgcttccgccgccgagcaccactcgtcgccggccatggagacctccgccgccgcgggtggcgcacacttgatctacgtatcctccgacgacgaggaggacgaaacacgcgtcctccttgccgaatcctacagcgccgaggagatccagatccagcaggccatcctcctctcgctcgacccctccagcgacgcggacgccgcccattcctccgcctcctcctcccgcccctccggcgccgcctccacctccgacgaaccctcctcccttcccgaccgcaagggcaagcgcaagctatcatcggaagaagatggccctatcgaatccacgaggaagaagcggcggaagcgcggccgattcaagtgcagcgtctgcatggagaagctacaggtctcggagcagttcaccgtgagcttctgtgcccacgcgttctgcaacagctgcattggccgctacgtcgccgccaagatctccgagaacgtagccgtgatcgggtgccctgaccccgggtgcgaggagggtttcgtcgagatggacacttgcagggatatcatcccgccggagttgtttgatcggtggagcgtctcgctgtgcgagttggcactgggtgagaagaagtactactgtccgttcaaggattgctcggcgttgctgatcaatgacaacgacggcgcggagaagaagatcagggagacggagtgcccccactgccaccggatgttttgtgcaaggtgtcgtgtgccttggcatgatgggatcaaatgtaaggagttcaggaagctaggcgatgatgagaagggggaggaggatctgatgttcaagaagctggctgggaagaagaaatggcagaggtgcccaaattataaaatgcagttttctgaatggaagattccagaatcaccaaattttggtagagttaggcaatgtaaggttgtgatggtgtaa

SEQ ID NO: 32821 - DNA, 550 bp, Oryza sativa
  unsure (1)..(550): unsure at all n locations
  Clone ID: PAT_MRT4530_36994C.1
gtcatagatggtgacaaaaatgtctgagaaagtggcaactggaatactatccggagttgtaaaggttactggctattttacaaactcaatagctaactcaaaagctggcaagaagttctttaatttgttacctggagagattgttcttgcttcgcttgatggattcggtatgattctttaacttttctattgtatctggttagtgttacataatgggtctgcttggcattattgttttttttaatggtataatgagtgttgatatgtttgctttattcagacatgaaacctggtttcataatttaataaatttatgttattcttaaactcacctagacaacacctgtgtcatgactcatgagcagattggtttttctgtttctaatntgaatatccctgtgggttgcattatataagtcataattatctgacgtaggtcaggctttgcttgggtttttttggtcgcatatattctgtgaatttgcataacttgatggatacaaaattttgccaaatctgaggtagcataagaagcatatactttggtgac

SEQ ID NO: 32822 - DNA, 1353 bp, Oryza sativa
  Clone ID: PAT_MRT4530_36995C.1
ttttagatcgccctcgacccccctcgcccgccggcttcgccgatccccatacgtcgagcaccgccgccgccgccgccgccggcgtcccgccacatccccgcctcgctgcccgattatatcattattacaccttgctgcggcttttattgattcgtgaatcgtgatggcgtgccggggcttcttcgaatgcctactgaagctgctcaactttgtcctcacggtcgccggcctcgccatggtcggatatgggatttacctgctcgtcgagtggatgaggatttccggcggcggcggcggggcaccaccgtcgccagcgccgcctgctgagttgcttatgtttggccgcccgatgctcacggctgttgccctaggtgacggtggcagtttcttcgacaagctccctaaagcatggttcatctatttgttcattggtgttggtgcaattatctttgtgatctctctgtttggttgcattggagctgcaacaaggaacacctgctgcttgtgttgttacgctttcttggtcatattgttgatccttgttgaggctggagctgctgcattcatattcttcgacgaaagctggaaagacgtaattccggtggacaagactgagaattttgatgtaatgtatgactttctcaaggaaaactgggagattgcaagatgggttgctcttggtagtgtcattttcgaggtattgcttttccttttagcactggttgtcagggcaatgaacaaacctgctgaatatgacagcgatgatgagatcatcgcaacttctagaagcactagcatccggcagccactaattcattcacaaaatgttcctgctactggtgttcctgttgcaacccttgagcaacgcgctagcagaaacgatgcatggagccagaggatgcgtgagaagtatggtctggacacaagccagttcacctataatccgtcagacccaagcagatatcagcaaaatggtgcccctccagctgaagaaaggaaccgctgtgttatactgtgaaaaattactccatgacgtactccggtatggtgtttttttcatgggcaggcttgtgcagttggttgcaccgagtaattaattattcagagtgtcgtgtgtaaagagggctattgcattgtcgttttgacatattgatgtgttctctgaatgttctatgcaccggtaaatcttctcatgtggagaagctgctattagatacgccattttatttgcctgtttttgggtgtatcttttcgtatttttctctcgactagctttcatcctcaattcctcattgtacagccgttgtattcagtttggcgttataatcatgtttgtggtggttggtttgtgct

SEQ ID NO: 32823 - DNA, 1120 bp, Oryza sativa
  Clone ID: PAT_MRT4530_36996C.1
cccacgcgtccgcccacgcgtgggctcccccccaaatccatccgcttccaccccccagcccccgaattccatcgcagatcagatcaggtgaaaaaagaggagagaggaggggggaagatggggttggcgttcgggaagctgttcagccggctgttcgcgaagaaggagatgcggatcctgatggtggggctcgacgccgccggaaagaccaccatcctctacaagctcaagctcggcgagatcgtcaccaccatccccaccattgggttcaatgttgaaactgttgagtacaagaacattagcttcactgtctgggatgtggggggtcaagacaagatcagacctctttggaggcattacttccagaacacacagggtcttatctttgttgtggatagcaatgatcgcgaccgtgttgtggaagctagagatgagctgcacaggatgctgaatgaggatgagttgcgtgatgctgtgttgcttgtgtttgccaacaagcaagatcttccaaacgctatgaatgctgctgagattactgataagcttggattacattcccttcgtcagcgtcactggtacatccagagcacttgtgccacaactggcgagggtttgtatgagggcctggattggctgtccagcaacattgctagcaaggcttgatgcttgatacgtggacctttaagacatggagctgactaggagctatggcatgtatctcattcatatgtaggacgaagcactgtttcaatctgtttttgtaaggcatgtggcttcggcgagtccaatatttttgtaatgatacctcacttgaatgttccgtacttttggatattatttgtacctgttcattttgcacaaggatttacagcatgatggatgtttccgcgacatgttacttggaacttgtcaattatcctccgtttcacaatgtaagactttctagcattatctatattcatatagataatagcattacccatattcatatagataatgtctagattcaataacatctatatgaatatgggtaatgctagaaagtcttatatttgaaacggatgaaacggagggagtagtatttagcttgagggaaccattattgaagttggtattttgg

SEQ ID NO: 32824 - DNA, 853 bp, Oryza sativa
  Clone ID: PAT_MRT4530_36997C.1
agctctctaagttaaggttgagccaacatagaaaaaaaaggagctccaacaaactttccaaatagacaaattgctcctatgactagccaaatgtagccagccaaatgtagccagcctcttccggctggccaaagatgggtcccaccaccactcccagccccatccttcctctctctcctgtccacccaccactggtccataggagcgccatcggcgagcgaacgaggaaagcacgaggcggcggcggcggcggggacgaaccgagggcgccgtcgacgagcgacgtctggtccacagtccgctgcagcaggcatcatcgtcgccgccgcggggagccgtcgccatctgcatcgctgctgccgcgcgaggagccgtgaccgccgccggcctggcgcgcgtgaggagccccctccggtgccggcctcccacctcacgcgctgggagccgtagccgccgccgtcaccgccgccatcgcctcccgcctcgcgcgcgtggggagacgtcgtcgccgccgccttcgtcccgatttggctggcgccttcgtcctgattcacgcgcgggggccacatccgcggccctccgcaccgtcgccggcctcgacctcggccctccgcgccgttgtcggccgcgaccgccgccctccgcgccgtcgccggccgcgactgccgccgtcctccgcgcccggggtcgtcgtcgtcgcgagcctccgccgcccccgctgccagcctatgcacagtcaacctccatgcccgcatcgggataggattggtatgggagaagaaaggagaggaaggaggaggaacgagagactgacatgtgggactcgatgttaagttggagaatgtgaatagag

SEQ ID NO: 32825 - DNA, 1447 bp, Oryza sativa
  Clone ID: PAT_MRT4530_36998C.1
gtttgttgtgaaggcagcggacgcggcggaagagggggcttttgtaagagaagctcgtgacccaactcttcgccaagaaggagatgcggattcttatggtcggtctcgacgccgccggtaaaaccaccattctctacaagctgaagctcggcgagatcgacacaaccatccccaccatcggtttgaatgttgaaactgttgagtacaagaacattagcttcacggtctgggatgacgggggtcaggacaagatcagacctctctggaggcattactgttggctctcccacgtttgctttccttcgcataaaaaaaagcccgcaccaccgccccaccccctactcctcccccacccatcgcttcccccctccacccgtctcctccgtctccggcgccggcgccggcgagctcgccccccgcgattcgtgccctccgatcagaggcgaggcgggagaagagatggggctcacgttcaccaagctgttcagccggctcttcgccaagaaggagatgcggatcctgatggtgggtcttgacgcggccggaaagaccacaatcctctacaagctcaagctcggcgagatcgtcaccaccatccccaccatcggattcaatgttgaaaccgtggagtacaagaacatcagcttcaccgtctgggatgtggggggtcaggacaagatcaggcctctgtggaggcattatttccagaacacccagggtctcatctttgttgtggacagcaatgatagggaccgtgttgtcgaagccagggatgagctccacaggatgctgaacgaggatgagctacgtgatgctgtgctgcttgtctttgctaacaagcaagatctgccaaacgctatgaatgctgctgagatcactgataagcttggactgcactcccttcgccagcgacactggtatatccagagcacttgtgctacaacaggtgagggattgtacgagggcctggactggctgtccagcaacattgccagcaaggcctaaattttaacaagatttgcataagctaggggagctttggatggatcgatgggtatttagggctgtggttgctatcccaatatgtaaggtgtaattccggagctcaatagttattgagctttggttatgatttcacagttaaatggtttactgtactttgagccttaacatgtttctgaattaaacagctattacattgagttccgtcgaattattctgctaaaaaaaaaaaaaatatttagtaatgatacctcactccatcgttatcttctccgtattatttgtacctaccccaacctgtggtcgttttgcacaaggatttgcagtatgatgttcccgtgggcatgttgtgatgaacctgtccaataccttaaaacacaataaaacacaataatacttgtttgtatgcataaaaaaaaaaaaaaaaaaaaaaaaaaaaaaaaaa

SEQ ID NO: 32826 - DNA, 1249 bp, Oryza sativa
  Clone ID: PAT_MRT4530_36999C.1
atggaagatgggctgcgacgacaggagcccgaggcattggcgctcctcttctttctgagttccgacgaaacgacgatgaaccaatggcgggatccgaggaggaggcggatggagcggcatcgggacaaagggggagcagggccgctgctgtcgcagggtgggaggtgcaaggatgccgctagagaggagcagggcgcggggccgctaccgctgaaggggagggaggctcacggccgctgccatcgccggagagattacgtaatgccgctgccgctggaggggagggaggcccacggctaccgccgccgaaggctccttgggcgcgaacatgccaagttaatgccaagtgaaaaagaggaggggggaaagatggggttggcgttcgggaagctgttcagccggctgttcgcgaagaaggagatgcggatcctgatggtcggtctcgacgccgccggaaagaccaccatcctctacaagctcaagctcggcgagatcgtcaccaccatccccaccattgggttcaacgttgaaactgttgagtacaagaacattagcttcactgtttgggatgtcgggggtcaggacaagatcagacctctttggaggcattacttccagaacacacagggtcttatctttgttgttgatagcaatgatcgggaccgtgttgtggaagctagagatgagctccacaggatgctgaatgaggatgagttgcgtgatgctgttttgcttgtgtttgccaacaagcaagatcttccaaatgctatgaatgctgctgagatcactgataagcttggactgcactcccttcgccagcgacactggtacatccagagcacttgtgccacaactggtgagggtctgtacgagggcctggattggctgtccagcaacattgctagcaaggcttgaggcttggaactccgaccgtaaaacttcgagctgactaggagctatgcatgtatctcattcatacgtaggacgaacactgtttcaatcttgttaggtgtcttcggcaagcccaatatttttgtaatgatacctcactccatcgttatcttctccgtattatttgtacctaccccaacctgtggtcgttttgcacaaggatttgcagtatgatgttcccgtgggcatgttgtgatgaacctgtccaataccttactacacattctaccagctttttgctacaaaacatatattgctgctcataggatttgatgaatgcctcatgtttagcagttcc

SEQ ID NO: 32827 - DNA, 156 bp, Oryza sativa
  Clone ID: PAT_MRT4530_3699C.1
atggcaaagaacctgtcaatctccgttcagctgcttctcgtcctcttcgttttactcgcttttgccagcggcatcctcgcacaaggtggaccaagcacctgcacggacaatcctgtgcagcaagattgcccgccaatccctggtagagggaactaa

SEQ ID NO: 32828 - DNA, 316 bp, Oryza sativa
  Clone ID: PAT_MRT4530_369C.1
ctccttagttttttaaatgtttgggggtttacccttcttttttttgaggttcttaaaaggcccctttatttttgtaatcattttttttacctctttttatcttaccatgacttctgaatttgcctacaaaacaaaagggggttacaaccaaatatattaacccctgggccacatagaccccaaataaaaaagcggcgggcggggcgaaaaaaaaaaaaaaaacagccagccccggcccccaaaaatttacagtggtttcaaaaggggaggaaaaccccccacccccccccttttatctggggctctaagggccccc

SEQ ID NO: 32829 - DNA, 413 bp, Oryza sativa
  unsure (1)..(413): unsure at all n locations
  Clone ID: PAT_MRT4530_36C.1
acttgacctcttcttcctcttcctcctcctcctccgcttactccaatccttctctcctcccgcgacgccgctgcccactcaccatagccccgacctccgcagccacctgacgcgcgctcgctcgcttcttggtggtgttcggtttggcgctgctgctgctgctatgccgagaacggcggcggnggtggacgtggaggacctcctcgtccgcgtcaagaacggcgccgacgccgagctcgccgaggtggcgcgggaggtggcggcgctcgcggagcangggaggctcggggaggacgacgacgaggacggtgtcctggtgccggcgcttgtttttcgcggtgccgccgtcggggtgcgcggaggccagggtccgcgtcatggccgcgctgcgggggctcgcgcgctgcgttggc

SEQ ID NO: 32830 - DNA, 786 bp, Oryza sativa
  Clone ID: PAT_MRT4530_37000C.1
atgaggaggtcggagaaggtggagggatttatagaaagcgcgcacggcgaggacggcgcggggacgggtggtcggcatgggcggtcggcgacggcggaggcagcaagcgcggcggcgaggcgaggtggcagcggaggcagcgagcgccgggaggtgagtggtggggcagggcggcggtggaggaggaggcgagtggtggcggggtacggcggcggcgaggcggctgacgccatgcgcgacaaccagccccagcccacgacggcgcccgcaacgaagcggaggaacagatgggaccaatcgtgtcgcctgtcgtcgtcgctcgcgccgcgtgccgtcgccatctcccctcgagccccgcccgcgccatgcgctgtcgtccgtcacccgtcgccgccgtcgcctcgagccccgtccgcgcgccgcctcgcctcctccgctgccacgatcgcctcctctgctgccgcgctcgcctccttcgccgcaccccaccgccgccgcctcgcctccagcaatgcgagctcccgctgccgctcgcctcctccaatgccctgcctcgccgccctgccccgtcgctcgcctccccgcgctcgctggctccgccgccgcgctcgcctcgccgcctccgccgccgtgctcgcctcgccgctgccgctgcctccttcgccgcaccccgccgccgctcgcctcctccgccaccgctaccctgccccgccgcctcgcttccccgtgctcgctgcctcctccgccgcgctcgctgcctccgccgtcgccgaccgcccacactga

SEQ ID NO: 32831 - DNA, 1543 bp, Oryza sativa
  Clone ID: PAT_MRT4530_37001C.1
ccctggcgtccgccctagcgtccggggtggcacgcgacctggaggagcggtgcgttctccttctccctccccggcccctagccgccgcacccccaccctcgcccgcctctcgccgtcgccggaacggaaaatcatgggcgcggaggcagagcaccgcatgtctccctcccccgctcccgctcccgctccccctacccctgttgggaggaccgacggcgacgcccctcccatggtgctgggcctgcagctgtcggcgctcatcgaccacgtcgcgcgcgtcgactggtccctcctcaaccgcatccccggcgaccgcggcggttcacagcaggtctgtattgaggagttgaatcatattctggctgaagtgaatgctcaaatcctcccttgccgtgatgacctttcttcaataaggactatagccggtggtagtgtcgccaacacaattcgaggtctctcagcagtttggatatcaacttgataaccaacgagttcaaaaaggaggacttcaaaggctccaagtggttggttgtacgatatgcaagacagaacatggaacagatccttgaagctattaggattgctaaacaagaaggtctctcagtatcattggatttggctagttttgagatggttcgtgactataggacacaactcattgaccttttggaaactggcaacattgacctttgctttgccaatgaggatgaagctagagagcttctagggggagagctgacatttgatccagaggaggcacttgctttcttggccaagtactgtaaatgggccgtggtgaccctagcttctaagggatgcatagcgaagcatgggaagcaggtggttcaagtggcggcaaccggggagagtaatgcggtggacgcgacgggggcgggggatctgtttgcgagcgggttcctgtacgggttggtgaaagggctggcattggaggagtgctgcaaggtaggggcgtgcagcggtgggtcagtggtgagggctctgggcggggaggtgaggccggagaactggcagtggatgtacaagcagatgaacgccagtggcctgctgctccctgacctcaagaactgaaaaaaaaaaaaaaatgcggagcggaggaatcaattcaatgtcttcctccgccgccttggccttggccttgaggagggccacctcctccgcgcacaagcagaagcagaagcaggccctcgccctaacggatgccgccgcctctcgaatacgccaactcctcagcctccgccacagaccctacctgcgccttggcgtcaaagcacgcggctgcaatggcctctcttacaccctcaactacgctgatgaaaaaggcaagtttgatgaggttgttgaagataaaggagttaaagtactaatcgatcccaaggctctgatgcatgtcatcggcaccaagatggattatgttgatgacccgctaaggtctgaatttgtgttcatcaatccaaattccaaaggggagtgcggctgtggtgaatctttcatgactacaagcagcaagggatctacatcttga

SEQ ID NO: 32832 - DNA, 934 bp, Oryza sativa
  Clone ID: PAT_MRT4530_37002C.1
gttctccttctccctccccggcccctagccgccgcacccccaccctcgcccgcctctcgccgtcgccggaacggaaaatcatgggcgcggaggcagagcaccgcatgtctccctcccccgctcccgctcccgctccccctacccctgttgggaggaccgacggcgacgcccctcccatggtgctgggcctgcagctgtcggcgctcatcgaccacgtcgcgcgcgtcgactggtccctcctcaaccgcatccccggcgaccgcggcggttcacagcaggtctgtattgaggagttgaatcatattctggctgaagtgaatgctcaaatcctcccttgccgtgatgacctttcttcaataaggactatagccggtggtagtgtcgccaacacaattcgaggtctctcagcaggttttgggatatcaactggaataattggagcttgtggagatgacagccagggcgttttgtttgtcagcaacatgagctttagtggagtagacctcacaagattaaggacaaaaaaggggcacactgctcagtgtgcatgcttggtcgatgcaagtggcaatcgcaccatgcgcccttgcctatctagtgcagtcaagctccaggccaacgagttcaaaaaggaggacttcaaaggctccaagtggttggttgtacgatatgcaagacagaacatggaacagatccttgaagctattaggattgctaaacaagaaggtctctcagtatcattggatttggctagttttgagatggttcgtgactataggacacaactcattgaccttttggaaactggcaacattgacctttgctttgccaatgaggatgaagctagagagcttctatggggagagctgacatttgatccaaaggaggcacttgctttcttggccagtactgtaaatggccgggtgaccctagc

SEQ ID NO: 32833 - DNA, 454 bp, Oryza sativa
  unsure (1)..(454): unsure at all n locations
  Clone ID: PAT_MRT4530_37003C.1
cacttagctaaaggccaccacacaaggggctggccagaagggaatgtgtctggggtggcgctaatatctttaaaaccactgtgctaatgccggtgcaaatgtatgatgaacgcacttgcggtgtgtgaatgtggtgtgcaatgctgctggattttgccagatgggattggtgctgccccacccctgtgggtnttgccgtgggtgggtgtcaccacaacgtgtgtggtggcatgcagtgctgtgtgtgngatttgtngaccccgcccgtggctgctggctgttttggtgtgttgtggtgtgtcacaccacggagatgcctgcctgctgcctggaacctngatggtaaaggagtgggtattctggcctacagactatatttgatgggtgagccatatgggaangaaatctatgaaagctcccggctatatatatttaaaaaaaaaaaaaaaaaaaa

SEQ ID NO: 32834 - DNA, 521 bp, Oryza sativa
  Clone ID: PAT_MRT4530_37004C.1
catacatccaaacttttatgttactttattatactatatatatatatatgagttttctcgagcaaattgaataatcagcgagacttgtagtgcagtgcaggttaccaccatccattccattcatctcatctcacaaattaagaaacaaagaaagaaaccgagcataggaggtctaactaacaaacaatcaagccatcaatgaccatggtctgaatctttgtttctttcttggaagcttgacaagtaaaaggcaagcccttttttctttttcttcagttcttgaggtcagggagcagcaggccactggcgttcatgcttgtacatccactgccagttctccggcctcacctccccgcccagagccctcaccactgacccaccgttgcacgcccctaccttgcagcactcctccaatgccagccctttcaccaacccgtacaggaacccgctcgcaaacagatcccccgcccccgtcgcgtccaccgcattactctccccggttgccgccacttgaaccacct

SEQ ID NO: 32835 - DNA, 801 bp, Oryza sativa
  Clone ID: PAT_MRT4530_37005C.1
atggccgccaccgccaccgcttgccccgcgccgccgccgccgcggagcctctaccgcggcgtggcgctcgcggcgcccggccgacggagggccggtgatatacctgtgcttattgagttttgggcctcatggtgtggaccctgcagaatggtccaccgaattgttgatgagattgcacaagaatatgctggaaggataaaatgctataagcttgacactgatgattacccacaagtcgcaacatcttacagcatcgagaggattccaactgttttactctttaaggatggagagaaaacgcatagcattactgggactcttccgaaggctgtttatgtgtctgccattgtgttagcttcctcagtccctgcgctttgatttatgcatgcagatgcagctaatcagctgaaggtttttcttctcatatggtatgtcacttctctttcaagtagctttacaaggttatatttgttagccttttttgcaccaggatttgtgcttctgaaatactaccttcgggtcagctcaggaacccatgcgatctggggggatcctagtattgcatatgagtatatcaggatgatagtggcaacccgcaagcatgtactagcactcaggcagcaagcgctgatactcagactgatgagtcgaaatcttggtatcatctcatattctgagctgttccccttcctcacaagtagaagagaacaaaagatataccttgttactgaagctcgcaatttggtcagagctggtatttgggatctgctcatcagtgctcctaccgtcctgcgctgctag

SEQ ID NO: 32836 - DNA, 330 bp, Oryza sativa
  Clone ID: PAT_MRT4530_37006C.1
gctatttgtgctacagcaacatggtgtccataaattgacccatagttttcttacagtttgcttgctgctctctgtgcacatggctttctagcccattcagctattagggcccagcactagtctagtgacatacttctcgacgggtatggccatgagaatgcaggttcgataggttgcaggcatttgagccaattcggagcgtgaggtctcaggctggcacaactgagttcttccatgtctctaatgagcacttgcattgctcctggagtctgtgctgtccagtcgatgttatatgaacctacatggccttctactacacccattacacta

SEQ ID NO: 32837 - DNA, 1027 bp, Oryza sativa
  Clone ID: PAT_MRT4530_37007C.1
atggcgcgacgatgcggctctggcggtgggaggccgagcgagagcgagcttccacgacagccgcccgttggtgggattgacaccgaagtggtggcccttactcttcattcaatccaatctcccccaattgcgcccaagatgaacgatctcatgaccgactccttcggtcggcgcggccgctgcggcggcggcgccgctggatcggcaagacggcggcgggggtcccggcgaccagaagctcgaggcgttcctccgggaggcggaggccgccaaggacgagatggcggcgctgcgcgacgagctgtcccgcctccaggccgcgcacgaggcgtccaaggcgctgtccgccccggcgcgccgcgcgccgccacgcaggccgcgctcgtccgcctcaattgctccgccggccgcctccgcgcgcggctggcgtccatggaccgccgcgcccccgccccggccaccaccgccgccaccgccggcctgcgcggccgcctgcaggacctcaccgcgggcgtccaggtcctccgccgccaggtctccgcggaacgccgcggcgacgcggcgcgctgctacctcgccgtcgccggggaggccccgaccgaggagcagctggaccggctcgtcgccgccggcggggcgaacaccgacgccgaggcggcggtgcgggcggccatgaagtcctcctcggaggcggaggaggtggagggcggcctcctcgagctgcagcagctgttcctcgacatggcggcgctggtggagtcccagggcgcgcgcgtcgacgacatcgagcggcacgtggccgcggccgcgggcgacgtgggcgccgccgagggggagctgagggaggcccagcggctgcgcgtccccgcgcggcggcggcgcctgtggttgtccgctggcctcgccgtgctgcttctcgtcgtcctcgccgcggcggccgccgcgttggcgctcgctctggcgcggcgcaagggcggcgcgacacagcgtcgccgccgacgcggctgatctcgccgcgttcttgtga

SEQ ID NO: 32838 - DNA, 1369 bp, Oryza sativa
  Clone ID: PAT_MRT4530_37008C.1
gtcaagaaaggagaatgtcacttgtcagaaaacatcaggatttctcagtggatttacattggagttgcattttattcaggcatgaggggggaaaaatggcagttaaattagttacaggttgataggaaatggagagattattacaggccaaaaacgactaattgaaattcccattcttacttcaaatccatttggatattaaatcatacagactagcttgagatacaaatataaacgtggcataggtagatggagatatatacacacaccgtggtcaggccataattgaaataaaaatgcacatgcatattactacgtaaacgtacgtattactccctccatacgaaaatataagacattatattatagaatgagggagtatcttcattttattttggttgcgctgaaacatgcaacacagcatgcatagatggaactaattggcagagaccacagggacaaacggggtggcgcacagcatcagtggcgagcggcggcgaaccccgaggcctggcgcctccgccatgtccacctcatttacaccctccggtagcgaccagtcgaagtggtagagaagacccgtaaacatgagctccatgcttgcgaggccatagttgaaaccggggcacatcctccggccagagccgaaagggatgaactcatagttgcttcccgtgaagtcgagggttccatcctcgaaccgttctggcctgaactcctcaggattatcccagtacttggggtcgcgtcctatcgcccacgcgttgatgataacgcgtgatttggcagggatcgtgtacccgtcgagctcgcacacgtcgatgctctccctcggcactagaagaggcgccggtgggtgcagccgtagcgcctccctgatcaccatcttcaggtaacggaggttgcctgcttgcatgtcggcctcggtcaccgtcgccttccctcggagcacttcgcggatttctgcttgtagttttttcatcacggaggggttccgcatcagctccgacatcccccactccatggccgacgccgatgtccccgttcctccggcaaacatgtccaggatgatagccttgattttactgttgtcaaggtggaatccgaagccacctttcccctggaggccgatgagcacgtccacgaggttctcgtcgacgttctccgcgccgccgctgatcttctcgtcgcggatgcccttcctctcggcgatgatctcctcgaggatgccgtccaccgtcgtgtagatggcccggaggctgcgcttcatgccggtgaccgtggtgaggatccccgtccatgtcgggaagaggtcggggatgttgaagccgctggcgaggccgacgccggacttgatggccgccaggaa

SEQ ID NO: 32839 - DNA, 818 bp, Oryza sativa
  unsure (1)..(818): unsure at all n locations
  Clone ID: PAT_MRT4530_37009C.1
gaggaacaacaacagacaagagagggcattgcacgatgcggcggtggtgcgccgccgccggcctcggcctcggccgccgcctcctctcctcctctgtctccgcccctgcccaccgccctcttccggcgcacctcatccccagccccaggccattgcccttctcctcccgccaccacctcttgactcctcctctgggtctccatccctcctccccaccgccgatgcaatggcagacgcagcaggtgcgccacttcgccgccaaggacagatcgcgcgcgccacggacgcccaccacctccaaggtcaagaagtacaagatcaagcccccctcctccatgaagtttcgattcagagtcatgaatgacggccaggtccgcaggtggagagccggcaagcgccacaatgctcacctcaagtcgaaggaagcgaaaagaagacttcggaagcctgcattagtgcacttagcttatgcaaaagtgataaagaagctcaacttctgcagctaggaaatcaggacagacatgatggagtttggcatgcgagacagattgatgagtactgagtgccaactactgcattcctcacactgatttgaaatgttatttttttcccaattgttgtttgatgcattctcatctggttttgttttctgcacaatctggctgataaagcccacccgtcttgtgctatgtacaatattcagcataatagtgggataactgctgctggtgaagaaaaaaaaaaaaaaaaaaaaaaaaaaaaacaaaaaaaaaaaaaaaaaaaaaaaaaaaaaanaaaaaaaaaaaaaacaataaaaa

SEQ ID NO: 32840 - DNA, 320 bp, Oryza sativa
  Clone ID: PAT_MRT4530_3700C.1
gaaggtggtaactacgataacatcatgaaaatagccaggaagcttaagaaccatatggaacccgacgaggagcttaatgaccaattatgtagaaaagagaacaactaagccaggaggaggaggagagaaccaggaggagaaagaccaaggagatggagaccgagaagaggggaaggaggagaacgagaagaccaaggagaaccgccggagaaggagagccggaggaggagatgaaggacaggaaaaaggaggagaagagaggaaggaggaccgcccacgagaagccggagcaccagaaggaaaaaaaaaaaaaaaaaaaa

SEQ ID NO: 32841 - DNA, 402 bp, Oryza sativa
  unsure (1)..(402): unsure at all n locations
  Clone ID: PAT_MRT4530_37010C.1
gcgtgcggcagctgtctggaccgcaagcacattctgttcgaacatgtggtacatactatgaacgtgcctttcgccntcgtgaaggcgtggtgcgaccaaaaaactgtctttgtctcgcgccgctttgtgcacaaagcgcaagggttgcggatccaggaggggcgcagcatcgtcttgccatggttgggatggagcccggatgtgaacaatgccaagacagactgggctggacatgatgcagctgatgtgcactgagagacttgtatgcataagggcacgtgagaggatcagggacctggaatggtgcccggcacgactggggctcaagcgactccaactgatgaaggtgtctgaggttcaagtcgggaccgggatgcagcatggccatcagatagtacagca

SEQ ID NO: 32842 - DNA, 506 bp, Oryza sativa
  Clone ID: PAT_MRT4530_37011C.1
acggtgcgagaccgcgcgatttcacggaatggaaaagagaccgaacggtctcgctgaaccaatcagcgacaaaagtttctttcttgtcctacaatgactagtatcacccatgagtataaatatgtatacccggggtcattgtaatgaatctctagatcaatacaactactctcggtgcatcgccaccctctttaccgaggtttttacttatcatacagtggaacttggcacctgacacagggctgcatctgtttagttcgattttcggcgaagaggtaagtcctacgtttcgccggccctggtgaatctatcggctacgttggcgttgttcaaggctacatctgtatattcgacctcttggattgctctggttcggttgatatttttgcctaccaatttatcatgtctctgttaatctagtcttagcatatcgatttagctctatccgctgcttctcgctttagggtttctgccagtatcggctaaatcgtcttgctagattagat

SEQ ID NO: 32843 - DNA, 948 bp, Oryza sativa
  Clone ID: PAT_MRT4530_37012C.1
atggacacgggaaaagagaccccgctcatcctagggcgcctgttccttagcaccgcaggagccaacattgacgtgggagcggggagtattgttggggcatgggaattgtccaaaacaccctgcaaccgcctctgggaaggaatccaagccatccacgtggaagcagatggcgaacggccgcagaacgggttcggccgaattggtgggttctgccgaacccaaaaatgtgtcatcccggcctctcctttggccggaataaggttgatctgcaccggcaagatcaacaacccacggagaggccaattgttcatgcttgcttgcaatgttgagcgcaaaattttggagaacccaacggagcaacaagctatgcttgtgcctcctatcattgatgttttgcaggaagttcagaacagtccccaaaatgagaagaacgatatgtttgagatgtcacttccatcactcatgaatgaggagaaggctgatgcacctaccttatctgaagagggcataaaaggtaaattaaatgttgcagaaattactcaagaaggggacgatgatgtgaccatggctaccacggatgcaaccattgctcacatcatggatgaacaagaagatatcaagatcaagtcctccaatgagccgcaattgaagaaccaatgggctgcattgtctgtaatgggcctatgggcttataacttcatttgggaccccggcccaggtggggcccatgtggggaataaggttgatctgcaccggcaagatcaacaacccacggagagccgaactggaggtttggctgactcctcattggttctgactgcatcagttttccttgtgtggttcgtcatggctcatcactactgggcaacaatggaaatggtggatatcctggaaggatggagacatgagatgaggatgcacatggtgtatgatattcttaccagatag

SEQ ID NO: 32844 - DNA, 411 bp, Oryza sativa
  Clone ID: PAT_MRT4530_37013C.1
atgccagttcttgctgcctgcgttagacaatatcacaagttagaagacaataagcccctgatacggcgttcttcctaccacgacgtggtgcgggcgacggaggtggaggacgtcctcgacatctccggcgtccaaaccagccacacggcgccggcgccgccgcctccccatataactcctgcctgcagctggtggacagacaccaagacgagggtgcccgcggggccaccgtgcaagctggtaagccgggcgggagcggcggtggccgggagggcgtggcggccgccgggctggggaggcgcgtgcggcggcctcgcgatccccttcgctagatccggcggcggcggtggagcggaggggatggcggcggtggcggccggtggccagcagcgccctctcctgccggactaa

SEQ ID NO: 32845 - DNA, 472 bp, Oryza sativa
  Clone ID: PAT_MRT4530_37014C.1
gcacgaggggagcatgttttccaagctacaactgaatataccttttgccatgcctagctggtcgtcgccatcctatcctagagctatctatagcttatctatggaattactactatttagccagcacaactgggttgatttatccacctgtatcagtatgaccatccaagaagacagccagatcttggactgttggtacaagcttgtcctagggttaagccttccctgtcagaagatgctccttgtacagtagctggaacccaattgagattcctgtgcttaaccattttcaggcttcaagattccatggctcaggacatggtagtagatctgaaggcaggtgtacttcaagcatcggccacatctgtttttagagtataacacccatgagccaacttgttgctccctgttctgaacatgcagccaagcagagctcacaagacgagagagagaagaaaaaaaacgcacactt

SEQ ID NO: 32846 - DNA, 1958 bp, Oryza sativa
  Clone ID: PAT_MRT4530_37015C.1
cgcccacgcccaccggcgagcctcagccaagccatgcgatcgcggcaatggcgacgtcgtcgacgctgagccagacgcagcggtacgcggcgggggcgctcctggcgctcgcgctccgccaggcgcagatccaccagtccgtcctgctcggatcccacggcctcgacgacgccccggccgccgctgccgcagtcccctctctcgccgaccccgtcgacgcccgccacctctggacccacgactcccacggcctcctccgccccgtcctcaggtttctcgagatcgaccacaaggcatggccgggcgtggagacgacggccgccacctccgagcccaagcaccacatcggagcctttctccggaaggtgttcgaggacgaggacgacggcgaggcggcggcggcggagaggtcggagcaggagctcgcgctcgccaaggccgtcgaggcgatggcgatggggctggagaacgacgtagtcgcggccgacgagctgatcaaggccaccggctccgggggggacggcgacgaagggtggccgtggctggcgtcggcgtcgtcggccggcggcagccgcaccaaggattaccggaagatggcggtgctgtacatgctcctctcggcgtgcgtcgccgacgtgaacatggcggaggaaggcatgggctcgcctcgcatcaggaggggctacgacgcccgccaccgcgtcgcgctccggctgctcgcgacatggctcgacgtcaagtggatcaagatggaagctatcgagataatggttgcttgctctgctatggctgcagcgagagaggaagaacagtcagaaggaagcgagtcaccaagaagcagatgggagaactggaagcgtggaggaatcatcggcgcagccgccttgacgggaggaacgctgatggccatctccgggggtttagctgctccagcaattgctgcaggattcactgctctggttccaacattgcacacacttatccctttaataggagctagtgggtttgctgctatagctactgctgctggacatactgcaggctctgtagcggttgctgcatcattcggagctgctggagctgggttgactgggaccaaaatggccaaaagaattggttgtgtgagagaatttgagttcaacactatcggcgagaaccataaccagggtcggctagcagttgccatcttggtcactggatttgcctttaccgaggaagattatatgaagccatgggaaggatggaagacaaacttagagaggtacattctgcaatgggagtctaagcatataattggcgtcagtacagcaatacgcgattggctggcatcaagatttgcaattgagttgatgagggaaggtgcaatgcaaactgtgttaagtggtattgtttctgcgtttgcatggccggcttacttggtatctgctgcagattttatcgatagtaaatggtccattgctattgacagggcagataagactgggaaaatgcttgctgaagtgctgctcagaggattgcaaggaagcaggcctgtcactctcatcgggttttccctaggggcacgtgttgtcttcaagtgtttggaggaactagctttgttgggaaataatgagggactcgttgaaagagctgtgatgataggtgcaccagtttcagataaggaggagctgtgggagtctaccaggaagatggttgctggacgatttgtgaatgtttactccacaaatgattggattctcggtatcacttttcgagcaagcctgctttcacaaggcttggccggcatccaagcagttaatgtacctggagttgaaaatgttgatgccagtgagctcatcgttggacattcttcctacttgacacttgtcaatcaaatcctggaccagcttgagctgaacacctactatcctgtcttctatcccagcacaccaaagtgcggcacaccgaagtcaaagtaa

SEQ ID NO: 32847 - DNA, 1508 bp, Oryza sativa
  Clone ID: PAT_MRT4530_37016C.1
ctatgagcggagccaagataaccataagaagatcttaatctttagaggggctttgatcttcctgattcttttgtttatattgggaacatcggtctcacattgaaaaagattagtatattgatcctgagctgtttgggcttcaccaaagcagtaaagctcgctcttatggaaattaatcttcaagccagataattcttcgaaaacgttcaacaacatttttagattacaagctttctctagatcatgttccataaagagtataatatcatcagcatattggaggatggacaatccaccatcaatgagatgatgcaccagtccaacaagctgtcctgcattatttgctctctggatcataaccgctagcatgtccgctataatattgaataaaatgggagatagcggatcaccttgtcgaaggcctttctttgtttgaaagaaccgtccaatgtcatcattaactttgattgctacacttcctcccgaaatgaaggactcaatccaagaaatccatcttggcgagaaacctttcatgcgaagagtttgtagtaggaaaggccattttactttgtcataagccttctcaaagtcaatcttaaggatgaccccactcaatttcctgtttattctattagtggccaccttagtgaaaattttgaagctagcatatagccgagagatatcatatagccgaagaaaaccaagaacaaagaacacatcaaaataccagggtttaggttgtacaggggaatttacatgattacccttataaaagggacatttataggggtacataatgttataggggctcatgggcccctgatgggccgtctggcgatcgccggccctatagcccttaggcttgatgggccggaaaggcttcctcggcccttgcgggggcgaacttgccatggcgaagtcgtcttccttcggcagatagtcttcgccttgcacccatcgcccgagacgcccctggcctggcaaggccctcgtgcgactcttcacctcacgccgttcttgctccatagccttcgccacgggtttcggcagatctggtcgaagagcctcatgtcatccgccaacaagcccctcacgggcacgggtgagattggagcttcggccgagaccgtcaccgcctttctgggggtctctcttgtggatgacgtcgagctggcgaagctggtcagctccggagcgttggttgaggggcaggctttcgccccagggaaaaccgtgccggagcggaggaaggcggcggcgcggctcgggtcgacggggtcgacggcgttccggcggtcggcggacccggcgagggggtggacggggtcgacggcggtgcggcgatgccggaggaggcggcgccgaggtgggaggctgtccggggcgacgacggcggcggaccggagctcggcggcgacggcggagagagagagcgacgtcgcgagctcgattccggcggagagacggtgcggcaaggggcggaaacgggcgagggaggcgcggggagg

SEQ ID NO: 32848 - DNA, 408 bp, Oryza sativa
  Clone ID: PAT_MRT4530_37017C.1
atgctgtggaagaaagagacggagaaagagagcgcacgcggtttcggcagaagcatcggtcgaaagggggcgccgcataccataccacatggtttgcacggtctcggccgaagctccaatctcacccttgcccgtgaggggcttgttggcggatggcatgaggcccttcgaccaagtctgccgaaacccgtggcgaaggctatggagcaagaacggcgtgaggcgaagagtcgtacgagtgccttgccgggccagaggcgtctcaggcgaagggtgcaaggcgaagactatccgccgaaggaagacgacttcgccatgacaagttcgcccccgcgagggccgaagaagcctttccggcccatcaagcttagggactatagggccggcgatcgcctgacggccctttag

SEQ ID NO: 32849 - DNA, 170 bp, Oryza sativa
  Clone ID: PAT_MRT4530_37019C.1
tttagcgtatagaaaagagttaaaatatagggttaattagaaattgggatggttgacgaaaacaccaaaataagcgctggttagcgcaaggatcttcgccaagcatatttgtatctaaagtaaatattggggttcttttttaaagggggggttctccagccctgagatag

SEQ ID NO: 32850 - DNA, 600 bp, Oryza sativa
  Clone ID: PAT_MRT4530_3701C.1
aatcttgtagaagagaagaagctcatgagaagggagctgaaacagaacaggattccacataggtacctcatcctgttcatcagccacttgtggagtatgccagcagccatcactgtatctctgcagccagatcttcacatcaggagcaccttccttggatccaccgaaataagccaccaaaaaactatccttctcagtctctacaatagtagaagcatggcagctattgaaaggggcacttccagctggaaatgtgaattcctccttgacaatgctccagtcagaagtcacatttgcagttgcattgatgatgttatgatcgttgtcttccatatgttgtacaatttctacattacggtcattcaggtttgcaacaaactccgcggatgaattgttaaccctctgaacacgacttgaactgatgctaatctcacgcaataacctagatggtgctgttttgaaattgagaggtttcttgttcaagaggatcctatgcggtgaatcagagaaaaagaacagcagggaaatcaaaagtgtacagcctgtagcgctccatgcaactttttgcctgctgcaccagtaaatggtgacccctcgtgc

SEQ ID NO: 32851 - DNA, 571 bp, Oryza sativa
  Clone ID: PAT_MRT4530_37020C.1
ggagagaactagtctcgagtttttttttttttttttttttttttttttttttttgttgttttttttcttgcaactaatacattgcaaaagaacaatatcagtatgaatacacgcaacaataaagggtagtagtagcagcagctgctggtgctacctacctaaagaaacaaaattctaaaaatccattctagtgaagaatacggtacattactgattctgttcaattaaatcttgcatttaactaatgctatggcattaatttgcacatcatgttgacccgaaaattccgactgatccattatgattgattgcctgaataattcttctgatggtctaactccatgcacatggaattcagtactctttatctctgtagctcaaaatcttaaacatgtcagattatcagactagtatctagctactccatttcccacgttacctagctagtccaaaattgatttttttttcattatgtttaggtcaggatccatacatgtgtcatgctcatacgctgtagggtcaaggaaaacataacagaaaaaaaagcttctgcagacgtatacatcaccca

SEQ ID NO: 32852 - DNA, 338 bp, Oryza sativa
  Clone ID: PAT_MRT4530_37021C.1
tcgcccacgcgttcgcccacgcgtccgcccacgcgtccgcccacgcgtccgcccacgcgtgcgcccacgcgtccgaaaaaaaaaaaaaaaaataaaaaaaaaaaaaaatatgaaaatatagaataataagaatggggttaatgtaaaggtggatgttgtatttagaaaacttgtatggtgcttcataaagtgtgtttcgttgttcgaccgttacaaggatggtattattactaattgggggaccattgatgggattgttgtagtaggatgtgactgttcatttggttgagactttggggtggatgagtttgttgatggttgttgtaatttattgttta

SEQ ID NO: 32853 - DNA, 498 bp, Oryza sativa
  Clone ID: PAT_MRT4530_37022C.1
ctagccgtaccagcgccaccaattttcaagactatggctagcaatactctccgcgagttcgctgctccttctgctgacaatgtggccattgggccacagatcaacatgggagacatggatttcgatttgaagtccagcctcatcacgatggcgcaggctagcccgttctgtggcaagcctaatgaggatgccaatgctcatctgcaacagttcctggagatttgtagcacgtacaccatcaaaggcgtcagtcccgacgctgtcaggctgcgactgttcccgttctcccttctcgagagggcgaagcagtagttctatgccaactgtgctgctgtcaacacctggcataagtgttctacggcattcctctcgaagttcttcccgatgggcaaaactaatgcccttcgtggacgaatttccagtttccagcagacgagggatgagtctattcctgaagcatgggaacgtctgcaagaatatgtagccgcctgtcctcat

SEQ ID NO: 32854 - DNA, 1848 bp, Oryza sativa
  Clone ID: PAT_MRT4530_37023C.1
atggcacgagggcccttggacctgtggaatgcatgggcatcgcagattctggtgctccacagcctcacgcttcaggtcgtgctcctcgtctttgctgggatccgccggcgtgagtgccccggcgtgctgaagtttctcctctggctgtcgtacctgctggctgactccaccgcgatatacgccctcgggcacctctccattggcagtgcagcccgcgagcacaagctggtggccttttgggcaccattcctgttgcttcaccttggtgggccggacaacatcaccggctatgccctgcaggacaatgagctctggctgcgtcacctacagattctcgtcgttcaggtcctcagagctggtgagaggacatgggcgcttaggtgcagcaacttcggtagcatccggaactctcttaaggagttacctggtaatcaactccgttggtacaaagggtacctacaaaataaagatgacactggaactacaaagattatcaagaagctcaggaaagagcccacactgtggaagttgatggagcttgagctgtccctgatgtatgacatactctacaccaaggcagccgtgatccacacctcgattgggtacaccatccgaaccttgtcgtcgatcgccatagccacctccttcctgctattccatttcagtggcagcaaagacaaccataggggagtggacatcatcgtcacttatgtcttgttgggtggtgcccttgtgatggagacaacatcccttctaagcgcactaggttcgagctgggcgcttgacttcctgtgtgccatgcgatggagttggcttcggcatgcggccctttgcactggaaggtggcatcgacttcgcaggatggttctatctcttcgcaggcttatcactaccatgacggcaggctacttgaacagatcaagggggtggtcaggcaccatagggcagctcaacttgcttagcttccgtgctgctcagatcaatgcaacagatcgctgccttaggaagctagccatgatgctagggatcgacgagtggtgggacagcacatgttactcttggattgaggaagtcccaatggaggtgaaggagggtgcggttgatatggtctccaggaatgatctcaacaccatgggcttgctcaggcataggtggggagaggtggcactagataagaagcatcctgggctgttagaagaactacagggatggcgacatggtgtcgacttccacgagagcatcattacatggcacatcgcaactgacctcatcctcgccgagagagagaacaaacagcctatggatgtgatggaaagaacaggaggcagcgacagagcccaacgtgtacattcgatcagggcactatccaactacatgatgtttctccttgtcactcgccctgacatgcttcctggccttcctcagaactggttgtaccagcggacttgtgataacctcgatgaaatattcaaagagcatcgtgggcgcctcatgtcttccaaaggcaaggttaataataggatcttcacagtgctcagtgcgttgctccgaggccataatagaatcaggccatttggactcaagcagacgaatgaatttgccaaaatcctactgatggcactcaagcatatgtccggcaaatttgaccctttggttcctcgcctcacatttgctcatcagatttctcaaatagtgttaaattggaaggaagctgacccagaggatgtactctttgatttgtggacggattttcttatctacgcagccaaccgatgcaacagggagtcccatgctaagaagctcaattctggcggtcaccattggtgtcttgcttacccctatgattga

SEQ ID NO: 32855 - DNA, 495 bp, Oryza sativa
  Clone ID: PAT_MRT4530_37024C.1
cgtacgcgtggccgagacgcgtgggttagttcccaagggaaagaagaaatggaggcttcacgccaaggtgttctcgcaccatgcttctccatggtgctctgctgcacagccactgggtggagatgggcgcggcgccaggtggatggtggcccggaggctgcggacgtcgcgatgtgcgcagagcacaccggttcacaagggcaccgtggcgcccgccaaggcgaactggcgccagcgtatggctaacaccggagggctgtgccccgacggctgatctgccaccggccgttctcgccgcccgcgtgaacagtggtgccacccaaagccccgtgcccccgtgagtcgagtgaacccagccacgcctagcgccagccagccttgtgtgtgcccgcccaccctcgcgccagtggtggtcatgtcgtgttcgatgtcgatttcggattccttagcgtgccccgtagtgaaggaatgtaaaaaaaaaaaaaaaaaaaaaaa

SEQ ID NO: 32856 - DNA, 1640 bp, Oryza sativa
  Clone ID: PAT_MRT4530_37025C.1
cacctcgagctctcgcaatgccggccatggaggaggaggcggtggccaacgaggcgcatcacttcctcgtcgtcacgtaccccgcccagggccacatcaacccggcgcgccacctcgcgcggcgcctcgcgcgcgccgcgccgggcgcccgcgtcaccatctccaccgccgtctccgcctgccgcaagatgttcggcgacgccgcggctgcgggcgccggcggggagctcgtcgacgaggggggtgtgcggtacgcgccgtactccgacggctacgacgacggcttcgacagggcggtgcacgacagcgccagctacatgacccaggtcagggtcgtcggcgcgcgcacgctcgccgccgtcatcgaggggttccgcgccgccgggaggcccgtcacccgcgtcgtctacacgctgctgctcacctgggtcgccgacgtcgcccgcgaccatggcgtccccgtcgcgctgtactggatccagccggccgccgtgctcgccgcctacttccactacttccgtggcacgggcggcgtcgacagggacatcgccgcggcggcggcggcgcgggaccggatggcgcccgtgcgcgtcccggggctcccgccgctccggctgcgcgacctcccgtcgttcctcgccatcgccgacgacgacgacccctacgccttcgtgctcgacgcgttccgcgacatcgtcgccgtgctcagccgcggcgacagacccaccgtgctcgccaacacgttcgacgccatggagcccgaggccgtggcgtcgctgcggcagcacggcgtcgacgtcgtccccgtcgggccggtgctctccttcctcgacgccgccaagagcggcggcggcggcggcgccatcaccaccaccaccagcaacgacctcttcaagcagaacgacacgggctacctcgagtggctcgacgcgcggccggccggctcggtggtgtacatctccttcgggagcctgtcgacgatgagccggcggcagatcgccgaggtgtcccgcggcatggcggcgagcggccggccgttcttgtgggtgctgaggaaggacaaccgcggcgaggctgacgacgtcgccatcgacggcggcgtggtggtggagtggtgcgaccaggtgagggtgctcgggcacccggcggtggggtgcttcgtgacgcactgcgggtggaactcgacgctggaggcggtggcgagcggcgtgccggcggtgtgcgtgccgcagtggacggaccagggcaccaacgcgtggctcgtcgccgagcggctcggcgccggcgtcagggccgccgtgagcgaggtcgacggcgtgctggaggccggcgagctgaggcggtgcatcgacgccgccacgtcggaggcggtgcgcgccagcgcggcggcgtggagagagaaggcgcgggcggcggtggccgacggcggctcgtcggagaagaacctgcaggcgtacgttgggaagattcgcgccaattagatgtgtcttattggattttgaattgggatgatgctccaattttatatgtaattagccgaatttcctatgtaattgtggaaatatatgctaatgcatgtttgtatttcattttaaaaaaaaaaaaaaaaaaaaaaaaaaactcgagactagttctctctc

SEQ ID NO: 32857 - DNA, 176 bp, Oryza sativa
  Clone ID: PAT_MRT4530_37026C.1
gttggtgccaccatgcaaagccccgccaacaagggggggttttattaaacaaagcgcctttaaaaccccaaaccaccggacacctgaatcccctaatcactacacatcggccgacaaggaacaaaccaggtgcccaatcatgaccacctaatcatcacaaacagttccaacaaaga

SEQ ID NO: 32858 - DNA, 970 bp, Oryza sativa
  Clone ID: PAT_MRT4530_37027C.1
atgcggcccggacctcgtcggcgggggggcggagcccgaaggcagccgccaagccgacgcttcccgtccccggcgagggaaagtgaggaggcgttgaacaccggcggccacggcagctcatacgggaacgcgacgccggcgtgcgcgttccgctggtgctcccgttccaccgccatggtccggagccacgcttcctccgacggcgacagacagcatgagccaggaaaatactctcaggtggtcgtcgttgctcacgccgatgatacggagctcgccgccgccatcgtcgtcaccggcgacgaccctgaacttgcacttgcgggaccactccctcatgtggtctgggaatacgacgctggagtgtttcgccgtgcgcgagtcaggcgttgaacaccggcggccacggcagctcatacgggaacgcgacgccggcgtgcgcgttccgctggtgctcccgttccaccgccatggtccggagccacgcttcctccgacggcgacagacagcatgaggtaccccctttccgcccccgacgattacgccagcgatgccgcagccgaagtacacatctccttgcggcccggcagcccgcgggtggccacggtcatctccggcgtgggctcggcggccatctggtagcgccgcgtaagtggctcgcagacgatgaggccatcagggcagcagcggctgtcggagtctcggcgatcgtccaggaggcggtgtccgggacgaagtcgagtgagaggcggcagccgtagacgagaaccggcctggagacgtggacgaacgccgcatgggagaccgcgccgccaacggcgtggtattggccgacgaggtcgggcccgtggtggacacggaagcggcggaggaagacagtagccacgtaggcctcgccgtcgccggcagcaacaagacggtcttcttcctccgcgccgccgtgctccggttcttgcaagttgcgacggctcat

SEQ ID NO: 32859 - DNA, 479 bp, Oryza sativa
  Clone ID: PAT_MRT4530_37028C.1
gttgaaaccctcagctgcgcgctgcagccacgctgctataaccctaggttcctaaatcctccgatccggggaccccacgcactcggattccggtactcgtcatctgccctatctccttcgctgctgcctgctgatagtgccgccgtggtcttgccttggaccacgcactactccctcgtccatgtccgtcgcagtgttgcgaccaagcctgctccagctggggggctcgtctgctcctgaccctgcaagggaatgatctacattgagggcgggctgttaaaagcgccgccagaacactgcttttcatgagagccgtgtccgctggccctgacaggaggcgttcgagcgccctgtccaggggcgagcttgacgacgatgagaacactctagcgctcaccactgcgcccgcggtgctcaacaactactaggcctagtatgtgctttatgagtaggcacagtctacatatagtgagaagaat

SEQ ID NO: 32860 - DNA, 429 bp, Oryza sativa
  Clone ID: PAT_MRT4530_37029C.1
cactagcgccctcctggcctccctcatccacccgccccactcccgtgcgacggctgcgccgccaccggctgggcgtccccagatcgattcttcgcgctcctcctctccgctcgcgccccaccccagcaccgccgccggttgtaggtcgtcttcgttgccgcgcgattccacctcccccgccgatggctgctccaccgtgccgcctccgtcatcggatcggcgggacctcacgtccctcacgctgcctcccctgcgaagccaccgccggatcgcgccaccgccagtcaggatggcgttgatccctcgcgcgctgtggccggattcctccccaccccgctgccagtcaagccgccggcgatccttgtggtcgactctaactcgcaggccaccgaaccagccctccaacaaggtaacgcgcgtggtttccat

SEQ ID NO: 32861 - DNA, 717 bp, Oryza sativa
  Clone ID: PAT_MRT4530_3702C.1
atgaggttccgcggcgtgcaggtggatctcgtgtacgccggcgtgtgcctcccgtggtgcccgacaacctggagtggacctcagtgcgaccggtcggtgctccgcggccttgacgaccttgccacggcgcgcagcctcaacggcatccgcgtggccgacgagatcctgcggcttgtcccggagaccgccgtgttccgcaccatgctgcggtgcgtgaagcactgggctaaggcgcggggcgtctactccaacgtcgcgggcttcctcggcggcatcggctgggctatcctcgtggcgcgcatgtgccagctctaccccaacacatccccagcatgctgctcccgcgcttcttccgcggctttgcgcggtggaagtggcccagcccgcttgactaacaaatcactgagtctgagaaataagagtggaagtgtagctagttcgccgcaagctcgtgtttgtccactgaaaaaaactgtgcagccagggaagctagccctgaaagagagatggtatggccgagccgcaaatctcttctccttgaaatggcaagctaaagatgatctcatcgatgttgatcgctcaaggaggcaaggaaaattaaggaggcgagaaaagtacgtaaaggagatgggaacaataagtgtaaaggcagaactgaaaactaattacccaaaactttatggattcgatcactgcttgacagggaacatactctaa

SEQ ID NO: 32862 - DNA, 522 bp, Oryza sativa
  unsure (1)..(522): unsure at all n locations
  Clone ID: PAT_MRT4530_37030C.1
ctgtgtgctgattgncctagtatggcttcaagggagaaagcttcangagaagttatctcagataaagtctcttgtggtacaactccttcgttccgttctagtagtattgtctcagcctaagattgtaatggtttcgtgccaagcctgccttgtggtgtactatctnaagaatagaaatcaccaatctggaagggaggcctaggcttcatggtagcgcgtaaatagacgaattggcattaattccttcttgtagttttttgtgctctgcccgctgctttgtaaccggttttgacaacttgcgtgtggacggcttagttgtggtaacaccatgctcatgccactctcccccgaattntggcttagcctactcttgggccagtctggctaaaataaatgtaatcagagttacactgttatttgttggaaacataacttgtaaaataaaactaatcatttttatcctaacataccagccgctcaatgctgcaataatttcccgttgaaaaaaaaaaaaaaaaaaaa

SEQ ID NO: 32863 - DNA, 371 bp, Oryza sativa
  unsure (1)..(371): unsure at all n locations
  Clone ID: PAT_MRT4530_37031C.1
attcgggtatccctccgaggcgncggccgggaaaaaaaaaaaaaaaaaaaaaaaaaaaaaaatcaccagaaaccatcaaacacacagggcattctgattaggagaaatctaatgggcttccttcttcctttntcccttcctgggttgttggctggctctgcttgggattgggcctccataggaaaagcctatggccctcagacccatagcccttctccaagacttttggtgtgcgctgatcctgaatctcgccaggtgcgagtaaatggggatttcgtttgcaagaacccaactggaacgcgagtgcgcgacgactctcttcaaggcnagccactgcgtcgatagagcctaagagaccacaaacaactaag

SEQ ID NO: 32864 - DNA, 222 bp, Oryza sativa
  Clone ID: PAT_MRT4530_37032C.1
atgtcaagcaccacaaagtctatcgggatgaagaaatcccggatcttcactggagaagcattcataaatgaagagaacgaggtggaaatatatcgatcaatcagtcaaaagtctgccggtgatctacaattacacgagaaggcccaaaagtccaatttaataatcacaaatgggcctagaatgtatgtcactgattcaggggcccacatggaagtctcctga

SEQ ID NO: 32865 - DNA, 226 bp, Oryza sativa
  Clone ID: PAT_MRT4530_37033C.1
atggggcccccacctacccccgaccctccccccctgcggccgatagagcagcacaagcgcgatggccggcgcatgacgagcgcgattggcagcctaccagcaggttctcatgcgattgctcaacggcgcaaggcagcaacctccgcggcgccgcaggcccaggacctgcaggccctctctccgcctcaccaagtcaccgcctccgtctccaatgcatatcacatcc

SEQ ID NO: 32866 - DNA, 789 bp, Oryza sativa
  Clone ID: PAT_MRT4530_37034C.1
atgggccagtgggagtgcgctgggacggggtacgctacgtactcgcggttgcggccgccggccggcacgaggcatgcctcgccctaccgagcgctccgtcgctggtcgtcggcgtactgctcgccggcgaggccggcattcaggagctacacgcgggccagccccacggacgtcctcgcgggggcgtcgcggcgagcgctgctgggctacgtgacccgcgtcgcctacccgcttgcctccctcccgctcaccgtctactgtgcgctcccggccgtctgcctcctcaccggcaagtccacgttccccagcgacgtgagctactacgatggtgtcctcatcctgctgctcttctccgtggccgcgtcggtcgtgctcgggctgaggtggagccgcgtgccgctgcgggcgtggtggtcggacgagaaactctggacgcacgctctccagccggcagcgacgacgaggactccggcggcaacggcggatctcgtgtcccgcgcgcagagctcggtgtcctacctgcggagttccttcctgagcaaccatgatctcgtatcctccttcttcagccccgccgccccgttcaacaccgcaaaacatgcctccatctcggccgtggcggcgataagagcatcaggtcgcttcggcttcggatctggcgggagggacctaagtgtgtcgaagcggccggctgtcggggtcagcgttaaggggatctattgtgccgcgtggaggatcacttccacctccaccttgtcgccacaggagatagccgtcttctggccatag

SEQ ID NO: 32867 - DNA, 807 bp, Oryza sativa
  Clone ID: PAT_MRT4530_37035C.1
cagctctagtcttacacaaagccagtacctgcgatcttcgaatggggacttagataacatgcatggtactagtgccatgatcaccagaggatctcctttaggtcttacagggctactcaacttgggaaatacatgtttcatgaatagtgctatacaatgccttgtgcacacaccagaattcgctagatattttcgtgaagattaccaccgtgaaataaattggcaaaatcccctgggtatggtgggtgaacttgcattagcctttggtgagctactgagaaaactgtgggctcctggacgtacaccagtttctcctcggccattcaaaacaaagctgtcttggtttgcacctcagttcagtggatacaaccaacatgattcacaggagttgttggcattcctcttggatggacttcatgaagacttgaaccgtgtgaaacataggccttacataaagtccaaagacgctgatggtcgatcagatgatgaggttgcagatgaatattgggccaatcatattgccagaaacaattcaatcattgttgatgtatgccagggacagtacaagtcaactttggtatgcccagcctgtggaaaggtttcagtgacttttgacccattcatgtatctttccttgcctctacaatttacatcaacccggagcatgaccgttatggtctttacttttgatgggagtactccaccaacaccatacactgtaaatgtacccaagcaaggaaggtgcagagatcttatccaagccatcagcaatgcatgctcacttagaaatggggagagacttgtaat

SEQ ID NO: 32868 - DNA, 768 bp, Oryza sativa
  Clone ID: PAT_MRT4530_37036C.1
aaacctcatcttatcagtttcccgcccgcaacgtgtggtacccatcccacccatccccacttttatccaagccgccggcctccgatccctccacccccatcgtccgcccgtacgccgtccgtcccactcccatctcgcggccgaggtgaagccggcgaagcgctccgtcggcctcggcctccccgcgcttccgccattattgcccggcctcgcctcccacggccagccccgtgtcgcgtccttctgcaagaggctggcgaggaacgtggtggccatgggcggcggggaggcgccggcggtgccgctcgccgccaacgcggagatcaccgagttcatcaacgccctcaaacaagagtgggacaggattgaggacaagtacgcggtgacgacgctggcggtcgctgcgtcgctcgggatgtggagcgccggcggagttgtatcggcaattgacaggcttcctatcgttcctggtctcatggaagctgttggcattggctacagcgggtggtttgcataccggaacctgctgttcaagcctgacagggaagctttctttgcaaaggttagggaggtctacgaggatataatcagcggttaacagagatactacttatatacaacttcagttcaagggaggctgctactggattaattatctgtactgtatcacagcatagcatctaatttaattgctcttactcaatgtatgtctatataagttggacattactgctaaataacatttttcacaatgcctactcagagttg

SEQ ID NO: 32869 - DNA, 1971 bp, Oryza sativa
  Clone ID: PAT_MRT4530_37037C.1
gcacgaggctattatccaagccgccggcctccgatccctccacccccatcgtccgcccgtacgccgtccgtcccactcccatctcgcggccgctattactaccagcagattgacgacaccgatcgaccgatcgatcgtactacgtgcagagagcttagctagctgcgacgcacgcacggtttgtacaaggtacagtatagtatgacaccgaccgtcgcgaccaccaccccggccgccgcggcggcgacgacggcggcggcggccgaggtgaagccggcgaagcgctccgtcggcctcggcctccccgcgcttccgccattattgcccggcctcgcctcccacggccagccccgtgtcgcgtccttctgcaagaggctggcgaggaacgtggtggccatggcggcgggggaggcgccggcggcgccgctcgccgccaacgcggagatcaccgagttcatcaacgccctcaaacaagagtgggacaggattgaggacaagtacgcggtgacgacgctggcggtcgctgcgtcgctcgggatgtggagcgccggcggagttgtatcggcaattgacaggcttcctatcgttcctggtctcatggaagctgttggcattggctacagcgggtggtttgcataccggaacctgctgttcaagcctgacagggaagctttctttgcaaaggttagggaggtctacgaggatataatcagcggttcaaacactcaacaatttacacggaagcacgtccaaaccgacagagagttagcgtcactaatcaattttattatcattcgcggccagttcacagttacacaatctcacgtcggattcaaggacaaaccgagcgcggtgatggcgatgaagaggggagccacggccgcgctgtggctggtcgccgccgtcgccggcatgctcctgcacgccgacgcgcagacgctcgtgtacaagtactacgcccagaagtgccccgccgccgagtccatcgtgttcgacgaggtccagaaggcgtggaacgccgaccggagcatgccggccagcctcctccgcctccacttccacgactgcttcgtcaacggttgcgacgggtcggtgttgctggaggcgagcgacgggcaggcggagaagaacgcgcagccgaacctgagcctgcgaggctacgacgtcgtcgacagggtgaaggcgaggttggaggcgacgtgcaagcagacggtgtcgtgcgccgacatcctcgcctacgccgcccgcgacagcgtcagggtcatgaccggcggctacaagtacgaggtgcccggcgggaggccggacgggacggtgtcgcgggcgagcatgaccggcgacctcccgccgccgaagcagcggaacgtggaccagctggcgcggtacttcaccagcaagggcctgaccgtggacgacatggtggtgctctccggcgcgcacacgctcggcgtcgccaggtgcggcacgttcgggtacaggctgacgagcgacggcgacaagggcatggacgccgcgttccggaacgcgctgaggaagcagtgcaactacaagtccaacaacgtcgccgccctcgacgccggcagcgagtacggcttcgacaccagctactacgccaacgtgctcgccaaccgcaccgtgctcgagtccgacgccgcgctcaactcgcccaggaccttggcgagggtcacccagctcaggggcaaccaggcgctgttcacgagcagcttcgccgccgccatggtcaagatgggcggcctccgcggcggctacgccggcaaggtccgcgacaactgccggcgggtcaggacatgagatacgacttatatacaacttcagttcaaggcaggctgctactggattaattatctgtgctgtatcacagcatagcatctaatttaattgctcttactcaatgtatgtctatataagttggacattattgctaaataacatttctcagaatgtttactc

SEQ ID NO: 32870 - DNA, 1317 bp, Oryza sativa
  Clone ID: PAT_MRT4530_37038C.1
atgcagcacaacccgaaaacaagaactcgtcgaaataaaactaaagcaaaagggtggcaatgcgccgagattgtattgaacatggaaggggatgtcgaggatgagcacggtgaggtggggcggtcggcggcggcagcatgggctggcagcacccggctcaatggggaggggctgctggaggatgatgatgttctagacgtcggtgtacatggcgctctggcttgcctcgggcagaacggaggccaagccggggaagaggaggtcgctgcgatgctacgaaaggtggtggcgtggtttggcgctgctccggccgacagggaggcttggctggagttcgccggtccttaccctacctttggcctcccacgccccaactgccgccattgccgctccacgtcgccggtttcccgcgcgcccaatgcccctccgccccactccgtccgctcgcccgcaaccgccatccacctcctccaacccgcgcccacgttccccccctccctcgcaaatcggcgccgccgcctcccgctggcgagcgttgccttgcccagccatgcagccgccatgccccactgcaccccgtccacttctcctcttccccaatccattgccgaaacgccgttgccacattcaccatctctctccgccaccgtcgcccactacaccgcgtcgcctctccggccgaccccgcactgcgtcgtcgcctccatcggttccgcaaggacaatgagaaccccggccgccgctcggttcgcgtcctccaccactggaatctgtttcccctcatgcaccgctccccgcgccgtctgcaggtggccgcgcgccgccaccgtgccatggccggccgggccggtctcggccgcgcccatgccccagcggctcgccctctaccgcccgatcggcttggctgatctaggctgtccttcccgtggaccagcggtggaccgccctttggtcccggtccacggtggaccggtggctccctgtgccgctaacgcgtggggcccacctttggtggacttggcccacaccagccccactgtgtcgatcggggatacccgtagaccggatatagagggtattaggttgatatgggattatatgatggaaaccatagattacaaagggaatagtggaactcgacgataccgacaagatcgtagtcgagttgatccgactagatctcccggcgacctggctccgataagctccgacttcgtaggctgtggtggatgtgttggctctaagattcgatgccttaggtcctcccagggggtcccttttatatcgcacaatgacgacccagttctgaccgagtag

SEQ ID NO: 32871 - DNA, 164 bp, Oryza sativa
  unsure (1)..(164): unsure at all n locations
  Clone ID: PAT_MRT4530_37039C.1
tcgtctgcagagaatgcttttnctgctagctcgtcccggaggagcttatctnnncgctcaggagatgcatgaatatacagattacnccatccatcaaaattgaaggaccgcacaacttcaactatacgcaaaaagggctataaacctcgtnccgaattcctgca

SEQ ID NO: 32872 - DNA, 114 bp, Oryza sativa
  Clone ID: PAT_MRT4530_3703C.1
atggatgaagaacaccagcagtatcatgaacagatagctgacaaaagagggtgtaattctgtaaagaggcctctttgtgattacatgctagaaaagataagcatgtcttcatga

SEQ ID NO: 32873 - DNA, 546 bp, Oryza sativa
  Clone ID: PAT_MRT4530_37040C.1
tttgtctactctgagtcaatgtttgaacatgcctggtaaaattttccatcagaataatagtgtccattaagtaatatattctatatagtgatctaaaacatcagttgcatttttctgaaccctaaacagttgccaaaacacccgtcaccgcaagtccacacgccctccaccaatcttgaccaatgacgctggcgccatcgaacgacacggcaggtcgtaggatcagcatttataattcctgtcgttgcaatcaccttctatgcgggctccagattcatggcgtcataagagagaacaactggaaccttacttatttttttttctgcattctttgcaatataccatgaagttctacttaactattgtctggacctgctactaatacttcgtctattttcttaaacaggatctatgtctgttactcccactcatggaagggctcccgtaggagacatcataaaagtaggggtttgcaaacaaaacataacccatcacattaagaatttagcttcctttggtgctacccaaacctgttcaggaatcatg

SEQ ID NO: 32874 - DNA, 1998 bp, Oryza sativa
  Clone ID: PAT_MRT4530_37041C.1
atggctcctcgcaagcctacaaaggctggatcgactggcgaagaccctagcagccttggcgaagggtggtcgtgcttccttggcaaatcacttgtcaaggaggccgccttgggcgagcttgtcctttctggcgttctcgtggagggccaggcgacctgcgggggcgaagccatcgtcccttcgcccggtgacaaccagactgttgtcttcgccgccttcttcgctaccggacttcgcctcccttgcaatgactttctgctgtccgtgttgaaaatgtatgaggtcaagctttaccagctcaacccatcagcgttcccgaagttagctgtttttgcatggatgtgccaaacgtgtgggttcgatcccactgccgagcttttcgccgttctgtttatggcatgcgcgacgacgaaggacgtcgacggtgttcttgagtcttggcttatcctccttcgcaaggtcgcgcggcggctaagtacccgtgacctctgcgaggagttttgcctgcttcggatttctccccttgctcgcgaatcgggggtgttggttagtaaggacgaaaaggtgctcggacttccccgcctcgcttttcctccgggagtccaccttcgcacacatggagacgctgaaaccgaggcgtcgaagatggttgggggccttacttcagccgagtttgcccgcctgctttcgcgtcagcttgacggctgggcgaaccgagttcactttggcgaactacccggtcgattgatccccaccaaagctattgacgacgtcggaacgtcgagaaagcgtaaacgggcggtcgcgaagggcgggcaagtgcgatctcgtcgcgccacgaaggacacagctgaaagtggtgaagaggaggaggaagacgacggggaggccgagtctgaggacgatggctcccgtggctatacccctagtccgcccccggtgaaatctggggcgggctctcgcgtttcacccgttcacccgcaagacgttgctatgacgaacactcttctggcgatctctagcactgcggcgaagccgcgcggtcctcgtggggggtgcgcatctcctccgccttctagcaacgccgaagcggcgacaggtgggagtgcttcggcgccagcaatcggggcgaacaaccctcacaacgaacgggttgaggtggttccttcgccagctcgccggcgggaaggaaaagctccgacggtcgaagcgattgtgtcagacgtgacacttactgccccgcacttcgttcccgccgatttcgccactcggccagagatcaccccttttgtggatggggtgtgccaagttatcgcgcccacggaaggccttggtctcttcaccgagatgaacgagttcggcgagagctatgccgccgtggtgagcttgtttgttcggggccttgccgcgcatctgagtgcgaagaagtctgccctggaaaggctggatggttaccggcttcggttgcggaaggccaaggacgaccttcgccacaaggaggacgaaaggcgcgtcgtggcggacaccttgtggagggcgaatgcggagaacaggctggccctgaatgaccttggtgctcgcgcggaggacaccctgggagatgatgggacggctttcgacttttccgagtggacgcaagagtcggccggctcagttgtcgaagtggccggcgcttatggggattgttgtgctcgtgtttcggcgggcttcgtccttagcctgctacatacgcacggttgcgagcatatcagggattttccccgctatgtgacggaagaatggcctttgaactcgcaatgctctggggcggccttaaaggcgttccgaaagggtttctgggaggacggtggccgggattgcgcgaagaccagccttcgcgagaatcttgagaggatcgcgaaggaggaggaagctgctgccgtccatgccggaggagaccctgggtccacggagctagcaggcgaagacaatagaggccaagaccaccctaaggtgtga

SEQ ID NO: 32875 - DNA, 468 bp, Oryza sativa
  Clone ID: PAT_MRT4530_37042C.1
gaattgcttctccgttgaggcgaggcgaggcgagggcgaagggggaacgaagtggaaggagatttggattgattggttggacgccggcggcgcagatccccaattcgatctcctcctcttcgatcttcatcctaccctgcctgccagtgccaggtaattcaattcacccttccgtcttccccaattcacctcacctgcttccatctccacccccaaatcacttgattacggcttaggcttcggggattaatcaccccccgctgctagttacttagggatctgatgaatctcatctcctactccctcaacctcaatgaattgaattcttagttagtagttgttccctccaattgactcatctctgtgcctctatttccccgaattcattcttctctgtgcccgcccgtcatcaccaattccgttattattattatacctctatttcctgatttgctttaaattatcacc

SEQ ID NO: 32876 - DNA, 281 bp, Oryza sativa
  unsure (1)..(281): unsure at all n locations
  Clone ID: PAT_MRT4530_37043C.1
cacacganagnangcaacaccnnannacnagagnacangnaaccaacgnnngancaacaacaaccacaggaagagagnnggaagnngacaggggccangnngcacagggagggcancggcancgccancnncancancggcggcggcccgagnccagcacaaanaacccggngcaggcncngcagcancgggcaacgggggccacagnggcacggaggcancangcccgggagcggcangcaacacggcngccgccggagcgccancggccgcgacacgaa

SEQ ID NO: 32877 - DNA, 317 bp, Oryza sativa
  unsure (1)..(317): unsure at all n locations
  Clone ID: PAT_MRT4530_37044C.1
cccgcccgcaaggagtgccagccctcattttgttatagcacacggtgacgttacaacaggtaatcgtttgatcaggtccagtccagtccaaagagggcgtgttaacaggcccagtactggttgcataaaacatataaggggaacaatagtttttttgtgggcctagatggggatccaataatggtaacaatcctagagggggagaaaaagcatttccttggctacaaaatgggatgacatgatggatcttggatttgatgttgggtacaacaggcccctgcgatggggaggagaattntttttcttctaccctttac

SEQ ID NO: 32878 - DNA, 197 bp, Oryza sativa
  Clone ID: PAT_MRT4530_37045C.1
ttagctggcggccttccttttttttttttttttttttttttgttgttaaggcgaaatttgattaaacagttgattactcaagacctttctcatcaagcgtgcaattctacaagttttctaatcggcaaaatgtttgaaacttttcgcgttttggtttaaccaaccctttggcatttctttttactgccatacacata

SEQ ID NO: 32879 - DNA, 221 bp, Oryza sativa
  Clone ID: PAT_MRT4530_37046C.1
gccgcccccgccgctttcaacactcccccaccgccacagcccccgatccggctgtgctgcggcggcgacggccgtggagcggtgtacggcatcatcccaccacgctcttatctcacacagattgcaggagccaaccgagctatgttaaggtaccctgttcagatctacggattgaggcaggggggatcctctagagtcgacctgcaggcatgcaagcttga

SEQ ID NO: 32880 - DNA, 351 bp, Oryza sativa
  Clone ID: PAT_MRT4530_37047C.1
atggcccgaggcccatggctcggcccgaagcccacagttttggcctggcccaagcacgacacggcccgcctggggtcgtgcccgtgccggcttgatccaacagccgagccgtgcctgggctacaccctcggcacggggccatcggccagcggcagccgtaagccgccacctcggctcaaccgcagaacggttcgcctctgcagccacgtgctcctggcggggcggagcgcgcgcgacgcgtgccccggcggatcgttccgccggaggcaacgaggcccgctccacgcgtccacgttgcttggccggccgtgtccaaatcttggtgagatgcgggcgtgccagtcagtttga

SEQ ID NO: 32881 - DNA, 385 bp, Oryza sativa
  Clone ID: PAT_MRT4530_37048C.1
ttgttgtttagtacagtaacagagatgacacacatgagcaatacagtgcatgcgtggaaaaaaggggcacatgtgtcaagagaagccatgcgtctggaagacgaatcaagaagaccatgcatgaaaacacaacgcacatgaactgccaagcgaaggtactgagaatggaaagaaccacagatgcatgcggacatgctttacttgattagtgcatcagaagggtgaaacgcaagcaaaaaggcatcttgtacagaaccgggagcagtatggagcacttacactgatcaccggttcttgagaggctaaccaaaaacaactacgaagctatgtactagactgaccatgtacacaaggactggatgcattaccttatggactaccatga

SEQ ID NO: 32882 - DNA, 288 bp, Oryza sativa
  Clone ID: PAT_MRT4530_37049C.1
atggcgacggcgaaggcggatgatctcctagcgccagcagaggagacgagcagcgtcggtggttggattgggagtccgccgcgtggagtcctccctacgccaacaacggttcaacggaggcggaacatcgcgcggagcgggcacctcccggcgacggcgacgtcggatgacctcccagagccagcagaggagacgagcggcgtcggcggttggatagggaaccctaaccctaaatgcacctcaaatcgcggagacgaacgacgagcgccgtctacgcgccggctctga

SEQ ID NO: 32883 - DNA, 187 bp, Oryza sativa
  Clone ID: PAT_MRT4530_3704C.1
ctttgcttcaagtctgacaaacacatgagctggtactcatggatactctcttctctcacacgcagtgtgtacatgtgtggtggcatcatcatatgcccacaactattcatcaactacaagctgaagtctgttgctcatatgccatggcggcatatgacctacaagttacttaacaccataattgatg

SEQ ID NO: 32884 - DNA, 698 bp, Oryza sativa
  unsure (1)..(698): unsure at all n locations
  Clone ID: PAT_MRT4530_37050C.1
ggggcagaaggatggcacggcaccaccgccgccgccgccgaagaagaagaagaagccgacgaggaggcgaccatgagggccaagtggaagaagaagcgcatgaggaggctgaagaggaagcgccgaaagatgaggcagagatctaagtagggccgaagggagatgggctgatccaccgccgccgccgccgccgaaaaagaagaagaagccgacgaggaggcgaccatgagggccaagtggaagaagaagcgcatgaggaggctgaagaggaagcgccgaaagatgaggcagagatctaagtaggcgaaggagatgggcgatcatggtgatggcgtgtcgcagtgatccatgtcttcggctgccaagctcgttgatatgtcaagctgcttggcgtggtgccaccattcgactgttgaatggcttatttacctgtgctgttatcatcttatatccctagttttaccaagagttttgcaccaagacatgtcggttcagttatgtgaacttgttatggagccgtatttgctgctaatgtttacctaccgttgagtaatagctttgttggctctgtggtaacatatattgattgctgctttatctgttaaaaaaaaaaaaaaaaaaaaaaaaaaaaaaaaaaaaaaaaaaaaaaaaaaaaaaaaaaaaaaaaaanaaanaaaaaaaaaaaaaaaaaaaaaaaa

SEQ ID NO: 32885 - DNA, 159 bp, Oryza sativa
  Clone ID: PAT_MRT4530_37051C.1
atggcgtatgccggtcttgtgttcgcgatggcctccgccgccggcggcgacggcggcggcggcggcgggatgcggacactcctgtggttcagtaattcttggtctccaaatcttagcaggccttaccgggcgcactctgcacaagagaagactgtttag

SEQ ID NO: 32886 - DNA, 201 bp, Oryza sativa
  Clone ID: PAT_MRT4530_37052C.1
cgcttctggaaaccttttaatcatgaatatctgttatgtgtgctgattaacagagtgattctgggtgcatttggacaaaaacatccaaattgtgtggccacggcagggcacatgatttctttgtcctaactacaaataagcgcgggggggccttttcaaaatggggggacggggggggggacccgaaattttcgatccggt

SEQ ID NO: 32887 - DNA, 378 bp, Oryza sativa
  Clone ID: PAT_MRT4530_37053C.1
atgaggcaggcgaggccctactcggcgatgttcgccggcggcgtgtcggcgcggactgggccgcacgcgctgccgctggctcgcatcaagaagatcatgaagcggtcggcgggggacagcagcgtcgtcgacggcggcggcggcggcggcggcggggcgaggatgatctccggggaggcgccggtggtgttctccaaggcgtgcgagctgttcatcgccgagctgacgcgccgcgcctgggccgccacgctcgagggcaagcgccggactgtgcacaaggaggacgtcgccgccgccgtgcagaacaccgatctcttcgacttcctcgtcgacgtcgtcacggcagacctcggcgacgatcatacggactataagtaa

SEQ ID NO: 32888 - DNA, 853 bp, Oryza sativa
  Clone ID: PAT_MRT4530_37054C.1
aaactcatcgtagtcgacttgctcctggaagaactcctcatcagcgggatctacttcatcttcttcagcaaccggatcacccagcccgtgcagaacggccacgtctggagaccttgagactttcatgacaaggcatttcgacagccgacacaggttcaccatatgccaacgagaggggtcctagaccaacaccaggttaggtcccagaccatactctaagtgtgccattagatagatctcgagatttgacgatttttggaagttgaacggagtcaaacggacgtacggttgagaagttattgaatttctaagattattggatttttggtctcgcgtggccccgagtgggacccgcttgtcggtgacacgattcatcgtgcagagggagcacgcggcggcgcgggctcgcggtggaccacgcgcccgagcggggcggaggggagcggcggaccggggtcagcttgacccggtcgcggccgaggtggcaccgacgtggtgcctacgtggctgggcggacggcggctgcgaacggcggggcgaccgggaggtagcacgggttgagaggggacgagccaacggctcggattcgccgggggatgatcgacggcggtggattgcggcgggggcaactggcggcgagagaagagggaaacggcgacgagacggctagggttggattcaaaggggctagagcatctagggaacctcaggaatccattccttgcgccggattgatcggaaacgctacgggagaggccggcgacgagaggcggctaccgaacacgggcggcgacggcgacgagcacacagcgagcggcgacaaggcttggggcggcccagctagctacggggg

SEQ ID NO: 32889 - DNA, 131 bp, Oryza sativa
  Clone ID: PAT_MRT4530_37055C.1
atgaagggaattatatccggtggtgttgaagcactcgccggcctcccgtctgcgtcgatccctactgctgcgacttgcgagaagttaaagtttttggaaggagaggcaactgcgacctgcgaggctatggg

SEQ ID NO: 32890 - DNA, 323 bp, Oryza sativa
  Clone ID: PAT_MRT4530_37056C.1
cgtcgctctctgcccctcccctgtgcctgacgccgtcggcaagctcgagctcgtccgtcatcccctccaccgccaagttcctccccgtggtcgtcggcgagctcgagctcgtcccctcaaccgccaagctcctccccgtggtcgtcggcgagctcgagctcatttcctccgccgtcaagctcctccccgtggtcgctggtgccggcgaggttgagctgcttccgtgcctccgtggtcgccggctgcccccaaagctcacgagcctaacgagctggctcgagctttcaaacgagccgagccgagctgggtttctagctcgttag

SEQ ID NO: 32891 - DNA, 732 bp, Oryza sativa
  Clone ID: PAT_MRT4530_37057C.1
aaagcaacgatccaaaaggttgttcttcaattatgcagttccgactcttcgtcgatacgtaatgtcaccctccgtgtacgtacgtacgtgcgagctagcgcagcgcagatcaggaccacatacgtcgtacgacgaacagcattcttgctgtgcatcccaggagatgatgcaagaacgcagcgcacctgccgcgccaccgtaacagtgcatgtcgcgctgccagtacaggaccaacgtacacgtacaccggccggcgcccgtaagctagcggtactaggccagtaccgtcacatcgccatatatacggtggcacagccggaccggcctccgtctccgatcgcctcctcatcgcgcgcgccgctcgcgtcccacgccgaatcgacggatccgggggaaagcaacgcagccgccatcgcctccgtcatcgccctccccagcagccgccgctgccaccttcctcctccctccgccagccgagtcccgccgccgctttctcccgccaccgaagcagcagcaaccagcgcctccacctccctcctcttcatcctcagccgtagccagcaccgccacctcccttctctccctccccagcagccgccactgacgccctcctctctctccctccgcacggcaagagacggtgttcgtgctagccttcgcggtggggccaacgttggctttttcatcagcgctgaactactggtccaggtcaaacagaggtgccattgtcga

SEQ ID NO: 32892 - DNA, 398 bp, Oryza sativa
  Clone ID: PAT_MRT4530_37058C.1
actggccaaccgctcaactaaacgagcgtggatcatctcagggagtatgtatcaataactcaatgtgcccgcgaacatgaaaacattacttatgaaggcggctccgcctttagcatatcacggccactgtgcacgcgtcgtcgagacccggacagtcggaatctgtcccatgcttagaacaaacagtccgactgtggatagcactctgctccgaagacatgtataacacaaattagcactttcgagctacagcataggcctaccctacgtactggcgcttacagatccaaacggctaggacttaccgactcactgcacataccgggccgaaaatcgtccagtactggcacatgaaaacagacagctacacagtgccttaggctaggatctgtcagggt

SEQ ID NO: 32893 - DNA, 620 bp, Oryza sativa
  Clone ID: PAT_MRT4530_37059C.1
gcacgaggattccaaatagtcccatacgtaggctttactagacccagttggcaggagattatctgttgtacagctactcttctggcatccaatcaattgcaattgcgaaagggagacctctagttcactcggatcctgccgagagtgatgtccccgacggcgtgggcaacggcctgtgccgcgatcgatccccatcttcaccattgcgacaagatgtagcacccaaaatcacctttcaactcgagtgctcatgacccttagggtcgcgaggccccaagtcatacgcttcattgggaattccacggccgccaagcgcgcacctctgtcaagtgtggtcgcctcaagtccgaagtcaagccgaagcccgtccggggccagcacgtccacgaccacgacattgagctcagcgagaccaacccgcgagtccctctcatttgccgaacggctggcccgcctgaaggagccagccgtgctgtacagagcaccgccgcacaggttttaccgcttctcttgctacagcagtgggctcttctgcatcatgtatgtgggctatcactatacgaccagcgtgttatacgcaccgcccgacgttacctggtggctaccgcacgcctttgcgg

SEQ ID NO: 32894 - DNA, 119 bp, Oryza sativa
  Clone ID: PAT_MRT4530_3705C.1
aaaagctatggggtcagccgaccccacataaatagcctaaatccgccacttggcgggagatattgcattattgcattgtctcattaacactttaactatatatggaaacattttttcac

SEQ ID NO: 32895 - DNA, 159 bp, Oryza sativa
  Clone ID: PAT_MRT4530_37060C.1
taggcagcatttcaatgtctagcttgtccattaattaaagaagcaccaccaatttcaccgtacacttctacagaaaagggagaaaagggtttctgtgctggttgggaaaccccctttggtgccggtttttccaaccggcacaagggaggtggcactgat

SEQ ID NO: 32896 - DNA, 145 bp, Oryza sativa
  Clone ID: PAT_MRT4530_37061C.1
atggggacgtattttgctcgcgggggggaaaggaccaacccgcacaagggacaaagtaccccgacgcaggataaggaaacaatctggagacgcaacccccagccggtggagagggaccaggcaacatgggatgaaggacccgacg

SEQ ID NO: 32897 - DNA, 845 bp, Oryza sativa
  unsure (1)..(845): unsure at all n locations
  Clone ID: PAT_MRT4530_37062C.1
gcacgaggggatgaacttggggattcatccaacttttcttggttgaagcaagcaaatccttttttactagtacatcatatcgttgctacttcgaggggtttgctggcaaacatgcacggtgacccagatttcngtttgggctttattcaatcttccttgagtgtccgtgctgcatggtcacacttttttctctcgtctgggaaagaattgagagccattataagctagtttctgcaaccaagaaattagtccttcattttgaaatctgagaagagcttttctttgtacgcagaaattaagtcccatttgctcagacaatgcaagcaatgcgggcggtggatgataaggagtgctacagccacagcatccatggcgagtcgaatgggcggccgcagcgcaagaacaatccggcgatcaaggccgaagccgacgccttccaagtgggacgacgcgcagaagtggcttgttagcctgtccaacggcggaggcggcggcgttgacgggatccacagcggcaaggtgaggccaaggaactccaacgccgacgaccggcgccttctgagctcgtcctcccagaacggccgcgtgtcctgcagcagcgtggacgggacgctggagtacaacctggtggccgctccccccgacgccaccgcagctgggtgaagccgccgccgacgacgttgagtgagacgaagaagatcgactactgcatggtccaaccgcagcacggctcccccgcggcggtgctccggtcggtctgcctgcgggacatgggcacggagatgacccccatcgccagcaaggagccgtccaggtccgccactccgctgcgggcgtccacgccc

SEQ ID NO: 32898 - DNA, 410 bp, Oryza sativa
  Clone ID: PAT_MRT4530_37063C.1
atgcacgagggatctgggagctcggcgcggctgctggtcgctgtggaggcggagaaggcgagggggagtgcacaacgagctagcgaggagtaccacaacctcaagacccgcataaactccgaggttgacctcacgctgagaatgaccaactatgcattaccattgtccgttggtgcccctgacctcatccccctttccctgacctcctccctcttctccctccccagccacggcaaatggcaacctcaccaccgcagttaccttcctccttgccaacttgatcgattccatcaaccatataacctcgttggactccacatgcccaataaatgcggtgtagggaaggcgaagagaatgggacatgccatcagtgttagggatgatggcggtcggtcctctggcgaagggag

SEQ ID NO: 32899 - DNA, 1114 bp, Oryza sativa
  Clone ID: PAT_MRT4530_37064C.1
gctagagaatgcaccaaaatgtcaatgctgccaaagtcattcttgactgactcagcaacttccttaacagtccaatttgatgacccagcataccttttgtttcctttgacatcttcaggaacatcttcaggggaatcatagacagcatcaagtggatagactttaacaatttccataagagatccatcaggcagctttcgtgattcatcaaactttccacgccttaggcttgtctcaaatatgtttagtgcaggcacccatgtaccaacaagaatttcagcaccagcagcagcaagagcctttgcaattgcccagccatagccattgtcatcagcaactccagcaatgaacgcccttttacctctaagatcaattggtaggccttgggggccactttcgcttgacattgctctgatggcgacaccgctgcgcttggaagaaccaagagggctggagtagcagattctgggacaggttgcaaagccagtggtggtgctgagtgcgcggccaatccgggagaccgccgccctggaagtaagcattccctgggaggctgagatgcaggggcgtgcagccaccatctgcataccggtagctgcagaagcgcccatcgtcctgctcgggagaaggcggaatgcacgagggatctgggagctcggcgcggctgctggtcgctgtggaggcggagaaggcgagggggagtgggctgatacttgtgggtatcagtcgtgattccccgagaggagcagcacaacgagctagcgaggagtaccacaacctcaagacccgcataaactccgaggttgacctcacgctgagaatgaccaactatgcattaccattgtccgttggtgcccctgacctcatccccctttccctgacctcctccctcttctccctccccagccacggcaaatggcaacctcaccaccgcagttaccttcctccttgccaacttgatcgattccatcaaccatataacctcgttggactccacatgcccaataaatgcggtgtagggaaggcgaagagaatgggacatgccatcagtgttagggatgatggcgacaccttgcattctcactacaacaacctttttgacacccgggagtga

SEQ ID NO: 32900 - DNA, 337 bp, Oryza sativa
  Clone ID: PAT_MRT4530_37065C.1
gttcacactttgggccaaacacaaaggatgggccttccgggtttgcaaacatgggagttgggccattcggtccattggtagggggggatgcaaccccccgtatcagggcctttgatgggggtccgtggttcccctggaaacttattcagggttcaactaactccttttcttcaattttgaaacaacccggaagctccccggggtcttgccaagcttgcgccagaatagctttctttaaaactagtataaatccgggctcccaggggcttattctgggggtgggtctctttgttagaaaaaaccctttttcatgttttcctcaaggtattatcctttt

SEQ ID NO: 32901 - DNA, 2694 bp, Oryza sativa
  Clone ID: PAT_MRT4530_37066C.1
ctcctctccatctcctccctctccattgtcaactcgcctcggttccttcatgtcgccggcgacgacggctgagtagaggtaacagcggcggcggcggcgatggaggggaggtgggtggtggtgttttgggttttggtggtgatgtgccgtggcgcgtgcgggctgaacgcggacggggtgctgctgctgtcgttcaagtacgcggtcaccgccgacccgctcggcgcgctcgccgggtgggggtacgccgacgagtcgccgtgcgcgtggaacggcgtcgtctgcaacggcttcccgcaggccgacgccgcggcggcgtggacggccaatgtcaccggggtggcggcggcggaggggggcaactcgagcgccgctgtccccgtgccgtcgaacggcacggcggcggcggcggccgggctcggcgtcaacgcgtcgctggcggcggcggcgacggtgtcgcgggtcatcagcctcgtgctgcccaacgcgcagctgtccgggtcgctgccgcccgagctgggccgcgtcgagcacctccgccacctcgacctctccgggaacagcctcaacggcagcttgccgccgacgctgctcaacgcgaccgagctccgggtgctctcgctcgccgacaatgacatctccggcgtgctccccgacggcggctccgtgccctactcgcgcagcctccaggagctcaacctgtcgaacaacgcgctcgccgggcgccttccgcccgctctctgcaggctcccgagcctcgccgtgcttggcctcgccaacaactacctcgccggcgagctccccatcggcgggctcgccgccttggaggtcgtcgacttgagcgccaactacttcaatggctccctcccgtccgacttcggcgggagccggctacgattcctgaacatctcgtcgaacaagctcaccggcgcgctacccaccgagctgtccgccgtcgtgccggcgaactcgacggtcgatctgtcgcacaacaacttcaccggcacggtgccgcaggccggcccgttcgccgtgcagccggcggcggcgtacgagggcaacccggagctgtgcgggccgccgctgaagaagatgtgctcgatcccgtcgtcgctgtcgaacccgccgaacgccaccgactcgccgccggcgttcgcggccatccccaagaacccgacccgcccatctccgggagcccaggcgcaggcgccgcgcgggcaggagaagctccgccccgcggcgatcctcgccatcgtcgccggcgacctcgccggcgtcgggctcctcttcatgctgttcctgtacatctaccacatcaggaagaagaggcggcagcggcggcaccatcatcatcagcagcagcaggattcgccgctgcagcacaagagcaaccgagcaatcggcgacgtcaagacgctcgacatcgccggagccagagaagagaaggcgtcgacctcggacgagagctccgactgctcggcgtcgtcgggggcggagacctccgacgacgacgacgacggcgacctcaagaagcggagcatgagcttcatcggccggagcacgccgcagcatcacagcaagaagcacgaccaccctcatcatcaggcggcggcggcgccgccggcgccggcgacgctggtcaccgtcgacggcgacggcgagctggagatggagacgctgctgaaggcgtcggcctacatcctcggcgccaccgggtcgagcatcgtgtacaaggccgtgctcgccgacggcacggcgctcgccgtccgccgcatcggcgagagcggcggcgccgacaagctcaaggacttcgaggcgcaggtccgcgccgtggcgcgcttccgccacccgaacatcctccgcctccgcggcttctactggggcgccgacgagaagctcctcatccatgactacgccaccaatggcagcctcgccaacatcgccttcagcaggcggttcggggcgtcgtcgccgctgcagctgagcttggaggcgcggctgcggatcgcgcgcggcgtggcgcgcgggctggcgttcatccacgagaagaagggggtgcacggcaacgtgaagccgagcaacatcctgctcggcgccgacatggagccgtggatcggcgacttcggcctggaccggctgctctccggcgaggccgtgcaccggagcacgggcgcgtcggcgaggctgttcgggagcaagcgctcgatgcactcgacgagcagcctgcccgacctgtcccagatgcccggcgccggcgccagcccatgcgggtcgtcgtctgcggcgacgtcggccgcagccgcggccgcgccgccgccgtaccaggcgccggagtgcctcaagaacctcaggccgaacaccaagtgggacgtctactccttcggcatggtgctcctggagctcctctccgggagggtctactcggaggtggagctctgccagtggcacgccgggttcgtcgtcgaggagcggagccggctgctccgcatggccgacccgacgctccgcggcgaggccgacggcagggaggacgccctgctcgcctgcttcaagctcgccttcgcctgctgcgccatggcgcccggcaagaggcccgccatgagggacgccgtgctggtcctcgatcgaataccttgttcgtcttcatctgcctcaaccaccaccaccaccaccgccgccgctgccattccttga

SEQ ID NO: 32902 - DNA, 742 bp, Oryza sativa
  Clone ID: PAT_MRT4530_37067C.1
aaataaaaagagttatatattatgatagtttgtttaatgataatgtttggtttgtaggatgggatgatcccaattttttgtttgattaaagggacaagagagagatgggatggacgctgtttgcaaccaccgtcaacgatcgggcgggcgtgcgggcgagcatgccggcggcgagcaagagaaagagatggtctccgagcgggcgtgtggacgagaaagccagcggcgagtaagagcaagaggaagagaaccatggcttgctcacctcccacatgaccatggcatgccgctgcccctcaaccttcgcgagttcctccccgcacgccaccgccgctcctcctccgtaacagtcccctgcctccggatccgccgccgcagtcctccccatcgccggatctgccgccgccgccctccccaccactggatctgccgctgccgccctccccaccactggatccgccgtcgccgagccccctaccgccaccgtcgcccaagccgtatgccactggcaaggcgtcgtcacgccgttcgctcgtcccaggtgggatgagttcgcccgcgagattttcttatatcggttggtcccgggtctgagaggaatattcctctccaggaaccaacccatcccactcgtccctcaaccaaacacccctgaaagtgggttcgtcccatcgtgtcacatcccatccttgtaaccaaacactatctaaagtgataaactttttgcaacaaattttaaatc

SEQ ID NO: 32903 - DNA, 417 bp, Oryza sativa
  Clone ID: PAT_MRT4530_37068C.1
atggtctccgagcgggcgtgtggacgagaaagccagcggcgatcccctgcctccggatccgccgccgcagtcctccccatcgccggatctgccgccgccgccctccccaccactggatctgccgctgccgccctccccaccactggatccgccgtcgccgagccccctaccgccaccgtcgcccaagccgtatgccactgctcccgagggcgagcagggcgagcgcgcgagcaaggcgtcgtcacgccgttcgctcgtcccaggtgggatgagttcgcccgcgagattttcttatatcggttggtcccgggtctgagaggaatattcctctccaggaaccaacccatcccactcgtccctcaaccaaacacccctgaaagtgggttcgtcccatcgtgtcacatcccatccttgtaa

SEQ ID NO: 32904 - DNA, 174 bp, Oryza sativa
  Clone ID: PAT_MRT4530_37069C.1
atggagccgcaaagagcttttggaagaagtttgcaatgtcctaatgacatcccagcgatccggatcggggttcataaaaaaaccgacacagctggagatggaaacatggagaaccaaacaaccccaagtgacgcgaacgtggtggtgatcacacgctgctacgggacaagccga

SEQ ID NO: 32905 - DNA, 495 bp, Oryza sativa
  Clone ID: PAT_MRT4530_3706C.1
gcagtgaaccacaagataagaagatgaatggctagctcttggtgtttgctgcacgacaaatggttgtttccatagaacacctctgatgctgcgtcttccatggattcctagaccttcagtcaccaagaacctaccaccaatcaagagcaagaaagtattgcaatcctattcagttctccataactagctgaagagaaggagaagaataatccaattaccgaaactaatgaacttaccaggctgatatatcatgagctgttgctatgcagtgtagctagcaatgagcagaacagaagaagaaggccatgattcagcttggtctggatgatgagaaatcttcactttctctcccaactccaatcccccagcttctacagaactcagcaaagggtctgaagaacagaagggaatgcaaattctccttggtactagagtagagacaagaataatgaagaacagcagaaatgatgggcaggagatgtcctggactcctgg

SEQ ID NO: 32906 - DNA, 2629 bp, Oryza sativa
  Clone ID: PAT_MRT4530_37070C.1
gggcggctcgtgccatgctcccctgggcgtcgcggcaacttcctgatctatactgatgctctacagtcctctttaaaagaaagagatggaagtagctgatctagaaaatcctacttccagaagctcatcccagaagtccagtcggcggtctggtagtcggcgttctcaaaagtcagccgggcaacaatcttcaccaactgtatttccagagaaaaaaggcaaatcaaaatcttcgaggcagaaacacttggtttttgacaataaagattccaagaaagcaaaaaataatgagcaaaaaaatgatgtggtggatgagaagtctaatttctcaggttatgaaatctattctggaaaactcttttttgacaagaaaaatagaattacaggagatcaaatttcagcaaatgggaaagctgatataagtgatgtaagactcacaagtaaagccctaatatggggttcttctttactcagtcttgaggatgtcatctctgtatcttacagttctggtgtccaacatttcattgtgcatgcatacccttctaagaagtatttgtttggaaagacacacagagtacggaaggacctccggtttatagcccctactgtagaggaggccatttcatgggtaacatgctttgccgaacaaaacatatatgttaacatgctacctctccctccaacatccagtaccgagcaagaccttgatggtcccctcagtggtgctttatttgaccacccacccatcaaatgtagaactccaccgaggatacttgttatactgaaccctcggtctgggcatggtagatcatgcaaagttttccatgacaaagcagaacctatttttaaggtaccttctgatactctcataatgcaagcttctacttattgctctgcacttgcaggttttcacatggaagtggttaaaactactcatgctggtcacgctaaatctcttgcatctacatttgattttagcgcattccctgatggaatcgtgtgtgtaggtggtgatggaattgtaaatgaggtcttcaacggtctactcagtagaagtgatagagcagaggctgtatcaattccagttggaataatcccagcaggatctgacaattcacttgtttggactgttttgggagttaaagatccaatttcagcatcattactaattgtgaagggtggctttactgccctagacatcctgtctgttgagtggatccagtctgggctaatacactttgggacaactgtttcatactatggttttatcagtgatgtcctggagctttctgagaaatatcaaaagaaatttggccctcttcgatattttgtggctggaatactcaaatttttttgcctgccaagctatttctatgagttagagtatcttccttcttcaaaggagatgactggccatggaaaaggtataggacaagaaaactttgtgtctgatgtatataccaatgtaatgcgcagccgatcaaaaagagaaggaattccacgagcttccagtttgtcaagtattgactctattatgactccaagtcggatgtcacttggggacgttgatacatcaggtagcacagcagcaagcactgaaccttcagagtatgttcgtggtcttgatccaaaagcaaaacgcctttctttgggcagaagcaacattgtttcagaaccagaggaagttttacaccctcaaccacatcattcatcattctggccaagaaccaggtccaaaacaagaactgagagaaattcagttggtgtcactactaacgatacacgattatcttgggcagccccatcaattcatgacaaggaggacatttcctcaacaatttcagatccaggacctatttgggactctgaaccaaagtgggacaatgggccaaaatgggatacagagctaacctgggagtctgaccaccctattgaactccctggaccaccagaagacaatgaaattggaccatcagtggaacttgtgccaaatttggatgataaatgggtagtcaggaaaggacactttcttggtgttctagtttgcaatcattcatgcaagacagtgcaaagtttgagttcgcaggttattgcaccaaaagccaaccatgatgacaacactttggacttgctcttagttggtggaaagggtagatggaagttgttgaaatttttcatacttctgcaatttggtcgccatctttctttgccttatgtggaatatgtgaaggtaaagtctgtcaagcttaaaccaggtgcaaacacgcacagtgggtgtggaatatacggtgagctttgccgcgtcaagggacatgtactctgctccctgttacaagagcaatgcatgcttattggccggcaaagcagacaatctacttaagtgctgtaaaattagttgaatttcgagtttttgaggcactgtattttctgtttccacttcgaacaactgatttttttttcttttgagttgtctatatttcgctacttgctaatggggtgtgtgagtgggttcagaacgtgcagacctcgagaatttggactgaacaaacaatgctgtgatgcttctgtatattcgagtgattataggagaataccttgattcttttcattgaaaaaaaaaaaaaaaaaa

SEQ ID NO: 32907 - DNA, 491 bp, Oryza sativa
  Clone ID: PAT_MRT4530_37071C.1
tttttgttgtgaagaagctcctgagttgtactacaaatgaaggcaaacagatagaaagatagaatgactatttgcggcgactgatcgctgcgggtttaaagtgttggagctcaaaatcttgcttggattcgtcactggccagaggtcgggctcgatgctcgtcctcttcttcatccatggcgttcatgggctggatgacatgttttggtggctcttcgtgaagaaggtcctgtcgcgaggtggatccttcttgctgagttgcagtcgtagcacgcgagaggttgcccatgctcacttctgacgcacttggacctcgcaaacgctcctccttgacttcatcgtcttctgccccatcaatagaggtccggtagtagattggattacgcgacatgtgtagcttgcgattggataattgaaacgtgctcggatccacctttcgcaatgcgttctcgtcgacttgctccttttgaaagagactttgcgtaccacat

SEQ ID NO: 32908 - DNA, 700 bp, Oryza sativa
  Clone ID: PAT_MRT4530_37072C.1
gggcccatttggagaagcagtttcatagttacttctacagcgggacccatgagatgaagctttctgatttgacatcaatacaaaggcatgatgaaactgtgcaagattacatccaaggttcagagatatgaggaatagatgctacagttagccgatcttgctttccaaggtttgataactccgattaaagagttctcatctcaagactttgagagcttgtctcatctggcgcaaaaggtgactctacatgagcagaggtttgcagaggctaagaagaatttcaagaaagtcaatcaagcgtatccctatatgtatgattctgaagaggaagatgactttgaggtagcagcagctgagtgggtgaggagtaaaaaggttgtgccatgtcaatgggtaaagaattctggaaaagaagaaagatatgactttgatatcaccaaggttgataagatttttgatttactacttctggagaaacagatccaacttcctgctagtcacataattccatcggctgaggagttagggaagaagaaatactataagtggcataattctagttctcatgctactaatggttgcaaagtcttcaggcaacatatccaattggctattgagggaggaaagatttgtaggatcgaatcacaataactaagccaaccagaggggggtcctaaagccacgaaccaaactcatacta

SEQ ID NO: 32909 - DNA, 449 bp, Oryza sativa
  Clone ID: PAT_MRT4530_37073C.1
ggggaaaaacaaccatataacggacgatcgctgataactattgctgggtgcaatgtaacacttttgggtctcaataggtacattacagagctagttaaatgcaatgccacaataccgttgctgcaggaggatcataaatagggcttacacatcatagccggcatgcaaactatccgggctgacaagagatgagggtttttgaagctggcgaggagggccatgcataacaaatgctgaaaacctaggttgtaggggccgctatgaaaggaaaaggcatggataaggcaccaacaatggatgatgacgaccgcatattgtgacgcttcattcaccacccatatgaaacccctaaatctcgtcaagtttgtccgcctcaaccactggatgagcctagtcactattatccctaacagcaggacgatagtcaacctgtgcgtcatgcttatcgg

SEQ ID NO: 32910 - DNA, 1862 bp, Oryza sativa
  unsure (1)..(1862): unsure at all n locations
  Clone ID: PAT_MRT4530_37074C.1
ggatccccgggctgcaggatcgcacgagggtttcaagcactagcgaagtaggagtaagttcatatccccgcgggagccgagcgccaccacctcccacctcacgcactgcccagcctacctcagtgtacgcgcgcgcccgtgtactcgccgccgccgccgctgccgcttcagggacacgccaagaatctgcgggcgcggctgcttcgcttccacaccgcgcgggttagcggcgcgtttcgcgagcaaaggaagtgtatcgtgctattttctataatctggttgtggttgttggaaagatatttttgctaaagttttgatatcatcgtcgtagtttggatggcacccttggttattttggtgggtttatcgagctctggatgccgaactcgcctatgcttcatcaaaacggaagtgtaactggtgctacaaaagttcccccattgaaaaagaaagttaacaaagtcaagcattcttccaaagcttgattatgtttttttgaggctgaagggggagcatagaatttcatctggcatgcagatgtcaacaaatcctaaccactatccggtatttccacattcattccgcaaccaacatgtggtctcattccaaacaagcacaattgccaatggctcaggagccatcccagtttgcccagccagttcgggagggatgaacagcgatatgacattgctgaacaccacaccttcaacgattgtttcaacatcttcacccaacatgcttgctgattctaaccagagcctcaagtatgctgcaccaatggctgtggattggtcatatcctgagttacagctactgaacgacggcctccttaaatatgcaaatgaaccgggaatcatgaagtatatcaagatagcagctatgttaccagagaagacagtaagggatgtagccatgagatgccaatggatggcggcgaaaaaggaaaatacaagacgaaggaagaccgatgaacattatcttggaaaaaagacaagagatcgaaaggataaaatggtggagtcttcatgggctaccaatcgacaagttcagacaacagatattagaagtccttccaccttggcatgtaacacagttcgtgataatcaatttcagtctggagcctctgaaattgatcgcgcaatgcttaatatattggaagaaaatgctcgggttctcaaacaaataggagaaaatattatgacatcacaggttcagaacaatattgatctattccatcatgcaagaaggaacatcagtgatcttctacaaagcatgagccaaatgcctgggataatgagcaaaatgcctccgctgccagtttcgattgatgacaggctagctagttacatactccctggagtcaatttggcacaagttttcggcagcagccatttgaggagctaagagaatggtaagccacagccaaacaaggtggcttccattttcagcagaaatttgaagattatgttaatgtttggagagccatttgcctcgatttctgcatggagaagcagagacaaaacattgatcttgcttttcctgtgcctggaagttgaaggaagaaatgcaagtaacgtggttacatggccttcaaataaaagcagtcgagcttgccttctattgaagactgcaggcaatatatattaaatattgttattaaactagtgatcgaaatagcgagggtttttgcggcanattgcagtagtttttttgttgcacaaatcgattctttttggtttctcccctgatgtcttctggctccagaccaagtggcgattttaacaaaggtgtagcatagaaatttgatatgaataattagcaggaaaagcctttttgttagttaaaaaaaaaaaaaaaaaaaa

SEQ ID NO: 32911 - DNA, 318 bp, Oryza sativa
  Clone ID: PAT_MRT4530_37075C.1
atggaggagccacgcggcaccggcggcgcggggagtgcggcagccgccgccgccgccgccagttcttggcggcacgcggacgccggtttttggcagcacgcggacgccggttcttggcggcacgcagacgccggccgccggtacttggctcgcccggatccgagttgtggtggcggtcgtcaacgcggggccccggattcgccaccggatttgcgggtcgtggcggcggatgtggtggccgcggcggaagcggacggcgcgacgccgacgggaagccgcggtgaggaggaagctggcgcgtggtggcgagattattga

SEQ ID NO: 32912 - DNA, 2325 bp, Oryza sativa
  Clone ID: PAT_MRT4530_37076C.1
atggaaagtgtcgttgttactgctgctgagggtgctgtgaaaacactgctgggtaaactgggctcttttctttcgcaagagccccgacttcttggtggggtcagaggtgagttgcaatacatcaaggatgaacttgagagcatgaacgcattcctccagaaccttgcagccacaagcagccacagtgtccaagtgaagatctggatgaagcaagtcagagagatggcttatgacgctgaggactgcattgatgagttccaacaccactttggtggctattgtggtaatggtattgtagggtttatatataggatgaagcatcttatgtacactctgaaggtccgccatcgaattgtcatgcaagtgcaagagcttaaggttcgtgctcgagatgttagtgacaggtatgcgagatatagcggtgctaatgctattgttgatgcctctgactcgaagaataccaccacttcaatctcaacctgtttgtcccttgaccctaggcaagttattggttttatacaggatgatctacttgtgggaatcaacaatcggagggacagggtcctaacatatctaagagtggacagtgatcaagaactaagggtaatatcaatttttggctttggaggattgggcaagactacccttgccaaggcaatatatgatagtccacaggtaaagaatggtcagttccattgtcaagcttttgttaccgtatcccagaaaattgatctaaaggctctattgagagacatgcttgggcagcttattccacctgcttctgatcaacatgtcagctcagacattgaggatgaacatctcaaagctattgaagtatgggatgtgaaaagacttggcgacaaactacgttcattattcttgatgatatttgaatccaaagaattattcttgcggagattgtttggccagttacatgagtgcccacaaaacatacagaaagtttcagaaagcgtcttgaagaaatgcggtggtatgcctctagctatcaatagtatagctgggcttttggcttgtaggcctgttaagagcttagaagaaatgcagaacttacaaaactctcttggatctgagatggattctttctcaaccatggagaaaataaagcagatactactattaagttacaatgatttaccctaccatttgaagacatgcttcttgtattttagtatcttcccagaggactacaagattaaaaggaaaaatgttgtccggcaatgggtggcagagggatttgtatcagacaagcggggacaatctgcggagcaagttgctgagagctattttgcagagtttatcaataggagtatagtccaacctttagatataagtgacagcggaaaggttaagacttgcaggatccatgatataatgttggaggtcattgtagagatgtctgttgaacaaaattttatttcacttatgggggatcaacatacaatgatttcctatgacaaggttcgacgtctttccttacatggccatggtgcatataatctatcaactagcttggaattatcacatatccgatccctaagctcctttggggatatgccaagagctttgcgctttgaccgtgcaagattgctcagagtgttagatctagaaagctgtgaatttctgaggaatcgtcaacatcatcatatttgtgcattgttccatctaaagtacctcagtctaagaagagctcacaacatagataggctcccaagaaaaataaagaaattgcagagcttggaaactctagatttaaggggtaaaggtatagataagttacctgctagtttcattgaactggagaatttggtccatttccgttcaggttctacctacttgccgcatggctttgggagaatgaaaagcatactaacattgggattgatagagatctcagatgacacatcttggaggatacaagaaattggctgcttgatgcaactggagaagctctgcatatggtcacgcgatggcatgaacaaggagaactgggagtccctactcaccgtcattgagaacttaagcaggcgcctcctgtcactctcaattgaaacggacaggagaacttgttctttgccacttgatttctcatcctccccacctcttctcctgcgaagcctcctgttatatggaagtttggaagcattgccaagttggatggcatcgctggataaccttgtgaaattaactcttggtggtactaaattagaggaggatgatatacagattctccagaagctcccacgattgttttctcttagactgtggtttgcatttgccgtagagaagtttgttgttgcgccctga

SEQ ID NO: 32913 - DNA, 1389 bp, Oryza sativa
  Clone ID: PAT_MRT4530_37077C.1
atggcgttcctcaaaaccctgaaccctctcctccgcagaagccccaccccgatcccgaacccccgctccctcctttccctcgacgccttcctcgccgcctcctcccccaccgccgcctcccacgccaccgcgcccgcgcccttcgccgccgcggcgcaccaccacgtccccatccgctcggggggcccgctgttcctctcctcgccgccatggatgctctcccagtccgccacgccgctcaccgccgcggccgccgctctccgcgccaggctccggagggcccgcgcgctcgccggcggcggcgcccaggctgtcgcggacgccgtagggtgggagcccaggcggatctccagagatgagagcgaggtggcggaggcggtgacgggtggaagggagaggttcctgaatctgcccaatctggtgtcgattggacgcatggcgtcggggccggttattggatggatgattgtgaatgaatggtatcttcctgcttttggcacattggctttgtctggtgcaagtgattggttagatggctttttagcgagaaagatgggcatcaattctgtgtttggatcttatctggacccattagctgataagtggaacagttggtcagactttgttaacttagatgcaattcaccgtgagaaggtcaaacctctttttatcagcaaggtgaacacagttttccaattgatgttggttgctgctgctctcctccagccagaatttggcacagaggagactcagaattatattacagtgttgagggcattatggttattttacggcctgcagaccgcgactggaaatgtattcccgaagtggatcctctatgcggtgaagcacaatgttaaagtgcttgatgtggaactggatatgtatgataaaacggccttaccgtctcgcattttcacctgccgttcagttgaggagctaagtttgcagatgggagaagcccctgatgaagatcttgaacacgagctgccggcatgtccagtgtttgagaggctcacaactcttgaaattgcaagaaaaggagcagaaacagatgctatgccaattgatggaatgaccttccaatgtccgttccttgagactgtcataatacaatgttccaagggcgatgatgggatcaacaagctggtgaatgttctggcagcaaatgggattaacccaaagaagatacaggttaatttctatgaagatatcgaagagatggagcgggctgagaacaggcgcatcatagaggagcgggagaaggagctgtgcaacttcgagaagatggcgaagaaaaacccagaatgggtcgacgaaagccgttatgctgacagtaaccctgaaactgatagcgatgagtatgatgatgactacgatgatttctag

SEQ ID NO: 32914 - DNA, 474 bp, Oryza sativa
  Clone ID: PAT_MRT4530_37078C.1
ttagatggctttttagcgagaaagatgggcatcaattctgtgtttggatcttatctggacccattagctgataaggtgttgattggctgtgttgccatagcaatggttgaaaaagacctcttacatcctgggcttgttggcttggttgttgtaagagacttgctccttgtgggtggtgctgtctacaaacgagcttccagtctgggatggaagtggaacagttggtcagactttgttaacttagatgcaattcaccgtgagaaggtcaaacctctttttatcagcaaggtgaacacagttttccaattgatgttggttgctgctgctctcctccagccagaatttggcacagaggagactcagaattatattacagtgttgagctggcttgtagcttctacaacaattgcatccacattgtttgtcaagcatttggagcaagacactgaaggaagaggccagacttctgaatga

SEQ ID NO: 32915 - DNA, 1366 bp, Oryza sativa
  unsure (1)..(1366): unsure at all n locations
  Clone ID: PAT_MRT4530_37079C.1
gcagaggctcaattgctcatccatgtcctgctctgcctctccattcacatctccagcagcgatgagaaaaggaagctgcctttccaatccattaaactagccccattaaccagccagcgagagcagctagcacaagggaacagagcagcaccacgcgtccggggaagcagagtagccgagagcgagcgagagacgcagagaagcgagcagggcggggccatggccatggctcgctgttccttgctaccgatcttggccgccgtcctcttggcggcgtcgctgtcgctgccaccgcgcgctgccgcgtacgccgccatggtggacagcctcctccccgcgtcagcgacggctctctccttcgaggaaggctacacccagctgttcggcgactccaacctcatgctccacggcgacgggaagagagtgcacatctccctcgacgagcggacaggcgccgggttcgcctcgcagggcgcgtaccaccacgggttcttcagcgccagcatcaagcttcccgccgaccacactgccggcgtcgtcgtcgctttctacatgtcgaacggggacgtgtacgagaggacgcacgacgagctggacttcgagttcctggggaacgtgagggggagggagtggagggtgcagaccaacgtgtacggcaacggcagcacggcggccggccgggaggagaggtacggcctctggttcgaccccacccaggacttccaccgctacgccatccgctggagccatgacacgatcatattctacgttgacgagacgccgatcagggaggtggtgaggacggcgtccatgggcgcgcagttcccgtccaagcccatgtcgctgtacgccaccatctgggacggctcgagctgggccacctcgggcggccggtacaaggtgaactacaagtacgcgccctacgtcgccgagttcaccgacctcctgctccacggctgccccgccggctccccgccgccgtgcgagggcgccgccgcctccgcgacgatgccgcccgggcagcggtcggcgatggagaggttccgggcgaggcacatgacgtacgggtactgctacgaccgcgtccggtaccacgcgccgctgccggagtgcagcgtcggcgcggaggccgaggcgttcctcccgtccggcgaggcgaggtcgacggaccgccgcggcggcaggcacggcaagcgccaccggcgcgccggcggcggcgtggattccgcgctctgaccgattctgtgatccgcacagcgccgctcgcgatggtggcgcgcgtgctcgactgtactatcgtgccgtgtgtgatgtcgtacgtgattatngtttcctggtcaaaaaaaaaaaaaaaaaaaaaaaaaaa

SEQ ID NO: 32916 - DNA, 253 bp, Oryza sativa
  Clone ID: PAT_MRT4530_3707C.1
ttctagctgagctacccgtacgaggtgcgacgatccatgaagccaaccagacacctgctccacgcgcgcgcgccgtaagcagttacaaggcccaagatagagcacccactctcccgcgggctggacctactcatagcacgacacgcgcacgcacgctatgtcacgggcggtgagcactgtccgaggcagcgacatccatacagaaagtgactgaggttgcaaacatcctctacagaacaagcttctactacac

SEQ ID NO: 32917 - DNA, 201 bp, Oryza sativa
  Clone ID: PAT_MRT4530_37080C.1
atggtaaaagagcctatagataaccattgcgggtgcgctaaggtagacggctatatcagccaccagagaaacttgaaatcgatcatgtactttccgcactggctgccgatgcgcttcccgatgaactacttcggtctagccatccttgcactctttgccgatccagatgaagagagtacgaaggagatgcgacccccttga

SEQ ID NO: 32918 - DNA, 214 bp, Oryza sativa
  Clone ID: PAT_MRT4530_37081C.1
ctatggccggaagggcggcgccgttgaggagctccggcgccggcggccggcagctggtggtgctcatccttctcctgctcattctgttcctattcacggcgcccatcgtcatggtattcggagaggacccatcggtgaacggcaagtgcaacatccgatggcgaatagcatgcccgccgccggttcctcgaccttgagagatgatcgcgatcac

SEQ ID NO: 32919 - DNA, 775 bp, Oryza sativa
  Clone ID: PAT_MRT4530_37082C.1
gctgcaggaattcggcacgagggcgaccaccgccctccccctcctccacctcctcccccgcctccgccccccccccccccccccccccccccccggccgcgtcccccgcctccggcgcctccctatggcgaccaccgccctccccctcctccacctcctccctcggatcgtatgcgccgccttcttcgcctgcctccccggcctcgtcgccggcatacggaaggacattggtcttgcagcacccatcatgtgcaggagcactgtgcaagggcggcacctgatatcagatgataatggtaggacaccctgcccatctcattttgctcacatatactgcctgaccaaggaaacagatgtgctgaagttgaaggtagctagaccagttacttctggaacttacagaaatgtcttcgatttctgcatgggaagatgccgccatagttctgcaagtgtggtacatgaaaatgcgtatgcaagtgacttccatcattgcttcttgctgcagcagaattcttcaggatcagctgattctggttctggaccaaggctggatggcattaacatcagcataggaaggaggggcgaatcttgtagttctgtgtgcagagcaaaaggacaatcatgtgttccaagcaggctttctgttctgaacaaatgtgagattttgcagaaatatatgagatgcaaaagtggttgtttcagcaatcttggaccagatcaacctgctcaagttgtagatgaggctccaagcaatttggtagtagtagtgctgtaa

SEQ ID NO: 32920 - DNA, 2304 bp, Oryza sativa
  Clone ID: PAT_MRT4530_37083C.1
atggccggcaatgtcatccggcttgaactctctgaggcttctttgggtggccaagttttgcaaggccggatgagtccttccttggcttctctcgagcatcttgagtacctcgacctcagtgctctcgtccttccgggcatcaacagcagtagcccaaagttcttgggttctatgacgaacctgagatatcttgatctctctgggtgttttctctctggtagtgtgtctccttggctcggcaacctttccaaattggagtaccttgatctctctttctcaaccttgtcaggtagggttccacctgagctcggtaacctgacaaggttgaaacatctggaccttggtaacatgcaacatatgtactcggcagatatctcatggattactcatctgcgatccttggagtatcttgacatgagcttggtgaatctgctgaacacaattccatctttggaggttctcaaccttgtgaaattcacacttcctagtacaccccaagcactcgcgcaactaaacctcacgaaactcgtgcagctcgatctctcgtcgaacagattgggccatccaatccaatcatgttggttttggaacctgacgagtatcgaatccctcgagctctctgaaacatttcttcatggtccgtttcctaccgcgctaggaagtttcacggcactccagtggcttgggtttagtgataacggtaatgcagcaacgttgctagcggacatgagaagtctctgttctatgaaaagcttgggtctaggtggtagtctatctcatgggaacatagaggatttggtagacaggttgccacatggtattactagagataaaccagcacaagaagggaattttacaagtttgtcttatcttgatctttctgacaaccatcttgctgggattataccatcagatattgcatataccatccctagcttatgtcaccttgacctttctaggaataatctgactggacctatacccataatagagaactctagcttaagtgagctcatcctccgttccaaccaactaacgggtcaaataccgaaattagatagaaaaattgaagtcatggatatctccataaacttgttgtcagggcctttgcccatagatattgggtctccaaaccttctagcactaattctgtcctctaattatcttatcggtcgaattccagaatcagtttgtgaatcacagtccatgattatcgtggatttgtccaacaattttcttgagggagcctttcccaagtgttttcagatgcaaaggttgattttcctcctcttaagtcacaatagcttctctgctaaactcccatcatttctccgcaactcaaatttgttaagctatgtggatctatcatggaacaaattcagtggaacattgccacaatggattggacatatggtgaacttgcattttctacaccttagccacaacatgttttacggtcatattccaatcaaaatcacaaatcttaaaaatctccactacttcagtttagcagcaaacaatatatctggtgcaataccacggtgtttgtcaaagttaacaatgatgataggaaaacaatcgacaataatagagatcgattggtttcatgcgtattttgacgttgtggatgggtctcttggaagaattttctctgttgtgatgaagcaccaagaacaacaatatggtgatagcattctcgatgtggtgggcatcgacttgtcactcaatagtttaactggtggaataccggatgagatcacttctcttaaaagattgctcagtttaaatttatcatggaatcaattgagcggagaaatcgtagagaagattggggcgatgaattcattggaatcacttgacctctcgcggaacaaattttctggtgaaattcctccaagtttggccaatctggcatatctaagctacttggacttgtcatacaataatcttacaggaagaattccacgaggaagccaactcgataccctctatgccgagaaccctcacatatatgatggaaacaacggtctctatggtcctcccctccaaaggaattgcttgggcagtgaactaccaaagaatagcagccaaatcatgagcaaaaatgtttctgatgagctaatgttctactttggacttgggtccgggtttacagttggtctctgggttgttttctgtgttgtattgttcaagaaaacttggagaattgccttgtttcgcctctttgataggatacacgacaaagtatatgtgtttgtcgccataacctgggccagtattggtagagaggctaccacagattaa

SEQ ID NO: 32921 - DNA, 368 bp, Oryza sativa
  Clone ID: PAT_MRT4530_37084C.1
aagggaaatcagacttggactaaagtccggattgcatactggatggccctcctctaacaagattccccaatggcacacccaaaacaaactaatctataaatgggatcccgaccgggccccgatctttttggttcgcctaatcacgggtacaattggcaatttacacccaaatcggggccaatcccgaatcaggacctcattgcaacaccttgccaaatatggcaaatatcaaatcccgaattcaaaccatttttgtgatagagctcctacatcaacgggaaatgcccagcccccgacaccaattgggggccgactataaaagcccacccccccggggccccggggtcgacccccataaatcccggacc

SEQ ID NO: 32922 - DNA, 346 bp, Oryza sativa
  Clone ID: PAT_MRT4530_37085C.1
agtgttattgtacagttggagcacccaccatcgaacttataaataaaccttagggctcccatgggccaggggatatacatcgaactggaacagttttaccctgtgccattcaaatgctttggcggacggagattggttttatcgcggaaatggaacgcatgcactgtcaagctatccatatagatttaggggacggcgcccaatgggggcgcgggggggatcattcgcattgcccggctccaaatctgataggcatcaccatccagtgactgaaagtggatctatgggcagtaagtctgttccaactcgttcaaacagagtatatccacctaactggtgggagtga

SEQ ID NO: 32923 - DNA, 1772 bp, Oryza sativa
  Clone ID: PAT_MRT4530_37086C.1
ggggtaattttggctggggctgatttctgtgtctcggtcgcttgatcgcatcaggggcccgacgcaggcactgcatctcgcatgttacttatcgcggcgatggaaccgatccattcgagcgtcggctgcgcgtggccttccgccgttccgcgtgcatccaatcggggcagcggtgcgcagttcaattcggaggccactccgacgacgatcccggcccctccgcgtgcggcggagactcgcttggatccattccggctagagtttgcttttgtgcagttggtgacgaaaagttgtagtgcttgatgtttcatgaattctgcatgcagccagtaccatactggtaccaggtaccagataccaggtatcaggtaccgggtaccaggtactaggtgcaggagggggcacacgttcaccaagtgaaatctcaccgctccggagcaagctatcacgacgacgctgagcgccaagatggcggcgaccatgaacactatgagcgagaccctccctgacttcctgatggtgccttgtatcaccaccagcccgacgatcgaagccacgaagcaggtgatggcgtaaaccaacgcggtcacgatcccatcaactcccaggattatgaactgaaccatcgacatcgaggcgcagaaaagaaccataaacatcgtcgtcgacgatgctgtttttgggggcactccaatttgtagtaggacagggttgagaagcaggccgccaccaatgccaaagagcccactcataacgccggtcagcagagcagctaccgggaagacgtaaactggcaaagattccagcttgctcttcactgaaattgcctggtcaaactcctggctgttctgagcgtgtgattttcgcttctggtgcacaatacacgctgtgaaagccacagcgataggaatctgtgctatggtgatgagccagtatgtaactccgcatggctcaatgtcaaatacccccttggcgccctcgcctcctatgaacagatgaatgacaaagaagcaaagccagatggtgacgagcaccatcaagtcaacgcattgacgccgatgaccatctccatccttctggccaagaagcgcttcccccgcgccatcgccaagggagctccctccctccagcatcctcctcgccgcagccgtctcggcgcgccaccgcttcatcccggtgccgtacgtcttgaacgtggcggatgcgaggaacacggcgaagagcgcggtgatgagccactcggggaacatgacgttgcagatcacgccgacgctgacgccgaggaggaggcacggctgcgagaccacggcgatgtcgtagtcgatcagcggctggtggccgcccttctcgtggccgcggagaacaatcagggtgtagagcacgttggacagcgtgccgccggtgaccatgaacgtggagaacgcggtcgccgtcttgaggctgagcccggcgacgatgttgaggatggggacgtacaatgagccgcctccgactcccccggcgctggagaaggccgcggccaagaaggaaaggatgcatgcaagaacagtaccaaggtccatcgatgctagctgctgcaatctccagacgtggacattcctgttgtttacctgtttgtttagatgtttctgcagataaatattccgtgcacagtttccatctgcattcttcagtattaagtagtaactcgtcattagatccaaggcaaagtatgaattgcaaatagatatggcgggcctggtgacgcttcggttactgagcaggtcgtgcat

SEQ ID NO: 32924 - DNA, 440 bp, Oryza sativa
  Clone ID: PAT_MRT4530_37087C.1
gaaaggatcagaccggcgcacgtagggaagggagcttcttagaagggcacccgcggttgcgtggaagcgtgccggtttgtacgttggcacgtgcccttgggggctagcacacctaacgagtgatggatcctatggtggccctatgcgccggtggctatgttaacttgtgacttacaggcaggaagcatgtaatacacatcacggtacctactttgccaatggtgttttaaagcaacagagatgaccaatatggtgaatcaacgggatctgtagaactatgatagataacaataggaatacgcgtatgatggtggtaaaagtaacttttatcacaatggtctaaacccatttcaggttccatatagcagggtgacacaatcgaaaagatagttgaaatcttgttcataatgataagtaatatgcgacatgagaaggatcaa

SEQ ID NO: 32925 - DNA, 743 bp, Oryza sativa
  unsure (1)..(743): unsure at all n locations
  Clone ID: PAT_MRT4530_37088C.1
gcccttgtgacccttcantncttccagaggtaaggcccttcgaganacgttcaatccaaagagggcacataacccgccctcgggcacccgcncaccaggcttggcccgtggaggtcgtgggggctcaaagatactgcacgcagataggaggagtggttcagctgacaaccggttcaacacgcccgtctgtcgtgccgccngtacatcgtacnagcgccgagtatctgtgaaaggcaacgcactggaagcggtactaacctcagccttcaggcctcggccttcaaccataggtcgccaggcaaagggtngtttcaggtatcggcccacactcggcccaccctcaacggagctgccaaattgaatggggtgccctgtagttgggagttgggagaatgggttgctccaaggacaatcgggcttacccccagggtgaaagactcgggcctcccgggcggtggcggcggccgggccgggcgttacctggtcggaatttcggaacccccgcttcattcccgtcccaggattcttggaaggccaaccaaaccgtaacngtaaggaaaggaaaccaaatttctccagccagccgatggttcttgccctccagttggccagaacggaacnnagccggccaaataatccctatgccatataattggntctcctggtaggtaaagtaaattttaatncgcnccatcgatcagctctatgctaaaggantaagnagatataatttggggaaaaaa

SEQ ID NO: 32926 - DNA, 249 bp, Oryza sativa
  Clone ID: PAT_MRT4530_37089C.1
atccgcgcggatccggcgctgggcgcctcctccgccggccttctcgcgggggatctggcgccggcgacgacggagggaggtgggggcggccgatccacgcacgtcgcccatcgctctaggtcgagctcccctctgccatcgagcccactaccgctcccgcccgctgtcgcccaccacgccgccgctgccgcccgccgcgccatgcctagagatggcaatggggacccgatcactgattccccgcggtga

SEQ ID NO: 32927 - DNA, 347 bp, Oryza sativa
  Clone ID: PAT_MRT4530_3708C.1
aggtataccctctacccttcgatatacgtcacatatcgacatggtatgcttgcgcatatgcggacgttttcggcataggttggggaaatccattacggagttcacaaatgtaaggagtcctactcagatagaactgggtcgtcattgtatcgtatcgggtccgatgtctccgagtcctacttggagaccagttaacctatggtataaaagggatcccccgggaggacctaagagatcgaatctcagagccaacgcatccaccacagcctacgaagtcggagcttatcggagccaagtcgccgggatatctagtcggattgactcgactatgatctcgtcggtatcgt

SEQ ID NO: 32928 - DNA, 1074 bp, Oryza sativa
  Clone ID: PAT_MRT4530_37090C.1
atggactccaagctctccatgctcttcttgttgctaggctttgtggcatgttctgccactgctagtcaccatgatccttccgttgtcggatactcgcaggaggatcttgcattgccaaataagcttgttggtctcttcacatcatggtcagtaaaacatagcaagatctatgcaagcccaaaggagaaggtcaagaggtatgagatcttcaagcgaaacctgaggcacattgtggagacgaacaggagaaatggcagctattggctcggcttaaatcattttgctgacattgcacatgaagaattcaaggccagttacctgggactgaagccagggttagcaagaagggatgctcagccacatggttcaacaacattcaggtacgcgaacgccgttaacttgccctgggcagtggactggaggaagaagggagcagtgacaccggtcaagaaccaaggagaatgtggaagttgctgggctttttcaacggtggcagctgttgaggggataaaccagattgtgaccggcaagttggtatcactatcagagcaggaactgatggactgcgacaacaccttcaatcatggctgtcgaggtgggctgatggacttcgccttcgcatacataatggggaaccaggggatctacacagaggaagactacccatacctcatggaagaaggctactgcagagaaaagcagcctcattccaaagtcatcaccataaccggctacgaggatgtcccggcgaacagcgagacaagcctactgaaggcactggctcatcagcctgtcagtgtggggatagcagctgggagcagagactttcagttctacaaaggggggatctttgatggggaatgtggcattcaaccggatcatgcactgacggccgtgggctacggctcgtactacggccaggactacatcatcatgaagaactcgtggggcaagaactggggagagcaagggtatttcaggatcaggaggggcaccggcaagccggagggagtctgtgacatatacaagattgcttcttacccaaccaaaaacgtcactggctggggttcatag

SEQ ID NO: 32929 - DNA, 327 bp, Oryza sativa
  Clone ID: PAT_MRT4530_37091C.1
gcgcatggctgcaaagttggattcccagttctctatgggaagagcttcaaacgtggctgttcatgttgatttgaccaacaaagtaactggacgggtcagcataaaggctaatacatcagagcagttgaagattgccctattaggtgtctgttcaatgacaatgtatttatggaacaggatgcatccttttattgatcgtaattattaatagcactggtgcgttgggaagtgctcggaagcttcagagttcacgctcctactactcagctagggatataagttgaaccatcactttcagtcaagaatcaagacaagtgtagctgggct

SEQ ID NO: 32930 - DNA, 1590 bp, Oryza sativa
  Clone ID: PAT_MRT4530_37092C.1
aagtcttaaaataacagagttacatataagataagtcttaaaatatcacaatgttaatttttatggctttatacaaaaaaaatgaacatatttaaatattgtagcagtttatttgttagctagccttgcccaggcagtttattcagttgaactggtccccaacaaaataaattggctgtctttttaataaaaacccaatagattagtgggcttctgctataccttgtttgcaccaatgtagtataggctcgtctgttagccctttgtactggatgagtgcatgtttattttagtagtgtatagaactccatttacaaactgaatggccattttcttgttaaaatattatattattcggacacaacttgaacaagatttgcatgttcatgtgttctatacggggggttgaatctcgtccgcccggcggtttcgttaattttatcaataccccatcaaaccatgtccatcatgtggccgaagggagtccatcacagcccatcaatgttgtgaatggacatgtcgctaggactgataagcgcttgtcatggatgaaggatgaagacttgagattgatcagtgcttggctgaacaactcaaatgatcctatagaatcgaatttcaagaagaatgataaatattggggcgatgtagctgcagcttacaacagcactacaccaaaaaaccgagctagactagttaagcaagttaaggatcgttttggtaaaattaggaagaaggtcgggaatttttgttgctcttggaaggaggttaattcattatatgctagtggggagtctaatgaagatctgatgaacaaggcacagaaaatatatgagaatgacttcaaggatggtccattcttgtttatgcactgttggaatgaactaaaaaaacaaccaaagtggcatgcatatttggagcagcttgacaagtcaaacaaaaggaaggcagattacaatgatgttatcccccttgatgatgaagaagatataccacgaccaataggagccaaggcatctaaggcgcaacgtagttgcaaagaaaagagcaaggtccaagtttgtacaactgagcttgaggatgacatccgtaagtttatggatgcgcatgcagcaaccaaggaagggcaaaatgaagtgttagagacccaaatacgggtttctattgacaaccatgcagccaaaaagcttagtcgccagacagctatgattgaaacctatcgagacttaatgaacaaagacacaaggaagatgcctgacgatatgagatctgagcttgttcacatgctgaaatgcatgagagaagagatattcaacaaaaatcagtgaggaagatgttctcttgtccaattcatggtgctgaacttcttacagcaaatgatggtagttcaggcaatggtcatatgatgcaatggttcaatgaagagtctctctttgattagatgaagaaatcgttatctatctgttagataacatatttatgtattttgcttaatgtcacattgtttgtgacttttggatttgtaaaccattaagtatgttttgttttatcctctattaccttgtcggttaaaaaaaaaaaaaaaaaaaa

SEQ ID NO: 32931 - DNA, 384 bp, Oryza sativa
  Clone ID: PAT_MRT4530_37093C.1
atggagctccggtggatttcagcttcggggaagtggaggacgatcttcttctcctcctcgcgaacacaacggtggcagcgacgaccgaaggcgaccatagacgacgacgaacggcgcggctgtagatcggaacatgacggcaacccactggttcatagcgaggacggcttccggcgaggtttcggcgcaaggggaacggcggccagggtggagcttgaccttgcggagccgagagaggtggcggcgcaggagagcgacggccgaggcgacgacaaacggcggctggaattggtggcggcggtggagagagaaggtgagcgcggggagagcgtttccggcgacggcggcggacgggacttgaggggatgggtagaggacgattag

SEQ ID NO: 32932 - DNA, 276 bp, Oryza sativa
  Clone ID: PAT_MRT4530_37094C.1
atggccttccctgtaatctgctttgtcaagagcaacatgttcacacagatggtgaagctgtgtgagcaagaaaatctatacacagaaagatcttccattaatgttggagagatcaattactctttctgcaaggctgtggctgttggtcgcctggccgcgttttgcccggacatgcacgtactcctccctgctagcgtcagcatcacccgccttctctccggcatgctccatgctgagttctctctgaggcatttcaccggtttcctcctgcagtag

SEQ ID NO: 32933 - DNA, 269 bp, Oryza sativa
  Clone ID: PAT_MRT4530_37095C.1
ggaataacgggtctagaatgggccagatcggagaagataaaagatcatctagtttacaggagtactaattaatgaattgacagtactctgatcgacaggtaggatcaaacactgaaagcctgcatatatgcaggaacccgatgcaaaaacaagcattgttctgtttcctgctggagcaatgagcagcaatgcatgcataatatatattgccttgatcgccttgatcagcttagcacgcgcgaaacgaattgattaagggaaggctttgg

SEQ ID NO: 32934 - DNA, 691 bp, Oryza sativa
  Clone ID: PAT_MRT4530_37096C.1
tcccgaccctccgggcgtcccgaccctgccggtgccccgttgtccccccgtgccgggagtcccgctgccggaggtgcccggcgtccctctgccgccggtgcccgtccgtcgtcccgcccgtgccttaggtcaactccggcgagccccgtgccgtcgttaattaattactccggccagctgacgtgtacgtggcattgaccgtgtgcgccatgcattggccgccggcgccggcagccatctacagattaattacgtacgtgtgttaagtagtaagtacttcctccgtttcacaatataaatcattctagcatttttcatattcatattgatgttaaagaatctagataaatatatatgtgggaaatgctaaaatgacttacattgtaaaacagagagagtacacaattaagatgacttgcatgtacgttgttacgtcaagttggtatagtatttgtgtaatgaacgtgtgtgtgtgcagaccaggtgcagtatgtgtttgtggcgagtggcgacaaatgcgtcacgctctgtatacgtacgtgtgcaaaagcttaacgtgttgcttaaattatacgtgtcatgttaacaaataaaaaaaaaaaaaaccgttttaattgtgtatatctttgttggcaaattaccacgcatgcatcttagtaaaagtgccccttaaaaaaaaaaaaaaaaaaaa

SEQ ID NO: 32935 - DNA, 665 bp, Oryza sativa
  Clone ID: PAT_MRT4530_37097C.1
gacggtttttcttttgtgacacatatagtgtaggtttacttccagcttcgtcgattaccagacggcaccggcgtcgcgcgagcgagcttgatcttgcgccttgtgcctgctagctgcttcggcggcggcggttatcttcttccggtgattaatcctatatacctactatttgcttgcttaagtgacgcccatatattgcgcgcgattaatcttgatatgtaaagtgttctcgatctgttccgctgctgttcgtcgtctcaggctaaatggacttggaagttttcctggccattctttactcagattgtccggattcattacattttgagtatctggcctgcaagtgctgtttatgaaaatgatcaccctattcggcattttcagatttatgtaatgcaatatttttttgtgtttctaaaatttgccaccttgtgctcaatcaccagctccttccgatcttctaattgcccggccttcattcgaattctctagacacatcttaattgaacttaatttaagctagcgctctgttcactcaaattattttctaatttaagtcgtgttatttctctcctaatcattttatatgttaaacttaataatatttgtcttttgcataaaagtagtaatagttcactaaacacttagctaaacgtcttaaaaac

SEQ ID NO: 32936 - DNA, 216 bp, Oryza sativa
  Clone ID: PAT_MRT4530_37098C.1
atggccatggccatgggtcggagtggccacttcccggccaggccaccatgggcagccagcagcagcagcggcatcgcgcgagaatacatgcaagcgggagcggggcacgcaccagcagtcacccggcgggagccgaccacggccactcgcccaggcgctaggtcagtgcatgcactagcagtaactactagcagtgccacagctacgccgccgtag

SEQ ID NO: 32937 - DNA, 734 bp, Oryza sativa
  Clone ID: PAT_MRT4530_37099C.1
cgggctgcaggaattcggcacgaggcgggtctcttttttcaccttgctcggagcggtggtggggagcggcggcggcggcggtcgggagcggtggacggtggtggggacggcggtagggagcggcggcggcctggctgctctaccgccgccgcctcggctccatcgagttcttcccgcgggacttcgacgctgtggagcagcggaggtcttccaagaagtcgccgtccaagaagccgaccaaatcgccaggggcactcgacgggcatccgccgcgcctcgcaccgacgcggattcgcctcgcctcgttgccgcgtcaacacagatcctcctcgcctcgccacctcgctgacgtggataccttgctgcctcgccgacgtggatccgtcgtgcaagcaccgcccgcgggctcaccacgctgcgccgccgcgccccgacaaggattcgtcgtcggcctcctcgccccgtcgtagacatgcctggaaacgccggccgcgggctcgcctcgatgtcatcgtccgctggccgccgcgccccgatgcgaatcttcgagctcaccgccacatcgtgtggacgattgcgtcttggagagagacggcaattttgcggtccctctctcctcatatgcaaaatgcctcctctgtttgctttgtctgttggaggctgttttgcgttttgccttctctggtggagacaatttaaggcgtgtccacaaggcgttggcggaagcaccgacc

SEQ ID NO: 32938 - DNA, 165 bp, Oryza sativa
  Clone ID: PAT_MRT4530_3709C.1
atgtggcaaggagagagaggaggaaaagaggagggcctcaccgacgatgacagcgaccgacgcggagcggacgacaacgaaggcggcaaggggcatgcagagctcaccggcgaaccgagggaggacggttccggcggtggaagacgacaggggaacgacggctga

SEQ ID NO: 32939 - DNA, 108 bp, Oryza sativa
  Clone ID: PAT_MRT4530_370C.1
atgggccgcaacgtcggggatggtctagcgggcagcaatgagctgagctgcgtcatgcggtccaacaacggcgacgttgggtctggcgtatctagaggtgggcaatga

SEQ ID NO: 32940 - DNA, 188 bp, Oryza sativa
  Clone ID: PAT_MRT4530_37100C.1
atggcaaataatattaggcactggttacccaacaatataactggccacaggaaacctgcaaattcaggggagggaagttttccagccctagttttatttttaggtccctaacatgaacctaagcagcatgacaggccaaagaatcaatggcgaggttaattcgaacgcgtggccgaacgcgtgggcga

SEQ ID NO: 32941 - DNA, 273 bp, Oryza sativa
  Clone ID: PAT_MRT4530_37101C.1
atggcaagattacccgggattgtagtggagaagaagaagaagaagaagaagaaaaggctcggttcctacgcgcaggccgccattcggaagctgaattggttagttttttctatcatcgtgctcctggccgaacgttacggcacggacttcggccactcgccgcagtggagggacggacagggacaagagagcttggtcacgagcggcggccaactctcctcctctgcatcttctgagcacggcgacacgcccagggaggagaatccagagtaa

SEQ ID NO: 32942 - DNA, 1254 bp, Oryza sativa
  Clone ID: PAT_MRT4530_37102C.1
atggcggcggcgtccacgaggaggccgctgcgccgccgtgcgacgaccgtggacgacctcgacgacgctctcctcacgcgcgtcctcgtccgcctcgcgtcgccgcactggttcatccgcgcggccgccacctgcaagcggtggcgccgcatcatcggcgccggcggcggctccccctgccgtgcggtcgagttccaccgccgcggccgcaaccccatcgtcggccactactactaccccggacgcggcagcggcggcgcagtcttcgttccgtcggcctctccctccctccagccccgcgtcgacggccgccacttctccctcggcttcctcccggacagcgattcatggcggctcgtcgacagcagcggcagcctcctcctcctcgccaagaggaagtccggctggatgcgccattgcttcccggacctcgtcgtctgcgagcccctgacgcggcggtaccggctgatccctcgcctggaggagatgaaacaccaccgctgcatcggcgcgttcctgcgccgcgaccactaccaccacgggtacgccggcgtgtccgccgacctcggcaccgccacggcgttcgtcttcggctccgagaggtggccctggccctgcgaccgcccctggagccgctggcgtctcgcgggcagggccaccggcgtgcacatctccggcgcggagtccgtccacttcgtggggcgtgcatcgggcggcttctactggcggatggacgacgacggcgaccgcatgcttgttcatagttgttacacttacagttacagcacgttctcgcgggtggcgcttccggaggcgatgaagggcgcccggcggcgcgacgacggcacgtcgtcggcgttccgggtcgtcgccggcgccgacggcgacgtgcgcattgcctggttgatgagcggcgtcccctcggtcttcgcccgtcgcagggagcagtggtggatggagaagcgcctccagctaccggcgcacacggcgccggagagcttcatcatcgctggtaataatgcggtgatcgccgacgccggagcaggacgcgtcctcctggcgccggcggaggtggacaagcggcggcggcggcggcgggtgatctccatcgagctcgccaccatgaagatcgatgagcccaagcaccacgccggtggtgtagtgacgtatccgtacgagctgccatggccggtgaccttgaacgcgtgtttcttgagcaaatggagccgtaatgaaggatgggggtgcgtttga

SEQ ID NO: 32943 - DNA, 1021 bp, Oryza sativa
  Clone ID: PAT_MRT4530_37103C.1
acatccaacggacgagccaatgaggacgacctaaatccctagtcgggcgattccccaatccccatcaactccgccggggcgccgcccctcccctcctcctctctgcccgtcggctgcgccgccgcaccggccgccgcctcgaccagcggttgacggcggcccaggttcggaaaccattcacgtaccccgcatcggccgcacctcccctcgccgcctcgcgcgtcgcaacttcgccgcgcaagcagtcgaccctgcgatccacaaggctgcatcggccgtcaagaccttcgccgttattttgcttgtcgtctagagacagttattcagacatgcttgaaggaggcaacttttccaaccaggagaccttgtacgaagttctatccgtgaggaaagatgctacatatgatgaaattcgtgcagcatataagtctgctgtactaaatacacatcctgacaaagcacagatggctctcaatccattggtgtcttccagtgagcgaaatgaatttctcagtgtgcaaaaggcatgggaaatcctacgttatcccaaatctagagcagaatatgataagcaactgcaatcttcccgacagaaccttgaaattgttgcaactgaaattgaaattgatgacatgatcgttgaaagtactgctgattctgtggagcttttgtatccttgtaggtgtggtgattatttctcaatcacttcacgtgaacttggtcagattggaatttcagtcagggaggacggagagatggaattgcacacttctgattctgttccatcatctgttgttcttggctgtggctcatgttctcttaaggcacgattggttacaaataaaacttgatggtaattttttttgtttgcatctatcagtatgcttgccagcaaagatcaatataaagatgctacctcctattcttcgaagaattcggcgtgcacatggaacgtacattgctgtttaaaaatgaaattctggaagaatgtacctctgatcatcctcaatgcagtgtgacc

SEQ ID NO: 32944 - DNA, 324 bp, Oryza sativa
  Clone ID: PAT_MRT4530_37104C.1
atgtacctccacctcgccgtgtacgcgtctgtggcgctcgccaccgacggtgttgcatcctcccaccatggcgacgcgcaggcgcagctcggggacgtggtggctgcgctcgccgcgtcgcgcgccgcacgcagcgccgccgcaacctcggtcagccgccgcacgcggctgcggccggcggccttggtcgaggaaccccacggcccctccaccatcctcacgacctcatccccacgcaccactggcgccggcttgctcgagttcgccgcggactggactgaggaggagaccgacgccgctggcgagttttggacgtgcggatag

SEQ ID NO: 32945 - DNA, 247 bp, Oryza sativa
  Clone ID: PAT_MRT4530_37105C.1
acaaactactctttgttattcgatctactccaagaacgggaatccatgcaaaataactgcaccctaggggctcaaaatacaaaacccttgtgaatagagttctgatgcaaaaaatgaatcccaaaactctttttgaggggggttcaagtcaaaatcagggaaggggccaaaccttttaactgcccaagcatacaaggaacaaccgactgtcccccccgttttaactatccccccttccaaaacggtc

SEQ ID NO: 32946 - DNA, 1463 bp, Oryza sativa
  Clone ID: PAT_MRT4530_37106C.1
ggctgaaactggtgcagtgggcacctctcatcccctcccagttccacattttgaagaaaaaatatatcttcatcggtcttgggctaaattattcaaggttgtatatggtggttagaacccaattctggattagttcttggggaattccctaatttggccatggtttggttcccattattgacaccaccaccaccacaggaattttcagctcagcctggcactgttggagagtagtagcagcatcagcatgagctaagttgtcaccaaagatccaaatttttgctgtgttgcttggttcttgaaggcaactattcatttaattggcttctgcttctgagttctgagttctgaataattggatggacatggattgcttgctcccctttcttccatgaaagtgcaggtgaggtttagctagctagctctggtgccaagaacaagctgaagaacaaagaagaggttgtcaagctgaagctgagaggagaaaagagagatagagagagatggaaggtgatagcttctcagggatggccaatggcggccaggtggacaacaagctgatccagacattccacaagagcttcgttcaggttcagagcatcctggaccagaaccggatgctcatcaacgagatcaaccagaaccacgagtcccgggcgccggacaacctcacccggaacgtcggcctcatccgggagctcaacaacaacatccgccgtgtcgtcggcctctacgccgacctctcggcgtcgttcgcccgcacgatggatgcctcgtcggagggcgattcgtcagggacgctccgctcctccgacggggcaggccggaccggccagaagcgtgtccggcccggctaggatcaggtgccattcttggcattttgatgctcagatcaagtagggtggatgaagatgaagatgaagatgatggtgatgatgccattgtcacttcttggggacttctctagtggtgttactattaggcttagttactcttaatttctttcttgacctcttcatcatcttctctacaaatgcttttgcacgagtgtatcattagggagaagcaaaaccttttactatgtagaagaagttgctatgatgatgagagaaaacggcaatgtagtagttcttgaccatctctgctcatggttgtcagccttactgatactagcattcagttgtttgattcctgactagattcaggttgttgtacatgagagcatatgcagatgcagtgttgcatctctgcaggtgtgccagattggtcagttcatcatctctctcactggatagatttcaatgtctcactggatagatttcaatgtcattcagttcttatatccttaacactttgtctaatactatttcttaagctgctttctgatgcattttgcaaaaaaaaaaaaaaaaaactcgagactattctctctctctctccctcgtgccgattcctgcagcccg

SEQ ID NO: 32947 - DNA, 381 bp, Oryza sativa
  Clone ID: PAT_MRT4530_37107C.1
atggagtgctgctcacgatccgtcatccatgttaccacaagaccttcaatcatgggaggggacgttggaggcaatggcagtggtgatttgggagtagaggaggacaacgacggtcctgacgaaccacgagatgccgagcagcggaacaagatttggagcacagcaaaccggttcaacaaactgtcggacaacatatttgatggcatatcaccaataagggacaacaacgatgctggtgctttggaggaaatggggatggcgatgggcggggcggtggatcctgcacctccactgccatcccttgcctttccttcaccagcatcgctcctgagactgggacgagtggatcctctccccttgaagcctttactattgtcgtag

SEQ ID NO: 32948 - DNA, 516 bp, Oryza sativa
  Clone ID: PAT_MRT4530_37108C.1
atgacgtggggtctgctggtcagtgtctcagcaagagagcaagggcagcagcagagcagcggcgactcggcgagtttctcgccggcgccggcgatgaacggcagccgttctcgcggtgcgaccaaaagagaaaacattcctaagcttcttgcgcatctattcgtagtggtttcatggtcggaggtgaccggaatcgatggtgacagtggtgtgagcggcggtggttctcggggtgacggcatgcacaagggtggtgaggtcaaggagatggtgtctgcgcgaggaatcgaacaatggctcaccggggcagcggtaatcgatgatgacggcggaggcgattctagatcggcgccggggaagaaaagatgtgttctccagagccggccggcgctcgttctctccctctcagtttttcttggtcggctgagggtgagggacagaggaagggcgagctggagaggctgccaggtggggccaagtcgatggaagctaggcttgggagagaggtatgggtag

SEQ ID NO: 32949 - DNA, 1614 bp, Oryza sativa
  Clone ID: PAT_MRT4530_37109C.1
cactcgcaaaccacatttgtattcacattaccagaccaaagccatcaaccgttatttacagatgatcatctctacccttatgtgtagctgtatgtaacccagatgctgggagcagcacttccagaggtaggagtaagactgaatgtgacacatcttaatactataaatctggccaagctcgaagctgccacgggttcaaccctgcagccaccacctccttgccgttgctcgcggagatacccaagcaaagtttcagccttgtgcttggcacgggcagagccggactgcgagagcgcgacaagcggtgggatggcgccctcacggacaagaagcgcgcggttgcgggggcactcggagcagagctgcagcagcgccaccacggcgaactccctctccctcgccgggccgtcctcgatggtctcgacaagcgccggtatcccgccagcctccaccacggcgtcgcggccctcgacgatgcccgcgaggctggcgaggaccaccattgccttctccgacgtcccgctgccacgctcgccgacgaggtggatgagcggcacgacggcgccggcgctgaccgcgcgctccttgttccggcgcgccgagcagagccggtagagcgtggtgagcgcgtccttcttgccgcgggtggagcccgcggagagcagcgcgacgaggggagggatggcgccgcacgcgccgatggtggcgcggttctcctcgatgcccgagaggctgagcagcgcgcacgcggcgttctgcttggccgacgcggtgcccgtccgcagcgcgtacacgagcggcttgatggcccccgccgccgtgatggccgaccggttccgctcctcgagcgagaggttgagcagcgccgtcaccgcgctctcctgcgccaccgggtcggtgctccgcagcagcggcaccagcgccgggatggcgccggacacgccgatcagctcgcggatgtccgacctgtgcttcgccagcagccttatcctcgccgccgcggtgcgccgcgcgtctggcgcggcgtcgggccccagcgcccgcacgcacgccagcacgaacggctccacgcgctccagcggcgccgcctcgacggacagatccatcgactcaagctcattcagatccacggcgcccacctgcggcgcgtcggatctgggcgtcaccaccgccgccgccgccgccgcgagccgctcgagctcgccggagatatccgagttgaagctcgagtagtcactgaagtcccgcgagagctcgagcatctccgtggccgccgcgttggccgacgacgacttggccaccgccgcggggtgcgcgggccccgcggtggccgccagctcgctgagatggaaatcaatcacggagtccgtcaagttctccatgtccgagtccgcccccgccgcgtcgtacgcggccgccacatgcggcgagcccgggcaggagtccggctgcagcagcgccgaccggatggtccgcatggagtaccccgcgccgcggcgctgcgaccgcgccgccgcgcacggactctgccccggcgacgggatctgggagccggctagcgacaccatggcaggcaagggctaggagacaccgccagttgccgcaaagcgcgag

SEQ ID NO: 32950 - DNA, 154 bp, Oryza sativa
  Clone ID: PAT_MRT4530_3710C.1
gtcttttcaaccactagctgataggatcttatcggagaatttcacattcttgggatgcttatgatcctgatacgtaccaagatactgacgctaatgggccgcctcatctcgtgcccaggtagtgctatcccacattgacgtatgagaactacac

SEQ ID NO: 32951 - DNA, 624 bp, Oryza sativa
  Clone ID: PAT_MRT4530_37110C.1
tggacgggtccggcgtttttaatgcaccggttagatggtcctgttaataactcctgtactttgccgtgcatgttcggcttgtctgataatgaatctggtccgggctcctaattgaagcttgaactaatgctttcatctgatcatggcattgacaatgccttctgatcttaatactggggaacagtgcatttctgttgttagtttatatgctagggtgttggtgcttttaagatcaaatggattttgaatagtggcctaaaaagacacatttttgcatcgcataattctagcgaaccttggctttttgtctatgctttttagactagtgttgaataaaccatgattcatatggttgtggttgtttaaccaaataatccgacgatgatggctagctgcttcacggtcggttttaggatgaccattcattcggcatctgcttgtcttccattagaattttaaactcaaaactacggccaatcattttggcctacacgtcctggccattaggatgcaataatgtcccaaaaagaactgacccaataatgaggtctgaagtctgaacctgtcacgcttgattttatcggtgcagagacgttggagcctgacgtgaagatcatgagcctg

SEQ ID NO: 32952 - DNA, 303 bp, Oryza sativa
  Clone ID: PAT_MRT4530_37111C.1
atgaccttaattcagtggatgctggaggagcaatcggcgaatcgaggccgccgttcgcagatgcctcgacgtcaccggagcagcatgggggttgattcgtgttgccgtgaatcacgtggaaaggtggcgctgctgccgaccaccgccggtgccccaccccaccccaccgccgtgccgccgccgcaccacccctcccccaaccccaccgtcgtgccgcagcagagagttgagtttggggatggatttggggatggatcccttctgaatcggagaagatgtgctgtgggacaatttgggggctga

SEQ ID NO: 32953 - DNA, 309 bp, Oryza sativa
  Clone ID: PAT_MRT4530_37112C.1
atggagatgacgccgacaaggactaggacggagacggcactgacgaggaccaggatggagccggcgccgatgggttggggtagttgcgctgcgcaggggaagcggctctgggaggaggagcggctcggctggggagagaagagctggcgccgtgacctagcttgtggaggcggcggcgggacgccagagtggctggcgccgtcattcaacgggacggcgccagcctctctggcgccgtcctcctgccaccgtggcgcacgcgaaccgacgtggcaggaggaggcgccagctatgctggcgctgccctag

SEQ ID NO: 32954 - DNA, 195 bp, Oryza sativa
  Clone ID: PAT_MRT4530_37113C.1
ccgtcgaccactgcgagttgtggctctgattggatggcctgttgtgctgtgtgatgtgcaatgaggatgccccgtgatgtgtcccagaacctgtagatgatgatacgcactgtggcacaacaatgcgcttttaactgtgacatctgccagaagaataactaagacgacctgttccaaaaaaaaaaaaaaaaaaaa

SEQ ID NO: 32955 - DNA, 2046 bp, Oryza sativa
  Clone ID: PAT_MRT4530_37114C.1
tcaggcgttccagagcggcgagtgcgtcctgagccgtggcgagccggtcagctagatcggtgtcactgcgctgctcgcgcgacgccagcgccttctccctaacctccagctcggacgcccgcgctgccatcgctgcgcgctcggcccgggcgccttccaggtggcgagcctcgcggccgtatttccctgagcctagtaaggtggggtagtaagggaaactaataatgatgataaacaatgatatgcaattgcaagtgggcagataaaggaacaaatacccttggcttcaaaccaaaattttccacgtgagaaataattccatcgatactccaatctgacagtgttgaaattggtgaggttaaaggaaacaacatttcaacaatgtcccttctgccatgattagcggcaacttcaattggagtcgtattgaactgttcatctggaatgtttggattagcaccagcatctagtaagcacttcatgatgacagaagagccatgatttgctgcaaccattacacaagtaacgccattggagtctctaaaattcatgtcagcaccaactttgattaatagcttcacgcattccaatgatccagaaactatggacataatcaacggggtaccatcaagattgaaaaccctgttaggatcagcatgatgctccaataagatcttcatcgtgctatgttggccactaatcgcagctgccagcaatggggtcccagcgatagaatataaatccacatcaactccttttgaaagaaacaactctactatttcgcagtgtcctttcactgcagcaccatgaagaggtaacactattttatcaatcgcaggattggaaccatgatcgagaagatatcttgtagcagcagctctcccatgaattgaagacaggaacagtggtgtttgacctgccaagaaaaacatgactggttgacgccgaggcagaggtcctccacgaggtacctgaggacgtccacgctccctccagaggccgccatgtgcagagcgcggtgcccgaagccgctgccctccaccgccgccacgacagccgcctcgccctgcccggtgtccagccctcgcgccatctcccctcccaccacccaatcccccacccaatccctttccttctccggatccgcagtagacgagaaaaatggcgccccccaatcgccccgtcgttgtgcccctcctctctctctctctctctcgcacacccccaccccgccgccgcctccgcctccgtacccctacgccgtgccatcgcgcctccaccactcgtcgcgccctccacacgccgccgcatcagcgcacgcgtcttccccctctctcggtcgctccctccgcatctcccctcctcaacccctcgatccacgtcgccgcagccccctccctcggtcgctccctccgctttcctcccccgcatcgctcgcgctcgctatccaaccgccgacgccactcctcccacctcttcgccgcgccccgccacgcctccaccgccggcgcccccatcgccacgctgcgctactccgcggtgctcgggattgaggccgccgtgctcgttggcacagctcgggactccacctcgtcgccgatcccgccctcttccactggagctccctcgctagcccgatgcaactacataaatgcaaataaatgcaagctgcagaggaagcaatttccggttagattgagctttgcattgaccatcaataaggcgcagagtcaaacaattccaaatgcaggcgtctacttaccggagcctgtcttctctcatgtagtaaacattactttcggtgggattttggcaaggcctatatacaccattacagactatgacaaaggaaatttggatgcaggcatgtcacaaactgatttcatcattatggaatctgcagaaattccaggctttggtggtactagctggactgaccaggagaccttgcttcttttggaagctttagtaattttgcaagcaaaatggggtgacattgcagagcatgttgatacaaaaaccaaagcacaatgcatgctgcactga

SEQ ID NO: 32956 - DNA, 318 bp, Oryza sativa
  Clone ID: PAT_MRT4530_37115C.1
gagctcgttttgtatagagaaaatgtcatagtgaaattcagtgtacaaattatcagttgctcgttccaagggagcttttgtatatactagttggctaaattgtagatcaggtttgctcccaggaacgcacacacagttgtgacagaccttgttacttgtcctacactttcgacgcccttagcgctggcggcatgaagtgatcacaggtgaagtgtaacaaccaaggattcagtgaaaaattggtgtactggactgagctgagcaactttggcatggaccatacattttactgttcgcacatcaaaaaaaaaaaaaaaa

SEQ ID NO: 32957 - DNA, 309 bp, Oryza sativa
  Clone ID: PAT_MRT4530_37116C.1
aaaaacaaacatctttacttgatagcatacattttttatattgtcgacacatacataaaatatgctttagatacatatattgtgtatatatagccggcactatatattgacatatcctcaccaaacgatatttgtatgtctaatacaataaaacctatccaaagagggtgggatgagattatttcatatatgttaagagcacttgtcatacatatggtacatatccaacctgtaaaattaaaatatatcgcatattatctttcgatatatcatcaacatagtcctaaacaaagcttcatactattatta

SEQ ID NO: 32958 - DNA, 381 bp, Oryza sativa
  Clone ID: PAT_MRT4530_37117C.1
ggactaacaaacatggtgatgatattttcgtggatacggactgtattctacaaggttgaagagtcagcccctagactctacaatacatgggtgacacagtccactatgaggaactaaaaaatcgatgcatgcccacgcaagcgtgggcgcaggcgcaagaaccggacatgagtaccagatcgagaaagggataggaagaccttaagtaggcttacaacccgactgggaggagctcgcgctggactttggctcaaattagcttacgggggaacgttctaattgtggacatggccatctttaccagatccttgcagtgctggatcttcttctgccactacggccgcgcgtgggcgcaggatcccttgaaccgctgacccctct

SEQ ID NO: 32959 - DNA, 315 bp, Oryza sativa
  Clone ID: PAT_MRT4530_37118C.1
atgggcacgcgcgtgcggcggcggtggcgggacggcacgctgcggccaccgagctgccgagcaatatcaaggcgctaccgcagtccaagacccaggtcgcgggaggacgacacggaccgcgtggacgagcagcggctccgcgtgctcgccgccggcgcgtcgccgggggacgactggagcgtggagggcctgcggcacacggcgtccaagatcgccacgctgcggatgaagctggaggaggacgaccacgacggcgccggtgatgacgacgaggagttcgtgcggaggcagcaggccgggctggtgcaaggatag

SEQ ID NO: 32960 - DNA, 1764 bp, Oryza sativa
  Clone ID: PAT_MRT4530_37119C.1
atggatggtacatctgagcctttatccacccttgtcgagaatgaagtagaacccatatgtgttgtgcctcctgacaactctgctcccatcattggttctgaacagcccgctcccaatgttgaaggtgttgaaaagcctgcaatagaggaagaacctgttagagaaccagacatatttgacaatgaggaagaatatgtgggtgtcgatgatgagcatttgtatgttccctcacaacctaaaaagcctccacagtttgctgaacccgatggaaacactggcactggtcagtcttctcagcctcctgttgcaggggtgagagctcctgaggaaaaagcaataaggcactatgcagttaaaaaaggttttgtgtttgctggtttgaagacagatccaacacgttttctagcccattgtgctgctgaagggtgtccttggcgtgttcatgcatcaaagctacctgggaccaaagtcatacagatcaaagttcttccctttgagcacacatgtgcatctaccaaattgcaagaaaacaagatggcaactcaaggttgggttgcagacaggattggggattgggtcaagaaaaacccaaaaaagggagctagtgatgcaaggcacaagcttgaagaagattttcagataaagttgaagtattcgaaggcatggtctgggttcaagccctatgttggtgttgattcaacaagattgacaggtaaatatactggtcaactagctgctgccactagtgtagatggacataattggttgttctatgtatcctattcaatttttgactctgaaactgatgaaaattggttatggttcatgagacacctcaataaggccatagataatccagagggcctagttatatcaacagatgcttgtaagggtttggaaaaagctgttgatgctgcatttgaaaaagttgagcacagagaatgcatgaggcatctctatgctaacttcatgaagaagtttcaaggtcctgccttcactgatcacctgtatccaactgcaagaagttatactgaggatggatttaggtggtacatgcaacaaatataccaagtgaggtctgatgcaatagagtatcttgagaagcatcactcaaggatttggtacagatgtggcttttctgagtctagcaagtgtgactacctcacaaacaatgtttctgaaagtttcaataaccagatcaagaagcttaaaggtctgttgttgcatgaacttgtggatgggatcagggagatgatcatggagaagatggccctcaggagagaagttggtaaaaagcttgtggatggcatcctgccaaatgtaatgaaagaattgaatgatgcaactgtctgtctcagggtggtaaaggttgttagaagcgatgaaggtttcgcagaagtgacacttgttgagtctgacaacaacactagaaggcacacagttgatttacagaaccaaaactgctcatgtaggatatgcaaacttgctgagccagttcatcaagatgagcaaacaatccagccaacaaccaaaaaaaggaagagacaagtggctgaagctgcaggtcaggccgaagctgcaccagtcaagaagaaaaaccctcctaagaagaaaggagtgcctggagctgcagctgaagcaagttcatctgcacctgtcaagaagaaaaatactcctaagaagaagaaaactccccagaagaggaagaatcttgttgcttctactgctccacccgctagagtagttagaaaattatcagactag

SEQ ID NO: 32961 - DNA, 414 bp, Oryza sativa
  Clone ID: PAT_MRT4530_3711C.1
aaaaaataaaaaacacctttttttttttttatatcccccaaagtttcacatgtcacatatgatgatatctgaccttatttttaacttccaaccccctttcctgttaaaactcattacaaaacccccccaaggggggaaatggtcctgggtcccccatattccctagggtaaatcccatatttaaatggcccgttaaaacccaacaaagcttgaccttgacccaaattccgatcaaagtagagacccccaacctgctggagttgaacctgctgccctatgccctgaacaatgttaatgccctgatagggaaattgttgccccaccagcccgagctgttgccaaacttggttgtttttcaattgaaacccaccttattgcaaaaaggggcttgcccttatgccatactgttgcctt

SEQ ID NO: 32962 - DNA, 426 bp, Oryza sativa
  Clone ID: PAT_MRT4530_37120C.1
atggccctcccagcggtcgcgccttctcgtcggcttcgtcgtcgtcctcctcccggtgtcctccactcctcccaggcgaggatccgcgccacctccgccagcgacagcaccaccttcttcttcgccgtcgactacgtcttcttcgtcatcaccgccgacgtcggatcctccgtctcgccgccggcttccttgtggcaggtgactgacaccgccggcgatcgcctccgacgagccctcctcggtggaaccggcgaggacgcgagactacgaagatatataggcagtgcacgcctctcctctcctctcatccccaccccgtcgagccgccgttgtactgagcgctacctcttcgccaacgccaccgcacatcggctcgccagccgccacaacaatgcggtgctcgatcatgatgaaggcagcggttaa

SEQ ID NO: 32963 - DNA, 810 bp, Oryza sativa
  Clone ID: PAT_MRT4530_37121C.1
atggtttcacttcaccgggtcggatcaccacgaaaacgcgagcacgtacacggtacgtccaccgcgaaaggacggcacacacacacactgctcccgtccacacggcccacaaccaccaccacacacgacgccgcgcgcgcatggggtcgacgtttcaaatcaaatcagcgtcgtcgtcgtcgtcatcatcatcatcgcctcacctcgcctcgcctccaccccgaccgatatgatatgatacatcgtactgtacgtacctccccttactacgtgtccccggacctcaccgtgcaacgtcgcacctccccaccacagaacacgtacaccacccgcgcaaccaccgtgtcgcgcacgggaatctcgccggctcgatcgatcgccacccacccgctccctccccgagtccgagtcccctcgcgtcgtcgtgtgttcgtgttgcacgagagggcgggctactacggggattgtgtgccggttgggtgcgagagcgcccgcaataatgcgttcgttgcgtgcgcgcgcgcgggggcgcccacacgacacgacgaccccaacaccggcgtacgtagtgcgtggcgtccctccggccccgtcgtccgtctcccctcctcctgcccgatggcgacgcggcgcgaccgaacgagggggggacgactcgtctcacgactgctcaccaacagcgcgcgccctccgcgcgatcgcatactgtttcgtccccccgtctcgcgcgattgcttgtgtcgggcgaaacgcatggcaattgggaaaaacggaggaggcgacgaccatgatgacggcgacgatgaatga

SEQ ID NO: 32964 - DNA, 563 bp, Oryza sativa
  Clone ID: PAT_MRT4530_37122C.1
agacaaaatctagatcatttgggaacacatccatacaggtgactgcatgccaggattctggaagtaaacagcaaaagctcctagtatgtgtttgtcaagtcccattcttgatactgagctcaagtaatatttgttagaatatgagttctcacaagtgctgtccagaaggaactattgctctgaaatgtttgtcagatttcaaggctggactttggagcaaacgaatgagctggcagcggcatgtactcccaaagtcaccactatacggactgttgtacattttacccaactttttactcatgtttacatgctgtggaaatgtagatctatcagattattcttgattgtcaggacaagctggacggattgtatacattactgactaccctgtgcatgtgtttgacctcatgtcccatgttgtgaacatggtgacagagtgtggtttgtgattgtaaacatgctgatcaaagcattctggcgttccatatgttttaagattatcaggccagttgcatggcgaaatgatgtttgtttggtgctaaaaaaaaaaaaaaaaaaaaaaa

SEQ ID NO: 32965 - DNA, 351 bp, Oryza sativa
  Clone ID: PAT_MRT4530_37123C.1
atggccaagaactatcccttcacggaccatgaaatggcacttttcccaattgagtaccagacaatgatcgaaggtatttccatagacagagaagtcatccatgaagacttccataatgtcctcgatcatgtccgagaaaatagtcatcatacacctttgaaaagatgcaggagcgttgcacagtccgaaggatatcctacgataagcataggtaccgtatggacatgtgaacgtagtcttactttggtcctctggatggatgggaatttgatgatacccggaatacccattaaggaaatagaaaaaagaatgatttgccagccgttccaaaatttcatcaatgaagggtag

SEQ ID NO: 32966 - DNA, 273 bp, Oryza sativa
  Clone ID: PAT_MRT4530_37124C.1
gcacgagggggcgccatcgcgcactgcaagagcacaatgggcggcgccgtgaccatgtgctcgcgcaaggcggcggcggcggcggcggcggccgccgacgagatctgcgcgttctgagcgcacgtaggattcgggcggggacgaagctaagtaaggcggtttaatcgatagcattatgtgttaattttatgtgttttgttaattaattttgtgtcctcctggtaagactattaagtatgattatggtggtaaataagggtagtttcaaggggt

SEQ ID NO: 32967 - DNA, 561 bp, Oryza sativa
  Clone ID: PAT_MRT4530_37125C.1
atggcaaccggcggcgacgcgcacggtcgccggcgacggcaatcggcggcgcgggaagcgacggcggacggggtacaggacggcggcgtcgaccgttttaacgctgaaactgaaggcgaggatcttgacaatgaggttgatgatggggttgatgatgaggatggagaagttgccaatgtaattggtgcaggttcggtgaagattatcaagttctctgtcttggagacgccacacactggtgtagtgattttcaatgctgttctcaaatgcattcaagagtggaacttggaaaacaaactatttgcaataacattggacaatgttagcaactatggttcgatggcaaagtttcactttggccctgcctttgggaaacgtgctaaacctaggcttgaaagattaaagacaaccctcgagggcatgttcaatgaatatgctcagcaaacgatcaaccttggttctgcgcaacaatggggtggtaatgttgagataggtagttgtgatgaattggcttattgggatcaacacgtgaaactgatcactaatggccgtcaacagtga

SEQ ID NO: 32968 - DNA, 257 bp, Oryza sativa
  Clone ID: PAT_MRT4530_37126C.1
cagtgaactccgcccaagtgattggttgtccttctgctctgttcatccggaaatgataattctagagaaggaagaaaggaaaaattttcacaaatcatttttgtcgaaaaaattcgtccttaaagtttgaccatttggcttatcctacagtcgagatggctctgataccaacttgtcacgcccggaaattcactagtaatttccgaacttatttgtgcataaaatcctcgtccaggaatcagccgaggtacacaaac

SEQ ID NO: 32969 - DNA, 7275 bp, Oryza sativa
  Clone ID: PAT_MRT4530_37127C.1
atgcaggcttctatgttaaacattgttataggctctcatgtctgggtggaagataaagattcagcttgggttgatggtgaggtcttccggattgatggtaaaaatgcccatgttcgcacaaccaagggaaagacggttattgcaaatgtatcagatatacatcctaaagacacagaagcaccacctgatggagtcgatgacatgacaaggttatcatacttgcacgagcctggtgttttagataatctggctgtcagatatgcaagaaatctaatctatacctataccggcaatatcctgattgccataaatccgttccaaaggctgcctaatcttgttgatgtccgaactatggaaaaatacaaaggtgcaaaccttggggatctagatcctcatgtatttgcaatagctgatgtctcttacaggcaaatgatgaatgaaggaaggaacaattccattttggtcagtggtgaaagtggagctggtaagactgaaacgacgaaactgctgatgagatatcttgcatatttgggtgggcggtctggaacaggaggaaggacggttgaacagcaggttttagaatcaaacccagtccttgaagcttttgggaatgcaaaaactgttcggaacaacaattcaagtcgatttggtaagttcgttgaaatccaatttgacaagagtgggaagatatctggcgctgctattagaacttacttgcttgagagatctcgagtctgccaaatcaatagtccagagcgaaactaccattgcttttacttcctctgtgctgcgccaccagaggatataaaaaggtataagctgggggatccatcttcatttcattacctcaatcagtcgtcttgcattagagttgatggtatcaacgatgctgaagagtatcttgtaactagaaatgctatggatacagttggcatcattgagcaagaacaggaagctatattccgggttgttgctgctgtgctgcatcttggaaatattaattttgcaaaggggagtgaggtagattcatctgttataaaggatgacaaatctagattccatcttaatacagccgcagagctcttgatgtgtgactgcaagaagttggagaatgccttgataaaaagggaaataaatacaccagaaggagtgattactactacagttggtcctagttctgctactgttagcagggatggcttagcaaaacaaatatactctcgattatttgactggcttgtaaatagaattaatgcatcgattgggcaagacccaaattcggacaaattgattggggtacttgacatatatggctttgaaagttttaaaactaacagttttgagcaattatgtatcaatttcacaaatgaaaaacttcagcaacattttaaccagaatgtattcaaaatggagcaggaggagtatacaagggagcagattaactggagttacatagagtttgtagataaccaagatgtacttgatttgatcgagaagaaaccaggtggcattattgcacttcttgatgaagcttgcatgttcccaaagtcgacacacgagacattttcccagaagctgtacgaaaagttcaagaatcacaaaagatttaccaaaccaaaactttctcgtactgcgtttactatccaacattatgctggagatgtgatatatcaatctgatcattttctggacaaaaacaaagattacgtggtagcagagcatcaggaattactgaatgcttccagatgctcttttgtgtctgcattgttccccccggcatcagaagagaacacaaaatcatcaaagtcctcaattgccactcgctttaaggtgcaacttcatgaactgatggagacgttgagctctacagagcctcattacattagatgtgtaaaaccaaatagtgttcttaaacctgctatatttgagaacacgaatgttctgcagcaacttcgatgttcgggtgttcttgaagcgattagaatcagctgtgctggatatcccacaaggaaattatttcatgattttcttcatcgctttcgcattcttgcttctgaaattgtgaaagagaaaaatgatgaaaaggtcacctgccaaaaggttttggataaaatggggctgcagggttaccagattggaagaaccaaagtattcctgagagctggtcagatggctgaattagatgctagaagaacagaggtgcggaataatgcagcaagaggtgttcagggtcagtttcgtactcatgttgctcgtgagcagttcctgatactgcgtaatgcatctgtttgcttgcaatcctttgttagagcaagattggcttgtaaactgcatgaatgcctgagacgagaagcagcagcaataaaaattcagaaaaatatccgctgttattttgcatggagaacttattctcaactgcgtttgtcagccattacattgcagacagggttaagaaccatggcagctctcaaggaattcatgtttagaaagcaaaacaaggctactacccatatccagatggacatcaagctcctggttacccagtggcgttgccacagagataactctaactatctaaaactgaagagagcagcattgacttatcaatgtgcttggagaagaagggttgccagaagggagctgagacagctcagaatgacagatctggagaagtccaaagtagcagaagtttctaaattgcaggccgctcttaatgaaatggaacagcgaatgcaagacgtcacagcaatgcaggaaagagaatcagctaaaaaggctgttgaggaagctcttgagcaagaaagagaaaagatcagttcattgacttctgaaatcgaaggactcaaggcgcttctagtagcagaacaagaggaaaatgatttaactaagaaagcacatgctaatgctcaagaaagaaatgaagaattgagcaaggaagtcgaggatgcagatggaaaaatcaagcagcttagcgatactgtgcagagactagaggagactatacaagaaagggaggcccttttgctagcagaaagacaggaaaaggaagaagctagtgccgtaatagctgaatctcaagcaagaaatgaagcatttgcaagcaagcttgaagatgctgagaaacaaatcgatctgcttcaggaaacagttcaaagatttgaggaggccattacaaaattacaatcttcagtgactattgaaaagcaacaacatgaggaaactgtggtacaattagctgaagcacaagctaaaattgatgaacttctgagagaagctggggatactgatgaaaaatctactcaacttgagactactatacaaaggcttgaagaaagtttaacagagaaggatgctttattgactacagaaaggcaagaaactgaagcaactaagaaattactaagcgaagcacagtataaaaatgaggaactactcaaaaaaattgaagatgctgataaaagcattgctcactatcacgacaccacccaaagacttgaggaaaatgtgacagcagtagagaattcattgaaagctgagagacagcataatggtgcaatcatgaaacaactagctgatgctcaggtagaaattggggagctacaaagaaaccttgaagatgctgataggagaaacaatcagcttcaagattctttacagagacttgtcgaagatgctaccacaagtgaggctttattggtagctgaaaggcaagaaaatgaagtgaccaaaaaaacactaactgaagctctggatcaaattgaggaattagttaaggaggtcgagtgtgctaaaaacagtgtgtatcagcttcaagataacatccaaagacttgaacaaaatgcatctgcaagagaggcagatctgctaacagagcgtcaggaaaaggagacaacatccaaagcactagcagaggcgcaagcaaagattgaaggattactggaggaaatttcttctgctaataaaaaaaccgacctacttcaaaaaactatagaaaggttagaagagggggcaacaacaacagatgctctctacttaacagaaagacaagagcatgatcaaaccaagaaagcattttctgaagctcaagaaataaatcaacaattatataggaaaattgaagaagctgagaaaaacatagaacagcttcgggaaaatgtggaaagacttgaagaaagaatagcgtacatagattccttattggccatagaaagacgtgaaaacaacgagaccaagaaagaattagctgatgctcagaaagagattgaggaattactggatgaaatgcaagacaatgttgcaagtatagcagaacatgaggacacaattaggagactagaggaaaatgtgggagcaaaggagtctttgttgctaactgaaagggaacagaatgcttcaaccttaaaattgcttgctgaagcacatttggaaattgatgaattaataaggaaacttgaagactcagatagaaaatctgatagccttcagagtaccataaaaaggcttgaagaagatgggattgccaaggaggctttactattaacagaaaagcaagcacatgaggcaacaaggatgactctcactgaagctttggaaaaaaatgaggaactcctcaagaaaattcatgatgatgataaacatatacttgagcttcagtttactatacagaggcttgaagaaaatacagctgcaaaagagaacttgttgttgagagaaagggaacaaaatgatgcaacaacaaaggctcagattgagagtcaagaaagaaatgaacaattactaaagagatttgtggatgttgacaggaaaattgatcttcttcaagataccatagaaaggatcggagaaaattcaacgataaaggatgctttgttgctatcagagagacaagagaaggatgcaattaagaaagaacttgttgaagctggagagagaaatgaagagttaataatgaaaattgaagacactgataaaaaaatcgaacatcttcagaatgccataatcaagcttgaaggagatatagaagcaaaagatatttctttggaagctgcaagggaagaaaacgacacaatcaggaaatctcttgctgaagctcaagagaaaaatgaagagttactcaggaaaattagtgataatgaatacaggatccacctactccaagacacagcacaaaagcttcaagttgatgccatttcaagattgtcttcctttgttatggaaaaacaagaaagtgatgcggccaagagagctcttactgaagctcgtgaaagaaacgaagatctactgaagagaaatgaggacctcctcaaacggaatgatgacttgattaagaaaattgaagagtctagcaaaactattactcaacttcaagagaccttacaaaggttggaaggaaaatcaacgaacttagaagctgagaaccaagttctccgtcaacaagcaactgcaactccaccatcaacagccaaatcttcagcttcacgctcaaagatcactaggattcatagaagcccagagaatggacatatcttgaatggtgacacaagacaagctgaaataaagccctcaactggcacatcagaaacgataccttcaataggcaatcctcctgacttgaataatgaaaaacatgttgaacaaggagagaaactacaaaaagtacttaatcagaaataccagagtcagcagcctcaggacgatcagcagtggttactcacttgcatttcacaatatcttggatttttcgggagcaagcctgttgctgcgcttcttatatatcaatgtctctctcattggagatcatttgaagcaatgaagactggtgtctttgacagcatcctacaggctataaattcagcaaccgagtctacatcatgcaatgtcctgatggtagctttccctcccttgaaggcccaaaatgatacaagagcattggcctattggttatccaacttgtctacattaacagttctcctccagcgatcattcaaaactactaggacagcaatctcaaccccacaaaggcgaagattttcatctgagaggatctttcatgcaagtcaaacttcaaatgctgggcttgcttatctcagtggccaaccagttgttggagctgctggattaccccaagttgaggcaaaatatccagctttgctcttcaagcaacagcttgtggatctaattgagaaggtttatggtatgataagtgacagtgtgaagaaggaactaaatccattgcttgaattgtgtatccaggatccacgaacttctcacagtccagcaaaaggacatgcgaatggcttggggcaaaaaaatcagcttggacattggttggccattgtaaaggtcctcaccaactatttggatgttctaagggcaaaccatgttccatcaattttggtgcacaagctattcacacagatattttcgctgattgatgttcaactatttaacagctaccgcctaatgcgtttttgtctgatacagtttgcaggttcagcctgggatgcactgaagcatatcagacaggctgttgatttcttggtgatttccctcaaaccaatgaggacactgaaagagatacgcactgatgtgtgccctgcactcagcatacaacagcttgagcgcatagttagtatgtactgggatgacatcaatggttcaaacgctatctcagcagagttcacatcaagcttgaaaagtgcagtacgcgaggaatcaaatacagtcacaaccttttccatactgctagatgatgattcatgcatacctttttcacttgatgatattgcaaagacaatgccaatcattgaggtggctgaagatgatttgctaccttttgttcgtgaaaacccaagctttgcgtttttattgcaaagggggaacagttaacttttctcaccatggagccttgcaagttgtggataaatcagttgttcctatccgtaggatagggtgtacagttcgcataattcatttttataccagatagcaggccattgaagagtagattgctaggggaggttataggtttctgatttttattgattggttcgttggttgtatatttgtgttcactttttccttgcattgtttctttgcaattctttttgggcttgtatactaaggggccaaggggcaaaacgcctttgtgtaagcatagagcttaggaggttttgctataattagtgaagctgtacatgtgttgtaaatgattaaagaaaatgaatcgcatcgctctgctggtatagaataatggttgtggttggctggtttttt

SEQ ID NO: 32970 - DNA, 234 bp, Oryza sativa
  Clone ID: PAT_MRT4530_37128C.1
atggagtacgatcactgggcgtcgactgcacaggaggcgaaggaggaggagaaggctgaaaaaaagacaagtgagatgatcaagatgggttatttccccttgagaagtgagctggagcagcaggagttggaggagtctatttgcgtgaagccgatgatgcaagtcatcggttggcttggatttcttcttcttggcctttctctttggagccagagccgatggattagcggctga

SEQ ID NO: 32971 - DNA, 796 bp, Oryza sativa
  Clone ID: PAT_MRT4530_37129C.1
actcctatgggcgattgggttcatcgaggccggccggggccaccctctctctccgccgcgaatcgagactccgatggcccccgccgccgccgccgccgccgcgctcgtgcgcctccctctccgcccggcgcgggccaccctgccgaaccaaggttttggccgccgccgcgccggggcgtcttcgctggccgtgcgggcgaaggactccgacgatctgagagtgctgatctcggagaagcccgcggagccggcgcctgcgaagcgggaggggtgggaggggtttggccgggaggtgggtgatggggatggagaggtccaggtgcagggggaatcgacttcctggaatgttctcaaccagattggcgtcgagttggactctgaaaattcatatactgctcttgtttatgggacatctgcgcttgttacgatctggatttcatcaattgttgtttctgcacttgattcagtccctttggttccccaggtgatggaagttgtcggccttggattcacagtttggttcacctcgcgatatttgatttttaaggaaaatcgggatgaattgatcaccagaattggctccatcaagaagcagatacttggatctcgtggtgactgagtagttctcctacacggttagtgatgaatctcgaaaggtgcttcgaatgtttaatgggtacccatgttgtgttcttgaaaaagttgttctgaacatttaatatgtaatcttagtgctttagtgctggttctgaataattaggtattaccctatttatttgctccccgttgaaaatta

SEQ ID NO: 32972 - DNA, 339 bp, Oryza sativa
  Clone ID: PAT_MRT4530_3712C.1
atggattactggctcggcttcttccggggcgctggggacaacatcttcgacgccatcgccgtcgcggcgtccgaccaccccgccgcgctcaggtcgaggcgggacgccttcgcccagcgcctctacatgctgctccaccccgagggcgccgccagcatacctagcatctgtagctccgaccgcgccgatgtcatcgccgacgacggcggcgtcccttgccgcgaggaccccgtcgccgctgagaccgagcgcatcaaggacgtcctcctcaacgaccaagaaaggcagtcgctgccgctgccggacaccttgacaaggttggaagtgcatactcgatga

SEQ ID NO: 32973 - DNA, 813 bp, Oryza sativa
  Clone ID: PAT_MRT4530_37130C.1
atggcccccgccgccgccgccgccgccgcgctcgtgcgcctccctctccgcccggcgcgggccaccctgccgaaccaaggtacgcacgcacgcacgcacgcccgccgggacacggtgcattcacctcgaatcttccgctgcatgggcgatgggagagctaaaaccctagttttgttcaccccccaaggttttggccgccgccgcgccggggcgtcttcgctggccgtgcgggcgaaggactccgacgatctgagagtgctgatctcggagaagcccgcggagccggcgcctgcgaagcgggaggggtgggaggggtttggccgggaggtgggtgatggggatggagaggtccaggtgcagggggaatcgacttcctggaatgttctcaaccagattggcgtcgagagagctcaggctcataaggtctataccaggtttttgtttatcttgtatcttccaaatgctatgcataatatgcaatttcctgagagtatttcatccaatgtttcatctatcaatgatgcgctttactgtggctcacctctacaaaccactcttatgcagttggactctgaaaattcatatactgctcttgtttatgggacatctgcgcttgttacgatctggatttcatcaattgttgtttctgcacttgattcagtccctttggttccccaggtgatggaagttgtcggccttggattcacagtttggttcacctcgcgatatttgatttttaaggaaaatcgggatgaattgatcaccagaattggctccatcaagaagcagatacttggatctcgtggtgactga

SEQ ID NO: 32974 - DNA, 137 bp, Oryza sativa
  Clone ID: PAT_MRT4530_37131C.1
gttcgtaaagtataattgttcttgaaataaagctttccatgagattgtaacaaaaaaaaggctggttagttcggatacccagaattgttcaagaacacaaaacttggattttgacatttaaataacttcagtaactg

SEQ ID NO: 32975 - DNA, 459 bp, Oryza sativa
  unsure (1)..(459): unsure at all n locations
  Clone ID: PAT_MRT4530_37132C.1
ttttgttataaagcataaacagttgaacaaaacatttattcatttgttactctagtcggctgatacgatcatacaacacagtttgacatgcctaataagccgaaagaaagatagacatgatgattaggatgaaggtggaccaccttcctatccgaaaatgtagaacatgacagccgccaatgcaaccattactgccgtatcatcagcagtatcagctcaaccccaaaccaggaagcatcagcacactgaaatcatgaataccactggacaaaccaccgatgctatggaatatttcttactctcacaccccaaaaaatttcaccttggtttatagacaaccgaagctcccacttcctctcctgcatggctgcatccagcagccagcatgagatttttccggtaccggagagattgagtaggaacgagatcgctagatgttcattnangcaacanaccatc

SEQ ID NO: 32976 - DNA, 205 bp, Oryza sativa
  Clone ID: PAT_MRT4530_37133C.1
gcacgagggccactcgtgtttcctcacttttatggcctctgagatggatcttttatcctctgaatgcagaagtttttagtgtaaccttttttactgaacccctactactcctcttgtaggccttcagaaaaatcagagctgtactaatttgagatcacctgacctttcatgttactgcaaattttcttggttgtggtggcacttg

SEQ ID NO: 32977 - DNA, 361 bp, Oryza sativa
  unsure (1)..(361): unsure at all n locations
  Clone ID: PAT_MRT4530_37134C.1
tcttttcagaagctttcaaaccctaggcgagggagagtggtgagacgccatggacgcggacactgtgtnaaagttttcccatttctttattcaagaactgattgtgtttgttgattgattttttttttttcttgataaaactttttgtgtttttgcatgcatgcaacttaagtgagcattcttgataaatttttttgagcttttaatttgggatctatattttaatatatctatcttttcttatcttttcatatgctactattatctaacttgatcatatgtttgcttataacttattttattagttatttttaaaattactagctttatggcttttaagatcatttaacatgcttttaat

SEQ ID NO: 32978 - DNA, 2347 bp, Oryza sativa
  Clone ID: PAT_MRT4530_37135C.1
atgccagcgcgccgaggccgtggaaagcggaagcagcagcagccgccgccgccgccgacgggcccagcggacgcgaggcagccggaggggaagcagcgggaggaggagcggaaggggatggaagggtccgacaaggggggcgccggctccgtggccgcctgccttgcgcaaggattccagggagagaataaaggttttcttgtttgcaagaaaaagatggcaacctctccagaatctttatgtggcattggtccaccaccatttcgtcaatttgttgagtatgttgtgaacttgaagttcgacgaagagccaaactatgcaaagtgcattgctctttttgatggcattgttggtccaaatccagatggaagaccattaaacaccgatggtgcccagaagcttgtatatcaggttgatcagaaaagaggccgcctcacaggggcgtgaagatgaggagcaacctaagaaaaagattagaatgggaatgccagcgacccagtggattagtgtgtacaatgcccgtcgggcaatgaaacagagataccactaccatgtagcagaagatagaatagcaccaaatattcaaacaaggaagtgaagatggttggtaaataagttcagtttcatcctgttcaaatctatgggctttaattatggatgctggcactggttctagctactaaatggaaagatgctcgcacagctttcttcacaaggaatggataatgacctgatatctttaggggtactgttcgttatgcttgtgttcatgcccacttgggaagaacgggagtgatcaggtcagaaggaacgccatatgcacagcaatcctacaaagtaagtgattcatttcccttcaaatggataaacaaaaagtggaaggaggggttctatgtcactgccttggccacagcaggaagccgatgggctgtggttatgtcccggaacgctggtttcacacatcaggtagtagaacttgatttcttatatccgagtgaaggaatccatcaacgctgggatagtggttatcgcataactgcaacagcagccacatgtgaccaggtggctttgatcttgagcatacctagaagaaagcctaacgatgaaacacaggagacactgagaacatctgcttttcctggccagcatgtaaaggaaaaatgggcaaaaaatctttatttaggctccatatgctatggaagatcagtgtcgtgaagtgcattttcccgagctggtcctttgtaagattaagatctaataatatgaacaaccggttttgtgacaatataagctttaaatatggatgctggcactggttttaccgcccaagtacatgaactctcccattactttcttcacaaggaatggataatggagcagtgggagagaaattactatattacttctttggctggttcaaataatggaagctcggtggtgatcatgtcaacaggaacgccatatgcacagcaatcctacaaagtaagtgattcatttcccttcaaatggataaacaaaaagtggaaggaggggttctatgtcactgccttggccacagcaggaagccgatgggctgtggttatgtcccggaacgctggtttcacacatcaggtagtagaacttgatttcttatatccgagtgaaggaatccatcaacgctgggatagtggttatcgcataactgcaacagcagccacatgtgaccaggtggctttgatcttgagcatacctagaagaaagcctaacgatgaaacacaggagacactgagaacatctgcttttcctggccagcatgtaaaggaaaaatgggcaaaaaatctttatttaggctccatatgctatggaagatcagtgtcgtgaagtgcattttcccgagctggtcctttgtaagattaagatctaataatatgaacaaccggttttgtgacaagataatggggggattttgaagtgcaaactttaacttactcgtagccttcaaaaatataaactaactatcctaactaaccaaagctaacgttaatatgatgaaagactaattttgtttttgtataatgagtgcagaaccatttccattactgatttattgtgcataaattattcaatatgtaaaagaaaagaaaaaacaaaactgcattgctcacatgtatagacaaacttagtgattctgtaccgtgagattaggttttagacttggtaaattttggagagaaaaaaaaaagagatggaccttattgagtaggagtagtaagcttgaggaggtgagctgattaccgcacccaaatatgcggtaggcatgactgttgattttgctctcttatctaatgataatctgattcccgcctta

SEQ ID NO: 32979 - DNA, 212 bp, Oryza sativa
  Clone ID: PAT_MRT4530_37136C.1
gatcgatcgatgtacaagtggatgcatgaagtcattatcttgggtgttctgatattacaaaccaccaccatgcaagtcgccatcaaccaccaacccagctcccctaatttacgtagcaatcaacaaatggattacccctcctaaatccataccaccccagctggatcgctatcacaaaaccaaacagcgcgcgcgaacgcacacccacgcat

SEQ ID NO: 32980 - DNA, 1896 bp, Oryza sativa
  Clone ID: PAT_MRT4530_37137C.1
atgcggaggcgcggcggcggggaggagggcggcggcgtggtgggtgcgggggcggtggtgaggcggctggacaggatccggaagcggggcgcgctgtcgtcgtcgggcgggtcgggcgcggcgaggaagctcaggttcagggcgccggcggtgctgctgcggcggcggagcggggcggcggccatgtcggaggcgtcgtcgcggacccggggccggcattgccgcgcccaagccgcggccgcggcggacggggcgcggccggcgaggaggctcgtgggcgcgttctggcagatggacaaggagaggctgttcggcgaggacgccgcggcggcggcgccgccgccgcgccggagcggcctgcttcctcgcagccgcgcgccgacggaggcgagtgtccaaggggtcaagaaggagcaggagcaagatcttggaggccgacgtgaaggggagctggcacggcggcggccatggccactggctctcctctacagatgtgatgagcaacgccacagcaatggagcactacgctccgagattgatcttgcccgctctcatgtgcgaaagcttatcaaggaacaaaaatcagagggcatcgagagcttaaagaagcagcttgtgcaagagatggaatcctggaagagcaagcagaaggagaaggtggcaaatgctctccaatatatagtttcagagctggacagtgagaagaagtccaggagaagagcagagaggataaacaagaagctggggatggcattagccaacaccgaggcctcgttgcaggcggcgacgaaggagcttgagagggagagaaaatccaaaggcagagtggagaagatctgcaccgagctcatcagaggcatcggcgaagacaaggctgaggtggaggcactgaagaaggaaaccgagaaggctcaagaagagcttcagaaagagcgggagatgctccagctcgcagacgagtggcgcgagcagcgggttcagatgaagctcttggaagcacggcttcagttcgaggagaaaaacgcagccatcaaccagctgcacgacgagcttcaggcatatttggacaccaagaaggagcatggacagtcaaatgatcaaatgacactgctccgcgcatccgaaaacggtagggaaattgctgataacattcagaagaacagcggagagtgcgatgatgaggatgaagacgatgacgatgacgactcggcatctgaaggaagtgacatgcactcgattgagctgaacgtcgatggcaacagcaagagctacacctggagttacactccaacctcaaaggacaggaagaggaatgcatcattttcacagagagggatggatagtggtagctcctgcggctttgacagaaagtttcaggaaacgggtgaagaactactggaaggagactgggcagaaggatgcagcaatgggatgctgaactttgaacacgatgaggagaggtacctggcaatcaagaatctcagggagcagatgctagctgggtctgggttcatcgtgtcacaaggtagagaacatgctgaaactgcaacgacgctactagtaccagcagccagtgcggccaagctagtggctggcaaggacgctgcgacggcgacggcggcggaggcggctcttggtagcaccgtggcgccgtgggtggaggccgacgccggcggcgtcgtcggcgggatgatgatggtggcggcggcggcaggcagcgtggagtacgggcatggaggagtacaccaccggcgcgtcctgcaggcgcggggtggtggcaacgtcaacccgtcgctggtggccgaccggcagaggtgcatcggcagctgcccggcgcgagggggatcgtacaccgggaggggcaaccagtgcatctaccacaaccgatcgtgttaa

SEQ ID NO: 32981 - DNA, 854 bp, Oryza sativa
  Clone ID: PAT_MRT4530_37138C.1
ggttcgccttgcttcccaatcgtcccagcggcgtccggccgggacaccctcgtccagccaaggcggcggcgcacagccaggagaagccgtcgagcggcggcgcaccgcgcaccgcgcacggagcacccctcccccccctgttaccgtcccctcccgctgcagaaggcgccggcgcacggcgtcgtcccatccctaattccggccccccctctggttcactccccacgtttgaagtcagcttggttctgactccagggatctcaactatcctgtccaggatcaagaccaaacccgtcagccatcatgcaggctagcgacaggttcaacataaattctcaacttgagcatcttcaagcgaaatatgtgggcacagggcatgctgacttgaatcgatttgaatgggcagtaaacatccaaagggatagctatgcatcctatattgggcactatccaatgctggcatatttttccattgctgagaatgaatcaattggaagagagcgttacaattttatgcagaaaatgctacttccgtgtggtctgcctcctgagagagacgaagattgaggtggccttcgggtctggcgttcagtgttactgcaactactggaacctagggttcagtatcagtttgatatccaaagcaagatcaaactaatctttgcctagccacctactactactatgtaagactctgtccatcttgaacatctgaagcactctgtgtacccttttcgaacatgttcatcagtaatgttcggcgcatgtgtgtaacggatcttttagttaaggtgaatgttgagggacaaaatgtttctggagcgatcaaaaaaaaaaaaaaaaaacccgcggcc

SEQ ID NO: 32982 - DNA, 316 bp, Oryza sativa
  Clone ID: PAT_MRT4530_37139C.1
aatatttatcaaaagaaggcagatacaaggggggggggctcaactctgcacgccacccatttgcatcccaagctcgaggaaccgacccatcaaactatgcctgtgactatgcaaacgcattttggccgtccctccttgcatatgatagcacctggctagactgggtacatggcaacagtggctaaactgaaagaccccgctaacaagtggcggtgatgtagctgctacttttactcaattgatgagagtcaagaggcattcgctaggtcctggaataattcactataggaaagcctgctatccatccttctacatt

SEQ ID NO: 32983 - DNA, 1395 bp, Oryza sativa
  Clone ID: PAT_MRT4530_3713C.1
atggccggagcaccgaccttagccttctccgtcaggcggcgcgagcgcgagctggtggcgccggcgaaaccgacgccgtacgagttcaagatgctgtcggacatcgacgaccaggacatccttcgcttcaaccgctccggcatcctcttctaccgccacagcccctccaaggacggcctcgaccctgtcaaggtgatcaaggcggcgatctcggagacgctcgtgcacttctaccccgtcgccggtcggttccgtgagctgcggccaactaggaagcttgtggtggagtgcaccggcgaaggcgtcgtgttcgtcgaggccgacgccaacttccggatggatgagctcgggacgtcgctggcgccgccggtgccgtgctatgacatgttgctgtgcgagccggagagcccgacggcagatgtagttgaccgtcctttgctgtttattcaggtgacgcggctggcgtgcggcggcttcgtgttcgggatgcacatatgccattgcatggcggacggctctgggatagtgcagtttctgactgcactgaccgagttcgcccgtggcgtgcacggagccccgacggtgcgcccggtgtgggagcgcgaggtgctcaccgcccgatggccgccgaccgtcacgcgcgaccacgtggagtacacacccctgcccaaccccggcaaggacgtgctctcccccactgacgcgtacgcacaccacgtcttcttctttggggcgagtgagatcgcggcgctcaggtcgcaggcgccgcccgacctgcgcgccgtcagctcccggttcgacctggtgggagcgttcatgtggcgctgccgcaccgccgcgctgcggtacgacccgggagacgtcgtccgcctgcacatgttcgtgaacgcccgcgtcaggaaccggagcaagcggcccgtgccgaggggctactacggcaacgcgattgtgttcgctgccgcgtccgtgccggcgggggagctttggcggaggcccttcggctacgcgctgcggctgctcatgcaggccaaggcgcgtgcgtcggaggaggggtatgtgcagtcggtggccaacttcaacgcggctcaccggaggccgccgttccctaaggccaggacgtacctcatctcggacatgacacaggccgggctgatggccatcgacttcggctggggaaagccggtgtatggagggccggcgacgacaatgctggccacgtttcaccttgaggggaggaatgaggttggtgaggcaggcgtcattgtgcccataaggttgccgaatccagtgatagagaggctaatacaggaggtgaacaaggggctcactgccggagctgttgccgacgcaaaagcaaacgtggtacctgatgattgcgttctagcaaaactgtag

SEQ ID NO: 32984 - DNA, 461 bp, Oryza sativa
  Clone ID: PAT_MRT4530_37140C.1
tagtatatggtgcttaaacatttataaatgctctacatatacttgctacacatatactaattatacgactacatttttcaagtaattttagtttaacatttatatgttgtaaggataatttgaaggaaatcataaccgataatcaacacgatccctaacagattattaattaaaattttttttttttttagagtcaaagaatattttaataaaaagtcacccacatataaatattcacaatacaatattaaataagctacattcctagtttcattagaaaaaagtaacacaaatatctgaagcagaggttgtacaaattttctttacgtggaactgaaatttcatttctttagcaaactaaaatataatcacacggcaagcagaacgtagaataaacatacagagcaaaaagggggaaggaagaatttacaaaagaatagcccaagcacctctattacaac

SEQ ID NO: 32985 - DNA, 141 bp, Oryza sativa
  Clone ID: PAT_MRT4530_37141C.1
atgggctgggtaggccagcccatgggtttggccgaacctctcgtggcgccgataatgcagggtttggatggacggcgggggttgatccccaatgacgttagtggtggcttttcgaagtaccaggagggcatcggaaagagg

SEQ ID NO: 32986 - DNA, 366 bp, Oryza sativa
  Clone ID: PAT_MRT4530_37142C.1
acattctgtagtgagagatggagtggcattgaatatgcgggatggcgctgctggtgctgatgttgggttactcgtgcaatgcatgtgaccacccgacctgcccggatgtgtgaatggcggcggtgtgggcggagctgttccacggtggcgtaggcggcggcaggcggtaaaagaggcgtgcatgcagtcactaggtgcgccacacacatcggtggccaggtacgggcaagaaggggaaccggtgcggttatgactgaacctgaagatcgtcgacgtggagttcttcctgcacgcggagttatgtgtgtggctgaacaatatagacgctaaattgactctgggaggtccatcgaccgcaggcaccag

SEQ ID NO: 32987 - DNA, 228 bp, Oryza sativa
  Clone ID: PAT_MRT4530_37143C.1
atggctgcgaaagacaaaggattatataggttcaggccgctactgagacaacatgttcgcctggcttcagactttggtggctcaccatgcgcgtggatcgcccctagcagcgtgctgatgggacaaggcatacctgcccccactccgcctgacacagggcggaacgtgggggcactgccacccgtcccgtcgcctgtgaccggtcacaggccggtcaagctcgattga

SEQ ID NO: 32988 - DNA, 361 bp, Oryza sativa
  Clone ID: PAT_MRT4530_37144C.1
cgccagcgtgggcgctgctaaggccttgtttagttgggaaaaaatttgggtttggttgtcacatcagatataccgacacacatttaagtattaaacgtagtctaataacaaaacaaattacagatttcgcagagatgaatttattaagcctaattaatccgtcattagcaaatatttactgtaacaccattgtcaaatcatggtgcaattaggcttaaaagattcgtctagcaatttacacgcaatctgtgtaattgtttcttttccatacattaaatgctccatgcatgtgtccaaatattcgatgtgacagtgtaaaaaatattgttttggaaaataaacagggcctaattcatcagca

SEQ ID NO: 32989 - DNA, 1132 bp, Oryza sativa
  Clone ID: PAT_MRT4530_37145C.1
gcaggaattcggcacgagggggtgcgtgccgctagcgacagacgtctggacgccctgtcgatcgatctggaggtggggtatgtcgtcgcaatcgatctcaggccagagcatgcaagataatggactaacgcggcggcagcgacggcagcaggaggtcccagggctcagcgcggtacaagtcgacgtcgcggatgaaggcggaggtgaagccggcgacgagcaccatggatacattccgccgcgggagtggccgcagttggcgacgacgacgcgactctcctcctcgcctcctctgccgctcccgccatcctcgccatctcctctgccgcgacaagctcgagccccggtgaccgacgtcgccccgtgccacttcgccacgtcctcgccgtcctccgccgctcccaccgcgagtgccgccgcagtcgctcccgctatcctcgccatctcctccgccacgatgagcgagacagtgaggttggcatgcgccgcaacgcggggaagcagagtaaggaagggcgcacgtcgcccacggcggagcaggtctgagaaggtcgggcgtgggaagagaacgacaagggcggcattgccgaagctgtgccgattagatttggatcggtgctgccaccgccgttccctgtcgtcgtcgtccgcgttgcctggggattggggcgtggaggagaaggaggagttccgaggccacggcgagctccgacgtggggctccaacacggtggcatgcgttgcggcgctggaaggagaggattcccgtgggccggcacggcatggcccgaagtgccgaccgtgtcgtgccggccagatcgccttgggccgtgcctcgcccgtgcctgggccaggccgtgccgggcaggcttggagggcgcgacgcggtgcccggcctccgcccctcccgcctctgccctccgtctcagttcgagtcgaatcgaagggtgcgtgccgctagcgacagacgtctggacgccctgccgatcgatctggaggtggggttccctgactacaccaccggcaacctcgtccatggcgcactcacctccctaagactatttactaaacagcaccgtcaacctcttctcaaggtgatagatgtttccttgagttatgacgtttctagataa

SEQ ID NO: 32990 - DNA, 1236 bp, Oryza sativa
  Clone ID: PAT_MRT4530_37146C.1
atggctgtgcagtaccaccaatggtctagttcagcagacggggatgatgatgaggttcttgaggctttcaatcgggactgttgtaccgatgcaggtgctggtgttttggatgattcagcatctactgcctatgttgagaagctctgcacatcaggcaacctccctgatgctgttcagattctccgacatttacatgataggaagatccatgtaggattgggtacgtttaatttggtgctggagcaaacaggcgaagtgaacaacttcgttctttttgccaaggtgttcaggtacctgctgctttccaaaatagctcctgacttgacttcttatacaaatgttgcaaaggcccttcagaagttggatgactatgaactaatacttaaatttgtgagacaagttatggaaattacacatgatagagatcctacagtgatgaatcgcattgttttcaccacggctaaatatggacagattgataaatgtttgatcatatttgaagaactgaagaaagatcaaagagggttagatgttgtcacattcaataccattttggacatgcttggaaaggctggtcgggtggatcaaatgcttcaggaggtgaagctaatggatgaacttggccattctcctgacattgttacatacaatactgtaataaactgcttgcggaggcttggaaggttagatcagtgcaaaatcttcgcaagagaaatggttgagagaggcatcgatccagatttaagaacatatactgcactgattgatattttcgggcgggctggccatattactgaagcccttgaaatgtttgaccagatgaaaaggtcacatcaaccttcaatttatgtctaccgggccctaatcagtgacttaaagaaggctggacagtttgaacttgcacaaaagttatctgaagagatgaaaacaagtgcttcagaattactaggccctgaagattttaaacataagttcaagggtagaaagatcaacaagaacaactaagaatggttcaatttctgcttgttctgcacttctacaagttcaatttcagcattgccattcatgttcagtgccgtgaagaatagttggagccttgaatggagagaggggggaagctacatgagaggagaggtgatgggggcgatttcgtcgccggtagatcctgcagcggtttcagcaatctatgactggaggccagtggtgtcgagcttggccaggcttttgtcggtgtag

SEQ ID NO: 32991 - DNA, 494 bp, Oryza sativa
  Clone ID: PAT_MRT4530_37147C.1
gtaggggaaaactggtatacccctgccaagggtacccggtcccggaattccccggggtgtcgacccaccggcggtccctcgtcaaccaatggctttcctggacctgggcttggaccgaagctcctggcttcaaacaagctccggacttgtatggatttggatggacaacgtgttgtgggttcgcatcttgccacctgagtggcgtacggcgtgcatttgtacactcgtggacccttgttgctccccggctattttccacgaccgggacttctcataggccatggtcaaagcattgtttaaaaacgtggttaaaccactgaaatgtatatatatatattttgtttgttgtatgtacgtacgtacgtacgtacgtacgttattcgttgtgggaaccagtagttatgtataaagtccttattgacatgtacgccctcccgtttttttaaatatttaatcaatttgattttgggacaaacgttaaaaaaaaaaaaaaa

SEQ ID NO: 32992 - DNA, 273 bp, Oryza sativa
  Clone ID: PAT_MRT4530_37148C.1
atggtggtagcgcaaggtgggaatgaggaggtaccgattctcaagggtaagccgtcgggcaccaagggtgcccatgtccgtgaggtaattcatgtccgcggacatacccgctactacatgatggtggaggtaggaggcggcgacgaccagaggtgggaggcagccaagcaagcggatggtggaggcgcggctggaggaaggtgtggcaggctggcggttgacggttggaggacttcgacgaccggaggtgggagctcggcgcagaaggggtag

SEQ ID NO: 32993 - DNA, 375 bp, Oryza sativa
  Clone ID: PAT_MRT4530_37149C.1
tgtaaaaaagttatggtttgttacaactgcaaagaaccacgacattactccagggactgtccctaaccaaggaaaaaaaatcggcctccacattttcgccaatttacaagaagcagacatgccaatcgccaagtgttcactggagcaaatgcagtacctgtttctctgaaaggcagtaggcccaaggacctcattgccccagaagcacccacaacatccggagtgaagagtacttggttgagaaagttgacaccaagggtatgaattatgagaagtcctcgaactgaaaccccgtcttcaagtaccgcaccccagtcgaagtcagctcaaggtgcaaccaaggataagtcaggtgaaaagaagattccatctgca

SEQ ID NO: 32994 - DNA, 697 bp, Oryza sativa
  Clone ID: PAT_MRT4530_3714C.1
actaagggggactcatccatggacaatcccaacatagtacattccatccgcgagcaatgctgcaatcggggaatccacatccacacatgctgcttttttggagccgtcctattacgacttccctcacactgcaccagcactgccactacactcctatactagtagtagttctatgcatctactaaacgacgacgactactactatcgaaggggagtagtatcaatgtatctcctccggaaaaaaaaaaaaaaagggttttgctgccatttctttgggctcttctcccctgatcccctccccctcccccggaaaatcttctgatttagtactataattacgtgcattacagtaacaaaaagggaatcccttgggcttggctttgccactagtatgctttactacagcagcgggagtagtactagtatgacaatcgcttcctggaagggacctcattgtcgcccgccacagcaaagcaatttcgtgccagggtcacaaaaaaatgcatgcttgctggctgccaacatgaaacttcccctttgcatgcttgcttccttcacaaaaaatacaatcacattgctttcgtcttgggatagcacatgctactttaatctttcttcttttataaggggaacctccgaaaagggcaggaagttcctgtaatttcacagatatttactcaggccattttttcggagc

SEQ ID NO: 32995 - DNA, 3402 bp, Oryza sativa
  unsure (1)..(3402): unsure at all n locations
  Clone ID: PAT_MRT4530_37150C.1
atggcgcatagcccgctctgctcccggagccggccggtgctcgtcgtccgcccggcgacggccgccactggcttcgcgcagccgatcataaggtgcaggagatttacaaggacaaggcttctccgatgcttggtggcaagtgcagattattctaagagaaacccaaggagagcctccactccgaaacctaaaggtgctgcctctagaacatatgctccgagacctactgttgaatccagcatgaagaagattggacaaagcggcacagatgaaggtgatcttggcacaagcaatgggaagctcagtagtgaagcaacagagcaaactagtaatgtagaagaatcatcggaggtggacttctctggaaatgtatcgagcagtgtattcttggagggaatggatgatgcttttgaagctgagactgaagaagaggtcgagcaaaatcagtctccagaactgtcttctgaatctatggatgatgatgcaattgacagaaaacttgatgaataccgtggtaaaataagtgcactaataagttcgaaacctgaacctacatcagtttctagcactcatgtacaggacagatcaattgttggttttcatgaacaagaaaaatctgtagttagtttccatgagcaagatagatcaattgtctctgttcccgaacaaagccagccaagtagtggtgtcagtggacaaaatccaacagaagagaaaaccattattagtggacaagatgtcaccgaagaagcaccagaagagataactggcaagagtattgagagggaaccattaagtagagaaactgagaaagttctgtttgctgatgatgaccctaggataatcaaggatgaacagtatgaacctgatatagcaccagtacaggatgatgtggatccacaagtgctcaggaggcggcttgaagagcttgctgagaaaaattatttggctgggaataagtgttttgtttttcctgaagtagtacaggcggattcggtcattgatctttacttgaaccatagcatgtcagccttagccagtgagcctgatattcttatcaaaggggcattcaatggttggagatggaaaaaatttacccaaaaaatgcataaaagtgagttaacaggggattggtggtgctgcaaactccatatacccaagcaggcttacagattagattttgtattctttaatggtgacaccatctacgaaaataacaatcataatgatttcgtcctacaaatagaaagcgaaatcaatgaacactcatttgaggacttcttggttgaagaaaaacaaagagagcttgaaaggcttgctgcagaagaagctgaaaggaaaagacaggctgaggaggagcgtcgtaaggaggaagaaagggctgcaatggaggctgacagggcacaagcaaaggctgaagtcgagatgaacaagaataagttgcaaaatttattaaattcagccagcagatatgctgataatctatggatggtgattggtggtatgcagatgttactctacctgaaggggcatggtgttagactgggttttgctgatgggccacctgggaatgcaaggaattatgataacaatggacgccaggatttccatgctgttgttccaaataacatatctgaggacctgtttnggtctgagataactgcaaaaatgaaagctgagatgaaggaaaagactatgagagactttcttctctcgcagaaacacattgtgtacactgagcctctcgaagtacgtgcaggaaccaccgtggatgttctatacaatccgtctaacacggtgctgaacggaaagccagaggtttggttcagatgttcctttaatcgttggactcatccaagtggtcctttgccgccacagaagatggtgaatgcggagaatggttcacacttaagagcaacagttagggttcctttggatgcatatatgatggactttgttttctctgagtcggaagaaggtggaatatatgacaacaggaatggcatggactatcatagtcctgtgactgattccgttgcaaaagaacctcctatgcatattgtgcacattgcagtagaaatggctcctattgcaaaggttgggggtcttggtgatgttgttacaagtctttcacgagccgttcaagatttaggccacaatgttgaggttattcttcccaagtatgactgtttaaacctaagcaatgtgaaagatttacattaccgtcaaagttttacttggggtaatacagagataaaagtatggtttggaaaagttgaagacgtccctgtttacttcttggaaccacagaatgggatgttttgggttggatgtgtctatggaagaaatgacgagagtagatttggcttcttctgccattctgctctagagtttctccgccaaaatggatcttctcctgatattatacattgtcatgattgctcaagtgctccagttgcttggctattcaaggaacaatatgctcaaaatggactgtcaaatgggcgggttgtatttaccatccacaaccttgaatttggtgcacatcacatcggcaaagcaatggcacgttgtgataaggctacaactgtttcatatacgtattcaagggaagtgtcaggacatggtgctattgcccctcacttttccaaattccacggtattcgtaacggaattgatccagatatttgggatccatacagtgacaattttatcccggtccactatacctctgagaatgttgttgagggcaagagtgctgccaaaaaggcattgcaacagaggcttggactacagcaaactgatacccctgttgttggaattatcagtcgtctgacagtccagaagggaattcaccttatcaaacatgcaatttatcgaactcttgaacgcaatgggcaggtggttttactaggctcagctccagatcatcgcatacaaggtgactttaccaacttagctagtaaactgcatggcgaataccatggtcgtgtaaagctttgtttaacctatgatgagccactatctcatttgatttatgctggtgccgacttcatccttgttccttccatgtttgaaccttgtggtttaacccagcttactgctatgcgttatggatctatcccaatagttcggaaaactggaggcctttatgacaccgtttttgacgtcgacgatgataaggatcgagctcgagaacaaggtcttgagccaaacgggttcagtttcgaaggagctgacagcaacggtgtggattacgcccttgacagagcgatcaccacatggtatgatgctcgcgattggttccactccctctgcaagagggtgatggagcaagattggacatggaaccgacctgctctggactatatggaattgtaccattccgctcgcaagaactga

SEQ ID NO: 32996 - DNA, 4070 bp, Oryza sativa
  Clone ID: PAT_MRT4530_37151C.1
gccattctgctcgcacttcattccttctccgagtgagcagaaaataaaccagagagaacatccgccctacaaatctaatctgccttacatatgtacatccgaaacactgcagaatcgtaaaatggaacatatttgcatggtacatgtttgcaaaactggctttaagcacgatgagcttcctgcatgtcacatacgcacgggcgccgtacgatggcgaactcacaaccgcaggataacggaaagattaattgatctcttactgacgctggagatcaatgtagaagccgggattggattctcctcattttctttctgtctaaagaatggtacccagagaaagggtatgtactgggatgccggcatgtcccagaaacctggggaaacctacttcccaaaatccatgtgttcttggggctagaaaggtctcagttcttgcgagcggaatggtacaattccatatagtccagagcaggtcggttccatgtccaatcttgctccatcaccctcttgcagagggagtggaaccaatcgcgagcatcataccatgtggtgatcgctctgtcaagggcgtaatccacaccgttgctgtcagctccttcgaaactgaacccgtttggctcaagaccttgttctcgagctcgatccttatcatcgtcgacgtcaaaaacggtgtcataaaggcctccagttttccgaactattgggatagatccataacgcatagcagtaagctgggttaaaccacaaggttcaaacatggaaggaacaaggatgaagtcggcaccagcataaatcaaatgagatagtggctcatcataggttaaacaaagctttacacgaccatggtattcgccatgcagtttactagctaagttggtaaagtcaccttgtatgcgatgatctggagctgagcctagtaaaaccacctgcccattgcgttcaagagttcgataaattgcatgtttgataaggtgaattcccttctggactgtcagacgactgataattccaacaacaggggtatcagtttgctgtagtccaagcctctgttgcaatgcctttttggcagcactcttgccctcaacaacattctcagaggtatagtggaccgggataaaattgtcactgtatggatcccaaatatctggatcaattccgttacgaataccgtggaatttggaaaagtgaggggcaatagcaccatgtcctgacacttcccttgaatacgtatatgaaacagttgtagccttatcacaacgtgccattgctttgccgatgtgatgtgcaccaaattcaaggttgtggatggtaaatacaacccgcccatttgacagtccattttgagcatattgttccttgaatagccaagcaactggagcacttgaccaatcatgacaatgtataatatcaggagaagatccattttggcggagaaactctagagcagaatggcagaagaagccaaatctactctcgtcatttcttccatagacacatccaacccaaaacatcccattctgtggttccaagaagtaaacagggacgtcttcaacttttccaaaccatacttttatctctgtattaccccaagtaaaactttgacggtaatgtaaatctttcacattgcttaggtttaaacagtcatacttgggaagaataacctcaacattgtggcctaaatcttgaacggctcgtgaaagacttgtaacaacatcaccaagacccccaacctttgcaataggagccatttctactgcaatgtgcacaatatgcataggaggttcttttgcaacggaatcagtcacaggactatgatagtccatgccattcctgttgtcatatattccaccttcttccgactcagagaaaacaaagtccatcatatatgcatccaaaggaaccctaactgttgctcttaagtgtgaaccattctccgcattcaccatcttctgtggcggcaaaggaccacttggatgagtccaacgattaaaggaacatctgaaccaaacctctggctttccgttcagcaccgtgttagacggattgtatagaacatccacggtggttcctgcacgtacttcgagaggctcagtgtacacaatgtgtttctgcgagagaagaaagtctctcatagtcttttccttcatctcagctttcatttttgcagttatctcagactttcttcgatcagcatcctccctttctttcctttctttctgaagccttttaaatatcatgtgctcttcttccacccaaaacaggtcctcagatatgttatttggaacaacagcatggaaatcctggcgtccattgttatcataattccttgcattcccaggtggcccatcagcaaaaacccagtctaacaccaatgccccttcaggtagagtaacatctgcataccaccaatcaccatccttttcatatgatttgattaatttttcagcaatagagagcccatcactccaattattgtaaccgccatgcatccaaatctcagtgttatgcattagcggtcttgagcttctgttgtagaacaatttgaccctatcccctgctttgtatgtgtgaggctctatataccatagattatcagcatatctgctggctgaatttaataaattttgcaacttattcttgttcatctcgacttcagcctttgcttgtgccctgtcagcctccattgcagccctttcttcctccttacgacgctcctcctcagcctgtcttttcctttcagcttcttctgcagcaagcctttcaagctctctttgtttttcttcaaccaagaagtcctcaaatgagtgttcattgatttcgctttctatttgtaggacgaaatcattatgattgttattttcgtagatggtgtcaccattaaagaatacaaaatctaatctgtaagcctgcttgggtatatggagtttgcagcaccaccaatcccctgttaactcacttttatgcattttttgggtaaattttttccatctccaaccattgaatgcccctttgataagaatatcaggctcactggctaaggctgacatgctatggttcaagtaaagatcaatgaccgaatccgcctgtactacttcaggaaaaacaaaacacttattcccagccaaataatttttctcagcaagctcttcaagccgccggacgagcacttgtggatccacatcatcctgtactggtgctatatcaggttcatactgttcatccttgattatcctagggtcatcatcagcaaacagaactttctcagtttctctacttaatggttccctctcaatactcttgccagttatctcttctggtgcttcttcggtgacatcttgtccactaataatggttttctcttctgttggattttgtccactgacaccactacttggctggctttgttcgggaacagagacaattgatctatcttgctcatggaaactaactacagatttttcttgttcatgaaaaccaacaattgatctgtcctgtacatgagtgctagaaactgatgtaggttcaggtttcgaacttattagtgcacttattttaccacggtattcatcaagttttctgtcaattgcatcatcatccatagattcagaagacagttctggagactgattttgctcgacctcttcttcagtctcagcttcaaaagcatcatccattccctccaagaatacactgctcgatacatttccagagaagtccacctccgatgattcttctacattactagtttgctctgttgcttcactactgagcttcccattgcttgtgccaagatcaccttcatctgtgccgctttgtccaatcttcttcatgctggattcaacagtaggtctcggagcatatgttctagaggcagcacctttaggtttcggagtggaggctctccttgggtttctcttagaataatctgcacttgccaccaagcatcggagaagccttgtccttgtaaatctcctgcaccttatgatcggctgcgcgaagccagtggcggccgtcgccgggcggacgacgagcaccggccggctccgggagcagagcgggctatgcgccat

SEQ ID NO: 32997 - DNA, 2889 bp, Oryza sativa
  Clone ID: PAT_MRT4530_37152C.1
atggcaaccatattagattctttggttggatcatgtgccaataagttgaaagagattattactgaagaggtgatacttattctagggatacaagaagagctcgcagagttgcagcggaagactgaactcatacattgttgtattagtgatgctgaggaaaggaggatggaagagtcagcagttgacaattggcttgcacgtcatgaggttgctgtgaagattagaagtctcaacaggaagatagaaaacatttcgaaggacagagtatttttgacactcaagagtacggttcctactggaagcagttcagtattgagagtgagaaaaagttcccacctacttgagcccaacattgttggcaaggagatcatacatgcctgcagaaaaatggtagatttagtgcttgaacataagggaagaaaactttataagcttgcaattgttgggactgggggagttggtaagacaacattagctcagaaaatatacaatgatagaaaaataaaaggaagtttcaacaaaaaggcctgggtttgtgtttccaaagtgtactctaaagcttctcttttgagagaacttcttcgaattatggaagttcatcatgatcaagatgaatcaattggagagctccagagcaagcttgaaatagcaattaaggagacaagttttttccttgtgttggatgacatgtggcaatctgacgcatggacaaatttattaagaattccgttgcatgctgcagaaatgggagcaattctcataacaactagaaataatattgttgccttagaaatcggagtggaccatacttatcgagttgatttgatgtcaaccgacgtaggatgggagctactttgcaagagcatgaatatcagtgaaagcatagaattgcaaactctgcaggatgttgggattgagattgttcgcaaatgtggttgccttcctcttgcaatcaaggttattgctagagtgttagcgagtaaagaacaaacagagaacgaatggaaaaaaatattgagcaaaaatgcttggttcatgaacaaccttccaaatgatttgagaggtgctttatatctgagttacgatgagttaccacgtcatttgaagcaatgctttctttattgtagtgtatatcctgaagatgcaaacatttaccatgatgatcttacaaggatgtggatcgctgaaggctttatagaggaccatggaggtcaactactagaagaaacagcagacgagtattactatgagctgatccaccggaaccttcttcaaccagatggtttatattatgaccacagcagctgcaaaatgcatgatcttttaaggcagcttgcttgttatttgtcaagggaagaatgttttgttggaaacccagaatcattggtaggtaacactgtgtctaaacttcgacgtgtttcagtcgtcacagataagaacatggtaatgttacctagcatggacgaggtgcaatataaagtaaggacatggaaaacttcttatgagaaaacactcagagttgataattcatttttcaagagatttccttatcttcgtgttttagatttgactgattcatttgtaccaagcatcccaggttgcatcgggaatttgatccatctacgtttgcttgatcttgatggtaccaatgtatcttgtcttccagagtccattggcaacctgaaaaatcttcaaatattgaacttggagaggagtgttgctttgcacagtcttccttcagcgatcacccaactgtgcaatttaaggcgccttggcctcaattattcaccgatatatcaagttccaaaagggattggcaaattggaatttctcaatgatgtagaagggtttccagtctatggtggcagtagtaatactaaaatgcaagatggatggaacttggaagagttggcttatctttaccagctaaggcggcttcatatgattaaattggaaagagcagcttaccgcactacttacccattgttaacagacaaagggtttctgaaatttttgtatctatggtgtactgaacgtacagatgaaccatacacagaaaaagatttcagcaatattgagaagatctttgagcagctaattccgccgtgcaacctggaagatcttgctattgttaaattcttcggtcgccagtatcccttctggatagattctacccatttggcttatgtaaaatccttgcatctcttcaactgcaaattctgtatgcaccttccaccagttgggcagctacccaacttgaaatatctaaaaattgagggagcagctgcagttaccattattggacccgaatttgctggccacagggcgagtaatcttggacgaacagttgctttccccaagcttgaagagttgctcattagagatatgcccaactgggaagagtggttctttattgatgaagcaacgtcaactgctaaggaaagggttgatgatggagattctgcaataccaaaagagaaagcattacctccaaggatgcagatactgtcacggttgaggaggctggaactttctggctgcccaaagctgaaagctcttccacagcagcttgcacagattaacagtctgaaggagatagagctaagatgggcaagcagcctgaaggtggtggagaacttccccctcctctctgagatgcttttgattgcgacatgtcaagccctggagaaagtctctaaccttcctcaagtgcgagagctgcgcgtgcaagattgtccaaacttgagacttgttgaggatttgagcactttggagcagttgtggctttatgaggatatgcatgaggtctctacattgtgggtgcctgggcttcaacagcagtgccggcaacatcatggagaggatcttgaagtctacaattggacatag

SEQ ID NO: 32998 - DNA, 414 bp, Oryza sativa
  Clone ID: PAT_MRT4530_37153C.1
acctgtaaaaaagctctatatttatgggtcgtaatatatcatatgatgaaccatgtttttattagacatataaaaatatcatgaaattatcctttccctcaatcagggtatccaacgtttcctgtattttcatgtctcgcatctttagaagcctgctccaagttcgcataaaaaaatggccctgaaattgacttcaacaggtgttttgggaattttgcttcaggctccatcttgttccatgcttgccacaacactattgttagatctgcatctcataaccggataagagtacaatatgatccatgcatcccaaaatttatgggaaaccttttagtttctatgaaatcacaacctggaacatggcaggtgcaaagggcttggcattaatcacaaccgcaacataggagcaaacct

SEQ ID NO: 32999 - DNA, 634 bp, Oryza sativa
  Clone ID: PAT_MRT4530_37154C.1
atggcaaccatattagattctttggttggatcatgtgccaataagttgaaagagattattactgaagaggtgatacttattctagggatacaagaagagctcgcagagttgcagcggaagactgaactcatacattgttgtattagtgatggctgtgatgctgaggcaaggaggatggaagagtcagcagttgacaattggcttggtcagctaagagaagttctatatgatattatgatgttgatgatattattgacttggctagatttaaggggagcattctactaactgatcatccttcatcgtcatcaaggaagtcaattgcttgcactggcctgtcaatttccacttgcttttctaatgttcaggcacgtcatgaggttgctgtgaagattagaagtctcaacaggaagatagaaaacatttcgaaggacagagtatttttgacactcaagagtacggttcctactggaagcagttcagtattgagagtgagaaaaagttcccacctacttgagcccaacattgttggcaaggagatcatacatgcctgcagaaaaatggtagatttagtgcttgaacataaggggagaaaactttataagcttgcgctcactgcccgctttccagtcgg

SEQ ID NO: 33000 - DNA, 282 bp, Oryza sativa
  Clone ID: PAT_MRT4530_37155C.1
atgaggataccggagagcgcgaggctgtccgtcggcggcgtctccccggacatgggcgacacggagctccgcgaccacttcggccgctacggggatgtcgccgacatctggctgcgccgcgatcgcctcaccggccttccccgccggttcgccttcgccgattacaaagagagtaaccgaacagacaatgccgatgagatcatagtcgaggggttcgacgagatctcccgacgagttggctccgtggactccggcttccgcccgttccgtcgtggcgcctag

SEQ ID NO: 33001 - DNA, 108 bp, Oryza sativa
  Clone ID: PAT_MRT4530_37156C.1
atggacaaggacgtcatgaacgttcaagtcaagaaggaggttaaactcatatcaagttcgagttcatctggggcgtcaggagccatccacactaaattcgccgtccag

SEQ ID NO: 33002 - DNA, 222 bp, Oryza sativa
  Clone ID: PAT_MRT4530_37157C.1
atgggagggaaaggaggagaggcgccgccgggcctctgcgctgcagatcaagaagtggtgttgatgctgccggaggcgaaggagctgttgccgctggagatggaggtacttccgcccaagttggaggatatgctggagagcagggtgataatattgctgctggagattcttaatctacacaaggatctgctgctggagaggaaggtaaacttcttctattaa

SEQ ID NO: 33003 - DNA, 543 bp, Oryza sativa
  Clone ID: PAT_MRT4530_37158C.1
atgcaccacaagtctatccctaacggcggccgtatcacccgccatatcatccccacccactgcgacggccttgtcgccttcgccacctacggcagggccatgctcgtgtgcaacccggccacccaggagctcgttgtgctgccgcccggcaacggcagcggcccatgcccacggtctacagaatcaacggcggcggttggcttcgacccgtggcggaacagtggacctgtgacacaacccgtggggcgcggcggcggcggcaacggccaacgctggttccacaacttcggcaccacggtggccggcgacgatggcgtggaggaggaggcgacgttggtggccatgttgtacaaggagctgtggtggcacagggagcggagcaaaccggtggtgaaagacgtgaacatgcaggggagccggtgcagttacatatgcaaagggaaaaatgtcagtgtacggaagaaaaatgtcatagagaggcatgggggtaggggtttatttttacaaattcaaaataaatttgatcaaacaagaaatctttaa

SEQ ID NO: 33004 - DNA, 171 bp, Oryza sativa
  Clone ID: PAT_MRT4530_37159C.1
atggtgtccatcggtagtcctagggctggatcatcttggtgtatgcgaggacaggcggagttgggtctggagtggagttggcctgtgggctgggggggggtggtggtggcggggggcgggtccggggttggccgttttggggctctggcccgcttgcgtcttggcggggcg

SEQ ID NO: 33005 - DNA, 581 bp, Oryza sativa
  Clone ID: PAT_MRT4530_3715C.1
ctctctcccacgtctccccgcgcccctttctctctcccttctccggcgccgctttcctcgccgccatccccttccggtgcgccgctccccctcccctgcatcccgaactccacctccaccgccctgccgcctcctcggcgaaggagcacagaccctagcgaccttccaattcgtcgccgccgcccgacccgccgcgtctccacgccgacatcgaggtaagagctccccccttcttcggcgagacgtgtcttctatgattctccccccattgtcgtcgccgattggccggcgatggattactggctcttcttcttccggggcgccggggacaacatcttcgacgccatcgccgtcgcggcgtccgaccaccccgccgcgctcaggtcgaggcgggacgccatcgcccagcgcctctacacggcgtaccgtcggcggtgcctcccacggggggcaccgacaccgaggcgccgctgccgcagctagctccaccccgagggcgccgacagcatacctagcatctgtagctccgaccgcgccgatgtcatcgccgacgacggcggcgtcccttgccgcgaggaccc

SEQ ID NO: 33006 - DNA, 758 bp, Oryza sativa
  Clone ID: PAT_MRT4530_37160C.1
atggcttcagctccactcccacaggcagctcaactggggtataaaccaaacgtcttctccttctggatcttttttcttcaactgagattaattgattattgcaaggtgagtacatgaaatactccgcaagccacacaataaatatgcaagtgcacaaggataccaaaggatggcataatataggctcatttgcaaaagcagcatttagcaaacatttaagacgacgcactcacgaaccttcgcaacgacggaaacgacaaactaacacgcaaaatgaaaaaaaagaggcggccaaaccgagggtaccagaagaaagagcacgatgaggggaactcactgaggggcggcaccacgaaggacgacgatgaaaaacggccggcgacaagattgaggcggtggcgagatcggcatgacggcgtcggcggcgctacggcgggcttcgccttcggccgagtggtggatggtgtgcagctcctcctcgcgaacctgatggtggcgacagcgacgctgaaatcactttttctcacttccggcccatccctttctctcttcttcccttgacccagccggcccaatgccaccgtcgctgccgtagctttgagcgcagccgcccacagctttacgccgccgcagtcgtcttaccgtcgccgccaaggaatcaccgtcgacgtctgtaccttcggaactgggtgcctcatcgagcaaaatgcgttggaggtacagtcgtgctcgtcggacctgaaacgacgtcgcccttg

SEQ ID NO: 33007 - DNA, 1471 bp, Oryza sativa
  Clone ID: PAT_MRT4530_37161C.1
ctgctagagcacgaggaggaggtgctcgcgggcgaggccttggcccccgtgcgcactttgacggtcgttttgagccccatggtcatcaccatgtggaggaatatggtgataatgatgtttttttttcgcaaagcatgatttggggcagcggcatgcccgtcctcaccgaggtgctgtccttggcaatgcaggacatcatcatggtcgccatgatcgtgatgacccagacaatgttgctcgggtaaagttgagtgttcccaagtttacttgaaaggaagacccggatgcttatcttgattgggaagaacagtgtgatcaaatttttagagtgcataatctttcatctcaaaggagagtaaagcttgcttcagtggagttctctggttatgctttcactttgtggaatcaaatgcaagaaagtcagcatgtgctgggtcgtgatcctattgaaacatgggatgaaatgaagcgtgttatgagaagatgttttgtgccttcacgttataggtgtgaccttcacaatcggctacaagtgttgagtcaagggactcgtacagtggatgagtattacaaagaaatggagttgctcttgatccgtgctcaaattagagaagatgatgagtcgaaaatgacaagatttttgcatggtctcaatgctgaaatttctgattttgtggagatgtttccatacaacactttgcaagatcttctcgatcaagctcggcgcacggaaaggtccattcggcaagaatggcgtaatcagtcctctagtggccgctccaatgcagctccatggcatcgcatgcagcaaaccactacccacaaccatcttcggcaacatctccagctgcatgcacaaattctcattggcctgctgcacctatagcatcatcttcgtcccgtagccgtgatattgtgtgtcacaaatgccaaggtcgtggccacattgctgccgagtgtcctagtaggaggaccatgcttgtgaatgagacgggtgaatgggaatctgcaagtgagacgaagggatgacagtttacgtgaagaagtgttgattaatgagcaagtggataatgataatggtgacaataattgtttcatttctcatcgcgtgcttagtgtgcaagttgcaaaggaagaacatggtcagcgacaatatttttcacactgatgatatcatcaatagtactgtttgccgtattatttttgttagtggcagctgcaacaacattgctagtttggagttggtaaaaagattagacttgaaacaacgacgtcacccaaccccatacaagatgtagcggttgaataattgtggtgcactccgggtgaaaactattgtgacggttcatttctccgttggcaagtatgaagaccatgttgagtgtgatgttgtgccaatgcaagcatgtcagttgctactcggaagaccttggttatatgatcgtgatgacccgactgatgccacaaattc

SEQ ID NO: 33008 - DNA, 339 bp, Oryza sativa
  Clone ID: PAT_MRT4530_37162C.1
atggatcctttgtacctatctcagatcataccggatgtgttggatccatttatttcaaccatttcactcagagtaacctacaacagcaggctacttctggcaggagcagcgcttaaaccatctgcagttgtaagcaagccacaggttgatgttggtggcaatgacatgagggtttcctacacactggtattggtggatccagatgccccaagcccaagtgacccatcgctgagggagtacttgcactggatggtaacagatatccctgaaacaacttccatcagctttggttatgttccgcaaaggctcaaacatgttattaccactaaatcatactag

SEQ ID NO: 33009 - DNA, 483 bp, Oryza sativa
  Clone ID: PAT_MRT4530_37163C.1
gcggggaatcctgtagcaaattttgccttcaaattaatctagttttgtactgacgtgggaaattgtgtctatattctgatagaactcggtaagagtcaggttgtgacttgatgagaccatatcttggttccccttaaaccctggatcggcttgttcttttttgtcctgaatcgaatagtttcttgctacggtttctgtcataaatttaccaatatgagcaaaccatgtagcgctctcaactatggttgcctcaaaatggatcctgtatgcatatcactacttgccagtaggtttgattttagtgcataggtgtgtatggtagtaacagattaatgtggtagttcaacttcttccctgctattgctagattgatgggctacttttttgttgccattcctgactgctcaatgtggttcagttttggactggatctacgtagagggaattctctcctatcttttcatatattacattgtttcataa

SEQ ID NO: 33010 - DNA, 628 bp, Oryza sativa
  Clone ID: PAT_MRT4530_37164C.1
actagtggatccccgggctgcaggctctatggccttgatctcagcaataacaggttcagtggcactataccaagtgatcttggcagtaggcaatttgtgaccattgtgttggccagcaacagcttctcgggagaatttcctttgacattttgtcagctggattctctggaaatcttggacctgtcaaacaatcatctccatggagagatccctagttgcctatggcacttgcaggacctggtattcatggatttgtcatacaactccttttctggggaggtttctccgatgtcggcttaccctaattcatcattggaatcggtgcatcttgctaataacaacctcactgggggatatccaatggtcctaaagggatgcaagtggctaataattctagatcttggtggcaaccattttgctggcacaattccctcatggattggaacttgcaatcccttactgaggtttctcattctgcgatctaatgtgttcaatgggagtatcccgaaggaactatcacaactctcccatcttcaattgttggacctagctatgaacaatttagtaggttcgataccgagaagttttggaaattttacatccatgatacaaacaaaaactgaactga

SEQ ID NO: 33011 - DNA, 777 bp, Oryza sativa
  Clone ID: PAT_MRT4530_37165C.1
gcccccgccgtgctcctccgcctcgccccctcgccttcgtatccccagaacccgccgccccggcggcggagccccgcctcggcatgcggcgcctcgcgccgggacttcgccatccacaccgccatcgcctcggcctccgcgggggtgcggaagaggaggcggccaccgggggagccttcccaaaataagaagggctcccctctgctgggcggcatcgcgaacaccaagtggtggtcgcagtactacggcagcggcttctccatccgcgttcccccttccttcgacgacatcttggagcccgaggagttcaacgtcgggatgacctactacggcgacaaggcgaagcccaggacatacgctgctcgcttcgcgtctccggacaggtctgaacttgtaagcgtggtaattaagccatcgaatcagctcaaaatcacattcctagaggccaaagatataacagacctgggcactttaaaggaggcatcaaagatatttgtacctggtggcgcaaaattatactcagctcgaacaattaaagttaaggatgaagatgatataaggtactatatgaccttttctatttattttgaggcaaaaaaaaaatcttatccctcatcaataagtgtcccaatttggacagaattgttcttgtattttgattttggtcatgagagattggttctgcaggacatattacttttatgaagatcgaaaccgatgcagctcaacccgaaagcaagaactcgtcgaaacaaaacgaaagtaaaagggtggcga

SEQ ID NO: 33012 - DNA, 450 bp, Oryza sativa
  Clone ID: PAT_MRT4530_37166C.1
atggcgaagctaatggtggtggtttcgctggctgcggtggtcggtgtcagcgatggtggcagcgcgagcggcggatgctccggcgacggcaagaaacggcatggcaacggcgtcgacccccttccagactccggactgccaagaagagaagtggaacggctcaacgacaatctaaggatgctacacgaacgaggaactgcgccgaagctcacccgagagcgaggaacggacgacgttggccggcggccggacttgaggaagaaagagaggatctccttgttggctgctcttcagcgcgattcccttcgcaggccttatcctagaaccttggcgacgctcatggcgcagcggctaggtcggagatgcaccggatcatcgggaacggcgaagcgaccgacggcggcgctctggacaccgaggacgccgacgagctcgacggaatgtgtttga

SEQ ID NO: 33013 - DNA, 1412 bp, Oryza sativa
  Clone ID: PAT_MRT4530_37167C.1
caaaaagaaagaaaaatacagatattgtcctcgatgcaacacaggacacagacatcttgactgcaagagaaaatcaaccttttgttgggccacaaataccccggtgcctcgacagcagcgaagcttgggaatgccctaacctgacaaggccgggacccgcctcgtcggcggcgaagacgtctccgtccctcagccgggctcgatggacgggtggagcactggattcggagatttggaagagagagaggaagaaccaagggggaggtggtccgtggtccgtgggccgtgggccgtgcacgcggaaaggagggcccaccaccgtgccgtgcttatccaccaaaaaatcggttcaccccgtgtgcgtgcgcgttcctctcaccacggcgaacttccagcctctcccgccgcggcttccgcgccgtccgctcggcagtggcgccgccgcctcgccgcgcaatggcccccgccgtgctcctccgcctcgccccctcgcctccgtatccccagaacccgccgccccggcggcggagccccgcctcggcatgcggcgcctcgcgccgcgacttcgccatccacaccgccatcgcctccgcctccgccgcggttgcggtctccgttcgtccggccaccgccgccgccgccgacgaggaggcgccaccgggggagccttcccaaaataagaagggctcccctctgctgggcggcatcgcgaacaccaagtcgtggtcgcagtactacggcagcggcttctccatccgcgttcccccttccttcgacgacatcttggagcccgaggtctctcgtctcctcccaatgtactattgcgcgttcggtttcctcaggccatatagtcgcgcgaggccgcgagctcaacattttggttttaacctcggaattttatcgacaaatcaggagttcaacgtcgggatgacctactacggcgacaaggcgaagcccaggacatacgctgctcgcttcgcgtctccggacaggtctgaacttgtaagcgtggtaattaagccatcgaatcagctcaaaatcacattcctagagcatttattttgtctaaaagaaaaataacttaaaggaggcatcaaagatatttgtacctggtggcgcaaaattatactcagctcgaacaattaaagttaaggatgaagatgatataaggacatattacttttatgagtttggtgtggacaaagaacatgttgctgtaatggctactgtgaatagtggaaagacatatattgccggtgccactgctccagagacaaagtgggacgatgatggcgtgaagttgcgatcggctgctgtatctttgtctgttttatgatgcaaagcagaataccaagcatttattcagaatttcaggccgcagctgcatagatgaatcatatcatcttattttt

SEQ ID NO: 33014 - DNA, 450 bp, Oryza sativa
  Clone ID: PAT_MRT4530_37168C.1
ggtgaaacttatttttaacttcttggaactttaattttaaaggataggcacttgagcccttctgcattcggatttggcagacattatcatagccagtgaaacaggatattatatcaacatgagaagggccccttatccgccaaaggaaaagacaaatgcacgcaaggtttatgctggtgtagctgaactcccagaataatgatcacatgaacactgctctttaacctgactacaaaaaccctgagggccggtctaaggcaggctaatagtctggcaccagccattgcgtgctaatactaagacttcaagtagtcgggagtccaaaggtccaaaacgcatcgtaaaccaaaagaacacttgcaacgtagatgtgaaccaaaaccaaagctttgatgctgacaacggcaagaaaagtaaacgcctcaaggccaaggagagagccctgggaaa

SEQ ID NO: 33015 - DNA, 494 bp, Oryza sativa
  Clone ID: PAT_MRT4530_37169C.1
tttttttttttttttttttttttttttttttttttttttttttttttttttttttttttttttttttttttttttggggggcaaaaaaaacgccatttaagtggccgttaaacaaaaagaaaaggggaaaggggggggaaccaaaacaaaacaaggggggctcttttcttttaacgaagccaccaaggcttttttctttccaacggacccaaaatttaaccccctgggccggccaaaattaaaggggccggcctgggccatttggggtaaatcccccaccgggcccccccatttttttgcccgccgggggggggcccggcccttgagggggtttgggcatgtcctctaagggaaataaccgtcctccgactgggacttctccgcgccggggaccattttctagatcccctaccttactaaagggggggaggggcctttcccatggccctgggaccccgggatcaacaccccaggccggttgggggactaggggg

SEQ ID NO: 33016 - DNA, 1543 bp, Oryza sativa
  Clone ID: PAT_MRT4530_3716C.1
ggtgcaaaagctaaatcgaacccacaatgcgaggctccttgtcgtccttctcgcatggattgcaggttgtttcatagatgagtgcaacattggatgccttggtcaattccatcctatgcccgaggtaccatggtcaccatccatactttgcttgagtctctgcttttgtgaggaatcccttggaacgcctctcggcaagctccatctccttttgcttcatgtcatagaatagagaaccaatctggtgctttcttttgtgcagcttggagggctttccttttgctgaaggggcgggctggtaactagggccgaaggccatcccagtgagcttggacttatcctccctcggtcggttcttcatcagctctgcctggttaacctctaaaatctctgccggcatatcgctcctacctctcttccctccaatcctaccaacctccggtggcagtattggctgctggattggcggtgctgtcgctgcagccgcattatgttcgtacccaccagcatagccccctccatatgccatttccgtcgaatgcccatatccatcaccatgttctactccgtatgtatttccatacactccaccgtgctctcctccatatgccgcatactgcgcttcagtcccatagttcacattgccgctcggatcccagccatagtttgcaccgtaattggcgtagtaatttggatcccatgcgtagccttcctgtccattactgctcccaactccagcatcatagctttgctgctgattctgctgctgctgtccagcttcggaatcaacagcgagctgctcctgctgctcctccggcacaggcatctcatcgtcatcgctgctcccattcgattcatcgtcttcatcatcggcagaggtagtatcaggcctttcgggggcaattgcgttgacggccgaggacgatggaccagcggcgacaacattcgacctctccggcgcagcggtgtctatggccgacctcctggcggcgccgccaccgccgagcccgagggagcgcttgggcggcgggaggaacgaagagacaggccccgtgcccgcggatacgggcgggcgcggctcggcctcgctagggcggcgcttctcggcgtcgtcgtcctcctcgtcggagctctcgcccgtgggctggcggatcggaggcgggcggaactgcacgacccgcttagggttcccggaggaggacttgggaggcgggatggcggagaagacgggcccggatttgggcgccgggagggaggagaagaggagcgccgacttgggctgcgggagcgacgagaagatgccgccaccggagggcggcttcggtcgggccgcggcggcggcgggaggagtgggtagggtttcgtcggcctcgtcgtcggaagaggcgtagttggcaagaagggaatccatcgcggcttgcggattcgatcggcggcgcgcgggggaggagagcaggggtagacgcctccggcggcggcggcgggtggggttcgattggaggtggagtgggagccggagcggcgcccgcggagcccggggatc

SEQ ID NO: 33017 - DNA, 1699 bp, Oryza sativa
  Clone ID: PAT_MRT4530_37170C.1
ctgtaagtatttccaactatattcggggtcaaagcttgagaccagttcactttttagttctgaactacaatgtaatagaatagaatggctgaaagttattctctgtaatcctctccattcaaatggatctggatgcgtgaggaacgctatggtataaacctctttggaagaacaaataatcaagatatgaaggaacctgacttattcttttgttgacctatacagtacatatggtaacttttgctaactagtcatatcatttcacttgtattttgtaagcactgaccttttacctacagcaattgtgtgtggaactctttcagcagtcactaaattaattgaagaatctgctattgaccccagccctgtacagctgcatgcactcaggaccagaggcagagaacttaacctcggtgtatgctggcacgaagaaaacatcaccttgtttagacttttcaccatttggcatggaatctacctggatctcgccttccccggccatcactaggtagacggatggacctgacactggggatatcacaaccagttcgcctggtggtagtgagcagcagtcaacttcgaactcatcaaacggaggggtgtaccttcttacatacggctgtacaggaaccccccgcaagatttctggaaagacctgtttgtatgttagcatagagcaaagagtttgcacatctctgtacttgggtgtcaaaccagcacgaacaacattatctgaagtggccatacattcaatgcattccccggatagatatgcatgtggttcattggcaccaatgtaaagtgcttcaccaggactgagcttgatataattgaagaaaaatgctgatagaacaccaacatcttctgggtattgtttctccagcgacaaaactagattttctttctcggttaaggtccttaccttgctctcagcattcaggcgaaaaatcaattttgtaattgcttcagaaaccgcttctttactagctgtcattagcttagtaaaagctgaccgcagacaggattttacttcattgacaccatggtactctttcacagacaaaagcttggcagcatcttcaggtccaacaaggtcttcaacttcaggcacagttcttaaaacgtccttaagttcctgtagctgctgaccacctccataggaatttgaggatttctcacgtgcaagcctgcttccacaggaactttgacatgcctggataccggcaaagccgcagaggacgcggaactcggtgacggcgatggccatctcgggcttgtggttgccgtccttgtaggtggccggacgcagcgcgtgcagcacctcggcgaggtccttgtccgggtgcgcctggatcgacagcgccttggccaccgacagaaccttgaagaggaatgggaggtcgcctccccagcgagcggcgacggcggggccgagcgcggcggggtggcgcgcgagccagtccctgaggaggccgtcggcgaggagggaggagggcgcggaggggtgcgtgcccatccacagctcggcgtaggggcgcgcggggtcggggccgtggtcgtcggcgttggcgtcggagaggcgggcgacgagggaggcctccccgcgtcggccccactcgtagtgctgcaccgcgcagcgcaggcgcagggaaggggaggagggctcctcctccggcggaggaggagtagggccggccat

SEQ ID NO: 33018 - DNA, 540 bp, Oryza sativa
  Clone ID: PAT_MRT4530_37171C.1
gccgtcggctcagcgccaagcgcattggcgctgaggttggccgtgtcagcgccaacgggactggcgctgacattgtgccaccgtggcggccgggccgatcccctagctgacgtggcagctacctcagcgccaaccgcttcggcgctgaggtgcccaacctcagcgccaaccgcccgcctagggttcggtcgccaccgcgttctcctcgcccaatctcccccaaaaacctctctaatcgaaggtgatttgtgcggcattgagtttgggatcggaagagaagtgtttctgttccatgcaaccgcaatcaacgagcgaacgaagcatatgcatgccaaagcaaaaggaggcaaggatctgcagattgcagatcgagccgacgtggaacgtgaggccatcagcagccgttgcgccgagcatccacggtgcccggccagaggcgggcacaggggtgcggacctgcgaatctgcgatgcgtctgcctccccgtaccactaccaatgcaagttgcccagaaatgccaaaacccaaaaagcaagcgga

SEQ ID NO: 33019 - DNA, 580 bp, Oryza sativa
  Clone ID: PAT_MRT4530_37172C.1
cgacgccgctgcagctccgcgccgaggccgccgcccccgccgccgcagctccgcgccgaggccgctacgaggcggtggggtggcgcagaggccgcgatgtagaggaggcgatggcgcagaggagcgagcagcgcgcaggcttgggttcacggtgatcggagctgtgtaggcgccgggcgagcagctaggccgtcgcctcagcgccaagcgcattggcgctgaggttggccgtgtcagcgccaatgggactggcgctgacattgtgccaccgtggcggccgggccgatcccctagctgacgtggcagctacctcagcgccaaccggactggcgctgaggtgcccaacctcagcgccaagtaagttggcactgaccttggctacttagagcccggccgaggccgccccagccagttcttcctccgttttttccccagccgcccgcctagggttcggtcgccaccgcgttctcctcgcccaatctcccccaaaaacctctctaatcgaaggtgatttgtgcggcattgagtttgggatcggaagagaagatgaaagtacacatggaagccaaggggtgcagga

SEQ ID NO: 33020 - DNA, 1651 bp, Oryza sativa
  Clone ID: PAT_MRT4530_37173C.1
atggccttggactcgccaccccaccatcaccacccaacccaacccaacctcctctcctatcgtcatccgctcttcttcccctcttccccactcgcaccaaccccaacccccccaaccgccgccgccgccgccgacgacccaccggtcgccgcgtcgccggagtcgcgtactggagaggggggcggagaggcaccagccgccccctcgcgcgctgcagcagcaagcggtgcgcgtgatggcgttccactaccaggaccacgcgctggcgatggacgccgcggctgcggcggcgtagacgggcggccaccaccaccctgggttcgtcggggcgggaggagttgtggggggaggaggaggaggagggtgggagcgggagaaggccgccatcgcggcgcacccgctgtacgagcggctgctggaggcgcacgtcgcgtgcctccgcgtcgccacccccgtcgaccagctgccccgcatcgacgcgcagatcgccgcgcgcccgcctcccctcgcagccgcctccgccgccgccgccccccccggcccctccgctcgcgaggagctcgacctcttcatgacacattatgtgttgcttctttgctcattcaaggaacaacttcagcagcatgtgcgtgttcatgcaatggaagcagtgatggggtgctgggaacttgaacagtctttacaaagtctaacaggggcatctcctggtgaagggactggagcgactatgtctgatgatgaagataaccaagtggacagtgaagccaacatgtttgatggaaatgatgggtcagacggcatgggctttggtcccttaatgctgaccgagggtgaaagatccttggttgagcgtgtacggcatgagctgaagaacgagcttaagcaggggtacaaagaaaagcttgtggatattagggaagagatccttcgcaagcggagagctggtaaacttcctggtgatactgcatctatactaaaagcttggtggcaagctcattctaagtggccatacccaactgaagacgacaaggcccgcctggtgcaggaaacggggttacaactgaagcaaatcaacaattggttcattaaccaacgcaaacgaaactggcatagcaacccagcatcctctggtgaaaagaccaagaagaaaagaaacgttacaggtgatggtggtgctgagcaatcgtggtagattggttcaacatgaaactagatgtaaacagtaccttttattgtgaagagtgtagtacattctctcgtgctctggtgtgacaaaatctggagaccggcccattcacaagggaattgcgatcataggcgtaatcactgggcaaagaagtcatctgaaattgtagcataagcgcacaaaactgaggtgggtggtatttgactttcgcagtatagcatcgactgtctgctaatgtgattttgtgaaggaatgttctgtataaccgatgaacggaaggaagaattgtattgtgtatgtaattgtgtatcttatttatcatgtaatatatatatgatattaggagctttaagattcggattggatatgttctctgttttgatgcacgatgcagtgttgaggtgtaacatgttttggtaattcactgtgtataaaaaaaaaaaaaaaaaatgcgtaagcttttct

SEQ ID NO: 33021 - DNA, 1872 bp, Oryza sativa
  Clone ID: PAT_MRT4530_37174C.1
atggtcagcccatccacaagggcaatcttccgttttgagaatttctgggtccgaatcccgggcttcatggaggttgtgcaacaagctttgtcctcccacgccttcggtggacacccttttacagagcttagccacaagttgacagccacggctaaagctctcagaaagtggagtagaagtctatttggagagatcaaactacaattccacatggctcaggaagcgatccttctgttggacttggcccaggagaacatgatcctctcttctgatgaacacctgctcaggaaggacctcaacttaaggatcctagggagaaggaaaaaccacatccaccaactccacacaacaaatgctatcctgacagaacatgaagagaagagtgaggcacttttccgccacttcaactcaatcttaggcagcaaggagacacgaaattgtattctaaactgggaagcgatggatttgccccagtgcttgtatgatctagcagtagggaactttggagcactcaatagagcagcaatcaccttgctaccaaagaggaacacacctacatgggtcactgattttagaccaattagcctcattcactctgtggctaagctgatatccaaagtgccggcgatgagacctactaaacagctagatggcctgatctcggttgcacagagcgcctttatcagaaaaaaggtggatgttctcattagcattcttagggactttggcaaggtgacatggctgcatgttaaccttgaaaagagtctggtagcaccaatccgatgccaagaagtggatctagatgtcgttttgcgcagtttttctgggtcaagaaccagcttctcactgacttatctaggacttccactcacgcctggccaactgcgcaaggtacacttccagcccctccaggataagatcaagggtcggctgtcgggatggaaaccatcattgctacatattgggggagggggagacttttccagagttgcaaatttgagcagtagtagtgaaacctaccacgatgctgatcaccgggcccatcaacgacgacatcaggcatttcaagagggagatgatgaaacacttcaggatgagcgatttgggattgctcacctattacctagggatggagaagaatggcatgaagaattgcaatccctgttgcgtgccgatggagccaaagctgaaattggtcaagacaagtacaagcccacctttgatgtcacaacttattgcagtattgtgggtgcactgcggtatcttgtcaataccaggccggacctggcattttctgtgagctattcaaacacatactccggtacattgctgggacactggagtatggtgtgcaatacactagaggagaggcaggaaaacttcgactatgtggctacaacgatagcgacatggtcggggacgcggatgatcgcaagagcaccacaggcggcatctacttcctcgcacaaagtcccatcatctagcaatctcagaaacataaggtggtggccttatcctcatgcgactgagtacgttgcagcaacatctacgacgtgccaaggtgtttggctggctgggttgcttgaagaaatcatgggagcgcctcctgcgacggcgatgttgaaggtggacaacaagtccgccattgcactgtccaaaaaccccatccaccatgatggaagtaagcacatccaaatttgtcatcattatattcgagaatgtgttgaggtggggaaaatcgacatcgacaatgtgagttcgtcactgcaacttggtgatctgctgaccaagccactgtctcgggctagattccaggagttacgcaagcttattggtgtcatcaatgccaaacatgagcaccacaagaattag

SEQ ID NO: 33022 - DNA, 474 bp, Oryza sativa
  Clone ID: PAT_MRT4530_37175C.1
cccacgcgtacgcccacgcgtgcggcgctctttcgcgctcggcctgcggatgcaatgctgacagcagctgcaggacgtgagccgggagtgccgctgcgccgctatccgacggatggtgatgagctacgaggagagcatgccgatgcccctggagcaaggctggtcgaccgcgtcgtcggagtactacggcggggaggggttcccacaggagcatgcgtactacttgcaggggtcgtctgaggagggctactaccgtgagcagcaacagcacccggggatgacccgcgtgaggctgaccagggccaggcagaacgcgggacagctgccgtcgattgccgggttgagccccagcactgcaacattttctccgactggcagctactaaggttagctgggttgcctcatacttgtgtgatcacaccgtttgtttgttgcatgcaacgagatactgatcaaaacaaataatgaataatg

SEQ ID NO: 33023 - DNA, 433 bp, Oryza sativa
  Clone ID: PAT_MRT4530_37176C.1
cgagaaaaggcctgtgtcaaggagagggtagtagcaccttgctctcctttgccttcagagaggccggaagcaatggcgtctgctactctcctcaagtcatctttccttcccaagaagtctgaatggggtgccacccgccaggctgccgcccccaagccggacactgcctccatgggcggccgctctgctccctactacgaagagcttgacaagacccggaaacccataggatgaccgcgaaggggtgtgcttgtccatgctaacgcgaccgcaacctagagggacagccttgcgccacttgaacgcggaagcaccggcaccaaccatgggccattgccgaggttcattggtactgcaccgatccatgctacttcttattcttccgtcctacacttaggaaaaagacctcatgtgtgtgatggattagtccctt

SEQ ID NO: 33024 - DNA, 281 bp, Oryza sativa
  Clone ID: PAT_MRT4530_37177C.1
attcctatggattaatttactagacttgagttaaaggtaaaaccctatcgattgcttctggcactagccctccgctggtctgccaagctgaatccagcctacggctctatgatgtacctgaacatggagggatacaaaggatggacaaggctatcaccaccttccgcctacctcactttctatggagcacacaacaaaaaaagaatcctagtactagagcacttaataattcaactaagcgacgaacccgcaacgatgggaatatatgtcattcaagcaac

SEQ ID NO: 33025 - DNA, 480 bp, Oryza sativa
  Clone ID: PAT_MRT4530_37178C.1
atggcgtcgtacaggttgctcgtcatcctcgtcttctccgcgctcgtcgccttggccgccggcgacacctacccggcggactgcccctacccatgcctgctgccgccgcccacgccggtcaccaccgactgtccgccaccgccctccacgccgtcttccggctactcgtacccgccgccgtcgtcctcgtcttccaacacgccgccgtcgtcgtcgtcgtactggaactacccaccgccgcagggcggaggaggcggctacattccctactaccagcctcccgccggcggtggcggcggcggcggcggtttcaactacccggcgccgcctccgcccaaccccatcgtgccgtggtacccttggtactacaggtcgccgccgtcgtcgccggcgacggcggtgacggcgcgggggcgttcgctgcttgcctcggtggccgtggtaacagctgctgctgctgctttaattaccgtgttttaa

SEQ ID NO: 33026 - DNA, 1982 bp, Oryza sativa
  Clone ID: PAT_MRT4530_37179C.1
atggcggccgcgctcttgctggtcatggcggctctggccggggtcgcggccggcggcgacatcgtccaccaggacgacgaggcgcccaagatccccggctgctccaacgacttcgtcctcgtaaaagtgcaaacctgggtcaataacagagaggatggtgagtttgttggtgttggtgctcgttttggccccactatagagtcaaaggaaaagcatgccaatcggacaggactattgttagcagatcctattgactgttgtgatccccccacacagaaggttgctggagatgttttgttagtgcaaaggggaaactgtaagttcactaaaaaagctaagaatgctgaagctgctggggcttctgctattataatcatcaatcatgtccatgagctatacaagatggtctgcgaccgaaatgaaacagatttggacataaatatacctgcagttcttctgccaaaagatgcaggcaatgatttacagaagcttcttacacgtggtaaagtttcggtgcagctatactctccagaccgtcctctggttgatactgcagaggtgtttttgtggcttatggctgttggtaccattctttgtgcatcatactggtcagcatggagtgctcgagaagcagttattgaacaagagaagcttctaaaggatggccatgaaagttcactaaacttagaggctggtggttctagtggcatggtagatatcaacatgacatcggcaatactgtttgttgttattgcatcttgcttcttgataatgctctacaagcttatgtctcactggtttgtggagcttctggtggtcatcttttgcattggtggtgtagagggtctgcaaacttgcttggtggctttattgtcaagatggtttaaacctgctgccgaatctttcgtgaaagtgcccttctttggagcggtttcataccttacaatcgcagtctgtccattttgcattgtgtttgctgttatatgggctgtttatcgccggatgacctatgcttggattgggcaagatattcttggtattgctctgattgttactgtaatccaaattgttaggatacctaacctcaaggtcggatctgttcttctcagttgttccttcttatatgacatcttttgggtttttatctccaagatgtggtttcatgagagtgtgatgattgtggttgcccgtggtgataagactgatgaagacggtgtgcccatgctgttaaaaatcccacgaatgtttgatccatggggtggattcagtatcattggctttggtgatatacttcttcctgggctgttgattgcttttgcattaaggtatgattgggctgccaaaaagaccttgcaatctggttactttttgtggtcaatggttgcttatggttctggtcttatgatcacgtatgttgccttgaaccttatggatggtcatggtcaaccagctcttctttacattgtgccttttacgcttggcaccttcatagcgctcggcaggaaacggggtgaactcaggaacctctggacaagaggacagcctgagagagtctgcacgcacatgcacatgcaacctttaccgaaggacatcaattgtgatgctgtaagctcgtaagaaagcttatcagcatggccttggagttggagaggctcactgatacgtctgatgtaaattatatttgctcacggtattgtaacataatatgttctctggaggcagaatcgcgactccactgacttgtagtaacgtagtactacgtagaagtatttgtaactagggcactaggcttcactgctgttgtcctagtatggaactacggatccatgttgtcatcactagcaggcatcaatcttttgtatagtaaccggttatatagttttgtggccacataagaaatgaaggaatttttaagtgattttaaaaaaaaaaaaaaaaaaaactagttctctcgggcggcccctattcctgccgcccccgga

SEQ ID NO: 33027 - DNA, 187 bp, Oryza sativa
  Clone ID: PAT_MRT4530_3717C.1
aagacgaccggcaggtgggccccacctgtcggcgcccgaaggagagagggagggagggaggacttcggggaggggaaaggggaacgggccggcccaaaggaaaagaggccgagcgcgggagggaacttggaaccttccaagatttcgtcctgcaagaaggccaatgagcaagctgaatccagatcct

SEQ ID NO: 33028 - DNA, 690 bp, Oryza sativa
  Clone ID: PAT_MRT4530_37180C.1
atggcacccagcgacagcctggaggcgaacgctatgccgctccactgcgccctgggtcctctccacttgcatcgcggtgacgacgcgagagcaggagggagtcgttggggcgaggaggttcgacggcctgccagcgatgtggtggcagggacgcggcggcggagacacgagagaaggagagggcggcggcggggcgaggcggcgtcggcgggcgagtgcggtggcggagaggtggcggcggcggcggggcgaggcggcgtcgatgggcgagcgcggctgcggatggggagcagcggcgccgacgactccgcgccgctcggcctcattcttcgctcactgggagggatgactgaggtgagaggacgtcgccagacggttcagcggccagaccgaggtggcgagcatggacgacaacgaggcgtgcgagctgaacgggtgccgatggagccacggaggagcggtcgatgcagcatcgccggaggtggcagtggcagtggcggtacgtactccctcggcgatggccttgctggcggcgcgctgcacgtcgggcagctggtggtcggagtctggagtggagacgacgggggcgagcgggacgtggagcagccaggcagagttggcgaagtcgaggctggcggaggccccgcacagggcgagcatggcggcgtcgtgcgcgcgcggtctccttga

SEQ ID NO: 33029 - DNA, 219 bp, Oryza sativa
  Clone ID: PAT_MRT4530_37181C.1
atgggtgaggaggtggcaccggcgtgcacctatggagatgacgctgtggccgaagaaatgctcaagaatctctaccacctgctcctgtggccactctgcaacaccatcgcccgatgccacgccgagcagggccacatccgtgtggctgccgctgtgctaagcttggccacgtccttgccaccaccactaccatggctttgctcttttgccaacccatga

SEQ ID NO: 33030 - DNA, 315 bp, Oryza sativa
  Clone ID: PAT_MRT4530_37182C.1
atgtggggcggatgggggacggggcaagagaaggcgaggacggcggcggtgaggtggctcgacgccggcaagaccgcgcctccgcctccgctcggaagaacttgcaccaggagagatgtcatcgccgacgttgccgtcgcagggaagacaccgtcgctgcagggaagatgcagccgctgctgtcaccgggaacacaccgctgcttccgagaagttgccgccgctgttgttgccaggaacatcccgtgatcccgtcgctgccaggaagatgcggtcgctgccgccacaaggaagacttcgccactacaagatttag

SEQ ID NO: 33031 - DNA, 2080 bp, Oryza sativa
  unsure (1)..(2080): unsure at all n locations
  Clone ID: PAT_MRT4530_37183C.1
cggacgtgacnggnacgcgtgggttcaaatccacgctaggcgtccccccggcccccgccccccccccgaggccctagctccaagatccctcccccttcgcgggcgcgccgccgcggcctcccggatggaccccgcggggctgcgtgtggcctcggatcccgccggatcgggcgcgtcgtccccgccgccgccgccgacgacgaccacgaaggaattgggtcgggcggtggctgcggaggcgtcgtgcgggtcgcgggcggcggtcggattgggagatatgagagtggggatttcagattcgtcagatcgagcaaaatcttgtctacatccatgtgacaagaaagatacacctcaagttactgctgaagttgcaacaagaagtgaagatggagagccctcattgcttgagactggttcatttcttcagccagaggctgcctgcctcaccttgggccgttcttctgatgcagcagaggtgaacaatttgtgtgataaagaaaacatcaggacagacttgcaacctaagcctgatgtaagacatgtagagaacagaatgaatggtgcacctcttggattggatcttaatatagtagattcttccaatgctgcagaacttaatcccttctttccttacaagaagttggggcagacgaaagttagtgatccgtcagagtgtggtagcacaactggggctgtaggagagagtgagtcacacaggaagtggagagaaatgaagcagaatgggttcctttcttcatctcaaggaactgcagtgggtcctaggccgcgcggtcgacccatcaaaaggaaaagagacgatgaatccaaaaggaacacttttgctcagaaggaacagacaaacaagttcatgaaggttgctgctccgagtggcctattatctgggctaaaccctggaatcattaaccatgtgagaaacagcaagcaagtttactccataataaaggctatggtgcactctgagaatcttgagaaagagaaccaggcagttcatgctagtcaaacaggcgaaagagggagagaatttagtgagaaggctcaggaccagagatatgggggtaatatgatgaattgccacttcttgatgaaaggtagcaacatgccgtttcaccaagggttgcctactgcttcacaattccttccagaggacggtgatgatctgaaactgcaactctcatcagcagtcactatggcttcagacaggacctgcagtacatcagccgatgattttgcatctaatcatgattacatgactgtgttatcagtaaaagcggccaatgttgcttctcagtggttggagctactacagcaggacatcagagggcgccttgctgctttgaagcgcagcaagaagagagtcaggaatgcccttcagactgaactgccctacctaatatcaacagaattttcatataaccaagagaacgaaccatccgttgtacattcttctgatggtggatctactggaaaaacagttccagaagcgcatgtggcacgatggcggtctctttttcttcagatggacagaacacttcaggaggaggggatgcatctggagaatcggttgaaggaagtgcaagaaatgcaaatgaattgtgagaaagggctcagatacatggcttgcgaggctccattagtaggaccaatggctgaattatggaaactgaagaactcggagactcctgagagcgagtgggcagtgcaagctgctgccgcttccatctactcgacttgcaacctggtcatgagaaccgagaatgtttcttgcttctgatctcttctcacaactggaattagtttcttgcttcttcttttttcttttctttttcattttactgatctttacctcagtcagcgttgtgtgttaggttatgtttttttttctctctttatctatagcctggcaatgatctcatgttgagtaaatctgcagtggtttgtgctgcactgcttcatgtaacgtgaaatactctgtaacgtctgctgtttccaacttacaatttcacagccgcgtgaaataacaaatttattcctgtaaaaaaaaaaaaaaaaaaaaaaaaaa

SEQ ID NO: 33032 - DNA, 437 bp, Oryza sativa
  unsure (1)..(437): unsure at all n locations
  Clone ID: PAT_MRT4530_37184C.1
acagctgctgctgctgctgctctgctcccctcctaccacctgcccttttgcccccacgcacaacacacgtcgtcagcctctgcctttcacgctgccgccgccgncgcgagcctgagctccggtctcctcgctctgcaccgactgtctgcgtcatcagctccatgcctctcccggcgatggacagtctgaacacgaagctgtacctgcagaactgctacatgctcaaggagaacgagcggctgcgcaaggcggccgtgcttctcaaccaggagaaccaggccctgctctccgagctcaagcaccgcctcgccaggtcgccgtcgccggccgccgcggcacccggcgtcgccaacgacagcaagaacgccgccgccgccgccggccgccacgctggcccgcctccggtgcaggacaagtcagcctccaagtccaagtag

SEQ ID NO: 33033 - DNA, 995 bp, Oryza sativa
  Clone ID: PAT_MRT4530_37185C.1
ggcccccggcggtcggctacatagggccagggccggccctggtgccggcgtcctgctacgcatactctcccctcgtccgctttgcgccaagtcaatctccccgtctgtcttctcggcctcaactcccgtctcctcgctagttcgcccgccgcgccgcctgcgtcgatttcagtccatcctgcggaggggagcagcggtgggtgccgtcctcctgctgcttccgcctccggtaattaggtttgttcgttgagacgacatgcctaagataaagacaagccgtgtcaagtatcctgaaggatgggagcttatagaaccaactctgcgtgatttggaagccaagatgagggaagccgagaatgatccacatgatgggaagaggaagtgcgaagctctctggccaatctttcgtatttctcatcaaaaaagccgttacatatatgatctttactatcgaagaaaggagatatcaaaagagctgtatgaattttgtttggaccaaggtcatgctgataaaaatctgatcgcgaagtggaaaaagccaggttatgagcgtctttgctgcctccgatgcatacagacacgagaccacaactttgcaaccacttgtgtctgtagggtccccaagcacctcagggaagaaaaggttatagagtgtgtccattgtgggtgcagagggtgtgccagtggtgattgaagtcgctgtcctgtggctacaaataatctgagagtaatcgctcgagatgtttccttgtgtttgatctctgttaagacaagcaccatatgaccatataatcaggcgattcgtgtggtgtactgtaaactcttgggctatggcatgtgtctggtgagtaatgacgatttctcaacatgttgtgttcgcaaatggttcagtagaaactagctggaagtttgatggattactgtaccccgctagacctacttactacaatactactgtatgaacacttccttgctacagaggtattaaaaaaaaa

SEQ ID NO: 33034 - DNA, 933 bp, Oryza sativa
  unsure (1)..(933): unsure at all n locations
  Clone ID: PAT_MRT4530_37186C.1
cccgcgtggacccccgggctgcagccccagccctaggcctccctgtctacaaccccaaacctccaagtttacaatccgctagccaagagagttaaaacagtacgttgatcagcatctatcagctgaatggcggccaaggcgcaggcggtgctgctgctctccctggtggcgtccctcgccgcggcgctgggcgcgcaggccatctgcaacatgtcgaacggcgacttcaggctgtgccagccggcggcggcggtgagcgacccgacggacggcccgtcggcggagtgctgcgcggcgctgggggaggccgacctggcgtgcatctgccggtagaagggcgtcgccggcttctggatgaggatctaccacatcgacgccgcccgcgccatggcgctgcccggcaagtgcggcctcaccatgcccaccaactgctcctgatcgatccatccatcgatctagctccgcgcgtctctgcattatattatttccgtcacgacactagctttgtgtgtgcaacgaaaagtatgctggttaaataattaacgtgctggtgaacttaaactaatcaccatgcatgctcctagccgatcgatcttactgttgtgtaattcatccacaattccacatgtactgaagtgtgcatggttcgatcttgatttagtatatgtaattgtgtaagtgtgtcggcaatgcaagaagccaatgttagcgtcccgtataatgataagttatcagggcttgttatttggcaattaaaaaaaaaaacaaaaaattggagggggggcccgggcccaatttgcctatatcgagtttattacgcccgctcctggccgtcttttacaacttaggactggaaaaacctggtgttcccatgtaatagccttggataaattcctttctgcagtcggtgtatagttatagatcctaccgatn

SEQ ID NO: 33035 - DNA, 894 bp, Oryza sativa
  Clone ID: PAT_MRT4530_37187C.1
atggctgctgggttggcggagcgggagccggcgtggctgcggtcgctgctcggcgcgcggttcttcgaggcgtgcgcggcgcaccgcggcatgagcaggaacgagtgcaaccagtactgcctcacctgcgccgcggccgccgacgacgccggcggcgcggccgccgtggggtgccagtggtgcgtggtggcggcgcacggcggcggcgcggggcgggatcgcggccaccgccaccgggtggtccaggtgcggaggtcgtcgtaccacaacgtggtgcgcgtgtcggagctggagcgcacgctggacctgacgcgggtgcagacctacgtcatcaaccgcgacagggtcgtcttcctcaacgagcgcccgcaggcgccgcgcaacggccggtgcgccgccgccgccgccgtggcgtgcgccgcctgcgaggcgtgcggccgcggcctcctcgacgtcgccttccgcttctgctccctcggctgcaagctgaaatgcatggaatcggatcctaccctgacattcaccatcgatcccaacaacatcccagagccacagatttcagggccacaggaagacgaggaagaagacgacgacgaagaagacgagccgttctacccaaccaaggcgaacgctgctcagagcaaggccgcgggcggcggcggctgccggccgccgccgccgccgtccgcgtcgtcgtcgcgacctaggagaggaggacgccgggtggctagaggcgacaaggaagaggatcaggaggccgccgccaacatcctcgccttcgccgccgccgcggcgcggtcggtgccggccgcctccgccgccgaccccaacagctaccggcggcgcgctaggaagggcgcgcaccgcgcgccggagcggtcgccgttcttctga

SEQ ID NO: 33036 - DNA, 282 bp, Oryza sativa
  Clone ID: PAT_MRT4530_37188C.1
atggcggttcaccacagtgcaagaaggtcgtcggtgttcggcctcccttatcccaagaactctagaacttgttgggctcctctcaaacaagtctttgccgtcatcgatcaaggtacagatgcagaggaagaagcaagattatggatgtcatggttatggataccacttctacttggacaaggggacatctatgggtataagtgcggattcgatgaggaagactaccctgtcatcgactacgtgttggttatccatgccgccaagtcgacgacagctagatag

SEQ ID NO: 33037 - DNA, 1201 bp, Oryza sativa
  unsure (1)..(1201): unsure at all n locations
  Clone ID: PAT_MRT4530_37189C.1
cgcctagtcgcctagctcactgggcttagcagtttagcgagtnaccgaaatggcagccatgacagctacaatgatccacgtcgagtccatgcagaccgccgtgccgacgcggatcacgggggcggggcggacgctgcccgtcgccgtgtccggaggggaggcgccgccgccgctcaccgccgcctcgctgcagcgccgcttccgcgcggtgctctactaccgcggcatcgagcagctgcaggcggaggaggaggaggaggagcgcgcggtgtgggtgaaggagtcgctcagcgcgtcgctcgccgaccacccggagatggccgggcggctgcggcgccgcgacgacgacgacggcggagtgcggggcccgtgggaggtgaggctgaacgacaacggcgtgcggctcgtgcaggcgtccgtggacatgcccatgtccgcgttcctggaggccaaggacctggcgcgcagggaggccgcgctcacgctctggaccgacgtggacgtgcacgagcccgagttttgtgcccccttcttcatgcaactgactcgattccaggacggaggctacgccatcggcgcgagctgcagcctgctgctcgccgacccgctgtctctcgtcgacttcctcaaggcgtgggctcgcacgcacgcggagatgcgagcgcggggcaagcccgtcgcgccaccggcggtgatacagtacgcgcgctacctccaaagccccggcgccgccgccgccgccgtcgtcaggcgcctcaagtccgttcccctcgactcctgctccgccgccgccgccacgaccgtgctcttcagggccgccgccggtgcgcaggtcgaccgccacgcgctcgcggcggcctgcgtcgaccaggccgtcgagacgctgggcggcaacgccaggaagccgccgcggctcaccgtcctcgcggccggtggctcgggagagctgcgcgtcgaggcgtgtggatgcggggacggggaggagacgacgacgccgccgccgccgtcgcggggccatcacgcgctccgggccgcgtactggggtgacctcggtctcggggagatcgcgctggacgggagcgagcccgtgcacgtgtcgtgcaccgtcgtctcgccgtgcgccgacgagggcctcgtcgtcgtgatggcgccggccggcggcgccgagctcttgatcagcgtgactgttccgaactactag

SEQ ID NO: 33038 - DNA, 300 bp, Oryza sativa
  unsure (1)..(300): unsure at all n locations
  Clone ID: PAT_MRT4530_3718C.1
cccggtcgcccaccgtccgcccaccgtccgcccaccgtccgtgctcgccgtcctcccgtcgcggcagcggcggcgggctacgcggtacggcgacgtcgcgagtactgccggtggggaagcggtgtcccgacccggtcccatcgtgccgactacatcgcgcggtggtcgccgtcgccggggggggggtggctccgcngcgccgcgcggcagctcctggaccggctgcggggctcgccgatgccgtgcattgccggtgcgcgcgttggcgtgctggtgcgtggcgtggtcctgtgggggtgt

SEQ ID NO: 33039 - DNA, 2766 bp, Oryza sativa
  Clone ID: PAT_MRT4530_37190C.1
ggcaaagaaccaaatattcgtcttgaatttctgagaatcatcgactagatgattctgcatattgtagcagaaagaaatgtctgattattacatatacatttcattcacaagaaccgcagcttaatgccttttccacccgaaaaaccccctgacaagttcatgtcgacgtcgaaacttatgaaatcccctgacaagttcatgtctactacattttattcacaacgaactcaaaacatttgaaatcccctgacaagttcatgccctgagacttgaatcttgacacgataataacatcaaaacaatctatgaagtttcgtaccaacctaacatctatatgagctatagaatctctttcttttcgccctttttttttttttttcctccgttttttgagatgcagaaactgacactgattttctcacacgagcgctgctgcttcagagctcgtcgacgtcgacgttcctgaagctcccgccgagcaacgacaggaggccgccaccgtgcaccctcccctcggggacgacgaaccctcctccctctctgcccctgcccatcgacggcggcggcgccgacgagcacgacgacttcatggagttcgggaccagcacctgaggaggtatcagctcttgcctcctcgccgcgccgtcgcaggcgtcggagtactccgacgccgtgctgacgccggaggacgagtagccgttgttcatggcgccgacgaggccgtggaagagccctggaccgatcatgctcccgccgccgccggcgcgacgctgctgtgaggccatgagcgtgccgtgcgcggcgcagaggccgctccgcccgcgggcgaacttctcgcagccggtggcccaggtgcagcgcttgccgccgccgtgggccttgcagaactccgtgctcccctgcgcgctcttggcgcagccgtcgaccctgcaccgcttgccgccgccgtgcttgacgcagcagtccgtgcggccgcgggcgctcttgccgcacccgggcaccgtgcaccgcttcccgccgccgtgcgccacgcagaagctggtgccgccgtggacgctcttggggcagagcccgccgccctcgaacatgcaccgcttcccgccgccgtgcgccttgcacagcggcgtgctcccctccgcgcccttgaggcacccgtcgaacacgcaccgcttgccgccgccgtgcgccttgcagtacagcgtgctcccctgcgcgccctttcggcagtccgggtactggcaccgccgcccgccgccgtgggagatgcagagcccgaccctcccctccgcgctccggatgcagccctcgaccgaacacctcttccctccgccatgcttgatgcaccgcccggacttcccccgcgcggccttcgggcagccctggtgcccgcaccggcggccgccgccgtgggcgatgcagtgatccgtcttcccctcggcgctcttggtgcagccgagctgcatgcaccggcggccaccgccatgcgccttgcagtaggccgtgcggctctcggcgcccttgtggcacccgggcttctggcacctctgcccgccgccatgggcgatgcacagccccgacgcgcctcgcgctcctttggagcaccccttgaacctgcacttcttcggatgccggcgttgcgactgcgccgccgccgccgccggctgcgtcgtcacaggattggtcaccgtcgtgaccacgtcggagctcacaccgaacgaggtctccgtcatggtcgccgaaggctcaggctcaggctcagggctgagctgacgaacgacgcgacgccgcgcatggccatggcgcgcgccaccaccactcacggtgttgtccgtgtgatccgccacgacatcatgacgagcctcttcaggagccgacgcgttgggccgaggcgcgaagagcagcgacggcatgtacccaccggagctcctcctcgccgacgtcgagccctcatcgacggcggcggcgaaggagatgatgttcccagcaggcgcttcttccagatgctgaatcgtcgcgccaccatgatctccccgatgaagcccaaggctgagcacccctggctcagtgaaggagaagctcctctggctgaacaatgtcgccggcgccggcgctttcgacctgcgcgccgcggaggagcccatctccggcgatggacccaatccaagaaccaacccgcagccgtcatcttgcgcagacacaccatgacccgacctccggttgttacctctcttgccatggatactactgttctccattgatgaacccaggtggtctaggcaagaagagctccgtccatggctgtccatggtgtagcttgccacagagtgtcccattatcacaactgcggaattatccatcagatgcgggtttccgcggcgaatgatttccggaaaaccgttattcatctaggctaagtaatccgatgagtccaccactgacaaaacccgatgtgtccgccctgtccatgaacttactgtctggatttcaggaaaattttgatccagactgtacttcaactctgacgggctagaccatctgagatagtgatgttaattctctggtagttgagcatcaagaagcagcaggttgtagccagataatttctgtctgatggaaaaaatttaccagactgaaaagtcctatagctagtagaatctcggaatctcaaacggaggagacgagacgagacgaaacgactccggtcgctggctgagagagagagagagagagcctcgtgccgattcctcagcccggggatccactagt

SEQ ID NO: 33040 - DNA, 333 bp, Oryza sativa
  Clone ID: PAT_MRT4530_37191C.1
atgtcgcctaatgttgtgacttacagctcaatcgtcgctaccctatccaaggctcaagcaatggaaaaggctagggaggtccttactaggatggtcaagaatggtgttatgcctgattgcatcacagatggtgttgaaccgaatgtagtcacttataacatgctcatggactatctctgcaagaatggaagatccatggaagctagaaagatctttgattctatggtcaagaggggccacaagcctaatagtgctacatacggtactctgcttcatgggtatgctagtgaaggatctcttgttgagatgcaccaactcttggatgtgatgtga

SEQ ID NO: 33041 - DNA, 189 bp, Oryza sativa
  Clone ID: PAT_MRT4530_37192C.1
cgcgtccgccacacgcttccgcccacgcgtccgctcactcgtacggactccggtacggctaatccggagctagggccaatcgggacctggccacggcgttcttcgtcatcttcgcgctgctcgccggcagtcggctgctacttccacctcgttcacctgcctgcacagacgtaagtcaggggtaccctt

SEQ ID NO: 33042 - DNA, 156 bp, Oryza sativa
  Clone ID: PAT_MRT4530_37193C.1
atggatggccagactgcgtgccgagagatcagtgaaagcgccaagctggtcaccggcgttggcgacttggcggagatatatagcattgtctctgatctcgtcgggcacgaactcaagaaggaagactaccctgttgtcgactacgggatggcctaa

SEQ ID NO: 33043 - DNA, 365 bp, Oryza sativa
  unsure (1)..(365): unsure at all n locations
  Clone ID: PAT_MRT4530_37194C.1
aggtcgacccacgngtccggttttatccttttttccccctcgtaaataaagggaactgatgctttagctgatttttctttcaccgtggaaactatcatgcctcttttcctaacatatactaacaacgctagcacatcctcacatgaccttttttctggaagcacctgattcagtgttatggatattctttattaaaggataaatgagtccttttttttgccgggttggccaaaagaagcgaccaaccaattgcattaagattaaaaggaggtgtctacaaagataaaaggagtctgcgaaattcattaatacattatggtgaaaaatacaattaataaaaaaaagggcggccgccaccgggtggg

SEQ ID NO: 33044 - DNA, 342 bp, Oryza sativa
  Clone ID: PAT_MRT4530_37195C.1
agcacaaaccaaccaccacaaacatgattataacgccaaactgaatacaacggctgtacaatgaggaattgaggatgaaagctagtcgagagaaaaatacgaaaagatacacccaaaaaaaaaaaaaaaagggcggccgcccttttttttttttttttgggtgtatcttttcgtatttttctcccggcaagcccagggtcacatagattaatcgcactgccgttggattaagcagggcgctttaatacattttttggaggggagggttatcttaaataacagatgaatatgcgggcgcccgctttggagtaacaaagataaactgcacgtgggtgaaattta

SEQ ID NO: 33045 - DNA, 614 bp, Oryza sativa
  Clone ID: PAT_MRT4530_37196C.1
acaccaccccccccccccccccccccccccccccccccccccctcttttattatttttattttatttttatttttatattttttttttatatatttttttttttataaaaattttttataaatatttttattatataaattatatatatatttttatataaataaaaaaaaaaaaaaaaaaaaaaaaaaaaaaattttgtttatttataaagaaaaatagggtagataaaaaatatggagggcaaggtgaaggacaaaaaaggagggggtggagcttgattttgaaaaaagaaaaaaaaattaaattggagaaaagggaacaggagcaaaaaagggggaaaaaaactaatggaaaagaagtgggattggggggaaaccaccctgaggggagggcaacactggtagcgcaagatttgggtgaaaattatttgcaacgaaaagggtggccaaaaagggggggggagtagggtattctgaagacttactaaaaaaaaaaaaggggggaggaatagaagctgtggttggacaagccactgggggggaaaaagcctgtgactttgaataagaggatcaaacaaaacaaaaggattggagggaacaaggggggggggagc

SEQ ID NO: 33046 - DNA, 487 bp, Oryza sativa
  Clone ID: PAT_MRT4530_37197C.1
tgttgagcaaatcttgggttatattggacgatccactgagcttatggatagatctccttctatattatcaggtgttcttgatctactgaaggcattatgggaaagtggtgctcaatttatatacattttagagaaactgagaagttctagaacattctgggagaacttatcatgctgtattcgtgctgcttttgctagttaccctatcgacagcgttgagactgttgatgaaaaaaaaatctttgaggagcaaaaagaaccttctgttgcaccttgtccaagtgacatagtgctcaaatggtttgatagcacgactatggaggatttggtaaatcatctatcaagtaatgggtaccaaaatgatcttcttcatcgtgctaaggtagcatcctgcctttgcattatccgtctattaacaaagctgtccagtggtgatactggaagcttgtcattctcgctagtgaagaagattcagctcatatctagt

SEQ ID NO: 33047 - DNA, 6348 bp, Oryza sativa
  Clone ID: PAT_MRT4530_37198C.1
atggcgagcggcggcgcctcctccgccccggccaccgcctccacccccgccgccgccgccgccaccaccaccacaagcaagaccgcgtccgcctcgctgtggtgggacccgttcatcgacctctccgatgatctcgaccgcgccgccgcggcgtccccttccgtcccggacgccctcgcggagcggatcaaggcccaccacgcgtggctccgcgggtcggtgtccatgttcgtgaagccgagcgacgcgtcgaggggcgcgttggatgcctccgaggtggttgttggggagcaccgcctcgccgtcaagcccgagctcaaggcagccgcgcttcgcctgagcaagtgcatgaacttggatgaggtgcaatcgtacattctggttaagagaacttcagaaaacactccaacagctcttgttgctgatactgaagagtttcttcgcctggtatctgtacaatattacctggagcgtcaatgcttgctgaagtgcatccgaagaatctttgttcatgcaaatgattgttctgattcaattgatgccgttagagaagaggcctcagttttagttagggaagaggtggaacagagactactatccattgttcgagattcccttgcatctgcattctctgtcaaagggggagctgaattgacgatttcttggctggaagaaacactgattgaaattaacctgatttttgacatcttgtttctttttttctatgataacctttcaaggtgtaatggtggactgtggataatgttgtgttcgatttttaaggacatgctatctggttcttatgatgttggaaaatttgctgtatctgttgaagcaaaaaattcgtttcattatgctaaagctcagctgctgtttattctcattcaaaccttggactttgaaagtctactccggatggttcgtgatgaagttccttttagcggagggtattccacattttctgttgttgatattcttgaaatggacgtcgaagtatcaaaattacccgaatttgcagcagtagaatcaggaccacttattcttgcttgggcagttttcctttgcctggtcatgtcccttccaggaagtaataccaatttgggtcctgtttctggttttcggggtatattgagaacattcatttcagcatttgtggcttcatatgagatctcttatcagacagaagatagttctcttggcatgattttaaatattctatgcgaagtttacgatggagaggaatctctctgcatgcaattctgggacaaagatagttttattgatggtccaatcagatttaattaccttgagaggatgaatggggtgactacgttgtatgcagtccctaggagtgatacagacaatgtgaactatcatgatcaaattgaaattcatagtccaatcagcatttttggtattgaaggaactacaattcccggtggaagccatggctacatcttgaaagttcttgaagatgatgttgcattagttcgctgggaggatttgtgccttgctttgctgcatgctgacaagtcgctagctgtccaagcgtcacagaacttggggtatattgacaagcatgtcaggattgatattgctaaaattttttgcacatccattttcaaatatgtggaagattttaataatgcttgtgtaatgtccaaaacccttggcatgctggcagaaatgctcagttgtgttccataccatgtgttcaatgtggcgttggactgtggcttcttcattacacaatctggtgttgcttcaagtgattggcttctttctggtgcgctagcaagaatgctttttgctacctctgaggatagtggagactgttcttcacttacaactacagtgcttgattttgccatccaggttttgcggaaaggagctgctgctgatgatataatatcatcattcattatattttcagttcaatacatcatggttaatcatatgaactggaaatacaagagttatagtcgctggaagataacccttaaggtgtttgatttggtaaagagctgtattcaagtcaaatcattctcatcaaagcttggtggcatcatttgggaaattctattgtatgattcttctatccacagtgttcttttgcatattttgtccatgtcaacgcaattactggaacactcgcatggcagctattgtcatgatcttaaggatattgaagatatacagcttgtcctttgctgtggatttgatattgtattttatatgctgtccaacttaccagagcgagaaaaaaaatcaaaaagaatgttgagacgagttggttccaagtccgcctttcgttactatggttttgtcgtcctcgtcaaaaccattgcctttcgtcacagctgcaatatcattgatgtcctttcagaattcagccagccatccatagaaatgcgcacatgcatcatcttccatttacaacttgcattcatcaaaatattatcccaatcacattatgcttgttcaaacagtgaggacaacaatagaacttcaaataaaccttgggacactgacaatactgatatatttctcaaggctatacaagttgcagccgctagagtattttcaatgctgtgcttcactgcttataaagcacaacctcaactcatggaaaatgcctactttgttgttaatggttcagagatttggagactgcaaacaagtatttcctgcattcttgatgaggtagacaaagtcaatgaggttgttgctatattcaaccttctgtcttctgctgctcgttatcaggctcagagagctgatgttgcgcttgtatggttgagggttcacttgccaggagaacagagtacaagggcgcaagcagattctgataattccgctcatgagcagagcagtaaatattttgttctgaacccttcaggaagcaatcctagacttgttgagcaaatcttgggttatattggacgatccactgagcttatggatagatctccttctatattatcaggtgttcttgatctactgaaggcattatgggaaagtggtgctcaatttatatacattttagagaaactgagaagttctagaacattctgggagaacttatcatgctgtattcgtgctgcttttgctagttaccctatcgacagcgttgagactgttgatgaaaaaaaatctttgagatattgttgtcttggtacaatttttgagatcatgtcatatgagttgttcttgcaaggaaagttgcttacagaaacaaaaacttctgatcctgcccctgttggttcaaaggagcaaaaagaaccttctgttgcaccttgtccaagtgacatagtgctcaaatggtttgatagcacgactatggaggatttggtaaatcatctatcaagtaatgggtaccaaaatgatcttcttcatcgtgctaaggctgcttcctgccgttgcattatccgtctattaacaaagctgtccagtggtgatactggaagcttgtcattctcgctagtgaagaagattcagctcatatctagtaaattaacacacatgtgtgctggtgcacgcacactgttatgtgggggaccacgtatagcaagcacaggaaaccaggtgcactggacacaccggcgacatggtgaccgcgctcagtcgacagacgccaacgctttctttggcttaggtcaagttgttacaacaccgtgcatttgtagctctactgtcacaatatgcccttcatggttacagatgctgatatttatggatgaaccaaacttcttgcacgacatatggctgcttaaattgcacattgcaccagaactcgaaggtcgtccaattactcctggtccgtttcaggagctgctatgcttccttctagaatttaaagtttttgaacacaatccttcggagcaactacagaaaagtttcccagctgccaatggcgtttctttgtttgatgttcctcacatacgtgatgaacttggccttgaactttggaatcattcagactggaagacttataaagaagtagctgaaaagatgctggatatcatgcataaagcaaacctgatgaaatgtcaagttgatgcaaagctttgcgcgttgaggtcattcataacatttctgtcagtatgcactggaacaagttcatataagaagtttggcttacctggtggagggatttcaataacaactacacaatcagcggttagatgtgcatgcaaatctctgcagtcagctgttgactccctccctcctgaggttgataacagtggggttttgtttcctcccttgtctggacaagtggaattgttgcttactatcaccaggatcttacttgaccatgctaaacaaagcaaaagttcaaggcatctttatccagttattgtactactcatgaaaacttcaggtgccagcacttcctttttgtttaatctcatgccatccagtcctgctcttaagcaaccagtgaagtccctccttgttctgcttttgtcattatttgaattcatttacaagaaggttgacatgaaagatggatctgaagatgtcaatatatttggggagttatcccttttaagtatgagcttgttacctgtattatgcaaattggcagagagcagagaatattttgatcttgctattgcatcaatggacataatattgaaaggctttttgccttctaatgtatgggtgcctattctacaaaagcattttcgtctccaggttatactgcaaaagtgccaaagtggggctttattgtgtactcaagtcatattgaatttcctcttgactatggggcggacaaaggacggtgctaaaattcttcagtctgccaatatttttgctttcataaaggtccttctgagtcagatgtctttggatgactcctgtttgagaaattccttgagcacccaaacaaaggatgtgaaaatttggggtttgggtcttgctattgtctcctctttgaaccattgcatggatgatgatatttcccgcaacagtgttgcaaacagtactatcagcttcctttcagggcaagtgcctttgatgtcgtcttatctatctgcacaaagtgttaacactcatcagagcaagaaaaggacactgttacaaaagtcacagacatcactttcagctctcagtcttactgagaatattctcacacttctctgtattttggccaagtaccatttcccacgggacacaggtatgaaggaagtagattcagaattaagggagattattatccacctgcttgcatttataagcagaggtagtgaaagaaccggtgattccccaaactggaacttatcctttggttgtcctcctattattaaagaggaaatgaagcttaatgaagagccaccacttattaggagcaaatatggatggttccgatttgctgcaagttgtactttgtcaactccatctgtctctggtcctcccaatgcaggattgtcacttgtgattagagacaaaaatccagcggattctgattctatgaagcagactcgttttacagagatgttagcagtacaaatctataggattgcttttcttattatgaagttcctatgcagtcaagcaaaagaggcagtaagaagggcagaagaactggagttccttgaccttgctcatttcccagaacttccgatgccagatattcttcacggcctgcaggatcaagtggtttctattgtcactgaagtattagaggcaaatgtatctactgcactcaataccgagacagagagggtgtgccaacttctgttggtgatacttgaaacatcactttacatggaattgtgtgtatcccaatcatgtggcatcagaccagtgatgggtcgttttgaagatttctccaagggaattaaggctatggttcatgcttctgagaagcattccagttttaaaccattggtcagatggaatggcagctcacatatcattgtcgatgtagctcctgactgggtacacacatagcagaggctctcggcaaggcagcaacaccaagaactccactgttcgtcaacttctgtgctaacctattcgccaagagcgtagtgccaggaatgggcattaggaagactggaagttcatcttagcctttttttttttgtaggtttgatctgtttagttgcatcttgcagtttacatcgagttgcatcaatggccgatgtggctaaccatgtttattgaatactctacatggtaggtgcaaatgaggactggaattagttccacagctattaccatggttcaggagtttaattcaatcgaagtatcgcacgaattgtttcggtatgccttgagctgacgtgttccgtaaataaaacttgactagttaacagaatatgctctttacagtttgag

SEQ ID NO: 33048 - DNA, 589 bp, Oryza sativa
  Clone ID: PAT_MRT4530_37199C.1
gcgatacttcgattgaattaaactcctgaaccatggtaatagctgtggaactaattccagtcctcatttgcacctaccatgtagagtattcaataaacatggtagccacatcggccattgatgcaactcgatgtaaactgcaagatgcaactaaacagatcaaacctacaaaaaaaaaagctaagatgaacttccagtcttcctaatgcccattcctggcactacgctcttggcgaataggttagcacagaagttgacgaacagtggagttcttggtgttgctgccttgccgagagcctctgctatgtgctatcacgtcagatgtttaagatgcatgaacagtcacatgctacccagtttctttttggcggctacacactacccagtcaggagctacatcgacaatgatatgtgagctgccattccatctatgatagttaaccaacaaatttcattatcatagctacacaatttacaaaaattacatgagattgttattttgtacaatcccgggataaagaagagtggtaatttgggcaagtgacctgaccaatggtttaaaactggaatgcttctcagaagcatgaac

SEQ ID NO: 33049 - DNA, 351 bp, Oryza sativa
  Clone ID: PAT_MRT4530_3719C.1
gacgccggcgtcggccccagccccagccccaaccccgacgtgggcgctagcgccagcgccgcccgccaccaccacggcggcgaggaacagcgccgccacggccatcctgttcatcttcagggccgccattggggagagaagacacaacaaatcaacacacaagcaaagacaagccagacatcgacattagagattagcctaggcaaatccaatctagtgcctgtggaggccgacaagaggggatctagtaccatctatgatctcgacgcgttcgtactcgaggaggaagactaccctgtcatcgactacgtgttggtgatccatgtcgccaaatcgacgacagctagatag

SEQ ID NO: 33050 - DNA, 1820 bp, Oryza sativa
  Clone ID: PAT_MRT4530_371C.1
cccgggctgccgggtctcgtgtttttttttttttttttttggaaaatctggggtaacttcagtgtaaaatcacattcaaaatagcgccactgtgtccattagataacctacgtcttacacgacatatttctcatacagaagtccaaacatggtatacactgggtatctagtcgacaaaaaccacaaacatggcacaagatgacccaggaggtatcagtgtatcatatcttgccgtcgtaccttgtaggatgaggatctccttacgactcacattgcgtcgttatcgtgcagaacatgtttacaaatcaacatggttattacattagccgtatagaagctggccctgtaacagcagcaaccttctgagccttctgtgtttcaaatttgtacaggcctttcagctctttctttgctttccgtgcttctctcttctcttctttcactgcagcctttcttgctttcttttcctcctttgtttccttttgagctcctttcttaaaactttcagcacttggagtttctgttggctttgctttcttctccttctcaccatttcttttcctctgtggtaggtattctactggaagtctctctttgccttgaagcctgatgatatctttcgttgtagctgtttctccaggaaaaactttagggagcctatttttaggatttcctggtgtttgaatctttccaggatggttgtcaagatttgagtatgtggaaacaatagtctcacagtcccaaacttcagactcatcactgctttctgaaacaagtacaacttcttcctcttcagcagtttcatttaaatacctttcagcatattcagcacatttttggattacattagcagattcatccacctcctctgctgtgcttgaatccaattttctacgaacaaaatctgccggcgttctatattcttctgtgacagatacattttgactatggaacagtttcagttcatcaataacctcagtaggcagttcacattccccatttctaacacctggatcatcatcatcatcatcactgtcaccatattcttccaaagcaagcaaatcaaactgttcatccagcaaccgccggaccctcggcttgggctcaccctcatcatcctcaaactcctcttcctcttcaacatcacttaagaacacaccatccatcacttcctcctcttcatcatcatcatcttcctcctcatccccctcagcccggtttgccatgatgacaaaatcctcctccagtccctcatcctccgacccgccatgggagacatcggtctcgtcgagcaacctcgcgatgtcaggatcaaccgccctctcaatccgcctcacaggcgctgtcttcgcggccaccttacacatcgtcctcccctcgtccatctcatcctcaacattgccagaagcaatccgcaccctactggcatcatacgccttcacgtcgagggggagaggcggggcagtctggttgggcgcgaaggatgaggcggcggcggcggcggaggggcggagctcgcggaggtggtggaggtaattgtagccgtcgtccgggaggccgagctcgaggatctcgcggcggacgtggtcggggagggggccggaggcggaggagaagtgatcgccggcggcggcgtcaccggtgagggagagggatgaggagtcgaaggcgtcgtcgtcgccgaagccggggacggtgtagtcgttgctgtcgacgcggacgaagacgcggtcgttggggtcggcggcgccggcgcgcgggaacagccggaacgtggcgaagttgcgtggcttgcgccctcctcctcctcctcctcccat

SEQ ID NO: 33051 - DNA, 1916 bp, Oryza sativa
  Clone ID: PAT_MRT4530_37200C.1
ccccgcgcggcgcgagggcaccaggacccgccccccgccaggcccggggcccccaggctcggccgccgccgccgccccccggcggccgcggccgcgccggcctccgggccgcccccctccaccccccgcggcgcccctccccccccgccatggccaccgtgccggcgctgcggctcggctcccccgccgcgctcctcgccgcgcgccgcccgccgcggtggctgcggtgcggcggcggcggtgtcgggggagggggagggggagtgggagtggcgcggagggggatggcgtgctccgtggaggccttggcgaggcgcggtgggggcggcgagtcggagtcggagaatgaaggaggaggaggagaagcggaggggcagggcgggggaaaggaagcttcagaggcggcgggaccgccgcggcggcggcggcggcggcggggagcggggagctcctctccatccccggcgtggggcctcgcaaccagaggaagctcgtggacaacggattcgagggcgtcgcgcagcttaagcagctctatgctgagccacataggtatgcctatacctttcaaaattatgtgtttgtgacaagggtcatgcaagaaagggaatcttcaggtggaaaaaaaactctcagactgatggaaagaagtgttttcagtgataggatggtatttgttcgtgctggttcatgaagcctaactggatgaatgagatggagatcagcatttacgactcatggtttgatcctgttgtgtcatcgcttccaggtcttatccctgatggatttatctatctaagatgctagcccaggatacttggccacaaaagaatgatgctccgggaaaagagcataggaaggtggtgttactcttgactacttgcaaggtttgcatgtgcagccactatacacgcactccttggtgaaaaatgcttctgttcatcagttctttggaaaatatagcgagaagatggttgagtttttacagagctcggttggcatcattcataagaaccatgctgagagtcttatccctgatggatttatctatctaagagctagcccagatacttgccacaaaagaatgatgctccggaaaagagcagaggaaggtggtgttactcttgactacttgcaaggtttgcatgagaaacacgagagctggttgcttccttcaaaaggaggaggtactggtgtgttatctgtcagtcagctgcccacacatttggaaggttccttgcctccagcaattcgagatcgtgtcttttacttggaaggagatcacatgcactcaagcatccagaaggtccctgctctggtcttggattgtgaacctgacattgatttcaacaaagatatagaagctaaacggcaatatgctcagcaagttgcagaattctttcaatttgtgaagaaaaagaaggaagctccatctgaacaaacaagcactgacaagaaccgtatcaatccacagatcatgcttcctcacaaaggcggattgtgggttcctgatggaagaaaccctttctcaggatctgctatgaatctgaacttcagaagagccatgtcttcctatctctcgacataggatttcagctccagaatgaacgtaggatcttacaaatcccactctcactgaccttgtaaatgggcctatgcgttaagttaaacctaggtatgttagccactgatgtaagatagtctgccaccgcatctccatcttttgtaaatgatcatcttccaccctttccgagttccatgttttgtagtagcgtcagcttccgtttgtctgagttctggtatctgtatcgttatgttggttgctgactacattctgttagatgatccggaactctttgacatttctgggaaagatgcttcagtacttgccgtttgtttgtaaaaaaaaaaaaaaa

SEQ ID NO: 33052 - DNA, 580 bp, Oryza sativa
  Clone ID: PAT_MRT4530_37201C.1
cgcctccatataacgccaccgtcacgctcgccacgcctcccatccgctccactccatttcaaattctcgccacctcccccccgcatttcgacgaacaccttcgccgcccaccccccgcatgtctccgaccgccaccccatcccccgcgcccgccgcgggggcggaagcgcccaagccgccgtcgtcggggacggtggcgaagcgcagcctgatgtcgacgttgatggaggccaccgcgctgttcaggacgtctacgatcaaggaggactcgtacgtggcgtccgcgctcccggcggccgacctccgcgcgctcggcgacctcagggcgctgttgtccacgcacccgtacccaatctccatctggagcgtgccgctcaacccggcgccgccccagggcggagagggggccccgggcccggtcgtcgtcgtcgacgagcgcgccgactgtcagctgctcatgttcctccgcgcgcggtacttgcgtgtccaggacgcgcacgccatgctgctccggtgcgccgcgtggtgggaccagtatcgcgccgacgaccagctggacgaggacctctgcttcatggac

SEQ ID NO: 33053 - DNA, 836 bp, Oryza sativa
  Clone ID: PAT_MRT4530_37202C.1
tttttccaaaccctagtcccccattgatgacctccgccgccaccgccgtagatgcacaggctctccttcctccaggccaccatcattgacgcgccgctgctcctctcctccgcctccatggccaccgtgccggcgcggagggggatggcgtgctccgtggaggccttggcgaggcgcggtgggggcggcgagtcggagtcggagaatgaggaggaggaggagaagcgtaagggcagggcggcggagaggaggctcataggcggcgggagcgccgcggcggcggcggcggcggcggggagcggggagctcctcttcatccccggcgtgggggctcgcaaccagaggaagctcgtggacaacggattcgagggcgtctcgcagcttaagcaggtctatcgggataaggtgtttggaaaatatagcgagaagatggttgagtttttacagagctcggttggcatcattcataagaaccatgctgagagtataacttctttcattaaggagagtgttgatgaggagctgaaggatgcagactcatctaaggcttctcagaagaagaggctcaccttttgcgtggaagggaatattagtgttgggaagtctacctttctccaaagaatagctaatgagaccatcgaactgcgtgatcttgtagaaatagtgcctgaacctgttgctaagtggcaggatattggccctgaccacttcaatatattggatgctttctatgctgagccacataggtatgcctatacctttcaaaattatgtgtttgtgacaagggtcatgcacgaaagggaatcttcaggtggaataaaacctctcacactgat

SEQ ID NO: 33054 - DNA, 1416 bp, Oryza sativa
  Clone ID: PAT_MRT4530_37203C.1
gcacgaggctgagctactggtggtagctgccaatggcgatggatcatcgtggtggtggtggtggtggtgggaggagcagcagccggctgcgggacaggctggcgaggatgttccggccgggcgcgctgctccggtcgacgtgcaacaaccacgccaccgcgtcgacgtcctcgtcatcgtcgtcggcggcggcggcggcgggtggggtggtgacggcgtccgcgtgctcgtccagcagggcgctgctcgccgcggacgcggcggcggcggtcgactactgcggcagggagtcgttcttggcgtcgtcccgccgcgactacagcgacgcggcggccaccgcgctcgtcggccgcaccgagtcgttctccaccgcgctggaccgcctccaccgccgcggcggcggcactccgctgccaccgtcgaggttctccgtcgacgcgtcgccgaagaaggaggatgcggcggcggcggcggcggcggccaaggagaaggagatgaccaccgctgctgctcgcgacgttcagggcttccactaccaccaccaccgccgccatggcagcctcggcggcggcggcggctgcgggaagagtgacaaggccaggaggctgctctccaacccctacggcttcacaacgtccgacgacgccgacaccgacggcgacgacgtcttcagcagcgacgccgacgaccgcggcggccgcgtcgttgccggcggcggcggcggcgccaagaagggggaaaccgaggcattcttctcctcctcacgaagcttctcctccgactcctccgagttctacaccaagaagaagaagaggaacaagcccaagaagaagtccccctccaccgcatcgtccaaggcggcgccgccgccgccgcctcctcctcctccgacgacgaggcaccagataaggcgcaagcgccgcgcggcgagggcgagcagctgcgttgacacgtgcggcgtcagggacgggttccgccccgtggtgtcggcggcggaggagcaggtccggcgcgggttcgccgtggtgaagcggtcgcgggacccgtacgccgacttccggtcgtccatggtggagatggtcgtcgggcggcagctgttcggcgcggcggagctggagcggctgctccggtcgtacctctccctgaacgcgccgcgccaccaccccgtcatcctccaggccttctccgacatctgggtcgtcctccatggcggctagctactagctagcttattagccttaataaaaagagagaaaaaaatcaccgtgtttaattaattagctcagtcccaggatgattaatcactgagattagccagagtactactccatcttgcagtaatcatgtgtgttcattacttaatctttctcagagtttaattaatctcctctttgtgttgatttaaaacaacttcga

SEQ ID NO: 33055 - DNA, 477 bp, Oryza sativa
  Clone ID: PAT_MRT4530_37204C.1
atggcggcgctgggtagagggaagcgtcgggagcgaaggaggctggcgagaaaaatcccaacaaatccagattctgccggcgatgaactggagttggtcgtcgcaagccgaagggatgaagaagataatgaagaagctgaggaagtggaggatgctgcaggagcagatcgaccgcacatcctgtcacgatgtccgccccgcgaccgtgttacagagcgaagatctggcggcgagcgaggcggaggaggaggcgctcctgcagcttggacgccgacggtgcggaggccatatatacggcacctgaacgagtactggaaggagcagcaggagtgggtcaaggcggagctcgctgcccatggctacgtcgagtgcgagatcgacgacaacggcgacaacccttgcacctgcggctgtgcacacgccggtcgtggagaagacgaagaggaaggctatggacagcgactgtggatgcgatga

SEQ ID NO: 33056 - DNA, 188 bp, Oryza sativa
  unsure (1)..(188): unsure at all n locations
  Clone ID: PAT_MRT4530_37205C.1
gaccgtccgggatcccggtcgaccacgcgtccgncgacgtcgagacgctgtgctcgccactccgcgccgggctcgccggcagcgccggtacgccgtcaacggcggtgcgtcgggtccccgacacgccgataagctcgtggcaactacaacatcgccaatgtcatcggttgggacagcgtaccggcgag

SEQ ID NO: 33057 - DNA, 1308 bp, Oryza sativa
  Clone ID: PAT_MRT4530_37206C.1
atgcatttccaagccgccttcttcctctacttcctcctcgacctcggcggctaccgcagcgacgtcctctccgtctccgacctcgagccgccctccgacggcctcttcgtcgtcggcctcaccggaggcctcgacgccgacgagctagccgccgtggcgctccagggccacgacctctccctcgccggcttcgccaaccggacgcgccactggcacgccttccgcggccgcgagggcctcgtcccgtccgcggccagcgtcctccccttcggcggcgacacctaccgcgacctcatcggcggcatccagaacctccccggcgtccccctcggccgcgacgccatggtgcgcgccgcccgcgtgctctcctcctacgacccggcggcgttcgccgccgaggggaacgaggtggaggagctcgggcgggcgctggcggcggtgacggtgatgatcagcgaggcggcgcgggtgaagccgatcaacgagaccgtgtcgagcggaggcccaataccacatgtgacatctcagcccactaggcccaatacctcatcacgtgagcaacaaccacctagtccctgctcacgaagccacgatcttatcctctgcaactcccagtcccgatgcccgacggtgcagcaccgcccaacgccgcccgacggaggagcgcctcccaagaaggtcgtgcggctgtggcgatcccttcccaacccgacgcactctagcccggtcgcccagctgcaccctggtggacggtggtggaagagacctcgctggcggaggacgccggcccgcagggggcacgtcgagctgtcccccacgagcctgaggggcaagctgtccatggtggacctgctcgacttcgggagcggcgccggggcgctggcggtgagggtcgacaccatgttcgtcgccggcttcgccaaccggagcggccactggcacgccctgcgcggcagcgaccacctgttccaccgcggcgaccaccaccaccagcgagcacggcccctgctgctccggccgatcgcgcgggccgtgctggaggccagccggatggggagggcgcccgccggggagcaggcccggatcgccgacgagcacctgccgtacatcgagcactgggacgccatgtggcacgagctcgggaggtggaggcggcgcggcgagtggggcgggccgttcaccggcgtgctgagggagcgcgccaacatcggcagcgcggaggaggcgctcgccgtcgtcggctggacgttccggcagtcggcaaaagctgctcggcgacggctcggcggcggcgatgtgccgcactga

SEQ ID NO: 33058 - DNA, 207 bp, Oryza sativa
  Clone ID: PAT_MRT4530_37207C.1
ctgcatccactgttgcacgaccctgctcgccactgtgtgctgccgctgttcctcgtctccttcttcttctcctccaatcgtatgtgctattgcctcctctttgagcttcttttggttactttggttgcttggttggagctggctttgcttgctagtgctaccttgcgttggaggaagatgagagtgtttgttgctgttgttgttgat

SEQ ID NO: 33059 - DNA, 1586 bp, Oryza sativa
  Clone ID: PAT_MRT4530_37208C.1
ttccgatccctcggctgcaggaatgtcccacgaggtgtgacgctctcctctccatctccaagactcccaagtgctcttgtggtggctgtcccctacctctctctctctctctctgcattagtgcactgcagaagtgaagtgaagtggagtaactccactgctctgctctgtgcctgaatctctgacaactgcacgcttcttgcattgcatttgcattgcatcaagaaaatggcgatggggtggttgccgagatctgccaccgccgttcttgtgctcttcttggtcttatggagagattggggggtggaggcggcgacgttcacgttcgtcaaccggtgcacggacacggtgtggccgggcgtgctgtcgaacgccgggagcgcgcggctggccaccacggggttcgagctcccgccgggcgtggcgcgggcggtgccggcgccggcggggtggtcggggaggatgtgggcgcgcacggggtgcgccgtcgtccaggacggcggcgcgggtgggggccggatggtgtgcgccaccggcgactgcggctcgggcggcgccgagtgcaacggcgcgggcgccgcgccgcccgcgacgctggccgagttcacgctcgacggcagcggcgggctcgacttctacgacgtcagcctcgtcgacggctacaacctgccggtgctggtggagccatcgtcctccggaggaggcggtggtggcggcgggtctctgacgtcggcggcgacgtgcgcggcggcggggtgcgcggcggacctgaacgcgatgtgccccgcggagctccgggcgggcggcggcgcggcgtgccggagcgcgtgcgacgcgttcgggcggccggagttctgctgcagcggcgcgttcgcgaacccgtcgacgtgccggccgacggcgtactcgcaggtgttcaagtcggcgtgcccccgctcctacagctacgccttcgacgaccccacctccaccttcacctgctccggcggccccgactacaccctcaccttctgccccgcctcctccccaagcggcagccagaagtcgacgacggcgacgccgacgccggcggcgatgatgccggggacggggacgccgacgacgccaacgacggcgacggcgatgcctggggcgacgatgcccgggacggcgacggcgacgacgatgccggggacgacgttcacggacgccgtcccggacaccagcatgccgatgccgatgggcggcgacgccggcggcggcggcgaagagggcgtggtgctgagcggcagcgagacgtggatcgccaacatggccaccggcgagctgacggcgggcggcgtccctgtcccggccgtcgcccgccgcggcgctggcgctgttcttggtccacgccctgcggctgctcgtgctccggtgatgcccggcggccatgtcggcgccattgtagtagtaacaaaaacattttagtcatgagacgatgtgttgactagtgtgagtgggggtatttttgatgagctttgttgttgtactgtagggggtagtggtagactgtatcggttgtacgctgtagattgttgattaattacttgattaattaggatgtt

SEQ ID NO: 33060 - DNA, 234 bp, Oryza sativa
  Clone ID: PAT_MRT4530_37209C.1
aaggaatgtacgtctggggatcctgggaccgatgtacggccatgcgttcatccaccttccttgccacctcctcttgcatgctgagctcgtagctcgataccttgtactcaagatctgcaatcttcgcctcggcactggcaacccgctgttcccagatgtcgctctactgcgtacccggacagggatgactttagtgatctcgagggctatcaccacctctacacccacctcaac

SEQ ID NO: 33061 - DNA, 617 bp, Oryza sativa
  Clone ID: PAT_MRT4530_3720C.1
ccggccgggccaagcccgtcgcccccttcccctcctccgctcctcccaacccaaatccgccaaatttgactcgcgcgaggggcccgattcgtggggcgcgcttccccctgctgctgctgctgctgctgctgggattcagacgacctggacgcgctcgcgtccgggcgatctacggggacgatatggggctacttgagctccgcgatccccacgaatggatcgccgaccatggtagccggactcagccacaatggcaagtttacctatgagtatgcgagctcccctggaaaaaggacttccatggaacactgttgccagacaataattgactctgttgatgggcagagtatcgacctctttggaggatttgatggacatgatggtcgctagagtagctgagaatgtaacaaataatcacgtcattaatcttctaaggtgtccagagatcgtcgatgacaccataatgtgcagagatgatgcgtatcaaagtaccgatcgtgcaatcttagaatctgacagcagacgaaactcagagacatatccacgtgatgaaccggtggccttggtgacgaccgtatctatgttgctcacgatgaacacgctagggctatcgtatg

SEQ ID NO: 33062 - DNA, 497 bp, Oryza sativa
  unsure (1)..(497): unsure at all n locations
  Clone ID: PAT_MRT4530_37210C.1
ctgggaattggaaaatgccacagggagatcttggtggtacacggtgcgagggttgtgaattcttgtgaccagggacagagcttgggaagatagtccacaaattgtgtgccaagtttgatggaacgatagaggatgtatgccaagaggtcacagcagtgcaacctgataattgttggcagcgtgtgtgcgtaggacacataggagtggatactgtactgtgntnttgagtcatcgtagtngtctgtgnggtaccgtcaatgccccagngcttagaatgagatgctaccctgttgtcttggaccaccgtgtacggctatggctgcatgtcgtccgaagcaatttttgtgcgtcttcctaagaccatgtacttgacgggatacccatgctaatataaggtatcctgtagggtctggaccaaatatgtaagccatatgagatacaagataattagactcngaaactttgtgtttgtattccaaaaaaaaaaaaaaaaaaaa

SEQ ID NO: 33063 - DNA, 399 bp, Oryza sativa
  Clone ID: PAT_MRT4530_37211C.1
tacgttgaggtgggtgtagaggtggtgatagccctcgagatcactaaagtcatccctgtccgggtacgcagtagagcgacatctgggaacagcgggttgccagtgcctgaaaggaaagtgctacatcggtatatccgtgcgcttgcggattttatctgtaaccgtatcatataccaacacacgtacatgagtcggaggaggagcaagagagataccgaggcgaagattgcagatcttgagtacaaggtatcgagctacgagctcagcatgcaagaggaggtggcaaggaaggtggatgaacgcatggccgtacatcggtcccaggatccccagacgtacattccttctgtaatggtcaggccctcaggcaatcgtagcagctgcaccttaacggggcag

SEQ ID NO: 33064 - DNA, 468 bp, Oryza sativa
  Clone ID: PAT_MRT4530_37212C.1
atgccgacgggtagagccgggtaccgatccgccaccaagtctcgccacttatcaccgctcacggcttggatctcgtcgcacgttgcctactgcggatcccaccgcgaacacgacgatcacgacggcgtggtggtgaggtgccgtggggcatgggccgcggtgtggtggccgccggcgggagctgaagcggcggcggcagcggaagctagctggagtgggttctggagcaccgccggcatggtggacggaggtggcgcaaggagctcatcccccgggtcgacggcgacggacctcggcgcgacaaagaggcggtcgcccccctccgacggtggcggcggtccccggagtggaggagtcgacgatggcaaggctaacactcggcgagatggggtcggcgtcgtggaggaagtcgaccagggggggtcgcacttggcgttgtcgatggctgaggacagaggcggaggttga

SEQ ID NO: 33065 - DNA, 279 bp, Oryza sativa
  Clone ID: PAT_MRT4530_37213C.1
tacagatccgggcttctccccctcgctcctgtcaccagatccggagcttgtcgttgcaggggtggagctgtatactggaggacgggacggttacctagctgctggagaggaggtcactacagagcccgtatgtacagctcatccagctgaacagctgctgcatcaccaccccatccatgacagacatgatcatgtatgacacctaccatatgctgcataagcatgatcaggatatggtcaaggactctaacatcttcatgattggcacgaaaaaggatg

SEQ ID NO: 33066 - DNA, 159 bp, Oryza sativa
  Clone ID: PAT_MRT4530_37214C.1
atggggtcaggatcccagcgacgatcgcgtggccggcgtaccaagacttgccttgccgagccggcacccggcaggagaaatattgccggcacgggtgatctggaattatttcgtggtccatctgggacagttaaattctttcgcatagagctgggttaa

SEQ ID NO: 33067 - DNA, 366 bp, Oryza sativa
  Clone ID: PAT_MRT4530_37215C.1
atggctggaggagggcgagactgcgatgacgacgacgagaacggcgaggtggcggtggcgacggcgcatgcgaggggaggagccgaggaggagagcgtggcggcgcgcagagggaggagggcgagtgcgcgtgcgaggggatctaaacaaggcctctatgatgatggtggcggcgacagcggtagcggattcagtccctctgctgccgagcacaagcgacacgagcagattggcaacctcgccgtcgagctcaagcacccgcgccttgcttcggagccatcagccatggtaccgagccgagcacaagcgacacacgagcagatcggcgtcctcgccggcaagctcgagcaccacgcagtgcattag

SEQ ID NO: 33068 - DNA, 817 bp, Oryza sativa
  unsure (1)..(817): unsure at all n locations
  Clone ID: PAT_MRT4530_37216C.1
cggatcggccgagcctctgtctacaatggaggctgagtcttanaagccggatttggtcgttggagagagagagagagagagagagagagcgagccgagcctgtgcggtgcggngacacctgctcctcttcgctcgcgcgcggnattccggtcgtgtttctgangatccggattgcaccgtgttcgggctgtttcntccnccatggggaatctcccgcgaanggatctaatctgtgctccncnggaagaaatcnccnagtccnactctnccnangccnangatttggcgaaagngtgcnnataacaaccnntgctttctgaggatccccccgtgatttctgancccctcttgtttttctcnccaccatagaaatgctgaaaattgcnagtttccccacngaattctntttaaccctgggtctnggagtggagaacccnaacatttttngntcccngggcccctnntccccaaaaactaanccaaaaactacttcctttaangngcagccggcctcccaagttnccttgcccnttnggnnttcccttccnttnaangttcttnaaacccccnccctgattcnaagaaatcttnttttggaaaaactgctccncccccctgttactggttgatcgnaaactccaccttnttccttggaaaaaattttaatccccgtgctccttccnttgttttaaatccgncccntnatttcttattttaaccncnaccctggaaaaaaagttctccaccccttttcaaactcctctcccccttgggttaaccnccctnccttnanaaaggaccctcctnttcactgttg

SEQ ID NO: 33069 - DNA, 234 bp, Oryza sativa
  Clone ID: PAT_MRT4530_37217C.1
atggttcgtgggaagaccgtcatcagcaggatcgagaacacgacgagccgccaggtgaccttctccaagaggaggagcgggctattcaagaaggccaaggagctggccatcctctgtgatgcccaggtcggcgtcctggtcttctcaagcactggccgtctctatgactactccaactccagtaattctcgcaatcttacctatgatcagttattgggggataccgtctgttaa

SEQ ID NO: 33070 - DNA, 741 bp, Oryza sativa
  Clone ID: PAT_MRT4530_37218C.1
atggcggaggacgagttcgagctcgatgaggaggtgtttctcgacatacccgtcgacgtcgtccactccgtggtggcgctggctgcaagcggcggcggcggcggcggcgacgctctgcatccagagcgggagagagctctgcacccggcggaggacagaggcggggttgcgctcgcggttgaggtcgtgcccccgcgtgagcccgacgacgagcaggggacgggcgccggccacggcggcgaggaggaggagaccgacatcgtcgtcggcgactatatggagcgcggcggcggcgacgacgacgatgtgttctcatctacatgcctcacgaccgtgctcttcacgctgctcagcatcatcgtttgggccgtcttcctctacggcgccgccaagctttgcgtcaactacttagttcccttgttccggcagcagccaccaccatcacttccatcgccggcctcgcacacctacgacgccgacgccgatatgcggtgcccatgcccatgtccctcagatttacaggcctggaggaacttggtaggtgaggacggcgacgcctacgcttctgagctctcgtggctcccgccgttggggaacgcctcagctgccgtcctccccgtcgacactctccgagttgccgctggtgctggggggccgtatcattctgtcgtggcgctgctcgttgcggcagtgatctttgctgtgctcgggtacctcgtcaagcatctgatgacgcattag

SEQ ID NO: 33071 - DNA, 157 bp, Oryza sativa
  Clone ID: PAT_MRT4530_37219C.1
cagtgggatcgcccgactaatgacggattatatcatgtgatttcagagaagacggcatagaatagtgacctcataccactcacttctccaccggccaagtcgcgccaatataataacgctaccagatggcagaatttttctggtgtaccttaccaca

SEQ ID NO: 33072 - DNA, 260 bp, Oryza sativa
  Clone ID: PAT_MRT4530_3721C.1
gtgctttttcttattatttcactacacctacgacatatttttaagagtaaagttcatcaccgctccctaaacttatattgctgtgtcatcccggtccctaaactcgcaaatcgaccgttcagatccttaaacttgttcgactgtgtcatcccggtccccaaacttgcagatcactcgtttaggtcctccaacttgttcagttgtatcaccccggtccctaaacaggtttttgaattaaaactgtttagggtcctaaaata

SEQ ID NO: 33073 - DNA, 1287 bp, Oryza sativa
  Clone ID: PAT_MRT4530_37220C.1
atgctccacctccgcaaccacctcctcccgctgctccacgccgccacctccaccgcctcctcctcccctctgcacctcacccaccgccttctctccaccgccgcaagatcccccttctccgtcgagcactacctcatcgccacctgcggcctcaccgccgctcaggcgcgcagggcgtccccgaagctctcccgtctcaactcctcctccaaccccgacgccgtgctcgccctcctctcctcctccgccgccggcctcgactccctctccctctcccgcgcggacctcgccgccgtcgtcgccgccgagccgcggctgctccgcgcgaggcccggcaccatcgcccgccgcatcgcctccctccgcggccgcgccaacctgtctgcgccccagatccgcagcttcctcatgtccggcggcgcggcgcacctcgcctcgtccgacgtctccccgaagctcgcgttctgggtccccttcctcggctccttcgacatgctcctcaagatcctcaggaggtgcaacgcgatcctcgccaccgacgtcgacagggtggtcaggcccaacgtcgcgctgctcggggagtgcgggctaggtgtttgtgatattgtccagatgacccagaccgccgcgtggctgctcacgttcaacccagagcgactgaagattgtcgtgcggcgcgccgaggagctcggcgtgcccacttcatcgtgggcgttcaaggacgccgtgtgcaccgtcgcccgtaacaacgagggcaccatcgccgcgaggatggagttcttgcgcggcactcttggttgctccatggacaagctacgctctgcgatcagcaggaagccgagcattctaggattctcggagaagacgcttcgcggcaaaatagagttcttgctcactaaggtccaattggagactgaatacatcttgcagaggcctgtgatgctcacgctcagcctggacaagcggttggcgccgcggcattatgttctacaagcccttgtggagaaggggttgataaaaaatgatgttgattactacagttgtgtttgttttggcaatgaacatttcgtagcgaggtacattgatcgccacgaggatgctcttcctggtctcacggatgcctatgccgctgttcatgctggcaaatcgcctgcacaaagtctaactcaacatcttaagacagacagatatcggagtcatggcaacatctatttttctcaaatctcgacatcagtcaatggtagaactacaaatgatctgattgctgataatgctaatgcaagttga

SEQ ID NO: 33074 - DNA, 1959 bp, Oryza sativa
  Clone ID: PAT_MRT4530_37221C.1
atggcggaattgagagaaagcttcgagagtcagtgggcgccctccgatgtaatggaagaaaatctgaaaaaaatggtggcgcacggcgttcttccggcgaaggaaatcatcgggtggcgaccagcgttcggcgaagcgttcccgacccccgatacacacgagatcgtgcctcattttgccttgttccgccgcatctttttcctcaagccccaaccgaacaagaacaaaccatgtgtcgttgggggggctggtttccaactcaggggaaccttgagccaaaaatatttctccatgccctttaaaacctcaaacaaaggctggcatgcaaactggttttatgttcaaaatcctgagcccacactccccgagtactgctgcctccctccagtttatcaggacacatggaactcactgcctatggggaatgaagcttctcaggcagtagaactgatggaccgcatgataaagctgaaagaacaaggtctgcaaggagaacagatcacccgacatttcattaagagccggctggccccaatcaaagaaagatctcgcacgacctttgaattcgacggcaaacatgaccccaaccgtgaagatcctgaatctcttgatttcaaggtcatgaaggagagaatgtacaaaattttctcgaatgcaattgtagtcagctattcgcacttgctgctagtggtgccgtacaacgccttcaaccctcctccaccggaatttgctttgatgaaatctgagcccccaattgctcaacaccgctcacctcatgggaaaactagccaagttagtggagggccgaaaatttggtctgttgatcaatcggacatttcaaaacctaccagccagtcggacttccgcaagaggaaactagccttgagtgatgatgaaggcgatgacgctaaaaaaactggtggcgaggaaacagctggaaaacaaccacggcaggctaatccaaagaaaaaaacatccagtcgtcccatgccgaaaatcagaaagtcttccaggaaaccatccgacatagatccttctaaaaaagaccccaagccgactggcatggagagaagttcttcaaaagagaccaggtcgactgcaggggatcgcccgagtgacgaacagccggtgaccgacaatgtagatcccagcaacgagcccccgattgggagccagtgggccgaagctgggatcggtgctaatcaggagcccccgactggaaaccagtcggatatggagcaaaacaaggacatccctgaagtagaagctcgagctgacaaccctcctaaaaaagatgccaacgtcgacccagggtccagctctcctgctaaagtacaagggcctgctcgtccccgaccggaaataatcataggcccaatggtcggcgatgaagaagaaatcctgaggatccagtcagccgaggattcacacccacccactttaatcaagtggtgggacgatgataagcaacctcagggaatcataataaacaggcaaaaagaagatgaggaagtgtgcttgctgaaaaaggcactcagccaagccactcgcattgtaaacaggcttgagggagttagagatgaggttgccaacaccgctgcaccactcgtccaagccatgttctataataacaatggtccgagttcattcgatgctactgaaattttcgacaagctgagaattgctccaaatacttattttaagaatatcaaagaggctggaagtatgggagcaagcctagcgttggcgatgaccaagtccttgtacccgaagattgatattgacgccgttgacggctttgcggacaggacaagcgaagaagctgctctcgacctcatcaatgacgcgcagaaagccgccgacaagatagctggtgacatagttaggagattccaggacaacgacctccggccggctggatctaacaattctgatgatgaaaaaactgatactgattga

SEQ ID NO: 33075 - DNA, 1974 bp, Oryza sativa
  Clone ID: PAT_MRT4530_37222C.1
atggcagaagagagagaaagtttcgagagtcagtgggctccctccgatgtaacggaagagaatctaaaagaaatggtggcgcacggcgttcttccggcgaaggaaatcatcgggtggcgaccagcgttcggcgaggcaatcccgacccccgatacacatgagatcgtggtattctctcacttcttctatggcggattttctcttccaacctcaagattcttccggggaattctgaacttctacgggattagcttgcatcatctgaatccaaactccatagtgcatatctccaattttattcatgcctgcgaagcttttctaggcattaggcctcatttcgccttgttccgccgcatcttcttcctcaagccccagccaaacaagagcaaaccatgtgttgttgggggcgctggtttccaactcaggggaacactaagccaaaaatacttctccatgcccttgaagacctcaaacaaaggctggcacgccaactggttctacgttcaaaatcctgaaccagcccttcccgagtattcttgtctccctacggtctaccaagacacatggaattcattgcctacaggagatgaggctgcccaagcagtggaactgatggagcgcatgataaagctaaaggagcaggatccagactctcttgactttaaggtcatgaaggaaaggatgtacaagatcttctcaaatgccatcatcgtcagctattcgcacttgctgccagtcgtgccattcaatgccttcaatcctcctccaccggaatttgctttgatgaagtcggatcccccaatcactcaacgccgatcaccccaccaccaaaccggtcaagggagcgagggtcccaaaatccgttccgaagcccggccaaatacctccgatccagccggccagccagattcgcgcaaaaggaagttggtgtcgagtgacgacgaaggcgataccgctagaaagcctggagaccgagaaacaaccaagaaactgccgaagcaggctactccaaggaaaaaaacatccagtcatccagtgccaaagatcaggaagtcttccaggaaaccatctgatatagatccttcgggaaaagactctgacccgaccagcacgggaacaaacttaaaagaaaccgagccaaccgctgaggatcatccgagtgataaccagccagcaaccgataatgtaggatctggtgatcaacccccaaccggaaacgagtcggccgaggctagagccggggttaaccaggagcccccgatagaaaaccagtcgggcactagaccaagccaagagattccagaagttggagctcaggcagacaaccctcataaacaagacaccagcagtgacccgacgccagaatctcccgttaagacgcaagagtcgactcgtccccgttcggaaatcatcacggtgcaagctgctaggatttccgacctagagaagcaggtcaaggctctggagaaagacaaggccgaattagcaaagcagagggactcggccttaaaagatgatgaagatcgcaaaatcaagtcccaggcacagtttgatgtcttagttgacaagatcaataggcttgaaggagccagggataaagtcgctaatgccgctaccccactcatccaagccatgttcttcaataacaccggtccgagtacacttgacgcttccgagatctttgacaagctaagagtcgctctggatacttacttcaagaatatcagggaggctgggagtatgggagcaagcatggcattagccatgaccaaatctttataccccaaaatcgataccgacgccattgatgggtttgcagacgggacgagcgaagaaacagccctcgacctcatcaatgatgcgcaaaaagctgctgacaagattgctgctgacgtagttgagagattccaagatgccgaccttcggccgactgggtctgataattccgatgatgaaagaactgacactgattag

SEQ ID NO: 33076 - DNA, 991 bp, Oryza sativa
  Clone ID: PAT_MRT4530_37223C.1
gtggggaagaggaggccggggcggtgcggcggtgctcggcacgacgtcgctcggcgcttggcgcggtggcgcttggctcggcggcacagaggccggcagtggaggatgggggaggaaaagagggccggcagcgacggaggccatcggggcgaaggaggctgcgacccgcgtcagcgatgtcgactgctttagtctcttaatgcctaatgggctgctcctgctcctgctagccaggcccagtcggctttcttcttcggaattttgttggaaatttgacggaaattaccgataaaaaacggttaccgacaaaacggtcggaaaaaaccccatatcatttccgctaccatttccgaaaagcgattaccgtttccatttccgataccgactgaaacggtcggcgcaaaccggaaacggtagccggaattctcggaaatttccgtaccgttttcacccttactggcaacgcttttttgtcgtcatcggggaggtggcggcaaggaagtggcccgactcgtgacgaggacgatggtggcgaggacggaggcggcggtggcaacggactggacgctggcgaggaggtcggacggggcggcggagatggagatgggcctggaggaggaggaggaggggtggaaggggaggtgttgcccgcgtcgctcgccgccgtctccgcttccccaacatgtcgtccccaccgctgcagaggccgacagatacggccgcgcccctcgcccgcaccggccaccgccacctccccccagccgctccctcgtgccttcctcgttgccgcggcctcctcgccccaccgcgaccccgtatccccgacatgtcgtccccaccgctgatgcggccggcagctacgaccgcgcccccccttccccccctcccggcgcgcgacatccccgcccgcgccggtcgctgccgcctccccccagtcgctccctcgtgccttcctcgccgccgcggcctcctcgccccaccgcgtccccat

SEQ ID NO: 33077 - DNA, 1824 bp, Oryza sativa
  Clone ID: PAT_MRT4530_37224C.1
atggcggaagaaagagagagcttcgagagtcagtgggcgccctccgatgtgacggaagacaatctgaaggagatggtggcgcacggcgttcttccggcgaaagagatcatcaggtggcgaccgccattcggcgaggcattcccgacccccgatacactcgaaatcgtggatacttggaactcactgccaatgggggatgaagctgcgcaagcagtagaactgatggagcgcatgataaagctgaaggaacaaggtttgcaaggagaacagatcaccaggcactttatcaagtgtcggttagccccaatcaaagagagatcccgcacagcttttgagttcgacggtaagcatgatccaaatcgtgaaaatccagactctcttgactttaaggtcatgaaggaaaggatgtacaagatcttctcaaatgccatcgtcgtcggctattcgcacttgctgccagtcgtgccattcaatgccttcaatcctcctccaccggaatttgctttgatgaagtcggatcccccaatcgctcaacaccgatctccccgccaccaaactgggcaagggagcggtggaccaagaattcggtctgaaactcaaccaagtgctcctgatccagtcggccagccaaattctcgcaagaggaagctggttctaagtgacgacgaaggcgacactgctagaaagcttggagaccgagaggcaaccaagaaactgccgaagcaggctactccaaggaagaaaacatacagtcgtcctgtgcgaaagatcaggaagtctactaggaaaccatctgatatagatccgtctgggaaagactctgacccgactaacatggacacaagttcttccaaagaaaccgggccaactgttgaggatcatccaagtgacaatcaaccggcaaccgataatgtagaatccggtgatcaacccccgactggaaaccagtcggccgaagccgaagccggagttaatcaggagcctccgactggaaaccagtcggacgcagggccaagccaagagattccagaagtcgaaacccaagcaaacaacccttgcggacaagacaccagcaatgaccggagatctgaatctcctttaaaggcatccgaatccacttatcctcgtccagaaatcattaaggtggatacactagggccaatgatcagtgatgaagaagaaattccccgtatacaagcagccgaagattcgtgccctcccattctgttcaagtggtgggatgacaacttgcaacctcaaggaattgtaataaaccggcaaaaagaagacgaagaggagcagatccaaactctggaaaatgacaaggcagagctagcaagacagaggaattcggctttaaaggaggttgaagaccgcaagatcaagtctcaagcacagtttgatgtcttagttgacaagatcaacaagcttgaaggagccagggataaagtcgctaatgccgctactccactcatccaggccatgtttttcaataacgccggttcgagtacacttgatgctgccgaaatcttcgacaagctgagagtcgctccagatacttacttcaagaacatcaaagaagctggaagtatgggagcaagtctggcgttggcgatgaccaaatcgctttatccaagagttgatatggatgccattgatggctttgcaaacgggacgagcgaagaagctgctcttgacctcattaatgatgcgcagaaagccgctgacaaaatcgctgctgacgtggttgagagattccaagatgtcgaccttcggccgactgggtctgataattcagatgatgaaaaaactgatactgattga

SEQ ID NO: 33078 - DNA, 357 bp, Oryza sativa
  Clone ID: PAT_MRT4530_37225C.1
atggacatcatcaaggtagccaacaaatcagcaatcagcaatgatatatttgatctcgccacacaacctgacaagctcatatgtgttattgaactggcaaccatcttaaacataaaagaggatagtaaaatagtaggcgcagcttatgttaagaagtgggaacgttgtattgcctccggccgcatcgccaccgagatcctcgtctccacccagaggcctcgtcattgttcctcggagtgggcgacgcgggagctactgtgcgtcatcgccgtcaccgatgaagccagcagtgggggattttttgggaggaggatggggaggccaggacaaaggggaggacgttgccgctaccgctga

SEQ ID NO: 33079 - DNA, 1105 bp, Oryza sativa
  Clone ID: PAT_MRT4530_37226C.1
ccggccgggaagtccacattccctcccttactcccgttccgtttcacaggaacacaaccaatcagcgtcccacccttgtactgctccccccatcgaatcgaatcgaatcgaatcgaatcccctcacgattccaccaatcctccgccgccggaggaggaggccagggaatcgccgccgccaatgtcgctgccggtggcgaagctggggacgctggcgctgcggacgctgtccaagcccatcgccagccgcctcaagaaccaggccgccgtccaccccaagttccgcaacttcatcatctgcatcgcgcagattaaccatcgtgttactacaaggatacaaaggcgcatttatgggcatgcaacagatgtggaaatcacacctttaaatgaggagaaagctgtacaagctgctacggatctcattggagaaggctttattttttcggttgctgttgctgctttaatttttgaggtgcaaagaaatgcaaggtcagaggctaggaaggaggaagctcgtaaacaggaacttgaggtgtcgttttcagctgtcgcagccacagcggctgctgcagaattgaaacaacgggaagagagtttatctaaagatttggaggatcttaaactgaggcttgctgaaattgagcacctcgctaaaggacgaggcctttcaggaatcttgaacttcaaaggtgttcatggagcagaaagcagcaaggcagcaacacctgcttgatcaatcaaattaacttgggtcaggcgaaacaggatgatattttgttaagttgatgcgcaaaacacctcaaaatttcactgatctgttttgtgattcttgtgtggcagttcattgccatgcccattcttttggtgtatggatcaaaatatatgccggatgatccatagacaccctaaaataatagaggccaaggatagaaaaaggcactgtatcatgtagattacttctgggtaagtaactatagaacaagttcgaaagagtaaaagtgaatgtgatattgtactttgctaacacatcacgcacatagctacggctgaactgaatgcctccttttactctgtctagtgatatttgttgagattgattgcatatc

SEQ ID NO: 33080 - DNA, 2016 bp, Oryza sativa
  Clone ID: PAT_MRT4530_37227C.1
atggcggaagaaagagaaagcttcgagagtcagtgggcgccctccgatgtgacggaagataatctgaaggagatggtggcgcacggcgttcttccagcgaaggagatcatcgggtggcgaccggcatttggcgaagcattcccaacccccgatacgcatgaaatcgtggtatttgctcatttcttctatggcgcttttctgggcattaggcctcattttgccttgtttcgccgcatcttcttcctcaagccccagccaaacaagagcaaaccgtgcgttgttgggggcgctggttttcaactcaggggaacactaagccaaaaatatttctccatgcccttgaagacctcgaacaaaggctggcacgccaactggttctatgttcaaaatcctgaaccagcccttcccgagtactcttgtcttcctccggtgtaccaagacacatggaattcattgcctacaggggatgaggctgcccaagcagtagaattgatggaacgcatgataaagctgaaagagcaaggcttgcaaggagaacaaatcactcggcacttcataaaaagccggttagctccaatcaaagaaagatcccgcacagcttttgaatttgacggcaaacacgatccaaatcgtgaagatccggactctcttgactttaaggtcatgaaggaaaggatgtacaagatattctcaaatgctatcgtcgtcagctattcgcacctgctgctagtcgtgctattcaatgtctttagtcctcctccaccggaagttgctttgatgaagtcggatcccccaatcgctcaacaccaatcacctcgccgccaaactggtcagagaagcggagaaccaagaattcggtctaaaacccaaccaagtgcttctgatccagtcggccagtcagattctcgcaagaggaagctggttctaagtgacgacgaaggcgatgataccggagagctcagagataaaggagcgaccggaagacctccgaagccaactaatccgattaagaaaacctccaaagaagaaaacctccagtcgtcctataccaaaaatcagaaagtcttccagtcggatgcagggccaagccaaaaaattcccgaggttgaagctcaaataaacagtcctcccggaaaggatgctggcaatgactcagaaaccagatctcctgtgaagacacaagagtcctctcgtccccgaccgggaatcatcacagggccaatgattggtgatgaagaagagatccttcggatacaagcagctgaggattcgcaccctcccattctggtcaagtggtgggatgacaacatgccgcctcaaggaatcgtaataaataagcaaaaagaagatgaagaagtatgcttgctaaaaaaggcgctcagccaagccacctgcattgtaaataggattcatcttagaaacgaagctaaaacggcaaccttagagagagtcaatgtagtgcaagctgccaagatatctcaactggagaagcagattcaaactctggaaaatgataaggcagaactggcaagacagagggactcagctttaaaggaggttgaagaccgcaagatcaagtcccaggcacagtttgatgtcttagttgacaagatcaataggcttgaaggggccagggagaaagtcgctaatgccgctactccactcatccaagccatgttcttcaataacgccggtccgagtacacttgatgctgccgaaatcttcaacaagctgagagtcgctccggatacttacttcaagaacatcaaagaagctggaagtatgggagcaagtctggcgttggcgatgaccaaatccctttatccaagagttaacattgatgccattgatggctttgttaacgggacgagcgaagaagctgctcttgacctcataaatgatgcgcaaaaagccgctgacaagattgcagctgacgtggttgagagattccaagatgtcgaccttcggccgactgggtctaataattctgatgatgaaaaaactgatactgattga

SEQ ID NO: 33081 - DNA, 1897 bp, Oryza sativa
  unsure (1)..(1897): unsure at all n locations
  Clone ID: PAT_MRT4530_37228C.1
tttttttttttttttggaaaacaagtaaagtgtattgattagagaattttttcttaaatccccctatcacatggccctatgagactatttatagcccctattacaggttcttactactagggttttggttatacaggggaatttacatggttaagggacatttatatgggtacatagtgtaatagaggtttatgagcccctgatgggccgtcgggcgatcatcggcccaatagcccttaggcttgatgggctggaaagcttcttcggtccttgcgggggcgaacttgttacggggaagtcgtctcccttcggcatatactcttcgccctgcatccttcgcccaagagccttctggcttggcagagtacccgcacgatcctccgcctctcgccgtccttgttccatagtcttcgctttggggggacttcgccctgactaaccttgacgtctcgggcttgaatccccacttttcgcatagctttcggcagattctggttgaagggcctcatgccataccgccaacaaagtctanatggcattctgctggagagaatgacaaacgctaagtacttgttgctttttccatcaccttaggttcttcttgctaggttgttgccaactatcattttagtgggtttccttggtatcttattctgaatggataaattaacggatgctttgtgcggtctcctttccgagagaatgaacaactctgaactaaaggggcaaaatgcaatcagggcaacaaactcgatggagaaaatcctagatcctttgcattctgagagttttttctggatgatctgtgaggttttccatggttctgatgcctaacgtgatcagcaacaggcccttgatcattcctggcctttgtttcctgctgaaagctcgccatatccagattcttagtcgaagagcaaaacactgaacaagaactccaggtcagctcaatgatttcccagaatctgggttttcgccaacaaatcaagaaccgcatcttagctgaattaatgcggttgccggcggcatgaccacaggtctgaagcgcacccccaacaatcaaagaaatgaatagtctttattacctcataattgtcttgtccagctgcttttcgcaacaactttcgcagaggaaacactggaacctctttctcagagtagtcccaaatgttattcaaaccgcttacatccctgcaatcctccaaccaaaatatatcttccttcgcctaatcaaccacacttcaatgtcatgctaacagtgggaacgttgtattgcctccgtccgcatcgccaccgagatcctcgtctccacccagaggcctcgtcattgttcctttggtgtcgacgatggtgccgaggacgaggggactgcctggcgctgagacgaagaagaggacgaggtgcctccatatctagcggagtgggcgacgcgggagctactgtgcgtcatcgccgtcatcgatgaagccagcagtgggggattttttgggaggaggatggggaggccaggacaaaggggaggacgttgccgctaccgctgagcaaggagagaccagatccagccatgacgatggccttcccctcctctctccctgaaaacaaacaaacaaaaatacactcaaaccaccagaaaccgcagtgaaattaacctccgcgagacccctaatcgatctaccgaacaagccaaccgtgggttccgcctcggcatcgtcgtcgaactcgtcggcgttgaggccgcaccgctctaggaagcgagggcactccgtcgccgacgccaccgcgcccgaaggagccgcggaggacaccacggggagatggcgaacggggaggcggagggagggagacggccttagggtttggtggagaggggcgggagaaaggggaaggaagcaagcgg

SEQ ID NO: 33082 - DNA, 2244 bp, Oryza sativa
  Clone ID: PAT_MRT4530_37229C.1
atggcggaagaaagagaaagcttcgagagtcagtgggcgccctccgatgtgacggaagacaatctgaaggagatgatcatcgggtggcgaccggcatttggtgaggctttcccgacccccgatacacatgaaatcgtggtatttgctcatttcttctatggcggattttctcttccaacttcgagatttttccggggcattctgaacttctacgggattagcttgcatcacttgaatccaaactccatagtacatattgccaattttatccacgcttgcgaagcttttctgggcattaggcctcatttcgccttgttccgccgcatattcttcctcaagccccagccaaacaaaaacaagtcgtgcgttgttgggggagctggtttccaactcagaggaaccttgagccaaaaatatttctccatgcccttcaaaacctcgaacaaaggctggcatgcgaactggttctatgttcagaatcctgagcccgcacttcccgagtactgttgtcttcctccggtttaccaggacacatggaactcattgcctatgggagatgaagctgctcaggcagtagaactgatggagaggatgataaagctgaaagaacagggtcttcaaggagagcagatcacccggcactttatcaagtgtcggttagctccaatcaaagaaagatcacgcacagcttttgagtttgatggcaagcatgatccaaatcgggaagatccagattctcttgactttaaggtcatgaaagaaagaatgtacaaaatcttttcaaacgctattgttgtcagctattcacatctgctgcccgttgtgccattcaacgcattcaaccctcctccaccggaatttgctttgatgaagtcggatcccccaatcgctcaacgtcgatctccccgccaccaaactgggcaagggagcggaggaccaagaattcggtctgaacctcaaccaagtgcttctgatccagtcggccagtcagactctcgaaagaggaagctggttttaagtaacgacgaagccgatgatactaccaggcggcctagagaccgagagacaaccaagaaactaccaaaacaggctactctaaggaagaaaaccaccagtcgccctgcgccaaagatcaggaaatcttctaggaaaccatctgatatagatctgtctgggaaagattctgacccgactagcgtggacgcaagttcttccaaagaaaccgggccaactgccgaggaccgtccgagtgacaatcagacggcaaccgataacgtaggatccgtggatacattagggccaatgatcagtgatgaagaagaagttccccgcatacaagcagctgagggttcacgccctccgattctggtcaagtggtgggatgacaacatgcagcctcatgggatcgtgataaataagcaaaaagaggacgaagagttatgcctactgaagaaggcacttggtcaggcaacccgtatggaaaataggattcatcttaggaacgaagctaaaacggcaaccttagagaggctagtccctcatctcgggaccctcgaagccaccaggagtctgctgcacgaaacaaaagagcttgccaggaaaaatgagcatgatctgaggaatcgaattgccgagctccaggaatccaattttgaactgagtggcttatcaaaagtaatcaatgtagtgcaagctgccaagatatctcagttcgagaagcaaattcaaactctggaaaacgacaaggcagaactggcaagacaaaaagacctggctttaaaggaagttgaagaccgcaagatcaaatctcaagctcaattcgacgtcctagttggcaagatcaaaaaacttgaaggagcccgggatgaggttgctaacgctgctgccccaatagttcaagcgatgttcctcaataacaacggccctagtgcacttgatgcttctgaaattttcgacaagctgagagttgctccggatatatatttcaagaacatcaaagaagctggaagtatgggagcaagcatggcattggcgatgactaaatccctttatccgagagttgatattgacgccattgatggctttgcagacgggacgagcgaagaagctgctcttgacctcatcagtaatgcgcagaaagcggctgacaaaattgctgctgatgtagttgagagatttcaggacaccgatcttcgaccgactggtcttgatatttctgatgatgaaaagactgatactgattaa

SEQ ID NO: 33083 - DNA, 500 bp, Oryza sativa
  Clone ID: PAT_MRT4530_3722C.1
ttcggcacgaggcacagcctgcagcaacagcactgatctcctacagcagcagccactcaaagcagagaagcagcagcagcagcagcaagaagagcatgggtggatcacgacgcagcgctttctcactcagctggtaattaatcatcaatcacagtaatattttgtactatatactgcgtgcatgttaataattactccagttcttgcatgcgtcgatagatcgagccagccagtaaaagtttacaaatcttgttaattagtagtattagtaattttgtcatgaaaaaggatgacaggttagttttcatcacaagtgcagtataaaatatgcagcacaagcagctactacgacaggttcaccgcgcgcttcgccgagcaggccttggcgacggcggcggaagctggcggcgacgagtcgccgccgatgccgaggccactggatccgtacaggtactccgaggacagggacactgaccagagcagcacctgcgccaggatgg

SEQ ID NO: 33084 - DNA, 204 bp, Oryza sativa
  Clone ID: PAT_MRT4530_37230C.1
atggaggagccgaggagaggagaaattggggatcgccagattggggatcggcgcagggagggggttgcgggcgacagaggaatcgagtggtgcgtcatgcgagaggataagtggcgcccggagattcccgcgggggccgactgggcgacggacagcggggcccacgggccgagggcgcccgtgcggcgtgccaggccaggctag

SEQ ID NO: 33085 - DNA, 2148 bp, Oryza sativa
  Clone ID: PAT_MRT4530_37231C.1
atggcggaagaaagagaaagcttcgagagtcaatgggcgccctccgatgtgacggaagacaatctgaaggagatggtggcacacgacgttcttccagcaaaagagatcatcgggtggcgaccggcatttggtgaggcattcccgaccctcgatacacacgaaatcgtggtatttgctcatttcttctacggcggattttctcttccaacctcaagattcttccgggggattctgaacttctacgggattagcttgcatcatctgaatccaaactccatagtgcatatcgccaattttgttcatgcttgcgaagcttttctgggcattaggcctcatttcgccttattccgccgaatcttcttcctcaagccccaacataataagagcaaaccatgcgtggttgggggcgctggtttccaactcagaggaacactaagccaaaagtatttctctatgcccttcaagacctcaaacaaaggctggcacgcaaactggttttacgtccaaaatcctgaacccgcacttcccgaatattcctgtcttcctccggtttaccaggacacatggaactcattgcctatgggagatgaagctgctcaggcagtggaattgatggaacgcatgctaaaactgaaggaacaaggtttgcagggagaacaaatcactcggcactttatcaaaagtcgattagctccaatcaaagagagatcccgcacggcttttgagtttgacggcaagcatgagccaaatcgggaagatccagattctcttgactttaaggtcatgaaagaaagaatgtacaagatcttctcaaacgctattgttgtcagctattcacacctgctacccgttgtgccattcaatgcattcaatcctcctccaccgaaaccatctaatatagatccgtttgggaaagactctgacccgactaatgtggacacaggttcttccaaagaaaccgagtcaactgctgaggatcatccaagtgacaatcaaccggcaaccaataatgcagaatctggtgatcaacccccgactagaatccagtcggccgaagccgaagccggagttaatcaggagcccccgactggaaaccagtcggacgcagggccaagccaagatattccagaagtcgaaacccaagcagacaaccctcgcggacaagacgccagcaatgaccggagatctggatcccctttaaaagcatccaaatccactcgtcctcgtccagaaatcattacaggaccaatgatcggtgatgaagaagaaattccccgtatacaagcagccgaagattcatgccctcctattctggtcaagtggtgggatgacaacttgcaacctcaaggaattgtaataaaccggcaaaaagaagacgaagaggtatgcctactgaaaaaggcactcaaccaagcgactcgcattgtaaataggattcatcttagggacgaggtgaaaaccgcaaccctagagagactagttcctcatcttggaaccctcgaagccactaggagtcaactgtacgaggccagagaacttgccaagaagaatgaacacgatctgagggatcggattgctgagctccaggagtccaatttcgaactgagtggctcgtcaaaagtgcaagctgccaagatatctcaactagagaagcagatccaaactctggaaaatgacaaggcagagctagcaagacagagggattcggctttaaaggaggttgaagatcgcaagatcaagtctcaagcacaatttgatgtcttagttggcaagatcaacaagcttgaaggagccagggataaagccatgttcttcaataacgccgggtcgagtacacttgatgctgccgaaatcttcgacaagctgagagtcgctccatatacttacttcaagaacatcaaagaagctgaaagtatgggagcaagtctggcgttggcgatgaccaaatccctttatccaagagttgatattgatgccattgatggctttgcagacgggacgagcgaagaagctgctcttgacctcatcagtgatgtgcagaaagcggctgacaagattgctgctgatgtagttgagagattccaagatgtcgaccttcggccgactgggtctgataagtctgatgatgaaaaaactgatactgattga

SEQ ID NO: 33086 - DNA, 543 bp, Oryza sativa
  Clone ID: PAT_MRT4530_37232C.1
atgcgggagaagggagagcgtcaccgcgcgtgcgacctcggggtcggaccatcaaagaggcccgggaggtggcggcggcggcgacacggtagaaggggaggacgttgccacacgggtgagctcgaggacgaagatcccagtcgcagcgaggtgagcgacctcaaccgcatcgcgcccgccgtcgacgacccacgcaagcacgcactcgtcttagcagtcctcgagcttcgccacccagctgccgcccacgactcccgcgcacggttgcttcctgctcgcgccgttcccactttgatgttgcctccccggaggagccaagcctcagatggggatggcgatggcgaggtggctcgagggcaccacgacgatgagcaacggggacggggagagcgaggacgctaccgtcgtcgtgtcgcccgtcgccatgggaggaggccctctcctctcttcccccacctcatccccgctgccgccggaggagccaggcctcgggatgaggatgctggcgctgccacggcgacgagcagcggggacggggagtga

SEQ ID NO: 33087 - DNA, 1551 bp, Oryza sativa
  Clone ID: PAT_MRT4530_37233C.1
atggcggaagaaagagaaagcttcgagagtcagtgggcgccctccgatgtgacagaagacaatctgaaggagatggtggcgcacagcgttcttccagcaaaagagatcatcgggtggcgaccagcatttggtgaggcattcccgacccccgacacacacgaaatcgtggtattcactcatttcttctacggcggattttctcttccaacctcaagatttttccggggcattctgaacttctacgggattagcttgcatcacttgaatccaaactccatagtacatattgccaattttatctacgcctgcgaagcttttctaggcattaggcctcatttcgccttgttccgccgcatcttcttcctcaagccccagccaaacaaaatcaagccgaaaccatctgccatagatccgtctgggaaagactctgacccgactagtgtggatgcaagttcttccaaagaaaccaggccaactgccgaggaccgtccgagtgacaatcagccgacaatcgataatgtagaaaccggtgatcaaccaccgactgggaatcagtcggctgaagccgaagccggggttaatcaggagcccccgactgaaaaccagtcggacgcagggccaagccaagagattccagaagttagagctcaagcagacagccttcgcggacaagacgccagcaataaccagagatctagatctcctttaaaggcatccgaacccactcgtcctcgtccaaaaatcattacggtggatacattagggccaatgatcggtgatgaagaagaaattccccgcatacaagcagctgaggattcacaccctccgattctggtcaagtggtgggatgacaacatgcagcctcaagggatcatgataaataagcaaaaagaggacgaagagttatgcctactgaagaaggcacttggtcaggcgacccgcattgtaaatgaatccaattttgaactgagtggctcatcaaaagttaatatagtgcaagctgccaagatatctcagctagagaagcagatccaaattctggaaaatgacaaggcagaactggcaagacaaagagacctggcttcaaaggaagttgaagaccgcaagatcaaatctcaagctcaattcgacgtcctggttggcaagatcaaaaaacttaaaggagcccgggatgaggttcctaatgctgctgccccaattgttcaagcgatgttcctcaataacaatggcccgagtgcacttgatgcttctgaaatttttgacaagctgagagttgcttcggatatatatttcaagaacatcaaagaagctggaagtatgggagcaagtatggcgttggcgatgactaaatccctttatccgagagttgatattgacgccattgatggctttgcagacgggacgagcgaagaagctgctcttgacctcatcagtgatgcgaaaaaagcggctgacaaaattgctgctgatgtagttgagagatttcaggacaacgatcttcgaccgactggtcctgaaaattctgatgatgaaaagactgatactgattaa

SEQ ID NO: 33088 - DNA, 421 bp, Oryza sativa
  Clone ID: PAT_MRT4530_37234C.1
gcgtgccaccatgcaccgtcaatccgccgagagccaggcgcaccgccgctcgctgccttctctcgcgtggcgcgggcacccgtcgatgcaccgccgggagcctccgtccacgcgccgccggcagccgccgggagcctccgtccacgcgcagtcaggcacggcgcctgcagccgtagtcaccgggagccgccatcgccatcgacgtccgccagcgccttccgtcgtcactcgcccgcacgtcgtccaccgccagcacgccatccgccgacggccgaccatggcttcggcctccgccccccgggaaaaaatcaccgcgtggtgatcggggctggagaaaatgtacccccgtcgtggttgacgggggcggggacggtgaaattttttcaccgcggtgatggggacgcagcggtgacccccgacg

SEQ ID NO: 33089 - DNA, 1755 bp, Oryza sativa
  Clone ID: PAT_MRT4530_37235C.1
atggcggaagaaagagaaagcttcgagagtcagtgggcgccctccgatgtgacggaagataatctgaaggagatggtggcgcacggcgttcttccggcaaaggagatcatcggatggcgaccagcattcggcgaagcattcccgacccctgatacgcatgaaatcgtggtatttgctcatttcttctatggcggtttctcccttccaacctcaagattttttcggggaattctgaatttctatggaatcagcctgcatcatctgaacccgaactccatagttcacatcgccaattttattcatgcctgcgaagcctttttagattcagactctcttgactttaaggtcatgaaggaaaggatgtacaagatcttctcaaatgctatcgtcgtcagctattcgcacttgctgccagtcgtgccattcaatgccttcaatcctcctccaccggaatttgctttgttgaagtcagatcctccaatcgcccagcaccaatcacctcgccgccaaactggtcagggaagtggaggaccaagaattcggtctgaaacccaaccaaatgcttctgatccagtcggccagtcagattctcgcaagaggaagctagttccaagtgacgacgaaggcgatgataccggaaagctcagagataaaggagcaactggaagacctccgaagccaactaatttgaagaagaaaacctccagtcgtcctgaaccaaaaatcagaaagtcttccagaaacgagtcggccgaagctggagccggagttaatcaggagccctcgactgaaaaccagtcgggcactgggtcaagccaagaaattccagaagttggagctcaggcagacaaccctcgtaaacaagacaccagcagtgacccgacaccaggatctcccgttaagacgcaagagtcgactcgtccccgtccggaaatcattacagtggattcattaggaccaatgattggtgacgaagaagaaattccccgtatacaagtagctgaagactcgcgccctcccatcctagtcaagtggtgggacgatgataggcaacctcaaggaatcgtaataaacaaacaaaaagaagatgaagaagtatgcttgctgaagaaggcactcagccaggccacccgcattgtaaataggattcatcttaggaacaaagctaaaacggcaaccttagagagagtcaatgtagtgcaagctgccaagatatctcaactggagaagcagattcaaactctggaaaatgacaaggcagaactggcaagacagagggactcggcattaaaggaggttgaagaccgcaagatcaagtcccaggcgcagtttgatgtcttagtcaacaagatcaataggcttgaaggggctagggataaagtcgctaatgccgctaccccactcatccaagccatgttcttcaataacgccggtccgagtacacttgatgcttccgagatcttcgacaagctgagagtcgctccggatacttacttcaagaatatcagggaggctggaagtatgggagcaagcatggcattagctatgaccaaatctttataccccaaaatcgatattgacgccgttgacgggtttgcagacgggacaagcgaagaaacagccctcaacctcatcaatgatgcacaaaaagccgctgacacgattgctgctgacgtagttgagagattccaagatgtcgaccttcggccgactgggtctgataattctgacgatgaaaagactgacactgattag

SEQ ID NO: 33090 - DNA, 1839 bp, Oryza sativa
  Clone ID: PAT_MRT4530_37236C.1
atggcggaagaaagagaaagcttcgagagtcagtgggcgccctccgatgtgacagaagataatctgaaggagatggtggcgcacggcgttctcccgacaaaggagattatcgggtggcgaccggcgttcggcgaggcattcccgacccccgacacacacgaaatcgtgaatcctgagcccgcactccccgagtactgctgtcttcctccggtttaccaggatacatggaactcattgcctatgggagatgaagctgctcaagcagtagaactgatggagaggatgataaagctgaaagaacagggccttcaaggagaacagatcacccggcactttatcaagtgtcggttagctccaatcaaagaaagatctcgcacagccttcgaatttgacggcaagcatgacccaaaccgtgaagatccggattctcttgacttcaaggtcatgaaggaaaggatgtataacatcttctcaaacgccatcgttgtcagctactcacacttgctgccagtcgtaccgttcaacgcattcaatcctcctccaccggaatttgctctgatgaagtcgaatccaccaatcgctccacgccgatctccccgccaccaaactgggcaagggagcggaggaccaagaattcggaaaccatctgatatagacccgtctgggaaagactctgacccgactaacatggacacaagctcttccaaagaaaccggaccaactgctgaggatcatccgagtgaaaatcagccggcaacctataatgtagaacccagcaacgagcccccgactgggaaccagtcagtcgaagctgaagtcggtgctaaccaggagcccccgactggaaaccagtcggatgcagggccaagccaaaagattcccgaggttgaagctcaaacgaacaggccaataattggtgatgaagaagagatcctccggatacaagcagctgaggattcacgccctccgattctggtcaagtggtgggatgacaacatgcagcctcaagggatcgtgataaataagcaaaaagaggacgaagagttatgcctactgaagaaggcacttggtcaggcaacccgcattgtaaataggattcatcttaggaacgaagccaaaacagtaaccttagagaggttagttcctcatctcgggaccctcaaagccaccaggaatcaattgcacgaagcgaaagaacttgccaggaagaatgaacatgatctgagggatcggatcgctgatctccaggaatcaaattttgaactgagtggctcatcaaaagtacaagctgccaagatatctcagttggagaagcagattcaaattctggaaaatgacaaggcagaactggcaaaacaaagagacctggctttaaaggaagttgaagaccgcaagatcaaatctcaagctcaattcgacgtcctggttggcaagatcaaaaaacttgaaggagcccgggatgaggttgctaacgctgccgccccaatcgttcaagcgatgttcttcaataacaatggcccgagtgcacttgatgcttctaaaattttcgacaagctgagagttgctccggatacatatttcaagaacatcaaagaagctggaagtatgggagcaagtctggcgttggcgaagactaaatccctttatcctagagttgatattgacaccattgatggctttgcagacgggacgagcgaagaagctgctcttgacctcatcagtgatgcgcagaaagtggctgacaaaattgctgctgatgtagttgagagattccaagataccgatcttcgaccgactggtcctgataattctgatgatgaaaagactaatactgattaa

SEQ ID NO: 33091 - DNA, 332 bp, Oryza sativa
  Clone ID: PAT_MRT4530_37237C.1
gggcgaatggggtcccctcggcccgcccggggtagtttacatcccgaagggcggcaagagtgatccaggccgaccatggcttacgtcgagagaggtgttgtgaaagacaagcggactatatggcgactgagcataatctcagacttctttcgggctattgtcaacttcatcagaatcttctttgacacactgttctcagtggacaaaactgacagctacaagaaagggtatggtgctggtaagaagtgggatggtggacccggaggtggtaggtgcggcggggcccatatggaggtggaggtggaggcggcccagtgggggggaggaagtcg

SEQ ID NO: 33092 - DNA, 366 bp, Oryza sativa
  Clone ID: PAT_MRT4530_37238C.1
atgccatctagtcccaggttctccttcggccaaaaatggcgaggtggccggctggtggtggaacggaggagtcctggaccagctctcaggggtggtggttcgatgaagtcggccaacgaaggggcgtcggtgcggtgtggtgggtgctgcgtgctgccttttgtctgtgtgggggttctgagttggtggacggcgatctgcagtcaagggtgtagggtcccagaggacatggatccttcccaagtgcaaatctcctcatggactgccctccccatgggggaaattgcagggggcaggcttgggacacagcatgacactgggttttctttgagcctcaagaaaaggttttttgggtctatggtctag

SEQ ID NO: 33093 - DNA, 2091 bp, Oryza sativa
  Clone ID: PAT_MRT4530_37239C.1
atggcgggagaaagagaaagcttcgagagtcagtgggcgccctccgatgtgacggaagacaatttgaaggagatggtggcgcacggcgttcttccagcgaaggagattatcgggtggcgaccggcattcggcgaagcattcccgactcccgatacgcatgaaatcgtggtatttgctcacttcttctatggcggattttctcttccaacctcgagatttttccggggcattctgaacttctacgggattagcttgcatcacttgaatccaaactctatagtacatattgccaattttattcacgcctgcgaagcttttctaggcattaggcctcatttcgccttgttccgccgcatcttcttcctcaagccccagccaaacaaaagcaaaccgtgcattgttgggggagctggtttccaactcagaggaaccttgagccaaaaatatttctccatgcccttcaaaacctcaaacaaaggctggcatgcaaactggttctatgttcagaatcctgagcccgcactccccgagtactgctgtcttcctccagtttaccaggacacatggaactcattgcctatgggagatgaagccgctcaggcagtggaattgatggaacgcatgctaaaactgaaggaacaaggtttgcaaggagaacagatcaccaggcactttatcaagtgtcggttagctccaatcaaagaaagatcccgcacagccttcgaattcgacggcaagcatgacccaaaccgtgaagatctagattctcttgacttcaaggtcatgaaggaaaggatgtataagatcttctcaaacgccatcggtgtcagctactcacacttgctgctagtcgtaccgttcaatgcgttcaaccctcctccaccggaattcgctttgatgaaatcggatcctccaattgctcaacgccgatcacctcgccagcagactggtcaagcgagtggaggaccaaaaattcgatctgacgctcgaccaagtgctcccgatccagtcagccagtcagatactcgcaagaggaagctggttctaagtgacgatgaagccgatgatactaccaggaggcctgaagaccgagagacgaccaagaaactaccaaaacaggctactccaaggaagaaaacatccagtcgccctgtgccaaagatcaggaagtcttctaggaaactatctgatatagacccatctgggaaagactctgacccgactaacatggacacgagttcttccaaagaaaccgggccaactgttggggatcacccgagtgacaatcagccggcaaccgataatgtagaatccagtgatcaacctccaactggaacccagtcggtcgaagctgaagccggagttaatcaggagcccccgactggaaaccagtcggacgcaaggtcaagccaagagactccagaagtcgaaacccaagcagatagccctcatggacaaaacgccagcaataaccagagatctggatctcctttaaaggcatccgaatccactcgtcctcgtccagaaatcattacggcgaatacattaggaccaatgattagtgatgaagaagaaatcccccgtatacaagcagccgaagattcgtgccctcccattctggtcaagtggtgggatgataacttgcagcctcaaggaattgtaataaaccggcaaaaagaagacgaagaggtctgccaactgaaaaaggcactcaaccaagcgactcgcattgtaaataggattcatctcaggaaggaagccaaaacggcaaccttagagaagttagtccctcatctcggaaccctcgaagccaccaggaatcaactgcacgaagcgaaagagcttgccaggaagaatgaacatgacctgagggatcggatcgctgagctccaggaatcaaattttgaactgagtggcacatcaaaagtgcaagctgccaagatatctcagttggagaagcagattcaaattctggaaaatgacaaggcagagctggcaagacaaagagacctggctttaaaggaagttgaaggtatcaacaatcaatacctcaaaagccattatcctccatatgctgacttattaatgtga

SEQ ID NO: 33094 - DNA, 828 bp, Oryza sativa
  Clone ID: PAT_MRT4530_3723C.1
atggcgatggcgatggcgatggcgatggaggcggcgccggcgccggtgccgctgccgctggtgctgcggttccggaacggcgaggaccgcttcgcgctcaccgaccagccgaggcaactccccttggggtacgcgatcgacgccccctccattcgctccgcccgcaccttcggcctcctcgacgagtacgcgcgggtccacgcgcagcacgcgcggggcggccccggcgccgtgcccgacatcgccgcctgggaccgcgccttcatggagcgggaggtcaccgacaccgacgagctccacgacctcttcatggagtataaaatagtggacatgagcaatctctttgttatggtgggtggtcaaggcgacggcaggggaacgtgtatgctctggctaaatgtggttagtgcgacacaaccgtataggattatgtttatactacagcttgctgctatagataatgtaggttttcatgttttgtgctttggtagactggtagtcgtatacaatgtgagtctgtttgtggaaatgttgcagcataggcacctatctaacctgttccatagaaagatgttgcatataatcttggtcatggctgatgtcccaatagagtactttctagcttggaatcatgcatgctcacaggctgcgtcgacgctggaaatggacgggctgagtgtactgtgtgcacagaagacggcggacgtcgtcaagaagcgcaccgtggaggaggtcaaggcgctgctcggcatcgccgacgtcggcatgacgccggaggaggagctcaagctccagcacgacaacgatgccatcctctgcctccgttaa

SEQ ID NO: 33095 - DNA, 603 bp, Oryza sativa
  Clone ID: PAT_MRT4530_37240C.1
atggcccctgccgtccaagtggagggctgcaaggtgctatgcgtgccgggccagtccggtgttcgtgcagaggctcgacagtgggcggggcaggccgcagctagagcaggccggcagagcggcgtcggccggagcaggcgaggggcaaggcggcgctccacgcggctccagcaggcggcggccgcggcacagacgaggggcaaggcgacggaggacgacaacaacaacgccggcgccgcaggcgagaggttggccgtggtggcgcccatcctcgccgccgacgcggccctccaagctgccgatgtcctcgtcatcgtcgtctttcacgacggacccactggcggagttcctctgctcaatctccggcacgctcgccttcttcccgccggctgtcaccgtcgacctctccgcgctcccctccgcctcctccccaccttgccgaggttgccgcccaccatccaggccgacgccctctctgctgccgtccctcttctcgccgccgcccctctgctctgtcgccgccggccacacgccttgtggagctcgaggcagcgcggaggggacgcgcttgtgaagtcctcccgcgtgttcaagagctactag

SEQ ID NO: 33096 - DNA, 639 bp, Oryza sativa
  unsure (1)..(639): unsure at all n locations
  Clone ID: PAT_MRT4530_37241C.1
ttctcagtgttgcttctcgccgtcccggttcccttcccccggttgggcctttccggcccgggggccggaaaccggggccggaaaccccaatttgggggccgggggaaagtttaaccccaacccccaacccccaaaaagnaaaccccaaggggtttgggggttcctttaaccaaccccccccccgggggggcccccccggcctttccttgggtttccaagncccccaagggggaaaaattggggggggccttaaccccccccgnaaattngtttaacccccccggcctttcccccccggcccggtttttggccccgggggggccgggtttttgggggttggaaaaaagcccggccccaaaggttgggccggtttccgngggccccgggttgggggccaaaccgggggcnccgggccccgggcccccggcccccgnaaaaaccaaagnggtttcccccgggggccgnaaaaaaaaccttgggcctttggcccccgggggccggaaanacccccttcccccccggggggcgggtttttcctttggcccaaaacccggtttgggggaaacaaatttccccccccccanaatttgggggggaaacaaagggggttgggggttgggtttccttgggcctttaacc

SEQ ID NO: 33097 - DNA, 981 bp, Oryza sativa
  Clone ID: PAT_MRT4530_37242C.1
atggcgcagacggagaggcccgcctcggcgacgcgctgcgcgatggcgaggccggcggggccaccgccgacgacaaggtgggccacgcgaccaacgccgaggcgagcgagaccgcgagacgcgtctgcctctgctctgcgctggggaatagcagagaaaaaagtgcgtgacggcgatgctcctcgtgctggcgtcggcacaggacttcaacgcgctagcgccgtcgtcgagggagagcaactcagggcgagacggcggggccagcgagcgcagcgcctcacccgccgcagtggcgcggtggcgagggagggggagggggcttgcaggcggggtgggcatgggggaggagggcggtggtggccatggcggcgcggcggctgctcccagctaagaaattttttgattttgggtggggaaagatggcgccatctcctcccacggctacagcgtaggcccaatcgagtggtggagcggcgtcggcgtcggcgcacagcgcttcacggagcacgcgcagctcatggccgctctcggcagcgccggccgcgacgacaacacggtggacatgctcaactagacaagagcgtcccacgccgccgccgccgccgctgcagccaccgccgtgtcttccatgggcgccggcgacaagcagatggacctggagctgcatctctagatcgacgacagatcaaatcaactggcacgctcatatatctgaaggcaagcttttggacctgcactggagttaagcatatctctcaggcttcgtgtttttacatcaacatgctgcctgatgttggcgccgcccggccgcctccacccagcgtcccctacagccggatctggacgaggggaggccacccggccatatgccgcctcccattgcaccgctgcccgcaacctcatgtgtggccgcggcccgccgtcagaggagggggtagggggaggagagggggatgggccggaggaaggggaggagaaaat

SEQ ID NO: 33098 - DNA, 1398 bp, Oryza sativa
  Clone ID: PAT_MRT4530_37243C.1
gcacgaggccagatggtaccaccacccaagtctccgattttttcagctcggcgattgaggaagatcttcgtcatcatcaccaccaccgtgctaccctagcctaacctagcggccttcaacctctgctcgatcgatctgctgctgcttctccaaggcgagcttcgtgatcaaagcatgcaaggaggggcagcgatggtggtgacagtgaacggcggcaatggcaaggacagcttcggcaacatggcgaggccgccgtcgaggagcctcctccccctcaagctcctcaagccgttcctcatcttcgccgtgctcgccaccggcttcctcgccgccgccgcagccgccctcctcctcctcggcggcggcgctggcgcctcctacgtccccaacgtcctctcggcaacggcgtggcagcagcagccgcggtgcgcgcagcagcaggaggacggcgggcgggcggcgctggagcggtggacgcggctaccggcggcgagcgcctggcacaacatgagcgacgaggagctgctctgggcggcgtcgatggagccgcgggtgcggcggtatccgtaccggcgggtgcccaaggtggcgttcatgttcctcacgcgtgggccgctgccattggcgccgctctgggagaggttcttcaatggcagcggcggccgggagctcttctccatctatgtccactccacgcccggatacaaccccgacttcccgacaacctccgtcttctaccgccgccaggtgcccagccaggtggcgcaatgggggcagacgaacatgttcgacgcggagcggcggctgctggcgaacgcgctgctggacggcggcaacgagcgcttcgtgctcgtctccgagtcgtgcgtgccgctgcacggcttcccggcggtgtacggctacctgaccgcctcccgccacagcttcgtcggcgccttcgacgacccgggcccgcacggccgcggccgctacagggcggggctggcgccggaggtgtcgccggagcagtggcgcaagggcgcgcagtggttcgaggtggaccggtcgctggccgtgttcgtcgtcggcgacgagcggtactacccgaggttccgggagctgtgccggccgccgtgctacgtggacgagcactacctgccgacggtgctgtccatcgaggcggcggggcggatcgcgaaccggagcgtgacgtgggtggactggtcgcgcggcggcgcgcacccggcgacgttcggcggcgcggacgtcggcgaggcgtgggtgaggaaggcggcggcggggcagaggtgcctgtacaacggccagccgtcggaggtgtgcttcctcttcgcgaggaagttggcgccaagcgcgctgcagccgctgctcgcgctcccgccaacgctgctcggctactag

SEQ ID NO: 33099 - DNA, 822 bp, Oryza sativa
  Clone ID: PAT_MRT4530_37244C.1
agcataaatctctgcatggacgttatggatatatcccatctcaccaaattctgatcggcgagataatacaattttggaacaccaccaaccaatggacgttagtcaacggcaattaatcaccaaaactcaccttgtagcagccgttacaaggtgcaaaagaatcttgatgcccatcccaaattgtctatgaaacaatgctctactaaaaatttttaatctcttcaggaaattcctgctacggtgaatttcccttcatcattgccctcctctatgccgcaaccggtgtttgcctagggccgttgactcgggtgaacctcccatttccgttctggaacggccttgctggatggaatccgttgttctgatagccattcccaggcggtggccctcgaccacgacctgaaaactcgttgcgatttctcaagtcgttcctcctgctgaagttatcacctccacggtagtttccgctgttcgcatagccaccaccccgtcccctgaaattatcaccgcggtagcctccccttccagattggtaacgtccgcctccaccagcattcccattatcaccacgcgtgatgacaacaccattcacaactcgggtagtggttcttttctcctcaacaaatacttctttcccacccatatgaatcggagatgcctcaattgctgcctgcatagattgctgggactcaaactcaataaaaccaaagcagaaccggtcaatcttgttgttcctaacttggatgccacctggcttgatagcgccaaatttcttgaactcttcctcaaccgtctggactgtcacattgtgaggcaactctc

SEQ ID NO: 33100 - DNA, 390 bp, Oryza sativa
  Clone ID: PAT_MRT4530_37245C.1
tctggtttgcgcgcactcgacgaagagaatagacagacaggcgtactctaccctataaaaggcttttgacatatgaacgaaggcacgattgactgactcgaccgaagagtagataaccatcagtacaaataccaacgccaggattggaagttaaatattagcgaacgcgcacagactggagtacactatcaaacacaggcatacctgaccatcaacattttcgcataacctgtgagtgagatgcggagggtgagcagattttcaggtcagagctgccagcatgaactttggaagagccaatgctggacatcaacagtcgcgtgagctgggggcatccccccagaatgacccccagaggctagtgcgtgcacatccatctaccagactccg

SEQ ID NO: 33101 - DNA, 189 bp, Oryza sativa
  Clone ID: PAT_MRT4530_37246C.1
aatatgcttaacacattcaattttgcgaaagaaaagagaagcgtaaagaatgcatggatgattaaagaagttgattggggaccaaaccaagaccttctccaagtccacttccatttcaccacgtcacttttgatccatagaagataagagatcaagttttacacattttggattcggattcgggcctct

SEQ ID NO: 33102 - DNA, 249 bp, Oryza sativa
  Clone ID: PAT_MRT4530_37247C.1
gcacgaggcttgttcgagtgaatgctgctatattactgtgtttctaaacatcttatgaaggccaccgggatcacagtggagacctgaaagcctgtatctgagtatctatgtacactcaagttaatttgaggcagttctggactcatcttgtttttgatccttagtcctgctttacttaccacatatgagtacctccgtgacatttatcataattgaggtgtaatataatgtcttcacaaagaacttatc

SEQ ID NO: 33103 - DNA, 430 bp, Oryza sativa
  unsure (1)..(430): unsure at all n locations
  Clone ID: PAT_MRT4530_37248C.1
cccagggaancnagnnnnnnatccntgattcgcccnaagctcgaaattnaaccccntncnctaaagganccaaaanctggagctcccaccnnnnngngnnggccgctntagaactaggtggatcccccccggctgcaggaattcggcacgagggttcagagtagcgcaaaacagttgaggcgcggagtcggtcgggactggctgagcgaccggtgccaacccgactcacgggaacgggtgctttgttggaggttgtacagaagaggcagggacggatgaacctaccttcagggttcggtcggatttttgcatcgaataagtgtttaatgtcggatgatcatgaatcggggagggaggtattctggttgtttttctatgtaattttattcatgcagcatcaatggggcgaaaaaaaaaaaaaaaaaaaaaa

SEQ ID NO: 33104 - DNA, 164 bp, Oryza sativa
  Clone ID: PAT_MRT4530_37249C.1
atgggacagcccacacctacctccacttccgccgggggtgagcgcgtcgtgggaacatggctatacacgccttacgcccgccttgaacaaatgactaaaggcttcctcttgccggatggggcaggggtgtgtaaaacccccattgcccctaacccggattaccg

SEQ ID NO: 33105 - DNA, 871 bp, Oryza sativa
  unsure (1)..(871): unsure at all n locations
  Clone ID: PAT_MRT4530_3724C.1
gcgaatctanaactaatccggacgcgtgggcggacgcgtggaaaaattcctacccttttacgttttgaatacacaactttaaaatcctgggcctgctcatctatgatgagtcagcgatatgctgctgatttgctgccattgtagtttgtaggatttgtagattctgatgaagagtaatgtggatattgcatcgtttgaacttgcacattttgaacgtgctttttaaaattagtcgattattgatgttaaaagatattattgatttatttttatcacattttaattaaatttgtacttgtatatgggatttgcggtgttcggaaattttttatatgtgatgtgaacctttgaagtaggactacccaaccaaaaaatcctggctactccccgctccggcacatgcctccacatccgaggctcctactcaacgcagtgttaccgggacacggacacaggtgtcggagtccgactcggactcgagtgtccgacttggcaagctgaaaaaaaaaaggattcggggactcgccccatatatatatatatatatttttagtgaaaatattatatatatcatcaaatataacatactcttatagtcagtaaaacactaaaaacatatggtgtcacacattattctgcacaaaagatcttatcttcttattagttcccacatagaacaaaaactgccagccaaaataagtgaatttcatgtgtagaggatcccttgttcacaaaaaatcccactgctatcctgccgcccacaggccacatgccaatactagatttgtgaatgactggatgcaagtaagtcgctgctgtcattgtatggtttggtattggcctattgggcaagacatgaataggaatgggg

SEQ ID NO: 33106 - DNA, 279 bp, Oryza sativa
  Clone ID: PAT_MRT4530_37250C.1
atggcgcatctcaagaaggatgctagggttctcttacttacagccattgcagtcatggcgatgatcttctcaccttgtaacgcagaagttgcagacaagtgctacaccgtatatagatgcactcttccagcatgcaacgactactgcatcaagctgggtgtacataacccacaagtgacatgcaagctcagcttcccaccctccgactactatgacacgtgctgctgcggcacgtgggacgacaaaagcgtgggcgcacgccgtctgctgtcccgttga

SEQ ID NO: 33107 - DNA, 316 bp, Oryza sativa
  Clone ID: PAT_MRT4530_37251C.1
gggaaaaaaaacgggtggtaatatttttagaatttaattttaaaaaggaccagtttgggaaaaggcatttaacaaacctgatttttcatagaatagggggcctaaaaaaagattttttgcccatttttcctttaaatgctggccaggaaaagcaaatgttttaaaggtcttctgggtttaattgttgggcttttttttagggatgctcaaaaccaaaggaacttggaaaaaaatgggtgtttttgcctttttgcgaaaaccaatttcccaaccatgatggatttttttattcggatataaaaaattaaggtttaat

SEQ ID NO: 33108 - DNA, 1593 bp, Oryza sativa
  Clone ID: PAT_MRT4530_37252C.1
atggcggcttccatggccggagcgccgagggtccggtcgctcaacgtggcggagacggacgcgggcgcgaggccggtgctggtgccgggtggcaacccggccagttcgggccccgcccccgcccgcaagccgtcgccgaagcggctgcggaaggcggacactgcggcgcggaggccggagtaacgcgccgccgccgcggccgcgggctcttctccggccaaggaggaggagggcgccaagtagaatgccggcggcggcgtgggcaagggctcgggccccgtgccgtcgcggaggcgggcgcagccgcagccgccgccgtctcggaaggcggcgcacgacgcgcccgtgcagctgatcctgtcgctcaacgcctcctgctcctcggatgcctccgtggattcgctacgcggccgggagtcctccggtgggtggctggagaggatctggtgcggggtggcgcccgccgtgccgaggcgggggaagactccagtgaaggcggcggcggcggcggcggcggcggagaaggttgccgccgatgcggaggttgtcgcaccggccacaccggaggcggggaagaggaggtgcgcgtgggtgactccgaccagtggtggctccatcattttgcctacattggataaaatccttgctatgtcatcttccatgatgaggagtggggtgttccagttcatgatgacagaaactgacagtctgagaatgtcgaatcatgaccgatttcacaggagattgtttgagctgcttgtactgtctggtgcattggccgagctcacatggcctgaaattcttaaaaggaggcaacttttcagggaaattttcgtggacttcgatcctgttgctatctctaaaataaatgagaagaagcttgtagcaccaggaagtgttgccaactcccttctgtcagagcaaaaactccgagcagttgttgaaaatgctcgacagatacttaagattgtagatgaatttggatccttcgatcgatactgttggggctttttgaaccacaagccaatagtgagcaaattccgatatccaaggcaagtccctgtcaagagccccaaggcagacatgatcagcaaagacatggtccgaaggggtttccgaggcgtgggcccaacaatcatatattccttcatgcaggcagcagggctgaccaatgatcaccttgtcagttgctttcggttcaaagaatgcaatgaagctccaactctttgcacgagtgatactagcaatgcaaattcagaggcagatctaagtgcagatgaactgagaacaaaaatctgcagcaaggagatggctgcaaaagcagagctgttgaggacgatcggtacgcttatcatttcataggaccatgtggaacagtgatgcggttactgtacctgtattgcccatgtgtaggttgtgtgctaggttatcctcaaaatgagttttagggatcaaaatgcttttgtgtataaatcatttgtgtcagtaatgcaacccagtttgtacattgctaccggagagaaggatgatgaccattttactgatgcagaaactgtgaaaaatcttcctcaatcagttaacatttttttctcc

SEQ ID NO: 33109 - DNA, 2127 bp, Oryza sativa
  Clone ID: PAT_MRT4530_37253C.1
atggcggaagaaagagaaaacttcgagagtcagtgggcaccctccgatgtgacggaagataatctgaaggagaaggtggcgcacgacgttcttccggcgaaagagatcatcaggcctcatttcgccttgttccgccgcatcttcttcctcaaaccccagccaaacaagagcaaaccatgcgttgttgggggtgctggtttccaactcaggggaacactaagccaaaaatacttctccatgcccttcaagacttcaaacaaaggctggcacgccaactggttctatgttcaaaatcccaaaccagcccttcccgagtactcttgtctccctccggtctaccaagatacatggaactcattgcctacaggagatgaggcagcccaggctgtagaattaatggagcgcatgataaagctaaaagaacaaggtttgcaaggagaacagatcactcggcacttcataaaaatccggttagctccaatcaaagagagatcccgcacaacttttgagtttgacggcaaacatgatacaaatcgtgaagatccagactctcttaactttaaggttatgaaggaaaggatgtacaagatcttctcgaatgctatcgttgtcagctattcgcacttgctgccagtcgtgccattcaatgctttcaatcctcctccaccagaatttgctttagtgaaatcggaccccccagtcgttcaacgccgatcaccccaccgccaaacctgtcaagggagcgggggtcccaagatccattctgaagcccggccagatacctccaatccagcgggccagccagatccacgcaaaaggaagttagtgtcaagtgacgacgaaagcgacactgctagaaagcctggagaccgagaggcaaccaagaaactgccgaagcaggctactccaaggaagaaaacatccagtcgtcctgtgccaaagatcaggaaatcttccaggaaaccatctaatatagatccttctagaaaagactctgacccgactatcagggaaacaaacttaaaaggaattgatccaactgacgaggatcagccgagtgatagccagccaacaaccgataatgtaggatccggtgatcaacccacaaccagaaacgagtcggccgaggctggagccggagttaatcaggaaacatcgaccgaaaaccagtcggggactgggccaagccaagagattccagaagttggagctcaggctgacagccctcgtatacaagacacctgcgatgacccgacgccaggatctcccgtcaagacacaagggtcgactcgtccccatccggaaatcatcacagtggattcattaggaccaataattggtgatgaagaagaaattccccgtatacaagcagctgaggactcgcaccctcccatcctagtcaagtggtgggatgatgataggcaacctcaaggaattgtaataaacaaacaaaaagaagatgaggaagtatgcttgctgaaaaaggcactcagccaggccactcgcattgtgaataggattcatcttaggaatgaagctaaaacggcaaccttagaaagagtcaatgtagtgcaagctgccaagatatctcaactggagaaacagattcaaactctggaaaataacaaagcagaactggcaagacagagggactcagctttaaaggaggttgaagaccgcaagatcaagtcccaggcccagtttgatgtcttagttgacaagatcaataggcttgaaggggccagggagaaagttgctaatgccgctactctactcatccaagccatgttcttcaataacgccggtctgagtacgcttgacgcttccgagatcttcgacaagctgagagtcgctccgaatacttacttcaagaatatcagggaagctgggagtatgggagcaagcatggcattagctatgaccaaatctttataccccaaaatcgatgtcgatgccattgatgggtttgcagacgggacgagtgaagaatcagccctcgacctcatcaatgatgcacaaaaagccgctgacaagattgctgctgacgtggttgagagattccaagatgtcgaccttcggccgactgggtttgataattccgacgatgaaaaaactgatactgattga

SEQ ID NO: 33110 - DNA, 1296 bp, Oryza sativa
  Clone ID: PAT_MRT4530_37254C.1
atggcggaagaaagagaaagcttcgagagtcagtgggcgccctccgatgtgacagaagataatctgaaggagatggtggcgcacggcgttctcccagcgaaggagattatcgggtggcgaccggcgttcggcgaagcattcccgacccccgacacacacgaaatcgtggtatttgctcatttcttctatggcggattttctcttctaacctcaagattcttccgggggattctgaacttctacgggattagcttgcatcacttgaatccaaactccatagtgcatattgccaaatttatccatgcctacgaagcttttctgggcattaggcctcatttcgccttgttccgccgcatcttcttcctcaagccccagccaaacaaaagcacaccgtgcgttgttgggggagctggtttccaactcagaggaaccttgagccaaaaatatttctccatgcctttcaaaacctcaaacaaaggctggcatgcaaactggttctatgttcagaatcctgagcgcgcactccccgagtactgctgtcttcctccagtttaccaggacacatggaactcattgcctatgggagatgaagctgctcaggcagtggaattgatggaacgcatgctaaaactgaactactcacacttgctgccagtcgtaccgttcaatgcattcaatcctcctccaccggaatttgctttgatgaagtcggatctcccaatcgctcaacgccgatctccccgccaccaaactgggcaagggagtggaggaccaagaattcggtctgaaactcagccaagtgcttctgatccagtcggccagtcagattctcgaaagagcaagctggttctaagtgacgacgaagccgatgataccaccaggaggcctggagaccgagagacaaccaagaaactaccaaaacaggctactccaaggaagaaagcatccagtcgccctgcgccaaagatcaggaagtcttctaggaaaccatctgatatagatccgtccgggaaagactctaacccgactaacgtggacgcaagttcttccaaagaaaccggaccaactgctgaggatcatccaagtgacaatcagccggcaaccgataatgtagaacccggtgatcaacccctgaccggaaaccagtcggacacaggggcaagcgaagagattccagaagtcaaaacccatgcagacaaccctcgtggacaagacgccagcaatgaccggagatctggatctcctttaaaagcatccgagtccactcattgtctgaaaccatgtcgacccaaataa

SEQ ID NO: 33111 - DNA, 438 bp, Oryza sativa
  Clone ID: PAT_MRT4530_37255C.1
tgtgggtttggagtgtgtttgtccgagtggattttgtgtttgaagttaaatttatgttaaggtgcgtgtttgctcctcattgagcggttgttttgcaacacctatgaataaaatgagttgatgaatttcgtttcatttttgcctctctatttaaattccacaagttaaattcagcttttgattttgcgatggggatttttcgataacggttttttctttctctctctcacctctcccctagttttggtttttcttctcacctctttcctaggtccggttttctaataacaattttgagaaatcaattttgagaaacacttttgatgagtactttcaatggcaaatcttgaatttcatattcacccctctaaagcaattcttggtgtttcatatgtgcactagtttacaacagaattatgcatatcacacggaaattca

SEQ ID NO: 33112 - DNA, 2385 bp, Oryza sativa
  Clone ID: PAT_MRT4530_37256C.1
atggcgggagaaagagaaagcttcgagagtcagtgggcgccctccgatgtgacggaagataatctgaaggagatggtggcgcacggcgttcttccagcgaaggagatcatcgggtggtgaccggcattcggcgaagcattcccaacccccgatacacatgaaatcgtggtatttgctcatttcttctatggcggtttctcccttccaacctcaagattttttcggggaattctgaatttctatggaatcagcctgcatcatctgaacccaaactccatagtgcatattgcaaattttattcatgcctgcgaagcttttctgggcattaggcctcattttgccttgttccgccgcatcttcttcctcaagccccagccaaacaagagcaaaccgtgcgttgttgggggcgctggttttcaactcaggggaacactaagccaaaaatatttctccatgcccttcaagacctcgaacaaaggttggcacgccaactggttctatgttcaaaaatcctgaaccagtccttcctgagtactcttgtcttcctccagtgtaccaagacacatggaattcattgcctacaggggatgaggctgcccaagcagtagaactgatggagcgcatgataaagctgaaagagcaaggcttgcaaggagaacaaatcactcggcacttcataaaaagtcggttagctccaatcaaagaaagatcccgcatagcttttgaatttgacggcaaacacgatccaaattgtgaagatccggactctcttaactttagggtcatgaagaaaaggatgtacatgatattctcaaatgctatcgtcgccagctattcgcacttgctgccagtcgtgccattcaatgcctttaatcctcctccaccgggaagcggaggaccaagaattcggtctgaaacccaaccaagtgcttctgatccagttggccagtcagattctcgcaagaggaagctggttttaagtgacgacgaaggcgataataccggaaaggagcgaccggaagacctccgaagccaactaatacgaagaagaaaaacaccagtcgtcctgtaccaaaaatcagaaagtcttccaggaaaccatccgacatagatccttctgagaaagactctgacccgactaacatggaagcagactcctcaaaagaaaccgggccgactgcaaaagataccccgagtaataatccgctggccagcgacaatgtaaaacccagcaacgaacacacgaccgcaagccagtcggccgaagctagagtcggagttaaccaggagcccccgactggaaaccagtcggatgcagggccaagccaaaaaattcccgaggttgaagctcaaacaaacagtcctcacggaaaggatgctggcaatgactcagaaaccagatctcctgtgaagacacaagagtccactcgtccccgaccgggaatcatcacagggccaatgattggtgatgaagaagagatcctccggatacaagcagctgaggattcgcgccctcccattctagtcaagtggtgggatgacaacatgcaacctcaaggaatcgtaataaataagcaaaaagaagatgaagaagtatgcttgttgaaaaaggcgctcagccaagccacccgcattataaataggattcatcttaggaacgaagctaaaacggcaaccttagagaggttagtccctcatctcgggaccctcgaagccaccaggaatcagctgcacgagacaaaagagcttgccaggaagaatgaacatgatctgagggatcggattgctgagctccaggaatccaattttgaactgagcccaactaacttattgcaagctgccaagatatctcaactagagaagcaaattcaaactctggaaaatgataaggcagaactagcaaaacagagggactcatctttaaaggaggttgaagaccgcaagatcaagtcccaggcacagtttgatgtcttagtcgacaagatcaataggcttgaaggggccagggacaaagtcgctaatgccgctactccactcatccaagccatgttcttcaataacgccggtccgagtacacttgatgttgccgaaatcttcgacaagctgagagtcgctccggatacttacttcaagaacatcaaagaagttggaagtatgggagcaagtctggcattggcgatgaccaaatccctttatccaagagttgacattgatgccattgatggctttgcagatgggatgagcgaagaagctgctcttgacctcatcaatgatgcgcaaaaagccgctgacaagattgctgctgacgtggttgagagattccaagatgtcgaccttcggccgactgggtctgataattctgatgatgaaaaaactgatactgat

SEQ ID NO: 33113 - DNA, 198 bp, Oryza sativa
  Clone ID: PAT_MRT4530_37257C.1
atggaggcataccgcttgatctgggggactaattgttcaagcctccccattgtatgtcatgaggcgcccgccatcggctctcactggcactttcccagcctgagcctccaatgctatggcatggagcttgggtccatccgggcgcatccccagttggctcccaaccagcctcatacatttgcacgggggaatggttag

SEQ ID NO: 33114 - DNA, 2295 bp, Oryza sativa
  Clone ID: PAT_MRT4530_37258C.1
atggcggaagaaagagaaagcttcgagagtcagtgggcgccctccgatgtgacagaagataatctgaaggagatggtggcgcacggcgttctcccagcgatggagattatcgggtggcaaccggcgttcggcgaagcattccggacccctgacacacacgaaatcgtggtatttgctcatttcttctatggcggattttctcttccaacctcaagattcttccgggggattctgaacttctacgggattagcttgcatcacttgaatccaaactccatagtgcatattgccaattttatccatgcctgcgaagcttttctaggcattaggcttcatttcaccttgttccgccgcatcttcttcctcaagccccagccaaacaaaagcaaaccgtgcgttgttgggggagctggtttccaactcagaggaaccttgagccaaaaatatttctccatgcccttcaaaacctcaaacaaaggctggcatgtaaactggttctatgttcaaaatcctgagcccgcactccctgagtactgctgtcttcctccggaacaaggtttgcagggagaacagatcactccgcacttcatcaaaagtcgattagctccaatcaaagagagatcccgcatagcttttgagtttgatggcaagcatgatccaaatcgggaagatccagattctcttgactttaaggtcatgaaagaaagaatgtacaagatcttctcaaacgctattgttgtcagctattcacatctgctgcccgttgtgccattcaatgcattcaaccctcctccaccgactggtcaggcgagtggaggaccaaaaattcgatctgacgctcgaccaagtgcttctgatccagtcggccagtcaaatgctcgcaagaggaagctggttctaagcgacgaggaaggcgatgacaccggaaggctcgaagacaaaggagcgaccggaaaatccccgaagccaactaatccgaagaagaaaacctccagtcatcctttgccaaaaatcagaaagtcttccagcataactcaaactcgtaggaagccgtctgacatagatccttctgaaaaagaccccgagccggctgacataaaggcaaacccttcaaaagaaaccgggccaactgcagaggattgtccgagtgacaaacaaccgacaaccgacaatgtagaacccagcaacgagcccccgactgggaaccagtcggccgaatctgaagtcggtgctaaccaggagcccccgactggaaaccagtcggatgcagggccaaaccaaaagattcctgaggttgaagctcaaacgaacagtcctctcgggaaggatgctgacagtgaatcagaaaccaaatctcctgtgaagacaccaaagtccactcatccccgaccgggaatcatcacagctgaggattcatgccctccgattctggtcaagtggtgggatgacaacatgcagcctcaagggatcgtgataaataagcaaaaagaggacgaagagttatgcctactgaagaaggcacttggtcaggcaacccgcattgtaaataggattcatcttaggaacgaagccaaaacggtaaccttagaaaggttagtccctcatctcggaaccctcgaagccaccaggaatcaactgcacgaagcgaaagaacttgccaggaagaatgaacattatctgaaagatcggatcgctgagctccaggaatcaaattttgaactgagtggctcatcaaaagtgcaagctgccaagatatctcagttggggaagcagattcaaattctggaaaatgacaaggcagaactggcaagacaaagagacctggctttaaaggaagttgaagaccgcaagatcaaatctcaagctcaattcgacgtcctggttggcaagatcaaaaaacttgaaggagcccgggatgaggttgctaacgctgctgccccaattgttcaagcgatgttcttcaataacaacggcctgagtgcacttgatgcttctaaaattttcgacaagctgagagttgctctggatacatatttcaagagcatcaaagaagctggaagtatgagagcaagtctggcgttggcgatgaccaaatctctttatccgagggttgacgttgatgccattgatggctttgcagacgggacgagcgaaggagctgctcttgacctcatcagcgatgcacaaaaatctgctgataagatagcagctgatgtagttgagagatttcaggacaccgatcttcgaccgactggtcctgataattctgatgatgaaaagactgatactgattaa

SEQ ID NO: 33115 - DNA, 225 bp, Oryza sativa
  Clone ID: PAT_MRT4530_37259C.1
cacgaggagctgacccatctgcaacctgtccccgtcgtgagagagtaatgcaccatggctgagcaagctgaacagcgacgtcctggccaaggccgtggacgatgtgctggccttcgcggccggcgaaaaggtcacgatcaacggcaaggaggtcaagggcaagaagcgtaacttcaacgagaccatcgagctccagatcgcgctcaagaactacgacccgcagaa

SEQ ID NO: 33116 - DNA, 705 bp, Oryza sativa
  Clone ID: PAT_MRT4530_3725C.1
atggtgcccgtggggatcagccacgtcgggagacctccaagctttcatgacaaggcatttccaaagccgacacagcggcttggctcaccgtgcggagggagcacgcggcgcggcgctagggtgtggagcggggcgcggtgcatgcgcgtggttcgcggtggaccgcgcccgcgagcggggccggagggagcggctgaccggggtcggctcgacccggtcttggccgagctggcgccgacgtggcgcctacgtggcagccacgcgggccggcgggaggttgaagaagacgccggccggaacggacggcggacggcggtggcgagcggcggagcgaaacacggtgatctaggcgaaagcgagcacaccgggaagttgcacgggacgaggggagtcgagccaacggctcggatttgccgggggatgctcgacggcggcggattgcggcggtggcaaccggcggcggaagaagggggaaacggtgacgaggtcacgaggggccgattcccggcggcgagagcatctacgcggctacgggaatccgatgctagcgttggattgggcggagcggcgccgagcgaggccggcgacgagcggcgcttccgagctcgggcgacgacggtggcgagcacacggcgagcgacggcaaccgtcggggcggcgccggctagctacggggaggctactcatgctactacccgagtctaa

SEQ ID NO: 33117 - DNA, 2034 bp, Oryza sativa
  Clone ID: PAT_MRT4530_37260C.1
atggcggaagaaagagaaagcttcgagagtcagtgggcgccctccgatgtgacggaagacaatctgaaggagatggtggcgcacggcgttcttccagcaaaagagatcatcgggtggcgaccggcatttggtgaggcattcccgacccccgatacacacgaaatcgtggtatttgctcatttcttctatggcggattttctcttccaacctcaagatttttccggggaattctgaacttctacgggattagcttgcatcatctgaatccaaactctatagtgcatattgccaattttattcatgcctgcgaagcttttctgggcattaggcctcatttcgccttgttccgccgcatcttcttcctcaagccccagctaaataagagcaaaccatgcgtcgttgggggtgctggtttccaactcaggggaacactaagccaaaaatacttctccatgcccttcaagacctcaaataaaggctggcacgcaaattggttttatgttcaaaaccccgagcctgttcttcccgagtactcctgccttcctccagtttatcgggatacttggaactcactgccaatgggagatgaagctgcacaagcagtagaactgatggagagaatgataaagctgaaagaacagggccttcaaggagaacagatcacccggcactttatcaagtgtcagttagctccaatcaaagaaagatctcgcacagccttcgaatttgacggcaagcatgacccaaaccgtgaagatccagattctcttgacttcaaggtcatgaaggaaaggatgtataagatcttctcaaacgccatcgttgtcagctactcacacttgctgccagtcgtaccgttcaatgcattcaatcctcctccaccggaatttgctttgatgaagtcggatcccccaatcgctcaacgccgatctccccgccaccaaactgggcaagggagcggaggaccacgaattcgccagccagattctcgaaagaggaagctggttttaagtgacgacgaagccgatgataccgccaggaggcctggagaccgagagacaaccaagaaactatcaaaacaggctacaccaaggaagaaaacatccagtcgccctgtgccaaagatcaggaagtcttctaggaaaccatctgatatagatccgtctggaaaagactctgacccgactaacatggacacaagttcttccaaagaaaccgggccaactgctgaggatcatccgagtgacaatcagccggcaaccgataatgtagaatccggtgatcaacccccgactggaaaccagtcggccgaagccgaagccggagttaatcaggagcccccgactggaaaccagtcggacgcagggccaagccaagaggttccagaagtcgaaacccaagcagacaaccctcacggacaagacgccagcaatgaccagagatctggatcccctttaaaggcatccgaatccactcgtcctcgtccagaaatcattacgggaccaatgatcggtgatgaagaagaaattccccgtatacaagcagccgaagattcgtgccctcccattctggtcaagtggtgggatgacaacttgcaacctcaaggaattgtaataaaccggcaaaaagaagatgaagaggtatgcctactgaaaaaggcactcaaccaagcgactcgcattgtaaatgccatgttcttcaataacgccggttcgagtacacttgatgctgccgaaatcttcgacaagctgagagtcgcaccagatacttacttcaagaacatcaaagaagctggaagtatgggagcaagtctggcattggcgatgaccaaatccctttatccaagagttgacattgatgccattgatggctttgcagacgggacgagcgaagaagctgctcttgacctcatcaatgatgagcagaaagccgctgacaagattgctgctgatgtagttgagagattccaagatttcgaccttcggccaactgggtctgataagtctgatgatgaaaaaactgatactgattga

SEQ ID NO: 33118 - DNA, 795 bp, Oryza sativa
  Clone ID: PAT_MRT4530_37261C.1
atggctgggagcggcaactacatcgtcgggagctctggcgcgggctcgggatgcggtggttgtggtggctacaggggagggcaccgctgcctgctgcctcctccccttggggagggcaccaccgatgcccgccgcttcccctcgggtgcaaccgcctaccaccgcctcctctccctccagatctggcatttcgtcgaacacctggttgacgtcgccctgccacggccgtcaccgctcagcccgtgcatcgtcgccgccgccgccggtcagcccgcgggccactgccaccaccgccgaacacgcatcaccctgccgtggctgcggctgccaccgctcgcccgttgccgcccgtgcgccgccggagggacgccagcaggccactgcctcccgtgccccaccgtggtaggcggcgcatggcccgcgtgcctcccgtgcgccgcctgccgccaccggcgggccactgccgcccgtgtgccaacaccaccagtgcacctgccgatgccgccgccgctcgtggctctcgcacgccgcgccgtgccaccaccgctcgctgccgcccgtcgctgctgtagggaggaatatggggaggggagagaatgggaggagatgggctctgttaactccactcccaaaaacagaggatctgaactgtatggcacagctttggctccaggcgacgagcatcctcccccatcaaaggccatcgccggagccaagaacgccatcccccagtgcttcctgcctaccccatcaccccacccctggcatggagctcctaccgacggcggccattga

SEQ ID NO: 33119 - DNA, 141 bp, Oryza sativa
  Clone ID: PAT_MRT4530_37262C.1
atgaactggcacggagtggtggggctgggtgcctgggtggagtgccaccgcccgccgcgtggcgagctacgtgtgggctgcctgcgcgaggaacagaaggccgagcacgtagacgggcggattggatccaggaacaagtaa

SEQ ID NO: 33120 - DNA, 2529 bp, Oryza sativa
  Clone ID: PAT_MRT4530_37263C.1
atggcggaagaaagagaaagcttcgagagtcagtgggcgccctccgatgtgacggaagacaatctgaaggagatggtggcgcacgacgttcttccagcaaaagagatcatcgggtggcgaccggcatttggtgaggcattcccgacccccgatacacacgaaatcgtggtatttgctcatttcttctatggcggattttctcttccaacctcaagatttttccggggtattctgaacttctacgggattagcttgcatcatctgaatccaaattccatagtgcatattgccaattttatccatgcctgcgaagcttttctgggcattaggcctcatttcgccttattccgccgcattttcttcctcaagccccagccaaataagagcaaaccatgcgtcgttgggggtgctggtttccaactcaggggaacactaagccaaaaatacttctccatgcccttcaagacctcaaataaaggctggcacgcaaactggttttatgttcaaaaccccgagcctgttcttcccgagtactcctgtcttcctccagtttatcgggatacttggaactcactgctaatgggagacgaagctgcacaagcagtagaactgatggagaggatgataaagctaaaagaacagggccttcaaggagaacagatcacccggcactttatcaaatgtcggttagctccaatcaaagaaagatctcgcacagccttcgaatttgacggcaagcatgacccaaaccgtgaagatccagattctcttgacttcaaggtcatgaaggaaaggatgtataagctcttctcaaacgccatcgttgtcagctactcacacttgctgccagtcgtaccgttcaatgcattcaatcctcctccaccagtacctaacaatgaaggatattacatccaggaatttgctttgatgcagtcggatcccccaatcgctcaacgccgatctccccaccaccaaactgggcaagggagcggaggaccaagaattcggtctgaaactcaacctagtgcttctgatccagtcggccagtcagattatcgaaagaggaagttggttctaagtgacgacgaagccgatgataccaccaggaggcctgaagaccgagagacgaccaagaaactaccaaaacaagctactccaaggaagaaaacatccagtcgccatgtgccaaagatcaggaagtcttctaggaaaccatctgatatagacccgtctggaaaagactctgacccgactaacatgggcacgaattcttccaaagaaaccgggccaactgttggggatcacccgagtgacaatcatccggcaactgataatgtagaattcggtgatcaacccccaactggaaaccagtcggccgaagccgaagccggagttaatcaggagcccccgactggaaaccagtcggacgcagggccaagccaagagattctagaagtcgaaacccaagcagacagccctcgcagacaaaacgcggacaataaccagagatctggatctcctttaaaggcatccgaatccgctcgtcctcgtccagaaatcatcacggtgaatacattaggaccaatgattggtgatgaagaagaaatcccccgtatacaagcagctgaggattcatgccctccgattctggtcaagtggtgggatgacaacatgcagcctcaagggatcgtgataaataagcaaaaagaggacgaagagttatgcctactgaagaaggcacttggtcaggcaacccgcattgtaaataggattcatcttaggaacgaagccaaaacagtaaccttagagaggttagtccctcatctcggaaccctcgaagccaccaggaatcaactgcacgaagtgaaagaacttgctaggaagaatgaacatgatctgagggatcggatcgctgagctccaggaatcaaattttgaactgagtggctcatcaaaagtgcaagctgccaagatatctcagttggagaaccagattcaaattctggaaagtgacaaggcagaactggcaagacaaagagacctggctttaaaggaagttgaagatcaatctcaagctcaattcgacgtcctggttggcaagatcaaaaaactcgaaggaacccgggatgaggttgctaacgctgctgccccaattgttcaagcgatgttcttcaataacaacggcccgagtgtacttgatgcttctgaaattttcgacaagctgagagttgctccggatacatatttcaagaacatcaaagaagctggaagtatgggagcaagtctggcgttggcgatgaccaaatctctttattcgagggttgacgttgatgccattgatggctttgcagacgggacgagcgaagaagctgctcttgacctcatcagcaatgcacaaaaagccgctgacaagattgctgctgatgtagttgagagatttcaggacaccgatcttcgaccgactggtcctgataattctgatgatgaaaagactgatactgattactgtaccaatgattttgatgattaa

SEQ ID NO: 33121 - DNA, 2214 bp, Oryza sativa
  Clone ID: PAT_MRT4530_37264C.1
atggcggaagaaagagaaagcttcgagagtcagtgggcgccctccgatgtgacggaaggtaatctgaaggagatggtggcgcacggcgttcttccggcgaaggagattatcgggtggcgaccggcattcggcgaagcattcccgacccccgatacgcatgaagtcgtgccaaacaagagcaaaccatgcgttgttgggggcactggtttccaactcaggggaacactaagccaaaaatacttctccatgcccttcaagacctcaaacaaaggctggcacgccaactggttctacgttcaaaatcctgaacctgcccttcccgagtactcttgtctccctccggtctaccaagacacatggaattcattgcctataggagatgaggctgctcaagcagtggaactgatggagcgcatgataaagctgaaggagcagggtttgcagggagaacaaatcactcggcacttcattaaaagccggttagctccaatcaaagagagatcccgcacagcttttgagtttgacggcaaacatgatccaaatcgtgcagatccagactctcttgactttaaggtcatgaagaaaaggatgtacaagatcttctcaaatgctatcgtcgtcagttattcgcacttgctgccagtcgtgccattcaatgccttcaatcctcctccaccggaatttgctttgatgaagttggatcccccaatcactcaacgccgatcaccccaccaccaaaccggtcaagggagcgggggtcccaaaatccgttccgaagcccggccaaatacctctaatccagccggccagccagattcacgcaaaaggaagttggtgtcgagtgacgatgaaggcgataccgctagaaagcctggagaccgagaaacaaccaagaaactgccgaagcaggctactacaaggaaaaaagcatccagtcgtccagtgccaaagatcaggaagtcttccaggaaaccgtctgatatagacccttctggaaaagactctaacccaaccagcacgggaacaaacttaaaagaaaccgagccaaccgctgaggatcatccgagtgataaccagccagcaaccgataatgtaggatctggtgatcaacccccaaccggaaacgagtcggccgaaactggagccggggttaatcaggagcccccgactaaaaaccaggcactgggccaagtcaagagattccagaagttggagctcaggcagacagccctcgtaaagaagacaccagcagtgacccaacgccaggatctcccgttaagacgcaagaatcgactcatccccgtccggaaatcatcacgggcggctgaagactcacgccctcccatcctagttaagtggtgggacgatgatatgcaacctcaaggaatcgtgataagcaagcagaaagaagatgaagaagtatgcttgttgaaaaaggcactcagccaggccactcgtattgtaaatagaattcatcttagaaatgaggcgaaaaccacaactttggagaaattagttccccatcttggaacccttgaagctactaaaaaccagctacatgaggtcaaagagctcgcgagaaaaactgagcatgatctaaggaatagaatctccgagcttcaagaatccaactatgaattgaatggttcgtccaaagtacaagctgccaggatttccgacctagagaagcaggtcgaggccctggagaaggacaaggccgaattagcaaagcagagggactcgaccttaaaagatgttgaagatcgcaaaatcaagtcccaggcacagtttgatgtcttagttgacaagatcaataggcttgaaggggccagggataaagtcgctaatgccgctaccccactcatccaagccatgttcttcaataacaccggtccaagtgcacttgacacttccgagatctttgacaagctaagagtcgctccagatacttacttcaagaatatcagggaggctgggagtatgggagcaagcctggtgttggcgatgaccaagtccttgtacccgaagattgatattgacgccattgacggctttgcagacgggacaagtgaagaaacagccctcgacctcatcaatgatgcgcaaaaagccgctgacaagattgctgctgacgtagttgagagattccaagatgtcgaccttcggccgactgggtctgataattccgatgatgaaagaactgacactgattag

SEQ ID NO: 33122 - DNA, 542 bp, Oryza sativa
  Clone ID: PAT_MRT4530_37265C.1
gtgttatgcatatagagattttttttctgtggccaatcaatggactagtcatgaaaaagaaaaaaataatcagtgggtggaaataccttgtaattttttcctgaaccaaaggggtccaatacctgcttgtattgaaagccagagtttttcaggagataatatgaaagagaatagagttgggagcatctctggcactaaaagcaacatatagtacatattaggagacaccaccagattcaaagagaaattaccaaaagacaacagcagccagcatttagttcatgcaggttagttaggcatacagagcaggtcatagagcgctgaaaaattcaaatgatcttgaacctcaagtataccacaaaagctatatatttttattcaaggtcactaccctccacatcagtaggaagctcactaagaaataattttcatgcaaagatcttaatcttgagaggtattttgcctttccatattttgtttaccgatcgctccaccacaagatataagattgtagagggacttttgcatgtacatgttatttt

SEQ ID NO: 33123 - DNA, 2178 bp, Oryza sativa
  Clone ID: PAT_MRT4530_37266C.1
atggcggaagaaagagaaagcttcgagagtcagtgggcgccctccgatgtaacagaagataatctgaaggaaatggtggcgcacagcgttcttccggcgaaggaaatcatcgggtggcgaccggcgttcggcgaagcattcccgacccccgacacgcacgaaatcgtggtatttgctcatttcttctacgacggattttctcttccaacctcaagattcttccgggggattctgaacttctacgggattagcttgcatcatctgaatccaaactccatagtgcatatcgccaattttgttcatgcctgcgaagcttttctgggcattaggcctcatttcgccttattccgccgaatcttcttcctcaagccccaaccgaataagagcaaaccatgtgtggttgggggcgctggtttccaactcagaggaacactgagccaaaagtatttctctatgcccttcaagacctcacacaaaggctggcacgcaaactggttttacgtccaaaatcctgaacccgcacttcccgagtattcctgtcttcctccggtttaccaggacacatggaactcattgcctatgggagatgaagctgctcaggcagtggaattgatggaacgcatgctaaaactgaaggaacaaggtttgcagggagaacagatcactcgacacttcatcaaaagtcgattagctccaatcaaagagagatcccgcacggcttttgagtttgacggcaagcatgatccaaatcaggaagatccagattctcttgactttaaggaatttgccttgatgaaatcggatcctccaattgctcaacgccgatcaccttgccagcagactggtcaggcgagtggaggaccaaaaattcggtctgacgctcaaccaagtgcttccgatccagtcggccagtcagattcttgcaagaggaagctagttctaagcgacgacgaaggcgatgataccggaaggctcggagacaaaggagcgaccggaaaacccccgaagccaactaatccgaagaagaaaacctccagtcgtcctttgccaaaaatcagaaaatcttccaggaagccgtctgacatagatccttctgaaaaagaccctgagccggctgacatagaggcaaacccttcaaaagaaaccgggccaactgcagaggattgcccgagtgacaaacaaccggcaaccgacaatgtagaacccagcaacgagcccccgactgcgaaccagtcggccgaagctgaagttggcgctaaccaggagcccccgactggaaaccagtcggatgtagggtcaagccaaaagattcccgaggttgaagctcaaacgaacaggcctctcgggaaggatgctgacagtgaatcagaaaccagatctcctgtgaagacaccaaagtccactcgtccccgaccgggaatcatcacagggccaataattggtgatgaagaagaaatcctccggatacaagcagctgaggattcacgccctcctattctggtcaagtggtgggatgacaacatgcagcctcaagggatcgtgataaataagcaaaaagaggacgaagagttatgcctactgaaggaggcacttggtcaggcaacctgcattgtaaataggattcatcttaggaacgaagccaaaacggtaaccttagagaggttagtccctcatctcggaaccctcgaagccaccaggaatcaactgcacgaagcaaaagaacttgctaggaagaatgaacatgatctgagggatcggattgctgagctccaggaatcaaattttgaactgagtggctcgtcaaaagaccgcaatatcaagtctcaagctcaattcgacgtcctggttggcaagatcaaaaaacttgaaggagcccgagatgaggttgctaacgctgctgccccaattgttcaagcgatgttcttcaataacaacggcccgagtgcacttgatgcttctgaaatcttcgacaagctgagagttgctccagatacatatttcaagagcatcaaagaggttagaaacgggacgagcgaagaagctgctcttgacctcatcagcgatgcacaaaaatctgctgataagatagcagttgatgtagttgagagatttcaggacaccgatcttcgaccgactggtcctgataattctgataatgaaaagactgatattgattaa

SEQ ID NO: 33124 - DNA, 606 bp, Oryza sativa
  Clone ID: PAT_MRT4530_37267C.1
atgaggagcaaggcgtccatgttcttgaagcagatggtgtcgacgatcgtggcggtggtgaaggcgaagtcgacggcggtgagggccaagacgagcgccatgaagacgcggctgctcatcttcggcgtcctccgcaaccggaagctcctcgccaccgccatcaaccacaagatccacgccatcatgggcggcgccgccgcccaggacaccaccaacgacggtggcgtcgccggagtggaggacgacgacggcggcggcagcaagaaggccgtggtgctgtacaacaccgcgccgagcttcctcacggagcgcggctactacgatcacgccggcgaggaggaagaggaggaggaggacagcgacgagtacctgacgcactcgttgttccaggaggaagacgacgaggacgacgagctggtgaacgcgccggggtcggtgatcgacctggtgcgcgacgccaaggaaggggaaggcggcgagttccggctggaggacgagatcgaccacgtcgccgacgtgttcatccgccgcatccacaagcagctcaagctccagaagctcgactccttcaagaggttctgcgagatgctcgagaggagcgcctaa

SEQ ID NO: 33125 - DNA, 2193 bp, Oryza sativa
  Clone ID: PAT_MRT4530_37268C.1
atggcagaggaaagagaaagcttcgaaagtcagtgggcgccctccgatgtaacggaagacaatctgaaggagatggtggcgcacgtcgttcttccagcaaaagagatcatcgggtggcgaccggcatttggtgaggcattcccgaccccagatacacatgagatcgtggtattcgctcatttcttctatggcagattttctcttccaacctcaagatttttccggggaattctaaacttctacgggattagcttgcatcatctgaattcaaactccatagtgcatattgccaattttattcatgcctgcgaagcttttctgggcattaggcctcatttcgccttgttccaccgcatcttcttcctcaagccccagccaaataagagcaaaccatgcgtcgttgggggtgctgtttatcaggatacttggaactcgctgccaatgggagatgaagccgcacaagcagtagaactgatggagaggatgataaagctgaaagaacagggccttcaaggagaacagatcaccaggcactttatcaagtgtcggttagctccaatcaaagaaagatctcgtacagccttcgaattcgacggcaagcatgacccaaaccgtgaagacccagattctcttgacttcaaggtcatgaaggaaaggatgtataagatcttttcaaacgccatcgttgtcagctactcacacttgctgccagtcgtaccgttcaatgcattcaatcctcctccaccggaatttgctttgatgaagtcggatcccccaattgctcaacgccaatctccccgccgccaaactgggcaagggagcggaggaccaagaattcgatccgaaactcaaccaagtgcttctgatccagtcggccagtcagattctcgaaagaggaagctggttctaagtgacgacgaagccgatgataccaccaggaagcctggagaccgagagacaaccaagaaactaccaaaacaggctactccaaggaagaaaacattcagtcgccctgcaccaaagatcaggaagtcttctaggaaaccatctgatatagatccgtccgggaaagactctaacccgactaacgtagacacaagttcttccaaagaaaccggaccaactgctgaggatcatccgagtgacaatcagccggcaacggacaatgtagaacccagcaacgagcccccgattgggaaccagtcggccgaagctgaagtcggtgctaaccaggagcccccgaccggaaaccagtcggatgcaggggcaaacgaagagattccagaagtcgaaacccaagcagacaaccctcagggacaagacgccagcaatgaccggagatctggatctcctttaaaagcatctgagtccactcatcctcgtccagaaatcattacagtgaatacattaggaccaataattggtgatgaagaagaaatcccccgtatacaagcagctgaggattcatgccctccgattctggtcaagtggtgggatgacaacatgcagcctcaagggatcgtgataagtaagaaaaaagaggacgaagagttatgcctactgaagaaggcactcggtcaggcaacacgcattgtaaataggattcatcttaggaacgaagccaaaacggcaaccttagagaggttagtccctcatctcggaaccctcgaagccaccaggaatcaactgcacgaagtgaaagaacttgccaggaagaatgaacatgatctacgggatcggatcgctgagctccaggaatcaaattttgaactgagtggctcatcaaaagtgcaagctgccaagatatctcagttggagaagcaaattcaaatcctggaaaatgacaaggcagaactggcaagacaaagaaacctggctttaaaagaagttgaagaccgcaagatcaaatctcaagctcaattcgacgtcctggttggcaagataaaaaaacttgaaggatcccgggatgagctaagagttgctccggatacatatttcaagaacatcaaagaagctagaagtatgggagcaagtctggcgttggcgatgaccaaatctctttatccgagggttgacgttgatgccattgatggctttgcagacgggacgagcgaagaagttgctcttgacctcatcagtgatgcgcagaaagccgctgacaagattgctgctgatgtagttgagagattttag

SEQ ID NO: 33126 - DNA, 279 bp, Oryza sativa
  Clone ID: PAT_MRT4530_37269C.1
tcaattagaagagaggcagtattaatctagtcaggacctgccaggctgccatccttgtctaagccgccgtttgtaaactgtgggtgcatattaaatgctaactgttttgtactatgccttttcttcccaaggcatagtaactttaagttggcaatgatggttaatcttaatagtattgactttgcacacataggacataagctgtttcatttccttgctgacaaaagttccccatttatcctgatagataatacttgtagcgtagggataagaatgtca

SEQ ID NO: 33127 - DNA, 271 bp, Oryza sativa
  Clone ID: PAT_MRT4530_3726C.1
ccgggctgtatatgccggtcagaccggcgttgtcgaatttgaaaggagtccaaatttggtacgattggctatcgggtttcggcagtctaaccggcgacacaccggcggtcagaccggcgggtgacctgcggtcagaccggcggcgacaataggcgcgacagggattccaaggcggtccaaccataagatcaacaccggtcaaaccagcggctacgcttcggtcagaccggcagatcaatctcggtcagaccgacttccgtcgatttcgagg

SEQ ID NO: 33128 - DNA, 2469 bp, Oryza sativa
  Clone ID: PAT_MRT4530_37270C.1
atggcggaagaaagagaaagcttcgagagtcagtgggcgccctccgatgtgacggaagataatctgaaggagatggtggtgcacggcgttcttccagcaaaagaaatcatcgggtggcgaccggcatttggtgaggcattcccaacccccgatacacatgaaatcgtggtatttgctcatttcttctatggcggattttctcttccaacctcaagattcttccgggggattctgaacttctacgggattagcttgcatcactagaacccaaactccatagtgcatattgccaattttatccatgcatgcgaagcttttctgggcattaggcctcatttcgctttgttccgccgcatcttcttccccaagccccagccaaacaaaagcaaaccgtgcgttgttgggggagctggtttccaactcagaggaaccttgagccaaaaatatttctccatgcccttcaaaacctcaaacaaaggctggcatgcaaactggttctatgttcagaatcctgagcccgcactccccgagtactgttgtcttccttcggtttaccaggacacatggaactcactgccaataggagatgaagctgcacaagcagtagaactgatggagaggatgataaagctgaaagaacagggccttcaaggggaacagatcacccggcactttatcaagtgtcggttagctccaatcaaagaaagatctcgcacagccttcgaatttgacggcaagcatgacccaaatcgtgaagatccagattctcttgacttcaaggtcatgaaagaaaggatgtataagatcttctcgaacgccatcgttgtcagctactcacatctgctgcccgttgtgccattcaatgcattcaaccctcctccactggaatttgctttaatgaagtcggatcccccaatcgctcaacgccgatctccccgccaccaaactggacaagggagcggaggaccaagaattcggtctgaaactcaaccaagtgcttctgatccagtgtcacaccccgattctcgaaagaggaagctggttctaagtgacgacgaagccgatgataccatcaggaggcctggagaccgagagacaaccaaaaaactaccaaaacaggctactccatggaagaaaacatccagtcgtcctgtgccaaagatcaggaagtcttccaggaaaccatctgatatagatccgtctgggaaagactctgacccgactaacatggacacaagctcttccaaagaaaccgggccatctgttgaggatcatccgagtgacaatcagccggcaaccgacaatgtagaacccagcaacgagcccccgactgggaaccagtcggccgaagctgaagtcggtgctaaccaggagcccccgactggaaaccagtcggatgcagggccaagccaaaaggttcccgaggttgaagctcaaacgaacagtcctctcgggaaggatgccgacagtgaatcagaaaccagatctcctgtgaagacaccaaagtccactcgtccccgaccgggaatcatcacagggccaataattggttatgaagaagaaatcctccggatacaagcggctgaggattcacgccctccgattctggtcaagtggtgggatgacaacatgcagcctcaagggatcgtgataaataagcaaaaagaggacgaagagttatgcctactgaagaaggcacttggtcaagcaacccgtattgtaaataggattcatcttaggaacgaagccaaaacggtaaccttagagaggttagtccctcatctcggaaccctcgaagctaccaggaatcaactgcacgaagcgaaagaacttgccaggaagaatgaacatgatctgagggatcggatcgctgagctccaggaatcaaattttgaactgagtggctcatcaaaagtgcaagctgccaagatatctcagttggagaagcaggttcaaattctggaaaatgacaaggcagaactagcgagacaaagagacctggctttaaaggaagttgaagaccgcaagatcaaatctcaagctcaattcgacgtcctggttggcaagatcaaaaaacttgaaggaacccgggatgaggttgctaacgctgctaccccaattgtttaagcaatgtttttcaataacgccggttcgagtacacttgatgctgccgaaatcttcgacaagctgagagtcgctccagatacttacttcaagaacatcaaagaagctgggagtatgggagcaagtctggcgttggcgatgaccaaatccctttatccaagagttgatattgatgccattgatggctttgcagacgggacgagcgaagaagctgctcttgacctcatcagtgatgcgcagaaagcggctgacaaaattgctgctgatgtagttgagagattccaagatgtcgaccttcggccgactaggtctgataagtctgatgatgaaaaaactgatactgat

SEQ ID NO: 33129 - DNA, 174 bp, Oryza sativa
  Clone ID: PAT_MRT4530_37271C.1
ttttgctttagtcgcagccgcagccgcgcgacgtctgctccgcctgagagctcctcttcctgccggcgagagatcaggagcacgcaaggctcgcggccatggacgctgagacccacacgctcgcactcaccccgataccaatcatctgttattcttcattatcaacccctctta

SEQ ID NO: 33130 - DNA, 570 bp, Oryza sativa
  Clone ID: PAT_MRT4530_37272C.1
ggtttcgccggtggtggggggaggggaaaggatgagcggaggggcgcgagcagcggccagcgggacggcgacgacggcggtagggcgatgatagcggcggtgcctgatctggaggaatcggtggcagtggcgatttgtggcggcgtatgtggcagatcggctggtggcgagatggttggggcaacctggagcgtcgatcctgcggggaggatcctaggaaaatactcgacgttggatcgcgcggtgcgcggctccctccccgacgcaggcgcggccgcgcgcagtggacggtggatgcggccacggcggcgcatgcggtggcgtgcggtaaaagcggccgcggtgggggccgggcggccgcgcggcggctgggctgcggcccggtggagggcggcggccaggcggtggttgggctgcggttgtggcggagcaggcgacggcgtgcggaagaagcggccgcggcggcggctgggctgcggcctggcggagggcggcgggcaggcgacggcggcagtggaggatttgtttttttttcggatttgtgatgaatttgcttttgagaatttgtga

SEQ ID NO: 33131 - DNA, 107 bp, Oryza sativa
  Clone ID: PAT_MRT4530_37273C.1
acaaccgcgcacccattttgcacctccttccagcggagtggagggtgatcccctatgtcagacgagtgaggacgctgggccacactcaaagacaagctatattttag

SEQ ID NO: 33132 - DNA, 2853 bp, Oryza sativa
  Clone ID: PAT_MRT4530_37274C.1
atggaggagatgaatgaattcagggtggatgtagcgagtttgaagagggatgtagctgatttaaagacgctcaagactgaaatgagggagatcaaaggattgctgagggagttgtgcaagcagaagaatgttgaagaaggtgaaggaggaactgaggaagcagctgctacgctgccaattcagaatgcaactggtcaagcaactcgtggtgctagaccaagtaatcctcccacaggggagccatcagctcctgaggtacgttttgctttggaaactaacactaatgcacccaataatgaactggttaatctatgggctacttctgggggaaataccatgggtcatggacagggtggacttcatacgcagcagccacctcatggaattcaccaaaggcagaatatgaactttgggggaagtggtccaacagttgctaaccagcatggggttggaactcaagggggatttcaaggacgtccaggggtgcattttattgatcgacaggggagtatatatggtagaatgggggctgaaggtaatcattatgcagaggctgtgattaagggaccaaggctagaaattccattgtttggaggagaagatcctattgattggctcaaacagtgtgaaaagttttatgagataactggaaccccgatggatcaatgggtgaatttagcattggcacacttgcaggggagagctcttaagttgtacaggggtataggaattccctggcagatgatttcttggccccaatggtgcgctatggtgcaccaggggctgctagaatcttattggtatgctaaaaactatgaaaaggctgctaatgctaggaaggttgctctgaattggaacaaaaacaaacctctgatccatactgggggaaatcaaagcagagctaatatgaccaaagcaccacctagaggaaatggggagaagaagtgttggttttgtaaagaagcttggttctctgggcatcaatgcaaggggactaccagacgtgatacattttcagtgataatcctcatcaatgggaaaagagctgttgggctggttgatagtgggagcactagtaccttcatggatcaggagtatgctatacgcaaccaatgtcccttagttaacactgagtctaaaaaggggtatgatgtgattttgggtgctgattggatatataattacagtccaattacattggatctaaagaagagagaattgggaataacaaagggagagaagacaattatgattcaagactttactaagcttgggaagcacatgctggtggatagcaaaagagtggataagatattgaaaaagggaggattgggatatctattccaaatatcccaggtcactgaagaaaggggcgaagaaggggatcctgtacctgctgacattcaagaaatactgctagattttccttcggtgcttgaagagccaaaagggtcacctccaagaagaaattgtgaccacaggatcactttgaaaacaggggcagaaccaccaaacctcaggccataccgagtaccacaccaccaaaaagaagcaatggagaaaatcatcactgaattgattgattctaaagaaatacaagttagtgacagtccttattcatcaccagctgtgatggcaattaattgcccaaactgtgaagaacaaattcctatgcccatcattgaggatttgttagatgagcttaatggagctaaaatctttactaagttggatctcagattaggttaccatcagattaggatgtctgatcaagatgttcccaaaactgccttcagaactcatatgggccactatgagtatcaggtgatgccatttggtctaaccaatgccccagcaacctttcaatcactgatgaatcaggttctagctcctttcttgaggaagtttgtgttggttttctttgatgacatattgatttatagcaaaacaaggaatgaacacagagaacacatcaaaatggtgctagaagccttgaaggagaataacctggtgatcaggttaaagaaatgtgcttttggactttccaatgtagcttatttggggcatattatctcccaagcaggtgtggctactgacccaagaaaagttgacaagatactcacctggccggttcctaaaaatgttactgagcttagaaaattcctggggatgatgggtattataaaagattcaatatgtaggccattgcatgatatgctaaagaaagaagggtttcagtggggaaatttacagacagaagcttttgataagttaaaacagaaaatgtgcatcagcccagttttatctttgccagatttttctatggagttcactattgaagctgatgcgtgtggcaataggattggggcagtgttgatgcaagctggtaaaccaatagcatttttcagcaaggctttaggtcctaaagcagcagctcaatcgatttatgagaaggaggcaatggctattttggaggctcttaagaagtggaggcactatgtgttgggcatcaaacttattatcaaaactgatcaacaaagcttaaaatacatgatgaaacagaggttagtagagggtatacaacacaagttacttctgaaactgatggagtatgattacaagattgaatataaggctgggaaggaaaatgttgtagcagatgcactatcaaggttgccccaaacagaacatgacaatgaggattgtcaggccatcactgtggttattcctgagtggatacaggacatccagaatagttatgaaggagatatacaagcacataagatgctgagtatgattggaactgacagcgaccctgataggagttacagtctagaatctggaatactatga

SEQ ID NO: 33133 - DNA, 2181 bp, Oryza sativa
  Clone ID: PAT_MRT4530_37275C.1
atgacctccaatatcacacttgttttcttgttgatgatgtgcttggcagcggcagtagcagcagcagcaacccctggagtcgccggaggtaatgggctcttgcatacaatcccttccaaaaactctctggctcactgcccttctacctgcggcgacattggcttctcctacccatttgggatcggccatggctgcttccggcaaggtttcgagctcatctgcgacaacaccactcatcctcccacactgctcctggcaaacactacaactaaggtcatcggccaatcaggccggacactagaggtgatagaaatcccagccattgccttcaacatcgcgatgaacaacagcagcatcatcgactacatccgatactgggtttctcctgccaatggtttcaccatcgtgaacgagagcaccctgttcgttatcggatgtgggatcgaggcgtgcctgttcgatcttgacacgaacgagaccatgggttcttgcatcaccatgtgttctgacaatttggggatcatggagatgcacgatggggattgtaccggcatcggttgctgccatatcatcgtgagaagggagctgcgtcggttttggttaaagcttgatcatccggatgatagaacaacaccgcgatcatatcgggtgttgtctcgtgctcaggttttcatcctgccaacaattaacagctatcaattcaatacgaatgatcttgtttcgtccagctggatgaacacgagctccattggtggtactcttctccgtggtgccatcatggaccaggagacttgtccaggtgcatcagcgagcaaagcaacctatgcttgcaccactaacaccaattgcttcaatgctacaaatggaggatattactgttcctgccgcaatgatgtcaccgatggcaatccttacgttaaccttggctgcagtgacgaccctggtataacaattggaattgggtgtggccttggctcaatcattcttgcactcggtgcaatagtactaatcaacaagtggaagagaggtgtacaaaagagaattcgaagggcacacttcaagaaaaaccaaggcctactcttggaacaattgatattagatgaaaaagcacaagataaaacaaagatattctccttggaggaactagagaaggcaacgaactactttgatgctactcgtgtacttggctctggagggcatggcacagtttacaaagggattttgtccaatcaatgcatagtagccattaaaatgtccaaaatagcggagcaaacagagatagatcaatttatcaatgaagttgctatattatcgcaaatcattcatcgcaatgtggtaaagctttttgggtgttgtcttgaagcagaggtgcctttattggtgtatgagttcatatccaatgggacactatatgatattcttcacagtgatgtaagtgttaaatgcttgctatcatgggatgaccgtattaggattgcagtagaagccgcaggagctcttgcttacctacactcagctgcagcaattccaatttaccatagagatgtcaaatcttctaatatattgttggacgacaactttactacaaaggtttctgactttggagcttcaagaaccatgtcacttgatcaaactcatgttatgacaaatgtacaaggcacatttggttacttagatccagagtactactacactggccaactaacagcgaagagtgatgtctatagttttggagttatacttgtcgagcttctagtaagaaagaagtcgatttttataaatgaccaaggtacaaaacaaagcttggctcattactttgtggaagggcatcaacaaggagtagtcatggagatcttggattcgcaagttatggaagaggcaaaccgggaagaaattgatgaaattgtctcaattgcagaatcatgcttgaaaacaaaaggagaagagagacctaccatgaaagaagtagaaatgaggttgcagtttgttagaactataagacaaagaaagtgccaacaatttccagtaacagaaggagaaattgagcatttcccattcccaaatactagtaactcttcagatggcaggttcagccattctactggtttaacttgcgactctgtctctggaagttacagcttggagcaacaattttcttcatcaatcaatttgccacgataa

SEQ ID NO: 33134 - DNA, 240 bp, Oryza sativa
  Clone ID: PAT_MRT4530_37276C.1
atgcaccgcgggtggcgcagctcgaccggggcgggcaaggaggtcgtgctcctcatccaggccacacccgcgcgtgggggagacgggaaggggccgacagcgacggagtgcgcactggctgcggcggacctcaccacaggtgagtggcggcgcgtggaggtctcgtgggagggggagggggaggaggaggaggcgcggggcgggggcatgccgttcttcgctcggtgcgcggctgcctag

SEQ ID NO: 33135 - DNA, 457 bp, Oryza sativa
  unsure (1)..(457): unsure at all n locations
  Clone ID: PAT_MRT4530_37277C.1
cagcttccgggatcaatcttcccacagaggcggcanaccggccaaatacggtcgtcttcttgattcttggtgcaacgaatcagctcacccgaggaaagatccgtgcgggttcttgcaatccaaggggtcaaggattagagagtaataaatcagtggttacaatatccttggaggagtaatccatcataagctcttttttttttccaagaaaggttaggaagatagaaggaagaaaaccttcgaagcagcagagatttggggatttttagatcgatttttgtgaatattatttgttggcaagtagatttgtggataaagaacatgtttggtacccaagtgaggggtgtggtggaagatgatttcaaccctaggaggaggaggacattntgggaacacgccagctgcatccatgcccactaccacccanaccatcaggacagcanacccaggaagggcc

SEQ ID NO: 33136 - DNA, 528 bp, Oryza sativa
  Clone ID: PAT_MRT4530_37278C.1
tcgttgacgcgtgggcggacgcgtgggcggacgcgtgggcggacgcgtgggcaaatccccctcctttttcttggtgctgctgctgctgcacgaagccacgagcgcctcgccacctcgggatcgcctccaagatccgattttgatcgccccgccgccgacgaattcgtcgagacccgccctcgccgtacctgcccaacggtgctcgatttggttgtagccttctggttctggtacttggctccatggacctatctttgatcttattatgattcttattacggttttaatcttctatatatatcggttgtggcttgtaattaggggaatagggggatcgtattagaacagtgaaagtttggaaaaattttccatggtttgtgtgtgcttaccaatcaaggaggcagttggaggcaagcctgttgttttcttgattggacactaaaagccggttcttgcttttaactgtgttggagttttattaaggatgttttctgttggtatttaatgaagtcgatttggtattcaaca

SEQ ID NO: 33137 - DNA, 309 bp, Oryza sativa
  Clone ID: PAT_MRT4530_37279C.1
atggccaatggaacgaaccaggtcgccatcatcgaggagataccctcctccttctccaagtctggccaccggctctcctcttcgattcctcacccccaggtgagcttcggcgcgattctttgcaccggccaaagcccgggagacaccatcgtcgtcgacctgccattaacgccgccgccgaagcattcctcggttccccgtagttttccgagcatcgtcggcgcatgcgtgacctcaagttggaacccaggaaacccaaagtcacacatgcatgcactagaatacactaagggctcctttgggagctga

SEQ ID NO: 33138 - DNA, 1469 bp, Oryza sativa
  Clone ID: PAT_MRT4530_3727C.1
caatagggcgcggggaggggagagagagggcgccggtggaccgagtccatctcgcgtggtccggggtgggaccagcttgtcagcggcttggctcaccgtgcggagggagcacgcggcgcggcgctagggtgtggaagcggggcgcggtgcatgcgcgtggttcgcggtggaccgcgcccgcgagcgggggccggagggagcggctgaccggggtcggctcgacccggtcttggccgagctggcgccgacgtggcgcctacgtggcagccacgcgggccggcgggaggttgaagaagacgccggccggaacggacggcggacggcggtggcgagcggcggagcgaaacacggtgatctaggcgaaagcgagcacaccgggaagttgcacgggacgaggggagtcgagccaacggctcggatttgccgggggatgctcgacggcggcggattgcggcggtggcaaccggcggcggaagaagggggaaacggtgacgagagcatctacgcggctacgggaatccgatgctagcgttggattgggcggagcggcgccgagcgaggccggcgacgagcggcgcttccgagctcgggcgacgacggtggcgagcacacggcgagcgacggcaaaggggaggagatggagcgaagagggagaacggggagatgcgctaccgtgcgggcgggcgcagtgacgagagccgacggcgcgaaacgtgatcgtttcggcctcgggccgaggaagaggaagaagagggcgcgcccggagtccccttccgcgtcctcgctcgtgccggctcctccgacacgcgcgacgacaaacggcgacggcgtacagagcacgggaggcggcgacaatggagtggaggcgatgggacaacgagaggagaagagagggagggcgcctgggctttataggatggcaatgtcgcggccaaatcggcgacagggcggagggaggatgacgccggcgggagaaaaaggggaaaaggagggagagaaaggggcttgccccttgcctctttgggaaaaggaggaggggagcgggggcgacgcggcagagggaggaggagctctgcctccgtcccttggaggctagcgcgtggagtggcgggggccgggcgatgacgacggcgatgacggcggggacggtgtggagcaaagcggcgacacgggcgacaggcgcgggcaggcgcggcagggcagtggggccgggcggcgcagacggcgcaggcgcggcacgggcggcgaccacgcgggcgcgcgcacgcgaacaacggcgcgcgggaagcggcagcgagggagcggagagggagggctcggctcggcgcggctcacgcgcacacgcgcgcggcgcgctgacagagcggagaagagggagagagagagaacgagaaagagagagagagagagagagccggggagggagggggagatggtcctatggcccatcgaacccgagggaggccaaa

SEQ ID NO: 33139 - DNA, 2492 bp, Oryza sativa
  Clone ID: PAT_MRT4530_37280C.1
atggattgggagcagaaggaagaaggtgtgaatctctgctttctcgcgcgatccggcggcggcgggatgcagtaccaccagggcggcagccgcatgccgccgttcgcgcgcggcggcgcgtacagccgcggctacaagcagctctacgcgccgccgcagcagcagccgccgccgcaggacaagcacgaggtgctcatggaggcgggccgcctggcggcggagtacctggtggcgaagggcgtgctgccgccggcctccctgcagcgccgcggcgtcggcggcgggggatgggtccagctcccgcctccgcccccgccacctccgccgccgcagggaaccctggcgttctatggtgcccagaatggccggcggcggttggatgatgatgatgatggtaatcctaacccccgctcgcggcggaaccgcggtggtgagaacaataatgatgacagtagtagtagctacaatggtagagggaagaggaaattcggtgcttacagtaggcattcggattgggggagggacaaggggaggagtagggggaattcggatagccggagttacgatgatgaggatgatgacgggcctcctggttataggagagagcggcgaggtggtgggagatttgatgatgctgggagtagcatgtcgggggtggcagcgtctaagacggaggccatgggggagtcggagctggaggatactgggtcgaaggtgggctctagcagtaatttcaggaaggatgtcgatccgccacaagaagtggagggcgttgataagttgaataagattaatgaggagagtaatccatcaaattcagaggtggtggagcaaatgactaatggtgagagcactagtaataatgcttcttgtattgttattgatgaggaacagacgaaggcaaaatatttgcctgtgccctcagatgacaaggtttcagatgagaagcctgacgatagtagtgttttgaatgagaagattgaagatgacgagactttagctgagaaagctgaagatgataagacttctgatgagagggtaccaggtgtgaagaataacttgcgtgatgattgtaataatttgctgagctattgcagttatccaaatgtaccgacaaggcggcgatcaatagttgcacacaggaatgcagcaccagcccatagggaagttgctgttgccgaacagattgatctggtttcctctgaagatgaaacccatatggccactgatgttacagggcatggcagctccttgactaatacccaggaaggcaacaaagatggccttgcctgcttggaacataccgatacaagcactacttgcaatcagatggtggagccagtaagattccagacagaggaaacacagattggaactgatgatttgagaggacagaaaaacattgagcaacattatgcagttcacgaatctagggaggagaatatgttacctcctaaagtgggtgttcagcagcaagttgaggaaggaatgcagatttacaatgttgatacaccgccacaagatgaagacttgattgcttcagctgataaagagaaagtagctggtgtggcattattacctagtatcaaagctgaagctgttgttgcgaaggaagaggacaagtttggtcagtcaagttcatttaaaatatgtgatctaaacctagttggtagtccagaggttgctgaattacgaaatgatcctggtttgggtcaattctcaactgctggatgttcaatggagccacaaaatcagcaacaagagtttagaaatacgggtaacagtgcagatgataccaacatgcatgcccaaattccattgcacaataaggtggttcaagttattgatcttgaagatgactcgccaattgaagctggtgcatgtgatacttcaaaagcaaaagaggaaaacatggcaaaccctgctgtgaccacagatgttcttcctggtatccaagatggatataattttgcgatttcagattatcttggtgctgatataccatgctaccaaccaatgcaaacagatcttcccaatgggatgagcctaaatgattcagagggcattactgtcatggatgattcaatatatggttctcttagcgatatcggttttatggaggtttgggaccagcaacctcaggactacgagaagttcttctgaccaggcgccaaattgctgttgtcagtgctgtgacagtgctgtaaccctgtaactgcaataatcagaaaaacacacacacacaacacacatacaggcacccatggtggccatatgatccaggccaatgtcctgtctaactacacatcatatatagctggagcctttgatccttccaggtcaatatcaacagagcattcatcctaaaaaggattgttcttgtgtaaacagttcgacaagttcatgtaccgtgaatacaatttactctacaactctagatataaatacattgtttcacctcggaaaggaaaataagaatacattgtttgatt

SEQ ID NO: 33140 - DNA, 734 bp, Oryza sativa
  Clone ID: PAT_MRT4530_37281C.1
caaacgtcaaagaagtgcaggaaaacattctacaagaaattgagaaactggctgcggaggcatatagcatatttagaagcacaactccagctttttccgaggaaggtgttttagaagcagaagctgacaagcctgacattaaaatctcctcaggaaccggctcgggatttgagatattatgccaaggtttcaactgggagtccaataaatctgggagatggtacttggaacttcaagaaaaagccgatgagttagcttcacttggattcactgttctgtggttacctccaccgacagaatctgtgtcacctgaagggtacatgcctaaagacctgtataacttgaattccagatatggaacaattgatgagctaaaagatacagtgaagaaatttcacaaggtcgggatcaaagttttaggcgatgctgttctgaatcaccgctgtgcacacttcaaaaatcaaaatggtgtatggaatctatttggaggacgtctaaactgggacgatagggcagtagttgcagatgaccctcatttccagggtagaggaaacaagagcagtggagataatttccatgctgctccaaacatagatcactcgcaagactttgttaggaaggatatcaaggaatggctatgctggatgatggaagaagttgggtatgatggatggaggcttgactttgtaagagggttctggggaggttatgtgaaagactatatggatgctagc

SEQ ID NO: 33141 - DNA, 285 bp, Oryza sativa
  Clone ID: PAT_MRT4530_37282C.1
atggaagctgacgccgtgaaaagtgcaaagcggtggttactatttaaaagagaacgcgcgacagttctgtccaccatccattgtgttcccaaggatagcttcccgccactggtcgtcatggttttctggggtctaccccttctcgcctctcgagaagttgttccaccagaacaaaatcatcgtgcagcatcccacccaatcagcacccgccccacgcggtcctaccaatggctgccctaccgtaggccctgcctcacacacaacaagaaaaccactacggcctgg

SEQ ID NO: 33142 - DNA, 1529 bp, Oryza sativa
  Clone ID: PAT_MRT4530_37283C.1
cgcgcacggcgcattatatttctcactctgcatggcttcggcttcttctgtcagccggccgggaagcccccacgcgtccgcagaaagtgcaattagcctgcaggcagctaatcagtagtagcttgctagccatggcttctgcaactaattcttcacttagcttaatgctgctggtggctgcagctatggcgtcagtggcatcggcgcagctctcggcgacgttctatgacacgtcgtgccccaatgcgttgtccaccatcaagagcgtcataacagccgccgtgaacagcgaggctcgcatgggggcgtcgctgctcaggctgcacttccacgactgcttcgtccaagggtgcgacgcgtcagttctgctgtccgggcaggagcagaatgctggcccgaacgtggggtcgctgaggggattcagcgtcatcgacaacgccaaggcgcgggtggaggccatctgcaaccagaccgtctcctgcgccgacatcctcgccgtcgccgcccgtgactccgtcgtcgcgctgggagggccatcatggacggttctgttggggagaagggactccaccactgcaagcgaggccttggcaaataccgacctccctgccccttcctctagcctcgcagaacttatcggcaatttctccagaaagggactcgacgcaaccgacatggttgctctctcaggagcacacacgatcgggcaggcgcagtgccagaatttcagggacaggatctacaacgagaccaacatcgattccgccttcgcgacgcaacgccaggccaactgcccacggccgacgggcagcggcgacagcaacctggcgcccctggacacgacgacgcccaacgccttcgacaacgcctactacagcaacctgctgtcgaacaaggggctcctgcactccgaccaggtgctcttcaacggcggcagcgcggacaacacggtcaggaacttcgcgtccaacgcggcggcgttcagcagcgccttcacgacggccatggtgaagatggggaacatctcgccgctgaccgggacgcaggggcagatcaggctcagctgctccaaggtgaactcctaattaaggagtagtatgacgggatgcgttcgttgctggaagcaaatcgtgtcgacgacgacataaacgggccacaccacatatacccatatatgtagtataaccacaagtataggtacggtggtgttgtactagtacacgtaaagtatatggcagccagctcgctctagcaatccatcaagtgtatggagcagagcagccatggcattagcacctagtataccaaaataaaagctcctcatgcgaaggcatgcatggaggatcaatgaactgttaccttcacgcaaaaaaataaaaaaaaaaaaaaaaaaaaaaaattaattagcggtgatcatcaacgaaaattctgagtgcatgaggggacaataataaggctatatatgccactgaaatcgatatttgtgctttgcactgatcagtgatcatgttcacgctttcttggttccc

SEQ ID NO: 33143 - DNA, 336 bp, Oryza sativa
  unsure (1)..(336): unsure at all n locations
  Clone ID: PAT_MRT4530_37284C.1
tgaatcgtgatgntaaaatgcaattattgtactaagcaagagggntggtttatacagtttttatgtgaagatccagaatcgcgntccacttaggtgacccttttctgcgtaggaccatgcaatgtcgtataaccantcctttgaactgattctatttttatttctctctgcaataaatcagtgtgtaatggtaggaaaagagctatgtgcctcttttaccaattgccttgaatgaagtccttctgttgagtggatcagntagcttgcaactttatatattcttgtgtgtttcagaagnaaaaaaaaaaaaaaaaaaaaaaaaaaaaaaaaaaaaaa

SEQ ID NO: 33144 - DNA, 179 bp, Oryza sativa
  Clone ID: PAT_MRT4530_37285C.1
gttcagatcgcacagaatcatatatagctctttatcacaagttatgttgcacatgacacatacgatgatacctgtgctgtatatgatcactatctggctgcatgctacgcaaaatcggggtgatgatactggctatgaggcgagcgatctcagccgcactctgggagcaagggaagatg

SEQ ID NO: 33145 - DNA, 2120 bp, Oryza sativa
  Clone ID: PAT_MRT4530_37286C.1
ccccctccctttttaagttctatagatgttatgcatttgattcaatcgaataagaaaaactcttgattattaccactacagaatatgtgtatagaccattgaccctaaataattgaccaaaactttatatgcatgtcgttaggaaaggaaaaacagtgaactctcaatgcttgctatcctcaggtttgcgaagccttttgctgccatgtttccacctgcttcattgacttctctttcctctgttgtaattctttgaattcctcagggctgaatggaggtggcagatcacatgggcctgcatcgttggcagacttaaccatagagtcctccataaacttcctttcacggcctatagcttggcatgccaataactctggacagatctcaatagcttcaggtggtttggtaggcttgaaccgtaggagcttagcatactcagttaacaggtgaaacatgtaatcgtatatatagtccatactaagctcttgttgaatgaagttgcttgcttgctttcctattttttgtgcctttttcttgtttgaattgccccagtcaacagcgtgctttatggagctgcacttattgtcatctcgaactggccaataatgctgagtgggcatcagcacccttgaaaagaaatcatagtattttggtgtaacaaccagtgtcattgaattacacgctagaatgtacttctcactgactgaccatgctgatccttcaatgtagatcttgtacctgtgtgtgcattgactagccaaatctgactgtttgtatcctgccttactctctttgatccaatccagctcttttcttttagttgcaacatctggattccctttccagtaagcataaggctctctatccacccatttcaccctcttattgccaatatccaaatccttctgcagtgcatcccacggctttatgttgatctctggccaaccccagaaggaccagtccgggaagacgacgtcgagcgtctcgtcgtcgccacagtaccggaagagcggcggcatggcggtggcgttctccccctggtaccgatcggcttggacgacgggccagtcgacgcagtcgaacatgaggtcgaggtcggggacgcggccggggtaccggcggagcagctggaggatgccccagatggtgaagaggtcgcgggtctggaaggccggcgcgatgcgctcgacgtaggcgcggccccggagcacgacgaggcggaagttggccgtgtccctggcgcgctcgagcatcctgcgggtgatcccgcccgcggctcgccatgggtggaggtcctcgtggatgaagcggaagtaggccgggcaggaggagttggtggtggtaggggggagtggctggggctcggggacgcgggcgcaggctgggcgggaggatagcgcgaggtagagcgtctgggagatgttcttcgggacggcggggtcgcggcggagaggcggcgacgagcaggagatggagtaggcccggcgcggcggcggcggcgcggtgggggtgcccgggatggatgtggcctgcgtggaggtcaggattgccgtctttgtgcgccactcatccagattggtgatcgacagatgactggtggtggtgatccaacgggcggacacgaggacgccaaccacgacgacgaagaagaagaggaagatggcggtggtcaccggcgacgacgacgagctcccgcccttgcaccaccgccggccgtccgggaagacggcggctgccgaagccatcgccgcccctcccacccgccgcccgcccgcacctccctccccctcctctgccttctcgatcgttgacgcggtccgagcgttgttcgccgccgcttcctcggcgagatcagcctctggttggctggttgaattggccttctgctcctgatatggattctggaggccacccggaggccgcgggcgcactgagaggaaggggagcccctgtaccacgaatccacgatacgaggaggcgttttgagtcttttgactctgacacggagtagtagtagtattgtaaattttgacgaggaatcttcggatcgatccaacgagcacgtgagccccggcggcccggccattgctaaacagaggctttgatgacttggtgtccat

SEQ ID NO: 33146 - DNA, 437 bp, Oryza sativa
  Clone ID: PAT_MRT4530_37287C.1
ctctcttcccccccccacgaaaaaaggaggtatacattattatgtatggaattatttgcagagatgggcattatagagctttgctcaaggtcaacggtgaaattcagggagatccaagtgttcagaaaaagcagtaatttgctaaaattctagaattagtgacatattgttagtacagatgatggtgagatgcttttcagacatatttatatgctcattgttattggaaagaacaaattacgcggacttatcgatggcggagttaagaatgtgaagaaaaacaaggtcgaatgtatcaccatcgaggagaaaactataaaaattaggcatttttagtatgctcttgagaattttgacaatttacgaaacgtacataaatgatccttgtttatacaaaaatctttggaataaaattagaagtgagctattttatgagg

SEQ ID NO: 33147 - DNA, 291 bp, Oryza sativa
  Clone ID: PAT_MRT4530_37288C.1
atggacacaggggaagtctcgccgcggcgcggagggatgtctcacggctgcgacggcgagggggcggcgtggcttgacatggagaggaggctacaggacatgggagcgcgcggcggcgcgcgcggccggagggtggtgcagccggcgacggcggctcctcggtggcggcgcgcgggctcagggcggcgcgagctcgccggcctcctcgtccccctcgtgcggtcggtgatggtggacgagcgacgagaagcaggcggtgcgacgcccccgccgcgtacagtggcgcggtga

SEQ ID NO: 33148 - DNA, 281 bp, Oryza sativa
  Clone ID: PAT_MRT4530_37289C.1
tcacactccatcaggcagatggctgggataaaaacggagcggatagtttctgtatgctctgaataagaacgaatatggatacctttcagatcggataattcccagatagttcggatacgaatacgaatattttctcatggatacggatacgaatatggtatcggggtttctatcggatacggataataattcggatatccaaaaaaattatttccgtattcgtgtccgatcatattcaattcttattcatattcaaaattatccgtatttgtttctatata

SEQ ID NO: 33149 - DNA, 1761 bp, Oryza sativa
  Clone ID: PAT_MRT4530_3728C.1
aaactcatcgtaaccggcttgctcctggaagaactcctcatcagcaggatccgcttcatcttcttcagcaaatccgcccatgaccgtgggcacggctgttcgaacagttagttaacctctgcagagggggtacactttacccacacgacattactaacccggatcacccagcccgtggggatcaaccacgtcgggagacctccaagctttcatgacaaggcatttcgaaagccgacacagggcgcggggagggttgagagagggcgccggtggaccgagtccatctcgcgtggtcccgggtgggacccgcttgtcagcggctcggctcaccgtgcggagggagcacgcggcgcggcgctagggtgtggagcggggcgcggtgcatgcgcgtggttcgcggtggacgcggatgcggcgggcctacgcgcggcctcacggctcgcggtggaccgcgcccgcgagcggggccggagggagcggctgaccggggtcggctcgacccggtcttggccgagctggcaccgacgtggcgcctacgtggcagccacgcgggccggcgggaggttgaagaagacgccggccggaacggacggcggacggctgtggcgagcggcggagcgaaacacggcgatctaggcgaaagcgagcacaccgggaagttgcacgggacgaggggagtcgagccaacggcttggatttgccgggggatgctcgacggcggcggattgtggcggcggcaaccggcggcggaagaagggggaaacggtgacgagagcatctacgcggctacgggaatccgatgctagcgttggattgggcggagcggcgtcgagcgaggccggcgacgagcggcgcttccgagctcgggcggcgacggtggcgagcacacggcgaacgacggcaaaggggaggagatggagcgaagagggagaacggggagatgcgctaccgtgcgggcgggcgcagtgacgagagccgacgacgcgaaacgtgatcgtttcggcctcgggccgaggaagaggaagaagagggcgcgcccggagtccccttctgcgtcctcgctcgtgccggctcctccgacacgcgcgacgacaaacggcgacggcgaacagagcacgggaggcggcgacaatggagtggaggcgatgggacaaacgagaggagaagagagggagggcgcttgggctttataggatggcaatgtcgcggccaaatcggcgacagggcggagggaggatgacgccggcgggaggaaaaggggaaaaggagggagagaaagggggcttgccccttgcctctttgggaaaaggaggaggggagcgggggcgacacggtagagggaggaggagctctgcctccgtcccttggagactagcgcgtggagtggcgggggccgggcgatgacgacggcgatgacggcgggggcggtgtggagcgaagcggcgacacgggcgacaggcgcgggcaggcgcggcagggcagcggggccggatgacgcagacggcgcaggcgcggcacgggcggcgaccacgcgggcgcgcgcgcgcgaacaacggcgcgcgggggccgatttcgcgggcggggtgctcgccagggatggaggcggggagggggggagcgacgggagggaggaggcgctcggcgtggttcgggcacgcgcgggcagagcgagggagagagagagagggagagagagagagagagccgggaagggagatgggccgagagggattcggcccatcgaacccgggggaggcgaaa

SEQ ID NO: 33150 - DNA, 752 bp, Oryza sativa
  Clone ID: PAT_MRT4530_37290C.1
agcctattatggggtgaaccggtgcaatgcccttgtctaccaaacagcggtgttgttaaatcagacatcaagggggcaggagaaggttttgttgtccatggttctgaatccaaatgcaatgtcacggtagggtgaaggccgtgagttgttcatatgagccctgagcggccaaaaggatgagtttagacttcagagtgcgtagttgacatggaacagagatgactctgaatcatgatttctggctttaggcatgggtatggaactgtaatagttacctatagtttttctgggttccacaagaccgggaggaaatgcttgaccagttaaatttacataggacacccaagcaagtcactggagacaccagtctaccttaaatctgggaagaactatgagtaactgcatgttcttttcaaggttctggctacaagtaacagtggcgcctcatggggacaatcgaggggctaaggcaaccctgaatttattccttctgcagaggttgtccaatttcaaggcatattgttcttgttctcttcttgagagaatggtaaggtaggacctttggtgtcaaagctacatttgttgtaatcaccccctcctttttcttcttgatacaaaaataaacaatattgcctgttctcttaagttggcctgctatctttatttggatagaagtgtgggtacatttgtttgtgatcaaatcaaaccgtgtttgttctggacatcatttttagagttaagagctttcattc

SEQ ID NO: 33151 - DNA, 2283 bp, Oryza sativa
  Clone ID: PAT_MRT4530_37291C.1
atggcggaagaaagagaaagcttcgagagtcagtgggcgccctccgatgtaacagaagataatctgaaggaaatggtggcgcacagcgttcttccggcgaaggaaatcatcgggtggcgaccggcgttcggcgaagcattcccgacccccgacacgcacgaaatcgtggtatttgctcatttcttctacgacggattttctcttccaacctcaagattcttccgggggattctgaacttctacgggattagcttgcatcatctgaatccaaactccatagtgcatatcgccaattttgttcatgcctgcgaagcttttctgggcattaggcctcatttcgccttattccgccgaatcttcttcctcaagccccaaccgaataagagcaaaccatgtgtggttgggggcgctggtttccaactcagaggaacactgagccaaaagtatttctctatgcccttcaagacctcacacaaaggctggcacgcaaactggttttacgtccaaaatcctgaacccgcacttcccgagtattcctgtcttcctccggtttaccaggacacatggaactcattgcctatgggagatgaagctgctcaggcagtggaattgatggaacgcatgctaaaactgaaggaacaaggtttgcagggagaacagatcactcgacacttcatcaaaagtcgattagctccaatcaaagagagatcccgcacggcttttgagtttgacggcaagcatgatccaaatcaggaagatccagattctcttgactttaaggtcatgaaagaaagaatgtacaagatcttctcaaacgctattgttgtcagctattcacatctgctgcccattgtgccattcaatgcattcaaccctcctccaccggaatttgccttgatgaaatcggatcctccaattgctcaacgccgatcaccttgccagcagactggtcaggcgagtggaggaccaaaaattcggtctgacgctcaaccaagtgcttccgatccagtcggccagtcagattcttgcaagaggaagctagttctaagcgacgacgaaggcgatgataccggaaggctcggagacaaaggagcgaccggaaaacccccgaagccaactaatccgaagaagaaaacctccagtcgtcctttgccaaaaatcagaaaatcttccaggaagccgtctgacatagatccttctgaaaaagaccctgagccggctgacatagaggcaaacccttcaaaagaaaccgggccaactgcagaggattgcccgagtgacaaacaaccggcaaccgacaatgtagaacccagcaacgagcccccgactgcgaaccagtcggccgaagctgaagttggcgctaaccaggagcccccgactggaaaccagtcggatgtagggtcaagccaaaagattcccgaggttgaagctcaaacgaacaggcctctcgggaaggatgctgacagtgaatcagaaaccagatctcctgtgaagacaccaaagtccactcgtccccgaccgggaatcatcacagggccaataattggtgatgaagaagaaatcctccggatacaagcagctgaggattcacgccctcctattctggtcaagtggtgggatgacaacatgcagcctcaagggatcgtgataaataagcaaaaagaggacgaagagttatgcctactgaaggaggcacttggtcaggcaacctgcattgtaaataggattcatcttaggaacgaagccaaaacggtaaccttagagaggttagtccctcatctcggaaccctcgaagccaccaggaatcaactgcacgaagcaaaagaacttgctaggaagaatgaacatgatctgagggatcggattgctgagctccaggaatcaaattttgaactgagtggctcgtcaaaagaccgcaatatcaagtctcaagctcaattcgacgtcctggttggcaagatcaaaaaacttgaaggagcccgagatgaggttgctaacgctgctgccccaattgttcaagcgatgttcttcaataacaacggcccgagtgcacttgatgcttctgaaatcttcgacaagctgagagttgctccagatacatatttcaagagcatcaaagaggttagaaacgggacgagcgaagaagctgctcttgacctcatcagcgatgcacaaaaatctgctgataagatagcagttgatgtagttgagagatttcaggacaccgatcttcgaccgactggtcctgataattctgataatgaaaagactgatattgattaa

SEQ ID NO: 33152 - DNA, 281 bp, Oryza sativa
  Clone ID: PAT_MRT4530_37292C.1
agccataccatcaattgggtccataacacaaaaaaagcggcaacagcacaaaagggggctttctttggtttggcttccaacacaacagggggggaagagggggggtaacacatttgatagatagcaggaagccaagaaccctagctcccgagtacctaggcggggagggggacggggcccccgggggccttgatcttttttttggggaccttggagaggagctgggccttaacaacaaggggccttttggggggggggatcccctgggcgagcccctgggg

SEQ ID NO: 33153 - DNA, 2376 bp, Oryza sativa
  Clone ID: PAT_MRT4530_37293C.1
atggcggaagaaagagaaagcttcaagagtcagtgggcgccctccgatgtgacggaagacaatctgaaggagatggtggcgcacggcgttcttccagcaaaagagatcatcgggtggcaaccggcatttggtgaggcatttccaacacccgatacacacgaaatcgtggtatttgctcatttcttctacggcggattttctcttccaaccttaagatttttccggggaattctgaacttctacgggattagcttgcatcatctgaatccaaactccatagtgcatattgccaactttattcatgcctgcgaagcttttctgggcattaggcctcatttcgccttgttccgccgcatcttcttcctcaagccccaaccaaacaagagtaaaccatgcgtcgttgggggtgctggtttccaactcaggggaacactaagccaaaaatacttctccatgcccttcaagacctcaaataaaggctggcacgcaaattggttttatgttcaaaaccccgagcctgttcttcccgagtactcctgtcttcctccagtttatcgggatacttggaattcactgccaatgggagacgaagctgcacaagcagtagaactgatcgagaggatgattaagctgaaagatcagggccttcaaggaaaacagatcacccggcactttatcaagtgtcggttagctctaatcaaagaaagatctcgcacagccttcgaatttgacggcaagcatgatccaaaccgtgaagatccagattctcttgacttcaaggtcatgaaggaaaggatgtataagatcttctcaaacgccatcgttgttagctactctcacttgctgccagtcataccgttcaatgcattcaatcctcctccactggaatttgctttgatgaagtcggatcccccaatcgctcaacgccgatcgccccgccatcaaactgggcaagggagcggaggaccaagaattcggtctgaaactcaaccaagtgcttctgatccaatcggccagtcagattctcgaaagaagaagctggttctaagtgacgacgaagccgatgataccgccaggaggcctggagaccgagagacaaccaagaaactaccaaaacaggctactccaaggaagaaaacatccagtcgccctgtgccaaagatcaggaagtcttctaggaagccatctgatatagatccgtctgggaaagactctgacccaactaacgtggacacaagttcttccaaagaaactgagccaactgctgaggatcatccgagtgacaatcaaccggcaaccgataatgtagaatccagtgaccaacccccgactggaatccagttggccgaagccgaagccggagttaatcaagatcccccgactggaaaccagtcggacgcagggccaagccaagagattccagaagtcgaaacccaagcaaacaaccctcgcggacaagacgccagcaatgaccggagatctggatcccctttaaaagtatccgaatccactcgtcctcgtcctgaaatcattacaggaattgtaataaaccggcaaaaagaagacgaagaggtatgcctgctgaaaaagggactcaaccaagcgactcgcattgtaaataggattcatcttaggaacgaggcgaaaaccgcaaccctagagagactagttcctcatcttggaaccctcgaagccaccaggagtcaactgcacgaggccagagaacttgccaagaagaatgaacacgatctgagggatcggattgctgagctccaggagtccaatttcgaactgagtggctcatcaaaagttaatgtagtgcaagctgccaagatatctcaactagagaagcatatccaaactctggaaaatgacaaggcagagctggcaagacagagggattcggctttaaaggaggttgaagaccgcaagatcaagtctcaagcacaatttgatgtcttagttgacaagatcaacaagcttgaaggagccagggataaagtcgctaatgccgctactccacttatccaggccatgttcttcaataacgccggttcgagtacacttgatgctgccgaaatcttcgacaagctgagagtcgctccagatacttacttcaagaacatcaaagaagctggaagtatgggagcaagtctggcattggcgatgaccaaatccctttatccaagagttgacattgatgccattgatggctttgcagacgggacgagcaaagaagctgctcttgacctcatcaatgatgcgcagaaagcggctgacaagattgctgctgatgtagttgagagattccaatatgtcgaccttcggccgactgggtctaataagtctgatgatgaaaaaactgatactgattga

SEQ ID NO: 33154 - DNA, 423 bp, Oryza sativa
  Clone ID: PAT_MRT4530_37294C.1
atggcgctggaggaggctggcgaggggtggttcctctgcgacgcggatggggtcgggtttgaggggcgtgtcgtggccgtgcccggcgacgaggagctccgcccggggcagatctacttcgtgctccaccccgaggcgcggcgccgcagccttacccgcgaggaggtcgccgcgctcgcggtgaaggcaagcgccgccctcgtcaaggccgccgcagcggcggcggcatcctcccccgcgggaggccgtcgccggcgcggcgcggtggcgccgctcgtgttcccgctccccgaggaggatgacacggcggtggcggcggccgcgcccaagccggcggtggcgcggaagcggcgggtggcgtcgcgaggcgtgagggcgagcaagttctctcctgacctgaccgccattccggagtccgagtag

SEQ ID NO: 33155 - DNA, 2310 bp, Oryza sativa
  Clone ID: PAT_MRT4530_37295C.1
atggcggaagaaagagaaagcttcgagagtcagtgggcgccctccgatgtgacggaagacagtttgaaggagatggtggcgcacggcgttcttccagcaaaagagatcatcgggtggcgaccggcatttggtgaggcattcctgacccccgatacacacaaaatcgtggtattcgctcatttcttctatggcggattttctcttccaacctcaagatttttccggggaattctgaatttctacgggattagcttgcatcatctgaatccaaacttcatagtgcatattgccaattttattcatgcctgcgaagcttttctgggcattaggcctcatttcgccttgttccgccgcatcttcttcctcaagccccagccaaataagagtaaaccatgcgtcgttgggggtgctggtttccaactcaggggaacaataagccaaaaatacttctccatgcccttcaagacctcaaataaaggttggcacgcaaattggttttatgttcaaaaccccgagcctgttcttcccgagtactcctgtcttcctccagtttatcgggatacttggaactcactgccaatgggagatgaagctgcacaagcagtagaactgatggagaggatgataaagctgaaagaacagggccttcaaggagaacagatcacccggcactttatcaagtgtcggttagctctaatcaaagaaagatctcgcacagccttcgaatttgacggcaagcatgacccaaaccgtgaagatccagattctcttgacttcaaggtcatgaaggaaaggatgtataagatcttctcaaacaccatcgttgtcagctactcacacttgctgccagtcgtaccgttcaatgcattcaatcctcctccaccgtcagattctcgaaagaggaagctggttctaagtgacgacgaagccgatgataccgccaggaggcctggagaccgagagacaaccaagaaactaacaaaacaggctactccaaggaagaaaacatccagtcgccctgtgccaaagatcaggaagtcttctaggaaaccatctgatatagatccgtctgggaaggactctgacccgactaacgtggacacaagttcttccaaagaaaccgagtcaactactgaggatcatccgagtgacaatcaaccggcaaccgataatttagaatccggtgatcaacccccgactgggatccagtcggccgaagccgaagccggagttaatcaggagcccccgattggaaaccagtcggacgcagggccaagccaagagattccagaagtcgaaacccaagcagacaaccctcgcggacaagacgccagcaatgaccggagatctggatcccctttaaaggcatccgaatccacttgtcctcgtccagaaatcattacaggaccaatgatcggtgatgaagaagaaattccccgtatacaagcagccgaagattcgtgccctcctattctggtcaagtggtgggatgacaacttgcaacctcaaggaattgtaataaaccggcaaaaagaagacgaagaggtatgcctactgaaaaaggaactcaaccaagcgactcgcattgtaaataggattcatcttaggaacgaggcaaaaaccgcaaccctagagagactagttcctcatcttggaaccctcaaagccaccaggagtcaactgcacgaggccagagaacttgccaagaagaatgaacacgatctgagggatcggattgctgagctccaggagtccaatttcgaactgagtggctcatcaaaagttaatgtagtgcaagctgccaagatatctcaactagagaagcagatccaaactctggaaaatgacaaggcagagctggcaagacagagggattcgactttaaaggaggttgaagttgacaatatcaacaagcttgaaggagccagggataaagtcgctaatgccgctactccacttatccaggccatgttcttcaataacgctggttcgagtacacttgatgctgccgaaatcttcgacaagctgagagtcgctccagatacttacttcaagaacatcaaagaagctggaagtatgggagcgagtctggcgttggcgatgaccaaatccctttatccaagagttgacattgatgccattgatggctttgcagatgggacgagcgaagaagctgctctcgacctcatcagtgatgcgcagaaagcggctgacaagattgctgctgatgtagttgagagattccaagatgtcgaccttcggccgactgggtctgataagtctaatgatgaaaaaactgatactgattga

SEQ ID NO: 33156 - DNA, 2298 bp, Oryza sativa
  Clone ID: PAT_MRT4530_37296C.1
atggcggaagaaagagaaagctttgagagtcagtgggcgccctccgatgtgacggaagataatctgaaggagatgttggcgcacggcgttcttccagcgaaggagatcatcggttggcgaccggcattcggcgaagcattcccaacccccgatacgcatgaaatcgtggtatttgctcatttcttctatggcggtttctcccttccaacctcaagattttttcggggaattctgaatttctatggaatcagcctgcatcatctgaacccaaactccatagttcacatcgccaatttcattcatgcctgcgaagcctttttaggtattaggccacatttcgccttgttatgccgcatcttcttcctcaaacctcagccaaacaagagcaaaccatgtgttgttgggggcgttggttttcaactcaggggaacactaagccaaaaatatttctccatgcccttcaagacctcgaacaaaggctggcacgccaactggttctatgttcaaaatcctgaaccagtccttcctgagtactcttgtcttcctccggtgtaccaagacacatggaattcattgcctacaggggatgaggctgcccaagcagtagaactgatggagcgcatgataaagctgaaagagcaaggcttgcaaggagaacaaatcactcggcacttcataaaaagccggttagctccaatcaaagaaagatcccgcacagcttttgaatttgacggcaaacacgatccaaatcgtgaagatccggactctcttaactttaaggtcatgaaggaaaggatgtacaagatattctcaaatgctatcgtcgtcagctattcgcacttgctgctagtcgtgccattcaatgcatttaatcctcctccaccggaatttgctttgatgaaatcggatcccccaatcgctcaacgccaatcacctcgctgccaaactggtcagggaagcggagaaccaagaattcggtctgaaacccaaccaagtgcttctgatccagtcggcgagtcagattctcgcaagaggaagctggttctaagtgacgacgaaggcgatgataccggaaagctcagagataaaggagcgaccggaagacctccgaagccaactaatccgaagaagaaaacctccagtcatcctgtaccaaaaatcagaaagtcttccaggaaaccatccgacatagatccttctgagaaagactctgacccgactaacatggaaacagacacctcaaaagaaaccgggccgactgcaaaagatcacccgagtgataatccgcaggccagcgacaattcggccgaagctggagtcagagttaaccaggagtccccgactggaaaccagtcggatgcagggccaagccaaaaaattcccgaggttgaagctcaaacaaacaatcctcccggaaaggatgctggcaatgactcagaaaccagatctcctgtgaagacacaagagtctactcgtccccgaccgggaatcatcacagggccaatgattggtgatgaagaagagatcctccggatacaagcagctgaggattcgcgtcctcccattctggtcaagtggtgggatgacaacatgcagcctcaaggaatcgtaataaataagcaaaaagaagatgaagaagtatgcttgctgaaaaaggcgctcagccaagccacccgcattgtaaataggattcatcttaggaacgaagccaaaacggcgaccttagagagagtcaatgtagtgcaagctgccaagatatctcaactggagaagcagattcaaactctggaaaatgataaggcagaactggcaagacagagggactcagctttaaaggaggttgaagaccacaagatcaagtcacaggcacagtttgatgtcttagttgacaagatcaataggcttgaaggggccagggacaaagtcgctaatgccgctactccactcatccaagccatgttcttcaataacgccggtccaagtacacttgatgctgccgaaatcttcgacaagctgagagtcgctccggatacttacttcaagaacatcaaagaagctggaagtatgggagcaagtctggtgttggcgatgaccaaatccctttatccaagagttgacattgatgccattgatggctttgcagacgggacgagcgaagaagctgctcttgacctcatcaatgatgcgcaaaaagccgctgacaagattgttgctgacgtggttgagagattccaagatgtcgaccttcggccgactgggtctgataattctgatgatgaaaaaactgatactgattga

SEQ ID NO: 33157 - DNA, 1710 bp, Oryza sativa
  Clone ID: PAT_MRT4530_37297C.1
atgaaggaaaggatgtataagatcttttcaaacgccatcgttgtcagctactcacacttgctgccagtcgtaccattcaatgcattcaatcctcctccaccggaatttgctttgatgaagtcggatccctcaatcgctcaacgccgatctccccaccaccaaactgggcaagggagcggaggatcaagaattcggtctgaaactcaaccaagtgcttctgatccattcagccagtcaggctctcgaaagagggaactagttctaagtgacgacgaagccgatgatactaccaggaggcctggagaccgagagacaaccaagaaactaccaaaacaggctactccaaggaagaaaacatcccgtcgccctgcgccaaagatcaggaagtcttctaggaaaccatctgatatagatccgtctgggaaagactctgacccgactagcgtggacgcaagttcttccaaagaaaccgggccaactgccgaggaccgtccgagtgacaatcagccggcaaccgataatgtagaatccggtgatcaaccaccgactggaaaccagtcggccgaagccgaagccggggttaatcaggagcccccgactggaaaccagtcggacgcagggccaagccaagagattccagaagtcccaacccaagcagacaacccttgcggacaagacgccagcaatgaccggagatctggatctcctttaaaggcatccgagtccactcatcctcgcccagaaatcattacggtggatacattagggccaatgatcagtgatgaagaagaaattccccgcatacaagcagccgaagactcgtgccctcccatactggtcaagtggtgggatgacaacttgcaacctcagggaattgtgataaaccggcaaaaagatgacgaagaggtatgtctactgaaaaaggtactcaaccaagcgactcgtattgtaaataggattcatcttaggaacgaggcgaaaactgcaaccctaaagaaactagttcctcatcttggaaccctcgaagccaccaggagtcaactacacgaggccagagaacttgccaagaagaacgaacacgatctaagggattggattgctgagctccaggagtccaatttcaaactgagtggctcatcaaaagttaatgtagtgcaagctgccaagatatctcaactagagaatcagatccaaattctagaaaatgacaaggcagaactggcaagacaaagagacctggctttaaaggaagttgaagaccgcaagatcaaatctcaagctcaattcgacgacctggttagcaagatcaaaaaacttgaaggagcccgggatgaggttgctaacgctgctgccccaattgttcaagcgatgttcttcaataacaacggcccgagtgcacttgatgcttctgaaattttcgacaagctgagagtcgctccggatacatatttcaagaacatcaaagaagctggaagtatgggagcaagtctagcgttggcgatgactaaatccctttatccaagagttgatattgacgccattgatggctttgcagacgggacgagcgaagaagctgctcttgacctcatcagtgatgcgcagaaagcggctgacaaaattgctgctgatgtagttgagagatttcaggacaccgatcttcgaccgactggtcctgataattctgatgatgaaaagactgatactgattaa

SEQ ID NO: 33158 - DNA, 3632 bp, Oryza sativa
  unsure (1)..(3632): unsure at all n locations
  Clone ID: PAT_MRT4530_37298C.1
cggtgatcaaatccgaagccagaagaatccaagcngacangctcgggctccccaccgtgaaacctcccaagaactttgcctgccagcctgcataaacaagcagagatggcggccgggaagagctcgtcggcctccaaggaggaccagtacgcggcgctgcgggagctgtaccggccgcacatcgactcgttcgactacttcatcgacgaggggctcgacaagatgcttcagtccatccgccccgtggagatcacctcaaagctttgccatctaagaggtgcagattctgaaaaattgattttccatggtgaagaggcaacagaaatgggcgggtacttcatatgtggtgggatggagagacttgtacggattcttattttacaaaaacgtaactatcctatgggcctgatccgtggctctttcgttaatcgtggtgctgggtacactgacaaagcagtgatcataagatgtgtccaagatgatcagtccagtgtgacaataaagctgtattacctcctaaatggcagtgcaaggcttgggttctggttgggaggcagagaatttctccttcctgttgggattgttctcaaggccctaattgatactagtgaccgggaaatatttacaagcttgacatgctgctacagtgatcattatgaaagaggaaagggagttgtcagcactcaacttattggtgaaagggcacaaataattcttgacgaagtcagagacctgtctctttttactcgcacagaatgcttgttgcatcttggaaagtacttccgatctgtgatggaaggatttgagaaagatgattttgaaactgttgctgaggcagttcttaaggactatatttttgttcacctgcaaaacaaccatgacaaatttaatttattgatatttatgctgcagaaactttatgcgattgtagatcaaactgcgtcacctgataaagctgatgctctacagtaccaggaagttctcttgcctggccacctgataacagtttttctaaaggatagacttcaagattggttgagaaagtccaaacggttaattgttgaagaggctacaaaaaataaaagctttgatctcaatgactttagagattttattctggagggtcaagttaaagggacatcaagagttattgagacatctagtggaaagccttgctggctgatgaggattggggcacaggaggtcaggaaatttctcagtaaaacttcagcatatgttggcaaagctattcagagtatgataaaggtcggaaaagtaaattcacaatcagggctagatctgccacagcgagatgggatgaccattcatgctgaacggctcaactttcatcgttatatttcgcatttccggtctgtgcataggggttctagttttgctaaaatgcgtacgacatctgtgaggaagttgcttccagagtcatggggtttcctctgtcctgttcatacacctgatggagagccttgtggtttactgaaccatatgacttccacatgccgtatttcatccttttacaactcagaaggggcaactaaagattttcagaaaataaagatgtcacttattgctcgtttggttggcgctggaatggcccaactgttgccgaggatagagcgaactggtcctccagaagtcctacatgtccatgtggatggatgcattgttggttccatcgcttctgctaagattgaagaagtaattccagaggatttggaagtgggttatgtacccttaagccatggtggggcttatcctggactataccttttcaccaatccagctagatttcttcgtccggcattcatggaaatacgatgccctgatggtggggatggtggaagaaacaaattatttcctgcaactcatgaagaaatccaccctacagccattcttagtgtagttgcaaatttgacaccttggtctgatcacaatcaaagtcctcggaacatgtaccaatgtcagatggcaaagcaaaccatgggattctgtggccaagctctaaaattccgtactgatgtaaaagcatttcatctacagacccctcagacaccaattgtccggacagctacatatagcaagtattgcatggatgagttcccatccggaacaaatgctattgttgcggtgctatcatacacagggtatgatatggaggatgccatgattttgaataaatccgctgttgatcgtgggatgttccgtgggcatattttccagactgagtgcattgatttatcagcaaaaagtagagataatgttacggagttcttttgcaagagtaatctttcgagggacactaccgctgcaatcgaatcagatggccttcctcggattggagagaacatatttccaaatgagcagtactacagcgtctgtaacaatctcactggtacagtaaggcctatcaaactgaagggctcagaacctgcagctattgattatgttgctgtcaatgggacaaattttaaggatcgtctacaaaaggctaatattcgtctgcgtcgcgtgagaaatcctataattggtgacaagttcagcagcagacatggtcaaaagggagtttgttcgcagttgtggcctgatattgatatgccattctctgctaatactgggatgaggccagatctcatcattaatccccatgcatttccttcacgaatgactatagcaatgctcttagagtcgatagcagcaaaggccggaagtctgaaagggaagttcattgatgcaacgccttttgcaagctcagttaaagagagatcaaattccattgtggatgaactgggacccatgcttgcttcttatggatttaattaccatggaacagaaattctatatagtggagtttttggcactgagatgaaatgtgagattttccttggacctgtatactatcaacgccttcgtcatatggtctcagacaaatttcaggttcgtaccacagggcgaatagatcagatcacaagacagccaataggaggaaggaaatacggtggagggattcggttcggtgagatggagcgagacgcgcttctcgctcatggtgcctcttacctcctacatgacaggctccattcctgctccgactaccatatcgcggacgtgtgctccatctgcgggagcttgctgacggcgacggtgatcaaatccgaaagccagaagaaagccaagcgcgacatgctcgggctccccaccgtaaaacctcccaagaactttgcctgccaggcctgcaaaacaagcaaagggatggagaccgtcgccatgccttacgtcttcagatacctggcctccgagttggcggccatgaacataaagttggagcttcggctcagcaatagaacagagcatcctactactaccagcgaagaatcctgaatgatttgtcttggtagatctactctgaagatattataatcactggttcatctggagctggcagggcacaagtgtgcagtcatgccatccgcggcagtgtcctgggggatactgagaagttttgcttagaggatgtctccagttttgttgtgtgtcactgctgttttgtttcatgaaaaggcagagtctgttgtatcaaaacatcaatgattataccaattttataacattagacgtat

SEQ ID NO: 33159 - DNA, 2343 bp, Oryza sativa
  Clone ID: PAT_MRT4530_37299C.1
atggcggaagaaagagaaagcttcgagagtcagtgggcgccctccgatgtgatggaagataatctgaaggagatggtggcgcacggcgttcttccggcgaaagagatcatcgggtggcgaccagcattcggcgaggcgttcccgacccccgacacacatgagattgtggtattctctcacttcttctatggcggattttctcttccaacctcaagattcttccggggaattctgaacttctatggaattagcttgcatcatctgaatccaaactccataattcatatcgccaattttgttcatgcatgcgaagcttttctgggcattaggtctcatttcgccttgttccgccgcatcttcttcctcaaaccccagccaaacaagagcaaacaatgcgttgttgggggtgctggtttccaactcaggggaacactaagccaaaaatacttctccatgcccttcaagacttcaaacaaaggctggcacgccaactggttctatgttcaaaatcccaaaccagcccttcccgagtactcttgtctccctccggtctaccaagatacatggaactcattgactacaggagatgaggcagcccaggctgtagaactaatggagcacatgataaagctgaaagaacaaggtttgcaaggagaacagatcactcggcacttcataaaaatccggttagctccaatcaaagagagatcccgcacagcttttgagtttgacggcaaacatgatccaaatcgtgaagatccagactctcttaactttaaggttatgaaggaaaggatgtacaagatcatctcgaatgctatcgttgtcagctattcgcacttcctgccagtcgtgccattcaatgctttcaatcctcctccaccggaatttgctttaatgaaatcggaccccccagtcgttcaacgccgatcaccccaccgccaaaccggtcaagggagcgggggtcccaagatccattttgaagcccggccagatacctccaatccagccggccagccagattcacgcaaaaggaagttgatgtcaagtgacgacgaaagcgacactgctagaaagcctggagaccgagaggcaaccaagaaactgccgaagcaggctactccaaggaagaaaacatccagtcgtcctgtgccaaagatcaggaagtcttctaggaaaccatctgatatagatccttctggaaaagattctgacccgaccagtagggaaacgaacttaaaagaaaccgagccgaatgccgaggatcagccgagtgacaaccagccagcaaccgataatgtaggatctggtgatcaacccccgaccggaaatgagtcggccaaagctggagccggaattaatcaagagcccccgactgaaaaccagtcggacactaggccaagccaagagattccagaagttggagctcgggcagacagcccttgtagacaagatgccagtaacgacccgataccaaggtccccagttaagacgcaagagtcgacttgtccccgttcggaaatcatcacagtggatacattaggaccaatgattggtgatgaagaagaaattcctcgtatacaagcagctgaggactcgcgccctcccatcctagtcacgtggtgggacgatgataggcaacctcaaggaatcgtaataaacaaacaaaacgaagatgaagaagtatgcttgctgaaaaaggcactcagccagaccacccgcattgtgaataggattcatcttaggaacgaagctaaaacggcaaccttagaaagagtcaatgtagtgcaagctgccaagatatctcaactagagaagcagattcaaactctggaaaatgacaaagcagaactggcaagacagaaggactcagctttaaaggaggttgaagaccgcaagatcaagtcccaggcacagtttgatgtcttagttgacaagatcaacaggcttgaaggggccagggataaagttgctaatgccgctactccactcatccaagccatgttcttcaataacgccggtccgagtacgcttgacgcttccgagatcttcgacaagctgagagtcgctccggatacttacttcaagaatattagggaagctgggagtatgggagcaagcatggcattagctatgaccaaatctttataccctaaaaacgatgtcgatgccgttgatgggtttgcagacgggacgagtgaagaatcagccctcgacctcatcaatgatacacaaaaagctgctgacaagattgctgctgacgtggttgagagattccaagatgtcgaccttcggccgactgggtctgataattccgatgatgaaaaaactaatactgattga

SEQ ID NO: 33160 - DNA, 2796 bp, Oryza sativa
  Clone ID: PAT_MRT4530_3729C.1
atggacaaaagttggatgaacatcaatagaactcttcctcaatatcaggatggagttaatcaatttattcagtttgcattcaaagattacgatgtggataagttgcttcggtgtccatgtagaaaatgtagaaataatcactttgctaatcggaatgaaatatgtgagcatctaatgattcatggagtgaataaagactacacaacatgggttcatcatggagaaaccataccagaatctgatgaagatgcaaattgtgagatggaagatcaagctgggtttcgtatggatgagatgacgaatgatttctggaatgctgccaatgcaaacagtgactcatcagtaaacattacaacacttgatgcacaagaggatatgggtaccaatataataattaatgaggagaccactaaattccagaaattaatagatgatgcagaacaagagctctatcctggatgtgatagtttttcaattttatcttttattgtccaaatgttgaatatcaagtgcctttatgatcttagtgggaatgcaatgaatgctctatttggtacattgtgcagcgcttttcctagcaacaataaagtccccaagtcttatgatgatgctaaaaagattatgtcaaatttggggttagattatataaagatttatgcatgtttgaacgactgcattcttttcataggtgaatatgctaaagctgaaacatgccctgtttgtggaatttcaagatggaaagaggatggagaaaatagtgctcgcaagtcaaggaggagaaaagctaggaaagttccgcagaaggttttatggtactttcctttgatcccaagattaaagcgtatgtacatgtgttcaaaaatagctgttcatatgcgatggcacaaagagaagctagttgatgatggatatatgagacatccagcagattctaatgaatggaagaactttgacaagaattttgaatcattcgcattggacgcgcggaatgttaggctaggccttgctagtgatggatttaatccttttggaaatatgagctcatcgtatagcatatggccagttattattgctatatataacttaccaccttggatgtgcatgaaagattcttatatgataatgtcaatgcttatccctgggcctaaagcacctggaaatgacatagatgtatacttgcagccattgattgatgaattgatacagctacgggaaggcgtgccagcctatgatgctcatgcaaagtcctcctttaagctacggggaatgctgctttggacaatcaatgatttccctgcatttggtaatttatcaggcatgagcacgaaaggaaaatatgcatgtccttcttgtcacatggacacttggtcccataggctcgttaatggacacaaatactgctatatgggacatcttcgcttcttgccaacaagacattcatggaggagcaatgcaaaatcttctgatggccaaaaggaaagacgtagcgccccaaaagcgttgtcaggagatgacattatgcgtcaatatcaaaatttcaatcaggttaaatttgggaaacataacaataagagaaaacgctcaagcacattgtatggagtttggaagaaaaaaagtatatttttccagctgccatattggagtacgttatcgataagacataatctagatgtcatgcacattgaaaagaatgtttgcgatagtattgtgggtaccttgttaaatctagatgggaagacaaaggacaatattaaatcccggtttgatttggaactcatgaaaatacagcctgaacttcatgcacctccaactggtgatgggaagttcttatttcatcctgcatgctatacaatgacactagctgagaagaaagcattttgtgagttccttagagaaataaaagtgccagatggatactcttcaaaaatttcacactatgtggatgcaacaaaagctaaaatatcagggatataccttccactttctattcgtggagttctgcctgctgatgtttgtgaggctataattgagctatgtagcttttttagagaaatttgttccaagaaattagatactgaaattctcaagaagcttgcatcatcaattgctgttaccctctcccaggaagctattactggtggacctgtccagtatcggtggatgtatcccattgaaaggtttttgcgaaggttgaagtcttttgtaaaaaacaaagctcgccctgaaggatcgatagctgaggcatatattttgcaagaatgtgtaaatttttgttctatgtacctgcaaggagttgaaacaagaatcaatcaaccaagtcgaaacgaggacgtgcagagtgacaacagcagtacaaaatttcagatatttggtactattggcaggccactccttggtaacaaatactgccagatggatatgaatgagttggagaaagctcggatatatgttctaaagaattgtgaagaaatatcagaatacgcagacattcacaaagaccaacttagcatccagaacagtaaaggtgtggaaaagtgccatgacaaagaattttttgtatggttcaagaatcatatatttgagaaacattccaaaggatctccagatacatcagaagagttgtttgctctagcaagaggtcctgatgctcgagtaacccattacacaagttatatgattaatggatggagatttaacaccagggaccgagacaagttggttcaatcacaaaacagtggagtctttgttaaaggtgatgaagccagtggaagcaaagactattttggtgttaattaa

SEQ ID NO: 33161 - DNA, 440 bp, Oryza sativa
  Clone ID: PAT_MRT4530_372C.1
ccccgtgttgcctcgcggcaatcccgcgctgcgctcatgcgcgctcgcgcccagctcgtgccagcccgcgcacgccacacgcccgcacgctctcgcacgaggacgaacgacgaacgaatgccgccacgacacctccagcttcccgcctccgtatttccttcgtctctcaagtcgcaaatcctcagaaattgaaggtaaaattggattctccatgacgagtactcccttccccctctctttacccatccaattcatcgccggaatgtcgcaagcgtcgcctcccgccgccactgctctgttcggccgccgccggccacatggcgcgccgccgctccaggccaccctaacttcggctatcgccaccctcggactcctctagccttagtgaacttcatcaggccgcctcccttctcggagttcgccggagtcgcctccgcctc

SEQ ID NO: 33162 - DNA, 2103 bp, Oryza sativa
  Clone ID: PAT_MRT4530_37300C.1
atggtggaagaaagagaaagcttcgagagtcagtgggcgccctccgatgtgacagaagataatctgaaggagatggtggcgcacggcgttcttccagcgaaggagatcatcgggtggcgaccggcatttggcgaagcattcccgactcccgatacgcatgaaatcgtggacacatggaactcattgcctatgggagatgaagctgctcaggcagtagaactgatggagaggatgataaagctgaaagaacagggtcttcaaggagagcagatcacccagcacttcatcaagtgtcggttagctccaatcaaagaaagatcccgcacagcttttgagttcgacggcaagcatgatccaaatcgggaagatccagattctcttgactttaaggtcatgaaagaaagaatgtacaagatcttctcaaacgctattgtcgtcagctattcacatctgctgcccgttgtgccattcaacgcattcaaccctcctccaccggaatttgctttgatgaaatcggatcccccaatcgctcaacgccgatctccccgccaccaaactgggcaagggagcggaggaccaagaattcggtctgaaactcaaccaagtgcttctgattcagtcggccagtcagactctcgaaagaggaagctggttctgagtgacgacgaagccgatgataccaccaggaggcctggagaccgagagacaaccaagaaactatcaaaacaggctactccaaagaagaaaacatccagtcgccctgcgccaaagatcaggaagtcttctaggaaaccatctgatatagatccgtcagggaaagactctgacccgactagcgtggacgcaaattcttccaaagaaatcgggacaactgccgaggaccgtccaagtgacaatcagccggcaaccgataatgtagaatccggtgatcaacccccgattggaaaccagtcggccgaagccgaagccggggttaatcaggagcccccgactagaaaccagtcggacgcaaggccaagccaagagattccagaggttggagctcaagcagatagccttcgcagtcaagacgccagcaataaccagagatctagatctcctttaaaggcatccgaatccactcatcctcatccagaaatcattatggtagatacattagggccaatgatcagtgatgaagaagaaattccccgcatacaagcagctgaggattcacgccctccgattctggtcaagtggtgggatgacaacatgcagcctcaagggaccgtgataaataagcaaaaagaggacgaagagttatgcctactgaagaaggcacttggtcaggcaacccacattgtaaataggattcatcttaggaacgaagctaaaacggaaaccttagagaggctagtccctcatctcgggaccctcgaagccaccaggagtctgctgcacgagacaaaagagcttgccaggaagaatgagcatgatctgaggaatcgaattgctgagctccaggaatcaaattttgaactgagtggctcatcaaaagtcaatgtagtgcaaactgccaagatatctcagttggagaagcagattcaaattctggaaaacgacaaggcagagctggcaagacaaagagacctggctttaaaggaagttgaagaccgcaagattaaatctcaagctcaattcgacgtcctggttagcaagatcaaaaaacttgaaggagcccgggatgaggttgataacgctgctgccccaattgttcaagcgatgttcttaaataacaacggcccgagtgcacttgatgcttccgaaattttcgacaagctgagagttgctccggatatatatttcaagaacatcaaagaagctggaagtatgggagtaagtatggcgttggcgatgactaaatccctttatccgagagttgatattgacgtcattgatggctttgcagacgggacgagcgaagaagctgctcttgacctcatcagtgatgcgcagaaagcggctgacaaaattgctgctgatgtagttgagagatttcaggacaccgatcttcgaccgactggtcctggtaattctgatgatgaaaagactgagactgattaa

SEQ ID NO: 33163 - DNA, 2055 bp, Oryza sativa
  Clone ID: PAT_MRT4530_37301C.1
atggcggaagagagagaaagcttcgagagccagtgggtgccctccgatgtgacagaagataatctgaaggagatggtggcgcacggcgttcttccagcaaaggagatcatcggatggcgaccatcattcggcgaagcattcccgacccccgatacgcgcgaaatcgtggtatttgctcatttcttctatggcggtttctcccttccaacctcaagattttttcggggaattctaaatttctacggaatcagcctgcatcatctgaatccaaactccatagtgcatatcgccaattttattcacgcctgcgaagcttttctgggcattaggcctcatttcaccttgttccgccgcagctttttcctcaaaccgcagccaaacaagagcaaaccatgtgttgttgggggggctggtttccaactcaggggaaccataagccaaaagtacttctccatgcccttcaagacctcgaacaaaggctggcacgccaactggttctatgttcaaaatcctgaacctgctctccccgagtactcctgtcttcctcctgtttatcgggatacttggaactcactgtcaacgggagatgaagctgcgcaagcaatagaactgatggagcgcatgataaagctgaaggaacaagttaacaatgaaggatattacacccaggaatttgctttgatgaagtcggatcccccaatcgctcaacgccgatctccccaccaccaaactgggcaagggagcggaagaccaagaattcggtctgaaactcaaccaagtacttctgatccaatcggccagtcagattctcgaaagaggaagctggttctaagtgacgacgaagccgatgataccgctaggaagcctggagaccgagagacaaccaagaaactaccaaaacaggctactccaaggaagaaaacatccagtcgccctgtgccaaagatcaggaagtcttccaggaaaccatctgatatagatccgtctgggaaagactctgacccgactaacgtggacacaagttcttccaaagaaaccgggccaactgctaaggatcatccgagtgacaatcagccggcaaccgataatgtagattccgtgaatacattaggaccaatgattggtgatgaagaagaaatcccccgtatacgagcagccaaagattcgtgccctcctattctggtcaagtggtgggatgacaacttacaacctcaaggaattgtaataaatcggcaaaaagaagatgaagaggtctgcctactgaaaaaggcactcaaccaagcgactcgcattgtaaataggattcatcttaggaatgaggcgaaaaccgcaaccctagagagactagttcctcatcttggaactctcgaagccaccaggagtcaactgcacgaggccagagaacttgccaagaataatgaacatgatctgagggatcggattgctgagctccaggagtccaatttcgaactgagtggctcatcaaatgttaatgtagtgcaagctgccaagatatctcaactagagaagcagatccaaactctggaaaatgacaaggctgagctagcaagacagagggattcggctttaaaggaggttgaagaccgcaagatcaagtctcaagcacagtttgatgtcttagttgacaagatcaacaagcttgaaggagccagggataaagtcgctaatgccgctactccactcatccaggccatgttcttcaataacaccggttcgagtacacttgatgctaccgaaatcttcgacaagctgagagtcgctccagatacttatttcaggaacatcaaagaagctggaagtatgggagcaagtctggcgttggcgatgaccaaatccatttatccaagggttgatatggatgccattgatggctttgtagacgggacgagcgaagaagttgctcttgacctcatcagtgatgcgcagaaagccgctaacaagattgctgctgatgtagttgagagattccaagatgtcgaccttcggccgactgggtctgataagtctgatgatgaaaaaactgatactgattga

SEQ ID NO: 33164 - DNA, 1862 bp, Oryza sativa
  Clone ID: PAT_MRT4530_37302C.1
gatcattgaacatcgacaacctttctcctgtaaatataagacatcgaaaaatatacgtaagcaagaagatccagcacggtgagcgcggcaagaagcaggtagaagtagtcgagatgtccccggttgaggtcgtcgtcgaaccagctggtgccgccgtccctcctcgtgacgacgtcgatggccgagatgaggaagctgctgatgaagctgccgacgccgaggacgctcaggtagagcgcgaggccgaggctcttgagcgcgccgggcacctggtcgtagaagaactcctgcatcccgaccatggcgaacacgtccgccgcgccgaacagcacgtactgcggcaccatccaccacaggctcatcggcaccgccgcgccggggtcggcgtccctcgccgcgctcagccgcctcatctcgacgagcgcggcgaccagcagcgtcaccgcgcacatcgcgatgcccgcgccgatccgctgcagcatggtgatcccggtggcgacgccggtggccctgcgcgccgcgggcaccaggacgtgctcgtagagcagcacgcaggggatgatgctgacgccaaggaagctctgcagcgccgcgggtggcacctggaacgacgacgacggcccgatcctccggtccagcgtcgccgcctgcttcgtgaacagcgtcggcggctgcgcgaacagcacgccgtagagcaggcacgtcgcccatatcgggaacagcctcgccatccccctcacctcctccgcgagctcgccgtgctccgcctcaaccgtggcgccgccgccgccgccgccttctcctcgccgccggctcttcctccacgccctgacggcctcgccgacgccggagaacgcgccggagccgccgccgtcgtagaaccggtacgtcctcgtcccgagcaggaacaccaggagcccgagcagcatcaccatgcccggcacgccgaagccgaggccccagccgacgttgtcctgcacgtagctcatcaccgccgccgtgacggtcgcgctggcgcagagcccgaggtaccaccagttgaagaaggtgctccgcgacgacgactcgccggggtccgtcgcgtcgaactggtcggcgccgaacgcctggacgcacggcttgtggccgctctgggcgatggccaccaaatagagagagacgtagaagaaggccctctgcacggaggaagaccggcaaacttgccggccatcgccggaggagctgcattgttggctctgaggcgacgagaacgtggacgacaacgctagcaagcccagtccctgccgttttccaaacagacactgagctgaagaacttcaattgcaatgggcaggtacataaatattttctgcaagacgcggtgtgatctgaccgtgatgtagagcacggaggaggcgacgatggtgcggtaccggccgagccacgagtcggcgacggcggcgccgagcagcggcagcatcgacgcggcgccggaccacgcgttcacggccgccgccgccgccgcggtggtctccccgaaagggccggtcaggtagctgatcaggttggacgagacgccgtagtaggcgaaccgctccgccacctccacccagattatgaacagcgcggacctccagccgccggtggcggggcggcggcgtgcggcgccggcgcgggggaggaggggatcggtggagcccgacgccatggttggccgatcgagcacgagcagtagtagtggaaggggtactgattcggaggcgtttggcgctttgtgatttgaggcaaaaaatctgtcgtgagacgtataccaaaatcggctttattttgcagtggttttgattggttcttgtctggttgttgggccgacgggtttacgtcca

SEQ ID NO: 33165 - DNA, 3039 bp, Oryza sativa
  Clone ID: PAT_MRT4530_37303C.1
atggcgacggcgtcgggctggggctggttgtcacgcatggcgtcggccgccgcgctcgcctcctccactgcctcgccgccgccgctcacctcgcctcgcctcccggcgctcactgcctccgccattgccgagaggagagagagattggcagggggttgtagctggctgttgcgtgcttctgcaagcgatgcgcggctgcgcccatggccggctggccactaccttatagctcgtcgttgcccctaccgctccgccgccagccgaggtgtcgacgtgtcgtgccgcgccgcctcccagcgcggatgccgcttgtctgcgcccgccattcgggagcctgacggccacacccctcttcgtgtccactccagctgccaccaggcaacagcagcgccgccgctggtattgccggattggggatttgatggaagtggaggagatggagaaagaaatttgggtgtagggtttgatactcaaaagccacgtttgcacaaaacaagcctaatggactttggcctgcttcctgttttcgatggcgcatgcaactcctcacgcccttgcacgtccttgcgctctctgtggctcagtgccctgcccgtagaaaaccgcgtgggtggggagtttagcaggcggcacgaggcctggagctatttttggaagcacaaacgttcaaggcttccagctgcttggcaattgctcttcaggatttctctacctattaactgttattgcctgtgtgggatatgcatgctcttcattactgtatatggtatgctcttcatgaagttcacattcatggcggaagaaagagaaagcttcgagagtcagtgggcgccctccgatgtgacggaagacaatctgaaggagatggtggcacacggcgttcttccagcaaaagagatcatcgggtggcgaccggcatttggtgaggtattcccgacccccgatacacacgaaatcgtggtatttgctcatttcttctatggcggattttctctttcaacttcgagatttttccggggcattctgaacttctacgggattagcttgcatcacttgaatccaaactccatagtacatattgccaatttcatccacgcttgcgaagcttttctgggcattaggcctcatttcgccttgttccgccgcatattcttcctcaagccccaaccaaacaaaaacaagccgtgcgttgttgggggagctggtttccaactcagaggaaccttgagccaaaaatatttctccatgcccttcaaaacctcgaacaaaggctggcatgcgaactggttctatgttcagaatcctgagcccgcacttcccgagtactgctgtcttcctccggtttaccaggacacatggaactcattgcctatgggagatgaagctgctcaggcagtagaactgatggagaggatgataaagctgaaagaacagggtcttcaaggagagcagatcacccggcactttatcaagtgtcggttagctccaatcaaagaaagatcacgcacagcttttgagtttgatggcaagcatgatccaaatcgggaagatccagattctcttgactttaaggtcatgaaagaaagaatgtacaaaatcttctcaaacgctattgttgtcagctattcatatctgttgcccgttgtgccattcaacgcattcaaccctcctccaccatcagactctcgaaagaggaagctggttttaagtgacgacgaagccgatgatactgccaggcggcctggagaccgagagacaaccaagaaactaccaaaacaggctactccaaggaagaaaaccaccagtcgccctgcgccaaagatcaggaagtcttctaggaaaccatctgatatagatccgtctgggaaagattctgacccgactagcatggacgcaagttcttccaaagaaaccgggccaactgccgaggaccgtccgagtgacaatcagccggcaaccgataacgtaggatccggtgatcaacccctgactggaaaccagtcggccgaagccgaagccagagttaatcaggagcccccgactagaaaccagtcggacgcagggccaagccaagagattccagaagtcggagctcaagcaaacagccttcgcggtcaagacgccagcaataaccagagatctggatctcctttaaaggcatccgaatccactcgtcctcgtccagaaatcattacggtggatacattagggccaatgatcagtgatgaagaagaaattccccgcatacaagcagctgagggttcacgccctccgattctgaggattcatcttaggaacgaagttaaaacggcaaccttagagaggctagtccctcatctcgggaccctcgaagccaccaggagtctgctgcacgaaacaaaagagcttgccaggaaaaatgagcatgatctgaggaatcgaattgccgagctccaggaatccaattttgaactgagtggctcatcaaaagtaatcaatgtagtgcaagctgccaagatatctcagttggagaagcaaattcaaactctgggaaacgacaaggcagaactggcaagacaaaaagacctggctttaaaggaagttgaagactgcaagatcaaatctcaagctcaattcgacgtcctggttggcaagatcaaaaaacttgaaggagcccgggatgaggttgctaacgctgctgccccaatagttcaagcgatgttcctcaataacaacggccctagtgcacttgatgcttctgaaattttcgacaagctgagagttgctccggatatatatttcaagaacatcaaagaagctggaagtatgggagcaagcatggcattggcgatgactaaatccctttatccgagagttgatattgacgccattgatggctttgcagacgggacgagcgaacaagctgctcttgacctcatcagtaatgcgcagaaagcggctgacaaaattgctgctgatgtagttgagagatttcaggacaccgatcttcgaccgactagtcttgatatttctgatgatgaaaagactgatactgattaa

SEQ ID NO: 33166 - DNA, 615 bp, Oryza sativa
  Clone ID: PAT_MRT4530_37304C.1
ctatatcacttttggcagcactaggatagcaagattcatctctacgaatggctgaccagttttaacttggtatattagccgccccataatcggtaagtggaggaggataaggcccatggcgctttctggtaccggccgacggttcctccgcgtcgccgccggctcctcccgcggcaccccacccccatcccggcgcttctgtccgtggagatcggcggggtagccggctcgcaaggtggagcatcgatgtgacgtgatgcagcatttggggagtctttggtagaggtggagcggtggagattccgacgccgccgaagccccacccagtgcacatcggcgtcgcgactcccgccgacgccccgccatcttccgaccggcgccgccgcccgcatcactgccgacgcctcgccatcgcgcggccgccacgccaaccgcgacgcccgcctcgccgatctcctccgcggtcgctgccgccatctccaccggccaccgctgtcctcgcccactccactggctggagctgcttccctcaggctgccggaggtagctcgctgtgccaggttcaagaaatacaggattcatgtgatgagaaaaaggaaaatagggttcaactga

SEQ ID NO: 33167 - DNA, 2331 bp, Oryza sativa
  Clone ID: PAT_MRT4530_37305C.1
atggcagaagaaagagaaagcttcgagagtcagtgggcgccctccgatgtgacagaagataacctgaaggagatggtggcgcacggcgttctcccagcgaaggagattatcgggtggcgaccggcgttctgcgaagcattcccgacccccgacacacacgaaatcgtggtattcgctcatttcttctatggcggattttctctttcaacctctagattcttccgggggattctgaacttctacgggattagcttgcatcacttgaatccaaactctatagtgcatattgccaattttatccatgcctgcgaagcttttctgggcattaggcctcatttcgccttgttccgccgcatcttcttcctcaagccccagccaaacaaaagcaaaccatgcgttgttgggggagctggtttccaactcagaggaaccttgagccaaaaatatttctccatgcccttcaaaacctcaaagaaaggctggcatgcaaactggttctatgttcaaaatcctgagcccgcactccccgagtactgctgtcttcctccggtttaccaggacacatggaactcattgcctatgggagatgaagctgctcaggcaatggaattgatggaacgcatgctaaaactgaaggaacaaggtttgcagggagaacagatcactcggcacttcatcaaaagtcgattagctccaatcaaagagaggtcccgcacagcttttgagtttgatggcaagcatgatccaaatcgggaaaatccagattctctcgactttaaggtcatgaaagaaagaatgtacaagatcttctcaaacgctattgttgtcagctattcacatctgctgcccgttgtgccattcaacgcattcaaccctcctccaccggaatttgctttgatgaaatcggatcctccaattgctcaacgccgatcacctcgccagcaaactggtcaggcgagtggaggaccaaaaattcgatctaacgctcgaccaagtgcttccgatccagtcggccagtcagatgctcgcaagaggaagctggttctaagcgacgaggaaggcgatgataccggaaggctcggagaaaaaggagcgaccggaaaatccccaaagccaactaatccgaagaagaaaacctccagtcgtcctttgccaaaaatcagaaagtcttccagcataactcaaactcgtaggaagccgtctgacatagatccttccgaaaaggaccccgagctggctgacatagaggcaaacccttcaaaagaaaccgggccaactgcagaagatcgtccgagtgacaaacaaccggcaaccgacaatgtagaacctagcaacgagcccccgactgggaaccagtcggccgaagctgaagtcggtgctaaccaggagcccccgactggaaaccagtcggatgcagggccaagccaaaagattcccgagattgaagctcaaacgaacaggccaataattggtgatgaagaagagatcctccggatacaagcagctgaggattcacgccttccgattctggtcaagtggtgggatgacaacatgcagcctcaagggatcgtgataaataagcaaaaagaggatgaagagttatgcctactgaaaaaggcacttggtcaggcaacccgtattgtaaataggattcatcttaggaacgaagccaaaacggtaaccttagagaggttagtccctcatctcgggaccctcgaagccaccaggaatcaactgcacgaagcgaaagaacttgccaggaagaatgaacatgatctgagggatcggattgctaatctccaggaatcaaattttgaactgagtggctcatcaaaagtgcaagctgccaagatatctccgttggaaaagcagattcaaattctggaaaatgacaaggcagaactggcaaaacaaagagacctggctttaaaggaagttgaagaccgcaagatcaaatctcaagctcaattcgatgtcctggttggcaagatcaaaaaacttgaaggagcccgggatgaggttgctaacgctgctgccccaattgttcaagcgatgttttttaataacaacggcctgagtgcacttgatgcttctgaaattttcgacaagctgagagttgctccggatacatatttcaagaacatcaaagaagctggaagtatgggagcaagtctggcgttggtgatgaccaaatccctttatccaagagttgatattgatgccattgatggctttgcagataggacgagcgaagaagctgctcttgacctcatcagtgatgcgcagaaagcggctgacaaaattgctgctgatgtagttgagagattctaa

SEQ ID NO: 33168 - DNA, 178 bp, Oryza sativa
  Clone ID: PAT_MRT4530_37306C.1
cggtggagcagaggccccgggaaaaggcgccggaagaaaggagagcgacgaggacgacgacgacggcgacgtgatcatgcgcgacgccgacgcaacggagtacgccctggtcgtggaggttctcggctctcgcggtggaatcttgcttgctgctgcaaccacaggagaggaaatataa

SEQ ID NO: 33169 - DNA, 474 bp, Oryza sativa
  Clone ID: PAT_MRT4530_37307C.1
cgggccttggggttcatttttaaaacccccaaaaaattcccgggttaaaagcggggaaaaaaggggggttttttttggcaaaaaaaaaaaggggggggcccaaaggcaccgattaaaattttgggtttgggggggtttttttttgggggtccaaaaagggggtggggctttagccttccaaaaggttacacagggaacgggtaaaaaggaagggggccctgggcccccaaggggacaaaggggggaatttgccccggggaaaaaaaaaaaatttgggtcaccccaaccccaaaaaggccccgcccaggggggtaaatttgctttggggcccgaattggcaaaccccggggaggggttccctttttaagggggtcccggaaggaacccaaacccttccttggaaaaaagcggaaaggggggttataagagggccccccaaaaaagttcccccccccaaaaaaattatttgggggc

SEQ ID NO: 33170 - DNA, 213 bp, Oryza sativa
  Clone ID: PAT_MRT4530_37308C.1
gggaaagggcccaatcaaatctcatcttaaactcacattattttaactaacaacaaaaggtgctaaacatttttggtattggagtatgttcacggcgacccactataaccaatgcttaatctccaagttgcttcatccgaagtaaaagggaggaaaataaatgactaatcattcacaaaacatctatcacttcttaaccccaaaaaaaagatt

SEQ ID NO: 33171 - DNA, 2403 bp, Oryza sativa
  Clone ID: PAT_MRT4530_37309C.1
acaccagtgtgcaattgaccgcctccggagttgattgagttcatatcgcatcttcttgttggatgtgatgacacagataataattacatccgaaaaggcgtgcctgaaattcctctgagatagagctcagattttaatcgcatgatgtttgcttgtaccaacagccatgggttcaggactcttcaagcctcgtgttcatccggacctccgtgatgttttctctaagatgtctttctttgacaagattgggtttctattcattcatgcatttgacaagagaaacctgtggcacaaggtgcctgttccgatgggtttgttctaactgaacactcgccgtgcgctgctagaaaaatagatcccgctagctgatgggaggacttctcaatgtgctatttttgatcccaagtatgacatgtaccgtacttaggatggcatgtactactacttccattatgaagatacttttaagataaaacactgtaatttaggagaaacattgaatcggtagaacaacagaattgtattgttaagtcgataaccatttattgcgccaataaaatttttacccaggaaagaaaacaaggacacagggaaacagttcaatatactagcagctgcatggatacagttcatggttcatgactggatggatcatatggaggataccggacagattggaatcacagctccaaaagaagtggccaatgagtgcccactcaaatcgttcaagttccaccccacaaaagaactgcctacgaattctgatggaataaagattggtcactacaatatccgcacagcttggtgggatgggagtgcagtatatggtaataatgaggaaagggcagaaaagctcaggacttatgttgatggaaaactagtgatcggagatgacggtcttcttttgcataaggagaacggtgtggcattatccggcgacattcgcaacagttgggctggtgtttcgatcttacaagctctttttgttaaggaacacaatgcagtttgtgatgcaataaaggaagaacatcccaacctatcagacgaagaattatatcggtatgccaaattggtcacttctgctgttattgcaaaggttcacactattgattggactgtcgagcttctcaagacaaaaaccatgagagctgcaatgcgcgcaaattggtatggattattgggtaagaaaataaaagacacatttggtcacataggaggaccgatattaggtgggcttgtgggactgaagaagccgaacaaccatggcgtaccttattctttgactgaagagtttaccagtgtttacagaatgcactccctaataccaagcactctcaagctcagggatccgacagggcaacccgatgcaaataattccccaccatgcctggaagacatcgatattggagagatgattggtctcaagggggaagaacagctatcaaaaatagggtttgaaaaacaagcattatcaatgggatatcaagcttgtggtgcacttgaactatggaactatccaagtttcttcaggaacctcattccacaaaatttggatggtaccaatcgatctgacagaatcgaccttgctgccctagaagtataccgagacagggagagaagtgtaccaaggtacaatgagttcaggaggagactatttctgattccaataaaaagctgggaggatctgacaagtgacaaggatgcaattgaaaccataagagcaatatacggagatgatgtagagaaattggatcttcttgttggtcttatggcagagaaaaaaatcaagggatttgccataagcgaaacagcattcaacattttcattttaatggcatcaaggaggctcgaagcagatcgattttttacaagcaatttcaatgaggaaacatacaccaagaaggggatgcaatgggtcaaaacaacagaaggcctacgagatgtgatcaaccggcactaccctgaaatcagtgccaagtggatgaagtcctctagtgctttctctgtgtgggatgcagactactagtgcaaaaattaaaggccccctgccatattatttggcaagttctatgaaatattatttatttacagaattatggtgtttgttcagtgtaaatatagttaaatatgtcagtgtaatatatgtaataggattcatcgcacgacacaagttgtatgctcatttgtttacaatttattgcacattattatttgttcattgtaattaaatatggctgggaaaataagtaggaggagaccatataacatcttcctacaatcttctgtaaaaaaaaaaaaaaaaaaaatttcttttggttttggttacagtgtatacttgtacatctacttatacccattaaagaaatcttgggcttgatcgtccaaaaaaaaaaaaaaaaaaaa

SEQ ID NO: 33172 - DNA, 237 bp, Oryza sativa
  Clone ID: PAT_MRT4530_3730C.1
gtccatatctctcatttttattttttttttttgatcactatttattttgtttttatttcttttattatttattatttgaatagagcaatatcccctagcatgcaacacaatggggcccaaaaacggggagctacccagcaaaccagcaaaacctagactggccgccggcgagaacaccaaacgggtggggcaaaaccccttgcatggacgggcgcaacaaaataaactggcgcaccc

SEQ ID NO: 33173 - DNA, 886 bp, Oryza sativa
  Clone ID: PAT_MRT4530_37310C.1
ttatttgttgaagaaatctgctggcatgttgcttggatagttggatgtcaatttgttcagtgtgattttcagaaactggtaaatttgctggtgctggacttggttgcattgagcatgatcccttacgcaattctttgggatttttatggaagaagcataaaaaatccccctccgtcttgatacctttatgctgtagtaacttgtgcagaatccccggccatcctttacggcaaaagattcagatattccttcgaggattttttctgatatgctatcatcagctgccatgactcctaacctgaactgcttgcttggaagaaaactcgagttatcctggaatttggcaccatagaggttagccacaccattttccagccttagataaagttcgttggcaaacaaaggtagttttccaggccgcccatatactatgttctgaaggaaggagtctctattccactgcactttattgtccttgttaaactcgccattcatgacaacaatcctaacttgcattgaggataaaggtccatttgtgataatcttattatcatgatcatatatggctactttgataggactgccgtcatcagctgttatgacgtgtctcgagaacttgtcgttgcaacatctgtgattagtgtgtttcttaacatggtccccaggagtacttgtgtccgaaatcaaggtgttgaactgcccccagatctgttccatcctcctctgttgctcactgatctgctcattgagctgcagctgggaattttggtaaaacagttgcatctctctctgtaagactttgcgctcttcaatgaaaccttttgacatacattgcatttctttcttgagtatttcaatctggctcttgtagaaatcttgtgtctcc

SEQ ID NO: 33174 - DNA, 353 bp, Oryza sativa
  Clone ID: PAT_MRT4530_37311C.1
atggcgaagggtatggcgtgtggcgaaacctcttcgcccgcaggccttgacgccatgccatattggcactttggcgaaaggcgtgggttggcgaaacctgttcgcccgcagcccttgacgccgttccttattggcactatggcgaagggcgtgggtggccgaaacctcttcgcccgcaagcccttgacgccgtaccttattggtactatggcgcaaggcgtgggtgtggcgaaacctgttcgcccgcagcccttgacgcagtacgttattggtactatggcgaaggcgtgggtgggcgaaacctggtcggccgcaccccttgacgccgtacctcattggtactatggcggaag

SEQ ID NO: 33175 - DNA, 978 bp, Oryza sativa
  Clone ID: PAT_MRT4530_37312C.1
atggcgaaggctggaaagccgcgtcggtattccgaaagtaaaggcatctcgggcgaaggcatctcgggcgaactacaaagacttcgccatgacgagttcggcatcaaggaggcccaacaggccgcccctggccttttaggcccaccgaaaaggcgaaatggaacccctttcaccacacccacacccttcgccacagtacccgcgcggtacggcgacaagggcttggggcgaaagtttcgccaacccacgcccttcgccatagtgccaataaggcacggcgtcaagggctgcgggcgaagaggttggttgcgggcgaacaggtttcgtccacccacgcccttcgccatagtgccaatgaggtacggcatcaagaggtttcgtccacccacgcccttcgccatagtgccaatatggcacggcgtcaagggctgcgggcgaacaggttttgtccacgccatacccttcgccatagtaccaatgaggtacggcgtcaaggggtgcgggcgaacaggtttcgccacacccacgccttgcgccatagtaccaataaggtacggcgtcaagggcttgcgggcgaagaggtttcggccacccacgcccttcgccatagtgccaataaggaacggcgtcaagggctgcgggcgaacagcgtcaagggttgcgggcgaagaggtttcgtccacccacgcccttcgccttagtgccaataaggcacgacgtcaagggttgcgggcgaacaggtttcgcccacccgcgccctttgccacagtaccaataaggcacggcgtcaagggctgcgggcgaagaggtttcgccacacgccatacccttcgccatagtaccaatgagcttttgccacacgccatgcccttcgccatagtaccaataaggtacggcgccaagggctgcgggcaaacaggtttcgccacacccacgcctttcgccacagtaccagcgaggtacggcgacaagggctag

SEQ ID NO: 33176 - DNA, 798 bp, Oryza sativa
  Clone ID: PAT_MRT4530_37313C.1
atggcgaaggctggaaagccgcgtcggtattctgaaagtaaaggcatctcgggtgaaggcatcttcggcgaactacaaagacttcgccatgacgagttcggcatcaaggaggcccaacaggccgcccctggccttttaggcccgtttcgccaacccacgcccttcgccatagtgccaataaggcacggcgtcaagggctgcgggcgaagaggttggttgcgggcgaacaggtttcgtccacccacgcccttcgccatagtgccaatgaggtacggcatcaagaggtttcgtccacccacgcccttcgccatagtgccaatatggcacggcgtcaagggctgcgggcgaacaggttttgtccacgccatacccttcgccatagtaccaatgaggtacggcgtcaaggggtgcgggcgaacaggtttcgccacacccacgccttgcgccatagtaccaataaggtacggcgtcaagggcttgcgggcgaagaggtttcgccacacccacgcccttcgccatagtgccaataaggaacggcgtcaagggctgcgggcgaacaaatttcgccaacccacgcccttcgccatagtgccaatatggcacggcgtcaagggctgcgggcgaagaagtttcgccacacgccatacccttcgccatagtaccaatgagcttttgccacacgccatgcccttcgccatagtaccaataaggtacggcgccaagggctgcgggcaaacaggtttcgccacacccacgcctttcgccacagtaccagcgaggtacggcgacaagggctag

SEQ ID NO: 33177 - DNA, 129 bp, Oryza sativa
  Clone ID: PAT_MRT4530_37314C.1
atggggatggcttcgaggctgtttctagaatcgatcaacgtgcttcacaaggattgttacgatggagataaagctcttagaaagatcaaatcaactggcacgctcaagaacctaaaagcaagattttga

SEQ ID NO: 33178 - DNA, 408 bp, Oryza sativa
  Clone ID: PAT_MRT4530_37315C.1
atggcgaaggctggaaagccgcgtcggtactccgaaagtaaaggcatctcgggcgaaggcatctcgggcgaactacaaagacttcgccatgacaagttcggcatcaaggaggcccaacaggccgcccctagccttttaggcccatttgccatagaccaggcccagcctatcagcccattaaaggcccatatctggcaccgtccgtggggaacccagaccgaaagggcgaaatgggaccccttttgccacacccacacccttcgccacagtacctgcgagcttttgccacacgccatgcccttcgccatagtaccaataaggtacggcgccaagggctgcgggcgaacaggtttcgccacacccacgcctttcgccacagtaccaacgaggtacggcgacaagggctag

SEQ ID NO: 33179 - DNA, 208 bp, Oryza sativa
  Clone ID: PAT_MRT4530_37316C.1
gttgagcggtcaaggctgcgtcgtcgtcgtcgtcgtcgtcacctgcagcggaggaggaggaggaggagagaaggttcataggaggaggaggttgcgatgcactatatagctgcatcttatctcatctctccctgcctgtctgggggcccattctattgataggtactttctggtctctatcgttatcgtcttctatcaccacgtttct

SEQ ID NO: 33180 - DNA, 612 bp, Oryza sativa
  Clone ID: PAT_MRT4530_37317C.1
atgtcactttcacccctcaccagtggcgggaaggaggtggccagccacgacagtgtacgcagccggccgacggcatggcgagaacgccagcgagaggtcctaattggtggcttggtgcctaatgctgacaaggcggcgaccatcgcgaggagcgggcacatgaaaacgcgactgagaggagcaagaaaagggggaaagagagggtcgagcacgcggttcgtcctcgcgctccaggtgttcgaccggcgaccgaaggtgttcatccgtgtttcaaagggcgcggacgctcaccgagctgatgaaggtgcattgaatgccttcaatgcgattcccgtgcgccgaccgaaaggcgacgcagaggaatgtcggggtggcggcggcaatgggacggcctccctgtgcagcagggcgtgtggcgacgcggtgcggtggcggcaggccggggaacaaatggaggggaagggcaacgagtccgccggtggaattggcgcggcggccgttagggaggagcacgggggcggcgcaaaggctctgtgggtggcacgaccttgccgagagagaggaaaggggatcgagccccacccttgcgccatgttggctcggctcggctga

SEQ ID NO: 33181 - DNA, 443 bp, Oryza sativa
  Clone ID: PAT_MRT4530_37318C.1
attggttaattcgggaccggtgcccggaggcgtacaagcgacccagatatgcagacggagaaccgtatgggaaaatgagggtaataagggcaaggcggataaaagggtgaaacagtaacaagcacaaaaatctaaagagcaaaaaggctaaagggaaaaaccgggaaaactgaaagagcgaaaaaactaacaaaaaaaaagtgggggcgactgacaaattgccagcctgaaaacctggaaggctggctaaataaatgaattgaagaacgggccaagggagggggagaggcatataaggacgccagggcgccagtgtgtaagaccatttaaacaggcaaaacggaaagggcttatagcccttgaccgcgagagggtgaaagaggggcagcaaggaaagagtgcccaaagggggaaaaagccgaaatggccgggggtgggggggg

SEQ ID NO: 33182 - DNA, 840 bp, Oryza sativa
  Clone ID: PAT_MRT4530_37319C.1
atggcgccgtcggtgaggaggagggagcgggctagggggtggagcgagcctgctatggcggcggcggcggtggggggacgacgatccgcgtcagatctggaagggagggccgccgccgcatccaccctccgcgccgcctccacccttcacctccgcctccaccggatctgggaggaaggaggggagccgccgctggctccacccctcgcgcagccaccgcctgaagccgccgccgccaccgccaaggacggagtcgaagacgccatcggaaaggagtgggccgagggcgtcgtcgccgcccacacaaggttcgacgcgtgggcgcgatctagcctcgccccgagccgcgtgttgccgtcgtcgagcgccgtgtgcgcctgggcgaaggaggacgcgcaaaggagtttgtggggaggagggcgaaggacggctggcggcgtcgctgaggaggaggaggaggcggcttcgactgacatgaaggttttggttctaatcgtcctcatcgacgacattgtcaaccctaacaattcttctgccatccctaacgacgtgcaacttcttgtttgtcgggataacatttggattttctcattcttcgataaggtgtggcaagttgaagggaggtacactcttcctgtgtccggattagttgctgtagcagcagcaacgcacaagcagcagcaacggcagatcggcagcagccgcagcagcacatgcagcaatcctagcggcagcagcagcaacacgagacaaaaatcagatcgacagcagcaactcaccaaggagacgatggctgtggtaaccggcgtcgtacgcacagcggcggcggcgccgaggtga

SEQ ID NO: 33183 - DNA, 784 bp, Oryza sativa
  Clone ID: PAT_MRT4530_3731C.1
attgaaggtagagctgctgcaacatcaggccccgtagtggtggctcaggagctctgcgacctcgatccgacggcaggtgcacggcgaactcgatacggtgcggcggggtcgtggcgagatccatcctgcattcgagttgcgtcgagctcaatccaaagcttcagagggaggttgagcagtggtagtgggacgcggcacgatcggagcacgagtggtggacgcaggcgcaccccgagcttactgacggcagaaccagcagtgatcatcttcagaatgtgttactggttctgcttcaatgggttcacattcgactccatctttactgagaaccgtagggaagtcaccatcatcaattgtagtgtaattcaatgcagccgtgatatgctcattctcttggcatgcttcagaactagacttatttgataaagttggatcattttcttcttcttcttctgtaggaggaaagtcatacaaatcacgtggcttcgtcttgactacaacaaaccatttagggtctctagtatctttgacataatatacttgctcagcttgtgttgccaaaatatatggctcatcaattggcactgtacgggaagtattaattaaggattcttgtttgatccttcagggcgagctttgttttttacaaaagacttcaaccttcgcaaaaacctttcaatgggatacatccaccgatactggacaggtccaccagcaatagcttcctgggctaaatggattggtagatgcaacattacatcaaagaatgaaggggggaaaatca

SEQ ID NO: 33184 - DNA, 343 bp, Oryza sativa
  Clone ID: PAT_MRT4530_37320C.1
aaatcaaccaaagaattaacatgattttgtgtaatttagtatggtccatggatcaagtaccacaaaactatacaaaaagaatgatattgcatttcacacttcctatgaaagaacgacgatggatttctgtacagaaatcaggtagcttaatctacaagtgagtcggcaatatggaatattttgaacaagatgctggtggaagtacatgtagtcagacgactgcatcagatcgagtagggaattcaaggccatgaagtgctccaatgttgtgcagatcctcagcagagtacaatggaagaaaccagagcaactttttggtgccaaaaacctgctccaagttttt

SEQ ID NO: 33185 - DNA, 420 bp, Oryza sativa
  Clone ID: PAT_MRT4530_37321C.1
atggtggtcccctacctcgcccacgcggtattggcaacaccagcacgcgcgttcgtcccgagttgtcccggggtctggcaaaccctgtatgacgtctcgtccttcacgattcgactacatcggctcttcggcatcatctacctcaatgattgtcacgatcgtgtcaccgtcatcgtctccagcgcgtcctcacgcaccttggtccacgacgccctcccgtgcatccacgaccactctacggcgccccatgcgtgccctacggctcgactacctcgacatcatcggctcctcaattttggctacatcgaccacgtcaactttacgcacggcttcatctaccatggctccctcgcaccctttgctttggctacgtcaactactacacaaagggctatcatccgtattgagcattcttgctag

SEQ ID NO: 33186 - DNA, 545 bp, Oryza sativa
  Clone ID: PAT_MRT4530_37322C.1
gcctcaccacctcagctcgacaaagcataactcacacaagggattaactcatcactcacttagcctaattaaatcttcgatcatgatcccataacgtgcggcaactgcgactgtgctgacaagaaccaatgcgtgaaaaaaggtaccagctatggcgtcgtcatacatgaagccgacaagagccacttccaggaggccgccgccggcgaagataacggtgattgcaagtgcggcaccagctgctcctgcacacgactgctactgcgtgcaagtgaagtcacaaatgaacctaacactcgccgccggcgagtcacctaccttaattaatccacaatagacaccatcccatatgagtgtggcttgtgtgtgtgctgattattgctgaattaaacccgtgcgttatcgattaagtaagcagctgtgcgcttccgcgactatgcgtgtatcaacgtatgaatttgtgtgatgcgatgtacccgtgctattctcactgaaattaatcaatcgtgtattcgaggggattgcctagccaaaacaaacaattg

SEQ ID NO: 33187 - DNA, 3384 bp, Oryza sativa
  unsure (1)..(3384): unsure at all n locations
  Clone ID: PAT_MRT4530_37323C.1
gttctatcggtactctctgaacagggcagagaaattttttttttatcaaaaaggacgtgttccatttgaactgacccacgtcatgttggaaaaaattacaaataatagctaggctataaataaatagcacatcccatattacagttcaaagtgttaaacctaaaaggaaacaaaagaccacgttgacaaaactagctgccatccaaagaatgttcttttccatatatcaagacacgacacagagactaactgacaaatgacgtttggcaccaacctatttttcccatgaactggaggcgaacttgaaacaaattttgaccagtttcagatgttgcgatgaccagcgtgcggttagatgatggtgatcatttttgtacagggatagaccacaatggatggcaaaaatagtacactctttttattgtacagcagtttgcttcggacatgtccatgcctgatgagcaggtgaggcttgcttgtctttctgaccgatctgactaacaactgttctggtcaactatgccattttagcccatgagatttcctgccccttcactcatttgctttgatttcatcggttttagtttcaacatccacagacggaacttccttagttggtaactccacgtcttcgttatccacagtttgttcagacgatactgctgtgttggctggatcaatgctactatcttcaggatctggcaaaacttctgagacagaattacccgaatcagatgagccagtgggttcatctgcagttctctctgtctgcacctcatcagaagatggggctgaagatactggtgctgcctctgcagcttctgtactagcttcagcatcaccatttgaaacatccaggtgtcgctcaatcccttcagcgttttgtagttgctcatcctccgtgctagtagccgggtgtttagtaaattccgctgcatcttctgcctcctcgataggaccattcccaagattgacagtatccatatgatcctcagtaccaatgacgacttcaccatcatcagtttcctcagtgtctggggaaatctcctctgaattaggtgaagacgaaggaaccgcagccaaacggtcagtaatacctctctctccatcaaatgtaaaccaattcgaatttgtaaagagggaaccatcctgatcatctcccagtcgcagtgaagatattacgacctctgctgattcatcatcaaaatagacatcctcatcatcccgttcaagtgtcccttgattctcttccatatcatcattgctatatatcccatatcggaatgcctggctcaagttattagcaagagctgccacatcataatccctgtctcggaagtcatcatcatcactatccctaccacggtcatgaagtgatgttgggcgcccacaagcccaatgataaacattctccacctcattacgcttgactagaacatctgtttgccagtcaacccactcactattttcctgcaagtgaatctggattgtgccgttactgcttcccaactgaataagcttgttggctattcttgtcatgtgaccaatattcccaattttgggaatcgatttaccatctgaaggtatagtaggcccagtagactctgttgacaaagaagaaagtttttccgcggcaagaattttaccaacaatgtcacagtcattaagaacatgctcaacaagttcagttcttttaccctccaggcaagagacaataatattctcaacatgatggtgcaaaaaattgttatatgggtactcgaagaataaatcaacagatcgctttattgccgattgcctgataagctctttctcagcagtttcacggccagctgtctctggtaggccaattgcagcaccaatcctattaggtttattagacacaatccaatgaggtggaccagactggcaaaggtcctcggtccctgcatttctgtactccatctggttcaagactgtactcatcaaatgatgttttccaagggctgggcgtaaacatccatatatcgaaggccaaacactttcagcgtcagaaatatccaataacttcagcaaattgcctaggctctcaagcatgccatcaacagtctctggactggcagtgaccaacgccccgtgacttaagttgcttctaaatgcttgataggaagctgatgccaatctttttggatccaacagagatatgcacactgacaatgaatgaactagaacggatttgggccttgattcttcaagtgcatgacgaaatagcctcccaacaaaacttgggctgcatatctttgcagcaagagatggaggagcacatcgagtcacggcacaaagaatttcggcagcattggcatgcacttcaggggagtccgatgagctaaacttatcagcaatcatttcaaggacatctgtattttctaaccactgcaatgtatcgccatagtttgagtatatggtctcatcagcaccaatcaatcgtattaacacctccattattgatgtgatgccaatcaggtcaacgagttggacaactatttctggatgtccaagtgtaagtgcataacagtttatcttaagcagatatctcaaagaaaatggttcagtgtggatgattagcttgttccagttaaccaaacagcatataattggaagaacaacacaactaaagtgaacagaagacaggacagatgcatcgaatatttgaatgtcagacctagtcagctgaacataagccataagaggagcagtcttccgcagcatcaaacatattaccaccttgctgaagtaaccagataacaatgtgctatgtggatgatcggatttcacaaatgagaaaagcaattccattaactgttcatcctcgactagggtcctcaaaatgacatcaatttcacatgtaaatatctcacaagcaatgaatggaaacttgaaagagcgctttttttcagcatcatctggtacttcttccacaacataacgaagcaattgctccacctgggctctgtcacgcaagaaatttatgagtcgtgtattcagagctttgcactcttgaataatttcatcctcgtcaagaagttcttccagtgtaaaattttccttgtctaggattgtatccacgggcgaggccgcggacaggccggtcatgcgccagaacatggcggcggagacgaaggcggatctagggtctccggcgccggcgacggcgggcgggggtgggaccacgaatccgcggccggcgccgcgcgaatccgggcgtgggcgtgcggattccgcgcccggcgagggccggtggcgggggncgccggatcgagggggaggccggagcggatcgaattgggatcgcgagggcgagggtgggggagggggaggaggcgcacgagaggaggagaaaagaac

SEQ ID NO: 33188 - DNA, 429 bp, Oryza sativa
  Clone ID: PAT_MRT4530_37324C.1
gatttgttagaattttctattatcttgttttcgtggatttcccatgtacgccgcagtagtgcgtccatatctagacaccattatagatatcaggggttttagattagtttacacccgaacaaaattatcaatatatctacaattttgtgttctttacttttctgttattttctattttcttttcatgacggaggtccagtaatcctaaaatttggttaatctttgtcgttttgcgctaaaaaagggtcatgctttttcacgaaagtaaggacattatcttttgctagtttgttcggaaactagtcgttcgtcgtcacgtaagtacggtatttatttttgcaaatttgctcttaaattagttcggtggatttacaaaagtgaattaatttaaaattaggtttacttccgggttttatctttggttttgct

SEQ ID NO: 33189 - DNA, 398 bp, Oryza sativa
  Clone ID: PAT_MRT4530_37325C.1
ctcgtttttattttaaaaaaaaaaaaaaaaaaagggggaatataaaaaaaaagggggggaaaaaaaaaaaaaaaaaaaaaaaaaaaaaaaaaaataaaaaataaaaaacaattgggggggcggcctttatgtttaaaacttgcttacctcctcggggggccgcgtttttagtattccctgtgtcccccccccatttcctcggcgggccgttttttttttgggccccggaagtaaaaatcgtggggccccctttttaacccgggtgggggggaaacccccgttgttcccccattttatttcgttgggggccccccccttttttccctttcggtgtataaggatagggggcccggacattggccctctttcccagtggcgtccccccggagggggggggg

SEQ ID NO: 33190 - DNA, 1623 bp, Oryza sativa
  Clone ID: PAT_MRT4530_37326C.1
atggcggaagaaagagaaagcttcgagagtcagtgggcgccctccgatgtgacggaagataatctgaaggagatggtggcgcacggcgttcttccagcgaaggagatcattgggtggcgaccggtattcggcgaagcattcccgactcccgatacgcatgaaatcgtggtatttgctcacttcttctatggcggtttctcccttccaacctcaagattttttcggggaattctgaatttctatggaatcagcctgcatcatctgaacccagactacatagttcacatcgccaactttattcatcatgacccaaaccgtgaagacccagattctcttgacttcaaggtcatgaaggaaaggatgtataagatcttttcaaatgccatcgttgtcagctactcacacttgctgccagttgtaccgttcaatgcattcaacccccctccaccggaatttgctttgatgaagtcggatcccccaatcgctcaacgccgatctccccgccaccaaactgggcaagggagcggaggaccaagaattcggtctgaaactcaaccaagtgcttctgatccagtcggccagtcagattctcgaaagaggaagctggttctaagcgacgacgaagccgatgataccaccaggaggcctgaagaccgagagacgaccaagaaactaccaaaacaggctactccaaggaagaaaacatccagtcgccctgcgccaaagatcaggaagtcttccaggaaaccatctgatatagacccgtctgggaaagactctgacccgactaacatggacacaagttcttccaaagaaaccgggccaactgttggggatcacccgagtgacaatcagccggcaaccgatcatgtagaatccgcgaatacattaggaccaatgattggtgatgaagaagaaatcccccgtatacaagcagccgaagattcgtgccctcccattctggtcaagtggtgggatgataacttgcagcctcaaggaattgtaataaaccggcaaaaagaagacgaagaggtctgcctaccgaaaaaggcactcaaccaagcgactcgcattgtaaatatatctcagttggagaagcagattcaaattctggaaaatgacaaggcagaactggcaagacaaagagacctagctctaaaggaagttgaagaccgcaagatcaaatctcaagctcaattcgacatcctggttggcaagatcaaaaaacttgaaggagcccgggatgaggttgctaacgctgctaccccaattgttcaagcgatgttcttcaataacaacggcccgagtgcacttgatgcttctgaaattttcgacaagctgagagtcgctccgaatacatatttcaagaacatcaaagaagctggaagtatgggagcaagtctggcgttggcgatgactaaatccctttatccaagagttgatattgacgccattgatggctttgcagacgggacgagcgaagaagctgctcttgacctcatcagtgatgcgcagaaatcggctgacaaaattgctgctgatgtagttgagagatttcaggacaccgatcttcgaccgactggtcctgataattctgatgatgaaaagactgatactgattaa

SEQ ID NO: 33191 - DNA, 2352 bp, Oryza sativa
  Clone ID: PAT_MRT4530_37327C.1
atggtggcacacggcgttcttccagcaaaagagatcatcgggtggcgaccggcatttggtgaggcattcccgacccccgatacacacgaaatcatggtatttgctcatttcttctatggcggattttcccttccaacctcgagatttttccggggcattctgaacttctacgggattagcttgcatcacttgaatctaaactccatagtacatattgccaattttatccacgcctgcgaagcttttctgggcattaggcctcatttcgccttgttccgccgcatcttcttcctcaagccccagccaaacaaaagcaagccgtgcgttgttgggggagctggtttccaacttagaggaaccttgagccaaaaatatttctccatgcccttcaaaacctcgaacaaaggctggcatgcgaactggttctatgttcagaatcctgagcccgcactccccgagtactgctgtcttcctccggtttaccaggacacatggaactcattgcctataggagatgaagctgctcaggcagtagaactgatggagaggatgataaagctgaaagaacagggtcttcaaggagagcagatcacccggcactttatcaagtgtcggttagctccaatcaaagaaagatcccgcacagcttttgagtttgatggcaagcatgattcaaatcgggaagatccagattctcttgactttaaggtcatgaaagaaagaatgtacaaaatcttctcaaacgctattgttgtcagctattcacatctgctgcccgttgtgccattcaacgcattcaaccctcctccactggaatttgctttgatgaagtcggatcccccgatcgctcaacgccgatctccccgccaccaaactgggcaagggagcggaggaccaagaattcggtcggaaactcaaccaagtacttctgatccagtcggccagttagactctcgaaagaggaagctggttttaagtgacgacgaaaccgatgatactaccaggaggcctggagaccgagagacaaccaagaaactaccaaaacaggctactccaaggaagaaaacatccagtcgccctgcgccaaagatcaggaagtcttctaggaaaccatctgatatagatccgtctgggaaagattctgacccgactagcgtggacgcaagttcttccagagaaaccgggccaactgccgaggaccgtccgagtgacaatcagccagcaaccgataatgtagaatccggtgatcaacccccgactagaaaccagtcggccgaagccgaagccgaagccggagttaatcaggagcccccgactggaaaccagtcggacgcagggccaagccaagagattccagaagttggagctcaagcaggcagccttcgcggtcaagacgccagcaataaccagagatctggatctcctttaaaggcatccgaatccactcgtcctcgtccagaaatcattacggtggatacattagggccaatgatcagtgatgaagaagaaattccccacatacaagcagctgaggattcacgccctccgattctggtcaagtggtgggatgacaacatgcagcctcaagggatcgtgataaataagcaaaaagaagacgaagagttatgcctactgaagaaggcacttggtcaagcaacccgcattgtaaataggattcatcttaggaacgaagctaaaacggcaaccttagagaggctagtccctcatctcgggaccctcgaagccaccaggagtctgctgcacgagacaaaagagcttgctaggaaaaatgagcatgatctgaggaatcaaattgctgagctccaggaatccaattttgaactgagtggctcatcaaaagtaatcaatgtagtgcaagctgccaagatatctcagttggagaagcaaattcaaactctggaaaatgacaaggcagaactggcaagacaaagagacctggctttgaaggaagttgaagaccgcaagatcaaatctcaaactcaattcgacgtcctggttggcaagataaaaaaacttgaaggagcccgggataaggttgctaacgctgctgtcccaattgttcaagcgatgttcctcaataacaacggcccgagtgcacttgatgcttctgaaattttcgacaagctgagagttgctccggatatatatttcaagaacatcaaagaagctggaagtatgggagcaagcatggcattggcgatgactaaatccctttatccgagagttgatattgacgccattgatggctttgcagacgggacgacgaagaagctgctcttgacctcatcagtaatgcgcagaaagcggctgacaaaattgctgctgatgtag

SEQ ID NO: 33192 - DNA, 2418 bp, Oryza sativa
  Clone ID: PAT_MRT4530_37328C.1
atggcggaagaaagagaaagcttcgagagtcagtgggcgccctccgatgtgacagaagataatctgaaggagatggtggcgcacggcgttctcccagcgaaggagattatcgggtggcgaccggcgttcggcgaagcattcccgacccccgacacacacgaaatcgtggtatttgctcatttcttctatggcggattttctcttctaacctcaagattcttccgggggattctgaacttctacgggattagcttgcatcacttgaatccaaactccatagtgcatattgccaaatttatccatgcctacgaagcttttctgggcattaggcctcatttcgccttgttccgccgcatcttcttcctcaagccccagccaaacaaaagcacaccgtgcgttgttgggggagctggtttccaactcagaggaaccttgagccaaaaatatttctccatgcctttcaaaacctcaaacaaaggctggcatgcaaactggttctatgttcagaatcctgagcgcgcactccccgagtactgctgtcttcctccagtttaccaggacacatggaactcattgcctatgggagatgaagctgctcaggcagtggaattgatggaacgcatgctaaaactgaagtaacaaggtttgcaaggagaacagatcactcggcacttcatcaaaagtcgattagctccaatcaaagaaagatctcgcacagccttcgaatttgacggcaagcatgacccaaaccgtgaagacccagattctcttgacttcaaggtcatgaaggaaatgatgtataagatcatttcaaacgccattgttgtcagctactcacacttgctgccagtcgtaccgttcaatgcattcaatcctcctccaccggaatttgctttgatgaagtcggatctcccaatcgctcaacgccgatctccccgccaccaaactgggcaagggagtggaggaccaagaattcggtctgaaactcagccaagtgcttctgatccagtcggccagtcagattctcgaaagagcaagctggttctaagtgacgacgaagccgatgataccaccaggaggcctggagaccgagagacaaccaagaaactaccaaaacaggctactccaaggaagaaagcatccagtcgccctgcgccaaagatcaggaagtcttctaggaaaccatctgatatagatccgtccgggaaagactctaacccgactaacgtggacgcaagttcttccaaagaaaccggaccaactgctgaggatcatccaagtgacaatcagccggcaaccgataatgtagaacccggtgatcaacccctgaccggaaaccagtcggacacaggggcaagcgaagagattccagaagtcaaaacccatgcagacaaccctcgtggacaagacgccagcaatgaccggagatctggatctcctttaaaagcatccgagtccactcaacctttgttagtggatacattagggccaatgatcagtgatgaagaagaaattccccgcatacaagcagccgaaggttcgtgccctcccattctggtcaagtggtgggatgacaacttgcaacctcaaggaattgtaataaaccggcaaaaagaagatgaagaggtatgcctactgaaaaaggcactaaatcaagcgactcgcattgtaaataggattcatcttaggaacgaggcgaaaaccgcaaccctagagaaactagttccttatcttggaaccttcgaagccaccaggagtcaactgcacgaggccagagaacttgccaagaagaatgaacacgatctgagggatcggattgctgagctccaggagtccaatttcgaactgagtggctcatcaaaagtgcaagctgccaagatatcttaactagagaagcagatccatactctggaaaatgacaaggcagagctggcaaggcagagggattcggctataaaggaggttgaagaccgcaagatcaagtctcaagcacagtttgatgtcttagttgacaagatcaacaatcttgaaggagccagggataaagtcgctaatgccgctactcccctcatccaggccatgttcttcaataacgccggttcaagtacacttgatgctaccgaaatcttcgacaagctgagagtcactccagatacttatttcaagaacatcaaagaagctggaagtatgggagcaagtctggcgttggcgatgaccaaatccctttatccaagggttgatatggatgccatcgatggctttgcagacgggacgagcgaagaagctgctcttgacctcatcagtgatgcgcagaaagccgctaacaagattgctgctgatgtagttgagagattccaagatgtcgaccttcggccgacttggtctgataagtctgatgatgaaaaaactgatactgat

SEQ ID NO: 33193 - DNA, 584 bp, Oryza sativa
  Clone ID: PAT_MRT4530_37329C.1
tttccttcgttttgtttttcttttccctccttttcctttttgaatgggccgccggcccattctcttcccctccccctccccgctgggccggccgaaggccaaggcccagcagccggccgcctcctccctccctgtcgggcccgtctcctacctccagccggcgccaacgcatcccgcaaccgccgcaccgctcgctcccgcacctcctgggccacgtcgcccacgtcaccgcctcccccccgccttccccgcgcccactccttctctctcccgcccgcgcccgcgctcgagacggccgggattcgaatttagaatcccgcctctctctcctccccacctctccccactccgccggcggaatcgtggccatcccgaccacgatcaacccccgctggtctatataaagcgccccgtctcctcctctctctttttcgttttgcaaccacccgctcccgtgccctccaccaccctagcgccgtcgccctcctctccgccgccgccaccaccgctccggccgccgctagccgccgtgccgagccgtgccttcgacgccgttgcgttcgccgtcgtgcaggccgtcccgt

SEQ ID NO: 33194 - DNA, 2391 bp, Oryza sativa
  Clone ID: PAT_MRT4530_3732C.1
atggagaaaatagtgctcgcaagtcaaggaggagaaaagctaggaaagttccgcagaaggttttatgctgttcatatgcgatggcacaaagagaagctagttgatgatggatatatgagacatccagtagattctaatgaatggaagaactttgacaagaattttgaatcattcgcattggacgcacggaatgttaggctaggccttgctagtgatggattcaatccttttggaaatatgagctcatcatatagcatatggccagttgttattgctatatataacttaccaacttggatgtgcatgaaagattcttatatgataatgtcaatgcttatccctgggcctaaagcacctggaaatgacatagatgtatacttgcagccattgattgatgaattgatacagctatgggaaggcgtgccagcctatgatgctcatgcaaagtcctcttttaagctacggggaatgctgctttggacaatcaatgatttccctgcatatggtaatttatcaggcatgagcacgaaaggaaaatatgcatgtccttcttgtcacatggacacttggtcccataggctcgttaatggacacaaatactgctatatgggacatcgtcgcttcttgccaacaagacattcgtggaggagcaatgcaaaatcttttgatggccaaaaggaaagacgtagcgccccaaaagcgttgtcaggagatgacattatgcgtcaatatcaaaatttcaatcaggtgaaatttgggaaacataacaataagagaaaacgctcaagcacattatatggagtttggaagaaaaaaagtatatttttccagctgccatattggtgtacgttatcgataagacataatctagatgtcatgcacattgaaaagaatgtttgcgatagtattgtgggtaccttgttaaatctggatgggaagaaaaaggacaatattaaatcccggtttgatttggaactcatgaaaatacgacctgaacttcatgcacctccaactggtgatgggaagatcttatttcgtcctgcatgctatacaatgacactagctgagaagaaagcattttgtgagttccttagagaaataaaagtgccagatggatactcttcaaaaatttcacactatgtggatgcaacaaaagctaaaatatcagggatgaagtgtcatgattgtcatgtatttttacacagataccttccattttctattcgtggagttctgcctgctgatgtttgtgaggctataattgagctatgtagcttttttagagaaatttgttccaagaaattagatactgaaattctcaagaagcttgcatcatcaattgctgttaccctctcccaggaagctattgctggtggacctgtccagtatcggtggatgtatcccattgaaaggccactccttggtaacaaatactgccagatggatatgaatgagttggagaaagctcggatatatgttctaaagaattatgaagaaatatcagaatacgcaaacatttacaaagaccaacttagcatccagaacagtaaaggtgtggaaaagcgccatgacaaagaattttttgtatggttcaagaatcatatatttgagaaacattccaaaggatctccagatatatcagaagagttgtttgctctagcaagaggtcctgatgctcgagtaacccattacacaagttatatgattaatggatggagatttaacaccagggaccgagacaagttggttcaatcacaaaacagtgtagtctttgttaaaggtgatgaagccagtggaagcaaagactattttggtgtcttgacagatattatcaagctaacatatggtacttttagtgtcatattgtttaaatgtgaatggtgggatgtacacactaaaaggggagtaaaagaggacaagcatagatttaccttaattaatacttcccgtacagtgccaattgatgagccatatattttggcaacacaagctgagcaagtatattatgtcaaagatactagagaccctaaatggtttgttgtagtcaagacgaagccacgtgatttgtatgactttcctcctacagaagaagaagaagaaaatgatccaactttatcaaataagtctagttctgaagcatgccaagagaatgagcatatcacggctgcattgaattacactacaattgatgatggtgacttccctacggttctcagtaaagatggagtcgaatgtgaacccattgaagcagaaccagtaacacattctgaagatgatctgtttgaagaggaagaagaagaagaggaagattctgaaagtgatggcgctgagtatacagatacagatgatgaaagtgacatccaaactgaagaagatgtagatgacagttaa

SEQ ID NO: 33195 - DNA, 408 bp, Oryza sativa
  Clone ID: PAT_MRT4530_37330C.1
atggatgccggtaagccctccacctcggactcgctggtccttgccactgcagctagcaagcagtcccctccatctctcgttgctcctccgccggcagcagccatgacccgtccattcctcatcgtccccaccggcggacgcgacaccctcgccgttgtcgttaagggaatcaacggccggggcgcttctccgccatggaggccggcgagcccaggaggacaacggctaaggggaacgagcgaccggggagccgagggtgaagctcagcgggacgagcggcacgggggaaggaggtcggtggtggcagcgacaagggttgaggacggtgacgcggcggtggctgggtggcaaccggcacaggggcggtggccggggaccttgccgggggagcagacgatgacactgtag

SEQ ID NO: 33196 - DNA, 2397 bp, Oryza sativa
  Clone ID: PAT_MRT4530_37331C.1
atggtggaagaaagagaaagcttcgagagtcagtgggtgccctccgatttgacggaagataatctgaaggagatggtggcgcacggcgttcttccggcgaaggagatcatctggtggcgaccggcattcggcgaagcattcctgacccccgatacacatgaagtcgtggtatttgctcatttcttctatggcggtttctcccttccaacctcaagattttttcggggaatcctgagtttctatggaatcagcctgcatcatctgaacccaaacttcatagtgcatattgccaattttattcatgcctgcgaagattttctgggcattaggcctcattttgccttgttccgccgcattttcttccttaagcctcagccaaacaagagcaaaccatgtgttgttgggggcgctggtttccaacttcggggaacactaagtcaaaaatacttctccatgccctttaagacctcaaacaaaggctggcacgcaaattggttttatgttcaaaaccctgaacctgctctccccgagtactcctgtcttcctccagtttatcgggatacttggaattcactaccaatgggagatgaagctgcgcaagcagtggaactgatggagaggatgataaagctaaaagaacaaggcctccaaggagaacagatcacccggcactttatcaagtgtcggttagctccaatcaaagagagatctcgcacagccttcgaatttgacggcaagcacgacccaaactgtgaagatccagattctcttgacttcaaggtcatgaaggaaaggatgtataaaatcttctcaaatgctatcgtcgtcagctattcacacttgctgccagtcataccgttcaatgcattcaatccttcaccgggaagcggaggaccaagaattcggtctgaaacccaaccaagtgcttctgatccagtcggccagtcagattctcgcaagaggaagctggttctaagtgacgacgaaggcgatgataccggaaagctcagaaataaaggagcggccggaagaccttcgaagccaactaatccgaagaagaaaacctccagtcgtcctgtaccaaaaatcagaaagtcttccaggaaaccatctgacatagatccttctgaaaaagactctgacccgactaacacggaagcggattcctcaaaagagactgggccgactgcaaaagatcacccgaatgataatccgcaggccagcgacaatgtagaacccagcgacgaacccacgactgcaagccagtcggccgaagctggagtcggaattaaccaggggcccccgactggaaaccagtcggatacagggccaagccaaaagattcctgaggttgaagctcaaacaaacagtcctcccggaaaggatgctggccatgactctgaaaccagatctcctgcgaagacacaagagtccactcgtccccgaccgggaatcatcacagggccaataattggtgatgaagaagaaatcctctggatacaagcagctgaggattcgtgccctcctattctggtcaagtggtgggatgacaacatgcagcctcaaggaatcgtgataaataagcaaaaagaggacgaagagttatgcgtactgaaagaggcgcttgctcaagcaacccgcattgtaaataggattcatcttagcaacgaagccaaaacggcaaccttagagaggttagtccctcatctcagaaccctcgaagccaccaggaatcaactgcgcgaaacaaaagaacttgccaggaaaaatgaacatgatctgagggatcgaattgctgagctccaggaatccaattttgaactgagtggctcatcaaaagtgcaagctgccaagatatctcaactggagaagcagatccaaactctagaaaatgataaggcggaactggcaagacagagggactcggctttaaaggaggttgaagaccgcaagatcaagtcccaggcacagtttgatgtcttagttgaaatgatcaacaggcttgaaggggccagggataaagtcgctaatgccgctactccactcatccaagccatgttcttcaataacgccggtccgagtacacttgatgctgccgaaatcttcgacaaactgagagtcgctccggatacttacttcaagaacatcaaagaagctggaagtatgagagcaagtctagcgctggcgatgaccaaatccctttatccaagagttgacatggatgccattgatggctttgcagacgggacgggcaaagaagctgctcttgacctcatcaatgatgcgcaaaaagccgctgacaagattgctgctgacgtggttgagagattccaagatgtcgaccttcggccgactgggtctgataattctgatgatgaaaaaactgatactgattga

SEQ ID NO: 33197 - DNA, 478 bp, Oryza sativa
  Clone ID: PAT_MRT4530_37332C.1
aacagaaatcatgaatggtaatagcagaacaatgttactctttatcatcgtataatgaaatgatcaaatgagatcataatttacatcatgaatagggtaaactattgattggttacactgttaagtgaagtgaagtgcatcagcttgaaaatttctccacgtatttccttccaataagatgtgccacttgcattagcgtgtcctacaacccccaccagatagttccaaataaaatgcacctagctattcctatctgaattgtagctggttttctcaatattgcaatcaaactatattgagcacaaaattggtcatgtttccgaacggttcggttcagaaactgcagaactggtttggcatccagagtttaggaatttgcagagagccttccagacaggaaccaacattttgacaggagggtgggatttctggaaaactagcctgagttcctcttcatcacgcagaagcaatgccaagc

SEQ ID NO: 33198 - DNA, 383 bp, Oryza sativa
  Clone ID: PAT_MRT4530_37333C.1
gtcggatggaagaggacaaggatgaggctagccatcccactctcctactgaagagcatcttgtcaggtggcccccaggatctctagtctaagccccaaagatctcttctaccaagctagcatctcctgagatctctgttagtatctgttgtatgaccgaaagccacaacttcagggcttggtggaatggtagatgaccacccttgttctgttgttttttgtccttcatgtgctttagtcattgtccatcctgggattccagcgtttccctctttatgtagtttgtctaacatgcatttcacagttacacgtttgtaatcagatcatgaatatttagtcagaaacaatagcactttgtattaagatgtacagcattcatgatgt

SEQ ID NO: 33199 - DNA, 2472 bp, Oryza sativa
  Clone ID: PAT_MRT4530_37334C.1
atggcggaagaaagagaaagcttcgagagtcagtgggcgccctccgatgtgacggaagataatttgaaggagatggtggcgcacggcgttcttccagcaaaagaaatcatcgggtggcgaccggcatttggtgaggcattcccgacccccgacacacacgaaatcgtggtatttgctcatttcttctatggcggattttctcttccaacctcaagatttttccggggcattctgaacttctacgggattagcttgcatcatctgaatccaaactccatagtgcacattgccaattttattcatgcctgcgaagcttttctaggcattaggcctcatttcgccttgttccgccgcatcttcttcctcaagccccagccaaacaaaagcaaaccgtgcgttgttgggggtgctggtttccaactcaggggaacactaagccaaaaatacttctccatgcccttcaaaacctcaaacaaaggctggcatgcaagctggttctatgttcaaaatcctgagcccgcactccccgagtactgctatcttcctccggtttaccaggacacatggaactcattgcctatgggagatgaagctactcaggcagtggaattgatggagaggatgataaagctgaaagaacagggccttcaaggagaacaaatcacccggcactttatcaagtgtcggttagctccaatcaaagaaagatctcgcacagccttcgaatttgacggcaagcatgacccaaaccgtgaagatccagattctcttgacttcaaggtcatgaaggagagaatgtataagatcttctcaaacgccatcgttgtcagctactcacacgtgctgccagtcgtaccgttcaatgcattcaatcctcctccaccggaatttgctttaatgaagtcggatcccccaatcgctcaacgccgatctccccgccaccaaactgggcaagggagcggaggaccaagaattcggtctaaaactcaaccaagtgcttctgatccagtcggccatccagattctcgaaagaggaagctggttctaagtgacgacgaagccgatgataccaccaggaggcctggagaccgagagacaaccaagaaactaccaaaacaagctactccaaggaagaaaacatctagtcgccctgtgccaaagatcaggaagtcttccaggaaaccatctgatatagatccgtctgggaaagactctgacccgaccaacatagacacaagctcttccaaagaaaccgggccatctgttgaggatcatccgagtgacaagcagtcggcaaccaacaatgtagaacccagcaacgaacccccgactgggaaccagtcggccgaagctgaagtcggcgctaaccaggagcccccgactggaaaccagtcggatgcagggccaagccaaaaggttcccgaggttgaagctcaaacgaacagtcctctcgggaaggatgctgacagtgaatcagaacccagatctcctgtgaagacaccaaagtccactcgtccccgaccgggaatcatcacagggccaataattggtgatgaagaagaaatcctccggatacaagcagctgaggattcacgccctccgattctggtcaagtggtgggatgacaacatgcagcctcaagggatcgtgataaataagcaaaaagaggacgaagagttatgcctactgaagaaggcacttggtcaggcaacccgtattgtaaataggattcatcttaggaacgaagccaaaacggtaaccttagagaggttagtccctcatctcggaaccctcgaagccaccaggaatcaactgcacgaagcgaaagaacttgccaggaagaatgaacatgatctgagggatcggatcgctgagctgcaggaatcaaattttgaactgagtggctcatcaaaagtgcaagctgccaagatatctcagttggagaagcagattcaaattctggaaaatgacaaggcagaactggcgagacaaagagacctggctttaaaggaagttgaagaccgcaagatcaaatctcaagctcaatttgacatcctagttggcaagatcaaaaaacttgaaggagcccgggatgaggttgctaacgctgttgccccaattgttcaagcgatgtttttcaataacgctggttcgagtacacttgatgctgccgaaatcttcgacaagctgagagtcactccagatacttatttcaagaacatcaaagaagctggaagtatgggagcaagtctggcgttggcgatgaccaaatccctttatccaagagttgatattgatgccattgatggctttgcagacgggacgagcgaagatgctgctcttgacctcatcagtgatgcgcagaaagcggctgacaaaattgctgctgatgtagttgagagattccaagatgtcgaccttcggccgactgggtctgataagtctgatgatgaaaaaacttatactgattaa

SEQ ID NO: 33200 - DNA, 2226 bp, Oryza sativa
  Clone ID: PAT_MRT4530_37335C.1
atggcggaagaaagagaaagcttcgaaagtcagtgggcgccctccgatgtgacagaagataacctgaaggagatggtggcgcatggcgttctcccagcgaaggagattatcgggtggcgaccggcgttcggcgaagcattcccgacccccgacacacacgaaatcgtggtattcgctcatttcttctatggcggattttctcttccaacctctagattcttccgggggattctgaacttctacgggattagcttgcatcacttgaatccaaactccatagtgcatattgccaattttatccatgcctgcgaagcttttctgggcattaggcctcatttcgccttgttccgccgcatcttcttcctcaagccccagccaaacaaaagcaaaccatgcgttgttgggggagctggtttccaactcagaggaaccttgagccaaaaatatttctccatgcccttcaaaacctcaaacaaaggctggcatgcaaactggttctatgttcagaatcctgagcccgcactccccgagtactgctgtcttcctccggtttaccaggacacatggaactcattgcctatgggagatgaagctgctcaggcaatggaattgatggaacgcatgctaaaactgaaagaacaaggtttgcagggagaacagatcactcagcacttcatcaaaagtcgattagctccaatcaaagagaggtcccgcacaacttttgagtttgatggcaagcatgatccaaatcaggaagatccagattctcttgactttaaggtcatgaaagaaagaatgtacaagatcttctcaaacgctattgttgtcagctattcacatctgctgcccgttgtgccattcaacgcattcaaccctcctccaccggaatttgctttgatgaaatcggatcctccaattgctcaacgccgatcacctcgccagcagactgatccttccgaaaaggaccccgagccgactgacatagaggcaaacctttcaaaagaaaccgggccagctgcagaagatcgtccgagtgacaaacaaccggcaaccgacaatgtagaagccagcaacgagcccccgactgggaaccagtcggccgaaactgaagtcggtgctaaccaggagcccccgactagaaaccagtcggatgcagggtcaagccaaaagattcccgaagttgaagctcaaacgaacagtccgctcgggaaggatgctgacaatgaatcagaaaccagatctcctgtgaaggcaccaaagtccactcgtccccgaccgggaatcatcacagggccaataattggtgatgaagaagagatcctccggatacaagcagctgaggattcacaccctccgattctggtcaagtggtgggatgacaacatgcagcctcaagggatcgtgataaataagcaaaaagaggacgaagagttatgcctactgaagaaggcacttggtcaggcaacccgcattgtaaataggatttatcttaggaacgaagccaaaacggtaaccttagagaggttagtccctcatctcgggaccctcgaagccaccaggaatcgactgcacgaagcgaaacaacttgccaggaagaatgaacatgatctgagggatcggatcgctgatctccaggaatcaaattttgaactgagtggctcatcaaaagtgcaagctgccaagatatctcagttggaaaagcagattcaaattctggaaaatgacaaggcagaactggcaaaacaaagagacctggctttaaaggaagttgaagaccgcaagatcaaatctcaagctcaattcgacgtcctggttggcaagatcaaaaaacttgagggagcccgggatgaggttgctaacgctgctgccccaattgttcaaccgatgttcttcaataacaacggcccgagtgcacttgatgcttctgaaattttcgacaagctgagagttgctccggatacatatttcaagaacatcaaagaagctggaagtatgggagcaagtctggcgttggcgatgaccaaatccctttatccaagagttgatattgatgccattgatggctttgcagacgggatgagcgaagaagctgctcttgacctcatcagtgatgcgcagaaagcggctgacaaaattgctgctgatgtagttgagagattccaagatgtcgaccttcggccgactgggtctgataagtctgatgatgaaaaaactgatactgattaa

SEQ ID NO: 33201 - DNA, 377 bp, Oryza sativa
  Clone ID: PAT_MRT4530_37336C.1
gtctggtgttacttagtaaggcacttaatggctaggctatgagattaaggtttagagtccagttttgacaatatccagccaacacaagaaaacctcactggtggtgctacgtattgagtttttggagattccggatgccatgaagcctatctggatctaggtgcagcccttgttctgagatcaggcgccccaaacaacagacttgggtttgaacaaactgcaatttctccttagaaattttatgttcctttgcagctaaaagctttcacaggtagatgctgtcttcctggaaggagaccttcctataaggggagcagagaagtgagtcatttacatattgtaataaaatggggccttcaagaaattttatattctct

SEQ ID NO: 33202 - DNA, 2289 bp, Oryza sativa
  Clone ID: PAT_MRT4530_37337C.1
atggcggaagaaagagaaagcttcgagagtcagtgggcgccctccgatgtgacagaagacaatctgaaggagatggtggcgcacggcgttctcccagcgaaggagatcattgggtggcgaccggcgttcggcgaagcattcccgacccccgacacacacgaaatcgtggtatttgctcatttcttctatggcggattttctcttccaacctcaagattcttccgggggattctgaacttctacgggattagcttgcatcatttgaatccaaactccatagtgcatattgccaattttatccacgcctgcgaagcttttctgggcattaggcctcatttcgccttgttccgccgcatcttcttcctcaagccccagccaaacaaaagcaaaccgtgcgttgttgggggagctggtttccaactcagaggaaccttgagccaaaaatatttctccatgcccttcaaaacctcaaacaaaggctggcatgcaaactggttctatgttcagaatcctgagcccgcactccccgagtactgccgtcttcctccggaacaaggtttgcagggagaacagatcgctcggcacttcatcaaaagccgattagctccaatcaaagagaggtcccgcacagcttttgagtttgacggcaagcatgatccaaatcgggaagatccagattctcttgactttaaggaatttgctttgatgaagtcggatcccccaatcgctcaactccgatctccccgtcaccaaactgggcaagggagcggaggaccaagaattcggtctaaaactcaaccaagtgcttctgatccagtcggccagttagattctcgaaagaggaagctggttctaagcgacgacgaagccgatgataccatcaggaggcctgaagaccgagagacaaccaagaaactaccaaaacaggctactccaaggaagaaaacatccagtcgccctgcgccaaagatcaggaagtcttctaggaaaccatctgatatagacccgtctggaaaagactctgacccgaccaacatggacacaaattcttccaaagaaaccgggccaactgcagagaatcgtccgagtgacaaacaaccggcaaccgacaatgtagaacctagcaacgagcccccgactgggaaccagtcggccgaagctgaagtaggtgctaaccaggagcccccgactggaaaccagtcggatgcagggccaagccaaaagattcccgaggttgaagctcaaacgaacagttctctcgggaaggatgctgacattgaatcagaaaccagatctcttgtgaagacaccaaagtccactcgtccccgaccaggaatcatcacagggccaatgattggtgatgaggaggaaattctccggatagaagcagctgaggattcgcgccctcccattctagtcaagtggtgggatgacaacatgcatcctcaaggaaatgtaataaataagcaaaaagaggacgaggaggtatgcttgctgaaaaaggcgctcagccaagccacccgcattgtaaataggattcatcttaggaacgaagctaaaacggcaaccttagagaggctagtccctcatctcgggaccctcgaagccactaggagtcagctgcacgagacaaaagagcttgccaggaaaaatgagcatgatctgagggaccgaattgctgagctccaggaatccaattttaaactgagtggctcatcaaaagttaatgtagtgcaagctgccaaaatatctcaattggagaagcagatccaaactctggaaaatgacaaggctgagctagaaagacagagggattcggctttaaaagaggttgaagaccgcaagatcaagtctcaagcacagtttgatgtcttagttgacaagatcaaaaaacttgagggagcccgggatgaggttgctaatgctgctgccctaattgttcaagcgatgttcttcaataacaacggcccgagtgcacttgatgcttctgaaattttcgacaagctgagagttgctccggatacatatttcaagaacatcaaagaagctggaagtatgggagcaagtctggcgttggcgatgaccaaatccctttatccaagagttgatattgatgccattgatggctttgcagacgggacgagcgaagaagctgctcttgacctcatcagtgatgcgcagaaagcggctgacaaaattgctgctgatgtagttgagagattccaagatgtcgaccttcggccgactgggtctgataagtctgatgatgaaaaaactgatactgattaa

SEQ ID NO: 33203 - DNA, 570 bp, Oryza sativa
  Clone ID: PAT_MRT4530_37338C.1
atggaaccaacactctcctccgtcgagggagaagagaaagttacggggacgacgacggaggcacctgggccactggcggcggcggcggtgggcgagagggcgggcgggcgacggccggagaaggggccagatcttcggcggcagcggacagaggccggagcagcggtggccagcgcctactccaaccccatccacaacctcctccgcccttcccgcggcgtcgttgtcggcgccggcgttagtgaccccatctctctccctctcattccttctccacatggtacagcgacgaggagcggccacgcctactccctcgagctctgctgccgccgctccggcccctctctgccgaccgccaacgtcctgccgtcgccgctaaggcatcgccgccgacgtcatctgccacctcacgccgccgacgtcagcctttggagcaaaccgccatctccaaccaatcacaagccacagccggcgccgtcgtcttccttctcacgtcgccgccaccaagaccaactccatcttctcctctacaaccgaccttcaaaaccgacgtccgacgcctataaatag

SEQ ID NO: 33204 - DNA, 300 bp, Oryza sativa
  Clone ID: PAT_MRT4530_37339C.1
atggcggtggggatggcgacgatggcaggggcggcaggggtggagtccgtggatccggcggcaacgcgccaggatctggtggcggcacggcagacggcctgccccacggctggcgtggccggtggtggtggtgaggaggatgtgctagcaacggcgacgccctcgggcgtcgttcaccttcttgaaggcattgctattggagcccacattcagcaccactttaaggagtttctcccggtgaaaaccttagattcgttaggatcggacgatgtcgtcattctgtcggcgtacccttcttga

SEQ ID NO: 33205 - DNA, 537 bp, Oryza sativa
  Clone ID: PAT_MRT4530_3733C.1
atgggtccagaccggacagagaaggttggccggaagttccggtccctggacctggaacttctggaccctgcatcgggcagcaccgcagcagcacccggcggccgaaggcatgagccttggcacgatggaaggattgcaggccaagacgctgaggctgctattgaaggtagagctgctgcaacatcaggccccgtagtggtggctacaggagctctgcgacctcgatccgacggcaggtgcacggcgaactcgatacgcgccatcactttcagaatcttcctcttcttcttcttcctcttcaaacagatcatcttcagaatgtgttactggttctgcttcaatgggttcacattcgactccatctttactgagaaccgaggaaagtcatacaaatcacgtggcttcgtcttgactacaacaaaccatttaggggcgagctttgttttttacaaaagacttcaaccttcgcaaaaacctttcaatgggatacatccaccgatactggacaggtccaccagcaatagcttcctgggctaa

SEQ ID NO: 33206 - DNA, 2467 bp, Oryza sativa
  Clone ID: PAT_MRT4530_37340C.1
atggcggaagaaagagaaagcttcgagagtcagtgggcgccctccgatgtgacagaagataatctgaaggagatggtggcgcacggcgttctcccagcgaaggagattatcgggtggcgaccggcgtccggcgaagcattcccgaccccggacacacacgaaatcatggtatttgctcatttcttctatggcggattttctcttccaaccttaagattcttccgggggattctgaacttctacaggattagcttgcatcacttgaatccaaactccatagtgcatattgccaatttcatccatgcctgcgaagcttttctgggcattaggcctcatttcgccttgttccgccgcatcttcttcctcaagccccagccaaacaaaagcaaaccatgcgtcgttgcgggagctggtttccaactcagaggaaccttgagccaaaaatatttctccatgcccttcaaaacctcaaacaaaggctggcatgcaaactggttctatgttcagaatcctgagcccgcagtccccgagtactgctgtcttcctccggtttaccaggatacatggaactcattgcctatgggagatgaagctgctcaagcagtagaactgatggagaggatgataaagctgaaagaatagggccttcaaggagaacagatcacccggcactttaccaagtgtcggttagctccaatcaaagaaagatctcgcacagccttcgaatttgacggcaagcatgacccaaaccgtgaagatccggattctcttgacttcaaggtcatgaaggaaaggatgtataagatcttctcaaacgccatcgttgtcagctactcacacttgctgccagtcgtaccgttcaatgcattcaatcctcctccaccggaatttgctttgatgaagtcggatcccccaatcgctcaacgccgatctccccgccaccaaactgggcaagggagcggaagaccaagaattcggtatgaaactcaaccaagtgcttctgatccagtcggccagtcagattctcgaaagaggaagctggttctaagtgacgacgaagccgatgataccaccaggaggcctgtagaccgagagacgaccaagaaactaccaaaacaggctactccaaggaagaaaacatccagtcgtcctgtgccaaagatcaggaagtcttctaggaaaccatctgatatagacccgtctgggaaagactctgacccaactaacatggacacaagtttttccaaagaaaccgggccaacagcagagaatcgtccgagtgacaaacaaccggcaaccgataatgtagaacccagcaacgagcccccgactgggaaccagtcgactgaagctgaagtcggtgctaaccaggagcccccgactggaaaccagtcggatgcagggccaagccaaaagattcccgaggttgaagctcaaacgaacagtcctctcgggaaggatgctgacaatgaatcagaaaccaggtctcctgtgaagacaccaaagtctactcgtccccgaccgggaatcatcacagggccaataattggtgatgaagaagaaatcctccggatacaagcagctgaggattcactccctccgattctggtcaagtggtgggatgacaacatgcagcctcaagggatcgtgataaataagcaaaaagaggacgaggagctatgtctactgaagaaggcactaggtcaggcaacccgcattgtaaataggattcatcttaggaacgaagccaaaacgacaaccttagagaggttagtccctcatctcggaaccctcgaaaccaccaggaatcaactgcacgaagcgaaagaacttgccaggaagaatgaacatgatctgagggatcggatcgctgagctcaaggaatcaaattttgaactgagtggctcatcaaaagtgcaagctgccaagatatctcagttggagaagcagattcaaattctggaaaatgacaaggcagaactggcaagacaaagagacctggctttaaaggaagttgaagaccgcaagatcaaatctcaagctcaattcgacgtccttgttggcaagatcaaaaaacttgaaggagcccgggatgaggttgctaacgctgctgccccaattgttcaagcaatgttctttaataacaacggcccgagtgcacttgatgcttctgaaattttcgataagctgagagttgctccggatacatatttcaagaacatcaaataagctggaagtatgggagcaagtctggcgttggcgatgaccaaatctctttatccaagggttgatatagatgccattgatggctttgcagacgggacgagcgaagaagctgctcttgacctcatcagcgatgcgcaaaaagccgctgacaagattgctgctgatgtagttgagagattccaggacaccgatcttcgaccgactggtcctgataattctgatgatgaaaagactgactgac

SEQ ID NO: 33207 - DNA, 2226 bp, Oryza sativa
  Clone ID: PAT_MRT4530_37341C.1
atggcggaagaaagagaaagcttcgagagtcagtgggcgccctccaatgtgacggaagacaatctgaaggaaatggtggcgcacggtgttcttccagcaaaagagatcattgggtggcgaccggcatttggtgaggcattcccgacccccgatacacacgaaatcgtagtatttgctcatttcttctatggcggattttctcttccaacctcaagatttttccggggcattctgaacttctacgggattagcttgcatcatctgaatccaaacttcatagtgcatattgccaattttattcatgcatgcgaagcttttctgggcattaggcctcatttcgccttgttccgccgcatcttcttcctcaagccccagccaaataagagcaaaccatgcgtcgttgggggtgctggtttccaactcaggggaacactaagccaaaaatacttctccatgcccttcaagacctcaaataaaggctggcacgcaaactggttttatgttcaaaaccccgagcctgttcttcccgagtactcctgtcttcctccagtttatcgggatacttggaactcactgccaacgggagatgaagctgcacaagcactactcacacttgctgccagtcgtaccgttcaatgcattcaatcctcctccaccgttaacaatgaaggatattacacccaggagtttgctttgatgaagttggatcccccaatcgctcaacgccgatctccccgccatcaaactgggcaagggagcggaggaccaagaattcggtctgaaactcaaccaagtgcttctgatccagtcggccagtcagattctcgaaagagaaagctggttctaagtgatgacgaagccgatgataccaccaggaggcctggagaccgagagacaaccaagaaactaccaaaacaggctactccaaggaagaaaacatccagtcgccctgtgccaaagatcaggaagtcttctaggaaaccatctaatatagatccgtctgggaaagactctgacccgactaacacggacacaagttcttccaaagaaaccgggccaactgctggggatcatccgagtgacaatcagccggcaaccgataatgtagaatccggtgatcaacccccgactggaaaccagtcggccgaagccgaagccggatttaatcaggagcccccgactggaaaccagtcggacgcagggccaagccaagagattccagaagtcgaaacccaagcagacagccctcgcggacaaaacgccagcaataaccagagatctggatctcctttaaaggcatccgaatccactcatcctcgtccagaaatcaatacggtgaatacattaggaccaatgattggtgatgaagaagaaatcccccgtatacgagcaaccgaagattcgtgccctcccattctggtcaagtggtgggatgacaacttgcaacctcaaggaattgtaataaaccggcaaaaagaagacgaagaggtctgcctactgaaaaaggcactcaaccaagcgactcgcattgtaaatgaacgaggcgaaaaccgcgaccctagagagaatagtcctcatcttggaaccctcgaagccaccaggagtcaactgcacgaggccagagaacttgccaagaagaatgaacacgatctgagggatcttaatgtagtgcaagctgccaagatatctcaactagagaagcagatccaaactctggaaaatgacaaggctgagctggcaagacagagggattcggctttaaaggaggttgaagaccgcaagatcaaatctcaagcacagtttgatgtcttagttgacaagatcaacaagcttgaaggagccagggataaagtcgctaatgccgctactccactcatccaggccatgttcttcaataacgccggttcgagtacacttgatgctaccgaaatcttcgacaagctaagagtcgctccagatacttatttcaagaacatcaaagaagctggaagtatgggagcaagtctggcgttggtgataaccaaatccctttatccaagggttgatatggatgccattgatggctttgcagacaggacgagcgaagaagctgcgcttgacctcatcagtaatgcgcagaaagccgctgacaagattgctgctgatgtagttgagagattccaagatgtcgaccttcagccgactgggtttgataagtccaacgatgaaaaaactgatactgattga

SEQ ID NO: 33208 - DNA, 1956 bp, Oryza sativa
  Clone ID: PAT_MRT4530_37342C.1
atggcggaagaaagagaaagcttcgagagtcagtgggcgccctccgatgtgacggaagataatctgaaggagatggtggcgcacggcgttcttccggcgaaggagatcatcgggtggcgaccggcattcggcgaagcattcccgacccccgatacgcatgaaatcgtggtatttgctcatttcttctatggcgtttatcgggatacttggaactcactgccaatgggaaatgaagctgcggaagcagtggaactgatggagaggatgataaagctaaaagaacaaggccttcaaggagaacagatcacccggcactttatcaagtgtcggttagctccaatcaaagagagatctcgcacagccttcgaatttgacggcaagcacgacccaaactgtgaagatccagattctcttgacttcaaggtcatgaaggaaaggatgtataagatcttctcaaatgctatcgttgtcaactattcacacttgctgccagtcgtaccgttcaatgcattcaatcctcctccaccggaattcgcattgatgaagtcagatcctccaatcgcccagcaccaatcacctcgctgccaaactggtcagggaagcggaggaccaagaattcggtctaaaacccaaccaagtgcttctgatctagtcggccagtcagattctcgcaagaggaagctggttctaagtgacgacgaaggcgatgttaccggaaagctcagagataaaggagcgaccggaagacctccgaagccaactaatccgaagaagaaaacctccagtcgtcctgtaccaaaaatcagaaggaaaccatctgacatagatccttctgagaaagactctgacccgactaacatggaagcggattcctcaaaagaaaccgggccgactgcaaaagatcacccgagtgataatccgcaggccagcgacaatgtagaacccagcgacgaacccacgaccgcaagccagtcggccgaagctggagtcggagttaaccaggagcccccgactggaaaccagtcggatacagggccaagccaaaagattcccgaggttgaagctcaaacaaacagtcctcccggaaaggatgctggcaatgactcagaaaccagatctcctgtgaagacacaagagtccactcgtccccgaccgggaatcatcacagggccaatgattggtgatgaagaagagatcctccagatacgagcagctaaggattcacgccctcccattctggtcaagtggtgggatgacaacatgcagcctcaaggaatcgtaataaataagcaaaaagaagacgaagagttatgtctactgaaaaaggcgcttggtcaggcaacccgcattgtaaatgaatccaattttgaactgagtggctcatcaaaagtcaatgtagtgcaagctgccaagatatctcaactggagaagcagattcaagctctggaaaatgacaaggcagaactggcaagacagagggactcggctttaaaggaggttgaagaccgcaagatcaagtcccaggcacagtttgatgtcttagttgaaaaggtcaacaggcttgaaggggccagggataaagtcgctaatgccgctaccccactcatccaagccatgttcttcaataacaccggtccgagtacacttgacgcttccgagatcttcgacaagctaagagtcgctccggatacttacttcaagaatatcagggaagctgggagtatgggagcaagcatggcattagctatgaccaaatctttatactccaaaatcgatgtcgatgccattgatgggtttgcagacgggacgagtgaagaagcagccctcgacctcatcaatgatgcgcaaaaagccgctgacaagattgctgctgacgtggttgagagattccaagatgtcgaccttcggccgactgggtctgataattccgatgatgaaaaaactgatactgattga

SEQ ID NO: 33209 - DNA, 566 bp, Oryza sativa
  Clone ID: PAT_MRT4530_37343C.1
cctctgctgtgcgatatcattcaacgaagtgtgtgattacatggtgccaatgctcaaggaagatctgtggttaatggtgtacttcatgaagcgccactattattgatacctacataaccatgccagtctgtaagaaagcactttcacactggtgtgccagtatagttacaataaagacgatttacggaccctacgcgtgagttagggttgctggctaagaactccatattaccagcattgactgaacatgctattgccaatgcttattatattgcgaggaattaatcccgacctataacgagtactagggcagatgagagagcgaccttatactccttacctacctcagaacagccggagacgttaccaatttatacctgaaagcctctctttattacaactgttgaacttatagagtatgagtgctatgcaagcatactaactatgctgcatcttgcttgctgtggatgctatgattacacttatgtactgttggtatgcccagatcattattcttgcacactggattgctgctagagtaaatctattccataatgctattctct

SEQ ID NO: 33210 - DNA, 176 bp, Oryza sativa
  Clone ID: PAT_MRT4530_37344C.1
gcctaccaaattaaagcccgcatgatcttctttgatcacctgttcttggcgaggggagataaggctacagacgcatacatggtgtatggcctcgcagtgaacacggatgacctgcacctcgcctgcgtccaagatcagatgtccacgcgacacgactccacgcccgtattagatgc

SEQ ID NO: 33211 - DNA, 543 bp, Oryza sativa
  Clone ID: PAT_MRT4530_37345C.1
atggcagagggagcggaactccggcgcacggccggttcacgaccacgaggcagtggttgcgttcttttgatactggtaggagtggtcagcggcagcgggatgacgacgggacgggcggcggctgacgcctccgccctgccgcgcagcagccgggcagcctcgtcgtggcgcaccggcaagaacgccctcgccgcgcacggcgacgacgccaccacgacgccgcaggtgcccatcttgaggtacatgacgggcccgtacttgcgctctagcgacgccaggtcagcgtgcggggccgggccgacgagcgggagcgcgtcgaggacggggatgcccgagggtcccggggggcaggtggtaggagcggagggagaggtcgaggaggaggcagaggaaggcggcggagagcacgacgggaggcaaacattgtctcatcaactcacggccatggcgatcaatggcggccgccgacctcgccgtgagttcgttgtgccacaactgcaagagctgtataatctccgatccccttgcaccatcatcgattaa

SEQ ID NO: 33212 - DNA, 351 bp, Oryza sativa
  Clone ID: PAT_MRT4530_37346C.1
atggtcgttgctgaggtgctccttgaggttgctgaggcatgggctcgaattgattgtattgaggaacaaactaaggttgagccaatcctccctgttggtattgaacttgcggtgatggaggctgatactgataattcaaattgcccccctggtaattctgaaaatccggctaaatattgcacaccaaatgcttgggaacaacttgaggtatcactgtttgatatggttgcacattatgaactaagtgctctggaaccacttgattcgcagcatgctgtccaggctgattaccaggcgttgcaaacccagccgatgcattcatcaggccttgctgctgaatcggctgaatga

SEQ ID NO: 33213 - DNA, 1473 bp, Oryza sativa
  Clone ID: PAT_MRT4530_37347C.1
atggcgtccaacttctccttccctccgctggcgccggagcagatcgcggaggcgctgcacacctacggcctcgcccccaccgccaacctccgcgcggaggacatcgccaacccgcagccggatctcctccccgccgtcatctccaacttcctcgccaccgtcgtcgaccccaccggcgccgacgacctcgacgggcagctagggttcgacgcgctggcgtcgctcgacaacccggagcactacagggagggcatccgggtcctccgcctccacaagagggccagcgctttcctcgagtccatccagttccccgggttcacgctccgcgacctcctccgccccgacccgcgccgcctcgtgcaagtcctcagcgccctcatcaacttcctctactacagggacgacaagctcgccctcctgcagcccatcatccacgagttccccaacttggatgaacggtgcatggagctcaatgccaagattgccgagcatcagaaggcaatcgccgatcaagagctcgccgcgcaaatggaggtgcctatggttcagcagctagaggcggaggtcaattccctgaagcaaaaacttgtagagtacaacaaaaagcagctggcactgagggccaacgccactgcgatcaatgacaagaaagaggagacccacagaaagattgccaaaagcgattttgagttggtgaaactagcccaagaaaattccaagttattgtcaaaaattgttcagtccccagaaaagcttcagagggcccttgaagagaagaaaacagctcgtgctgagttgaagaatgctgagaagatagcaatgcaaagtgtacaagagaaaactgccactttggagatatacagtaagggttatgaaaaattgtcgaagcattcttctaaaatccaggctttacaagaacagtttactgcaactaaagcccttgagaaagaagtcaaagcgcgcaaagctaagattagtgatgaaagtgttgaaattatggcccttgacacaaagactattgaatgggatgggaaagtgcatgaaatggaggagcgtgttaaagctaaagaaaaagaaagggatcaaatagtagcagacgaaaatcagaagctggctgctttgaggtctgaagttgaatggaaactcaagtgtcttgaacctcgtgaaaggaaagtagaggaaacaattgcaaaggctactaaactatgtgcggaggttgattcaacaaggactgatgctgcagaagaactgcggctgatatatgctaaatttcaacaaattggacatgcctttacttgctacaaggacaattttaagactttcttggaacaagttgatgaggtgagcaaagaaactttagaaagtttaggtcgccaagctgtggagccattggacacatctgcaacattgtcgattgagaaaggttgccaagtaaaaactttggattatctgtcctactatctgtcttcatag

SEQ ID NO: 33214 - DNA, 1006 bp, Oryza sativa
  Clone ID: PAT_MRT4530_37348C.1
cacgccgccccactctcgccaaccccctccacgtccacgatctgcccgctttgcagtgcccgggcgccatggacgccgcctcctgcgtgggcgtggccccggccgcgctgctgtccaggtccttctccgacgccgccgccatcgcccgcgcgctccacttctccctctgcgactcctcgccgctccccgagccgacgacgcatcagtacgttgctgccaccgacgtcgaccttggcgcgtgcggcgttgccgtggccgcgcccacgcctgcagtgtcgagcgagaacgccgtggtgctgaaaacccgggcgtcgttgtcgccgtcggctcggtgccggcttgggccggcgggtggcgggcgcgcggggaagcggcggccgaggccgtcgaagcgggcgcccaccacgtacatcagcaccgacgcggccacgttccgcatcatggtgcagcaggtgaccggcgcgcaggtcgagccgcaggacgacgcctgcctcggcctcctcatgccaccaccgcccttcgacgtcgtcgaccccgccgccttgctaccggcagacaccgcggcgtgcgcgggcgcggcccacgtcgccacttgcgtcccccaccctctccacgctgccgctgctgcggcggcagcggtggctgccccggagcagccgtgcttcccgacgctggactcgtggaacgtcatgtacggcaaggacgaggttgtttgaattaccaaggtaggagtactacgtacttgtaactaatgaatgatgcatgccatcgtgtgccctgcccatcgatcgcttgctcccatcgtctgttcgacgtagaattgtagagagaagctgtacattactgcacgcagtgagccgtgtgtccgtggtggcagagcgcgtcggagtgtgctagcttagctagtgtagcaaattagcaaccaggttcccggctctcctacctttcttgtgatggattcctatagttgcacttgcagatgcgtctcaacctcgtgcaaaaaaaa

SEQ ID NO: 33215 - DNA, 299 bp, Oryza sativa
  unsure (1)..(299): unsure at all n locations
  Clone ID: PAT_MRT4530_37349C.1
ncgcgcgaccgccgtgcgcaagacacgcagacccaaccgcgcgcgcagtcgcctgggcagaacgatggtccggtccaagctggagcacagcatcaagttcatcaaggccggatttggctaccgtgagaaccaccgacgcgtcggctactacgatggccggatcagcatgctgcggaacctgaagatcgcgccccacaccatctggaatgaacctgtccaggcgaaggacgtgggcccgaacgcggaccatacaccattcgacctgatcatggagttccacaacgactaccgggggcaca

SEQ ID NO: 33216 - DNA, 1455 bp, Oryza sativa
  Clone ID: PAT_MRT4530_3734C.1
atggaggaagtatattggctcgatgatttggagctaataatgggctatactgttaaacttgctcgaacaggtgaagcgcaccacgctgcaaatctcttcgccgtttcggattccacactctccagcttccgaggcaaatctctctccgccgcttgtattaatcacgtcctcctccattcgccttcatcttcctcgcttctcccaactcgaaaattcccagtttctctttcagtttcagctactccggtgatctctcagctctcgatcgatcccatcatgggcggcggcggcggcgagaatcgcgtcgacaaccacgacgacgacgacgacgactgggagctggccgccggcgccgcgctcgccgacgtcacactcgttctcgtcgggaaggtcggctccgggaagagcgcgacggcgaacagcatccttggagacgaagcgttcgagtccaagtgttcctatgccggtgtcacgcaaacctgccagaagaagagcaccacggttcaggatggctgcttgatccgcactatcaacgtcattgacactccaggtttattcgacatggacattaaagctgaggatgtgcgtagagagatcgtcaagtgtatggacatggccaaagatgggatacatgcgatgctcatggttttttcagcaacatctcgcttttcctgtgaagatgagaagacgatcgagactctgaaatcgttcttcggcgataaaatccttgaccatatgatattggttttcacacgcggagatgaagtaggtggggagaccagttggaaaaatatgttatctgacagtgcccctacatatcttcaggacattctcaagttgtttgaaaatagggtggttcttttcgagaataagaccagtagtactcaggaccgccaggcgcagcggaaaaaaatgcttgatgcagtggactttgtcgtatcaagcaatcatgggaaaccattttcaaatcagctgtttactcagattcaggaggtgcatcacagacagaaagatgccaattctgaggtgtattcatcaatgcaagagactgacagttacatttcactcataaccaagatggtagaagaaaagctaaacggtacaatcctgaggatggaacaacagcttctgaaagagcaggaagcgaggctggatatacagaacgagatgacgaaggcaatcctaagatcagaagaggacatcaggagactgaggctgagcctagagaaggctgaacaagagagtaacaatgctcgagaggaaaacaagagatttagagaatcggagaaggctagtaaagaacaggagaagcaaacagaagctgagattcagaagcttaaagagaagatggagaaggacagagaagaaagggaggaggagattcgcaggcttagagatgatctggagaaggagagagaagaaaggcagaaacaaagcggttgcatcattctttaa

SEQ ID NO: 33217 - DNA, 1220 bp, Oryza sativa
  Clone ID: PAT_MRT4530_37350C.1
cttcgtgtggtttgacgggcacatctcaggctgaagttgactggcaggctaaaggcccatcaatgtctctaatatccttctctcgaggcgtcggatgtttcattatgtttgtttgatggcttgaattattcacttcatccctcaaatataatgagaggtccggagagcctacgacaccaacggacaaaacctttcaggattaatctagtcctatcatcgaagggtacggggttatccccagagtgccaattcagcacaacaaaattcttaatttccacaagttcgaagtctatgagttcaaactccacgtcggccatcccatagaaaagttcttcttcaatgtgcaagaaccggagttctcgacatcaagcttgggaaaatggtgttttttgtccagatctcacgataaaaaaactctttgatggaaccccattcccaaattcgagacaattgtggaagtgttggctgtctctccttttgagtcccctgaatccctcctcgaagatgatttccactgcatttgttgagaaagaggacgatcttggagaggtgattgagttacccaaaaccgatccgtattcacgacctctatagttgtgctcaaacctcttccttcaggccttcgtcatgcttttctacatggtgactcagagtcgcccgtcgacataagtgacaaactgagtgatgatctgacctcccgactcatagccatgctagcaaagcattgctctattctaggctactttcttcaagttctcaaagggattagtccggctctctacacacatcatatccccctagacccttcttgcgcactctcttgggagccacaacagaggctaaacaatacgatgagagaagttgtgaaaaagaggtctatcctatgtcgtatagcgaatgggttaacccagttcaggttgtgcctaagaagggaggcatgacagtagttgaaaacttgaagaacgagttaatcccggaatgagctgtcattagatggaggatgtgcattgattatagaaaactcaacaaggctataaaaaaggaccattttctgctgccctacattgatgagatgttagagcggcagacaaatcattccttcttttgttttcttgatgggtattctggttatcatataattcccatatattcctacgatcaaagcaagacaacgttcacgtatccaatggaatgtatgcttactatcgaatgtcattcag

SEQ ID NO: 33218 - DNA, 379 bp, Oryza sativa
  Clone ID: PAT_MRT4530_37351C.1
tttaggaggaggaggaggaaaagctctctctctctctctctctagattcgattcctttcgtccggcgcggccaacccgaaaggctgcggccgtcgcagtccaatcgattccccccctgcgctgcgctgcgctttcccacccctcgaagccgaatccgatggttcctccacccgttgaccgcctccgccatcggaggccgcgccgcgccctcgaaccccgcgccgcctgctgctgcctccgccgccttcgcctcctatagataccgccccggctcaccgcggcccggccctcccggggggcggtcggcgccccccccgacatgcagagggacttcgccggcaggctccgcctcgcgcccttccccgtctccccgaccacc

SEQ ID NO: 33219 - DNA, 421 bp, Oryza sativa
  Clone ID: PAT_MRT4530_37352C.1
ggcacgagccaccgccgaactcggcccgttctctcaaaaaaaaaaaaaaaactcggctgggttcttctcagttctctcctctcctctcctctcgtcctccgcctctagcgagaactgagacggtgaaggggtggatactggagactggaaaatccatgaatccatccagagtcggattggtttctcgctctttccctccctcctgatcttatttcaaaccattcagtttttgttgcgattttgctgcttgggtggtggtggagcaatggaagggtttctgcatcgccggaaaccaaccacgacgatgacgacgacgaggaggaggaggaagatgccgttgcttccggcgagtctcccgagcagcggcggccgctctagaggatccaagcacgtacgcgtgcatgcgacgtcatagctcttc

SEQ ID NO: 33220 - DNA, 216 bp, Oryza sativa
  Clone ID: PAT_MRT4530_37353C.1
atggcgagggagctttgtccacgtcgttgcggcaacaagcgcatgcgcttctgtccccctaaagcacatgtctaccgcaacaacaacatctttgtcaatgatgacacaaatgatgctcgcgttcagtggatcaagaacaccaattcgcagtgtgttccacagacctcctcatcccttcacctcgcagattcgaccaagcaccacctgatgctctag

SEQ ID NO: 33221 - DNA, 188 bp, Oryza sativa
  Clone ID: PAT_MRT4530_37354C.1
ttaccgtccgcgtggagcgcttaagtgttcaccttgagtatcagtggggaaccggctggaccggaatcgcccgcacactctgaagccgaaccaccggcctgagcatgaacttctgggggaactcacattggcaagatccgcccacaacagcctagagccagaaaccaatctcacgcatgcgcgcgggg

SEQ ID NO: 33222 - DNA, 2187 bp, Oryza sativa
  Clone ID: PAT_MRT4530_37355C.1
atgaagtccctgacttcatcaaggaagaagcggaacccgaagagactctcgatcttccaatcttggaaccgccacctcgacctccgcttgagtttaaacctctacctcaaggcctatgtgagacaatcagtggagatggagcctgcaaatgcggaggacagtgtcgccaaagccctacggtaccgcgatcaattggtaagaaaccgaacccagtccagaggaatccatggcgtggttgaagaagatgaaggagatggccatcattgcttgcccgaactccatggcagcaattcgttccaagtggtggaggatgcatcctcggctgcacgtcgtgggcgccgcggcgggcatgatggtggacgtgggaagagacccaccacacaatcgattagcagtgcaccatcctcggcagcacgtggtggtcgaccgaggaaggcgccatacaagcagccacggccatcgagcagtggagctgctaccggggtaacggccagtgcagacaatctctgcgcagaaggatttgtcgacagtgagacatgtaatggaagtggaatgaaggagtttgacaaagcagaatggtctaccacaaacactaggatattttgtgaactatgcgtagaacaaatcgaagccggcaataggcctatcgggataatgactactagggggtaccagaacattgctgtcaagtacttgcagaaaacagggctacgacacagcaagatgcaattgaagaaccgatgggatatactaaaagccttgtatagcttttggcttggcctcctcaaagatacagggcttggatgggatagtacacaaggaacagtttcagcaagtgataaatactggaagcaagtcactaagggtcattctgaatggaagaagctacaacatggtcccccggattgtgaagatttattgagtcaaatgtttgctgaggttgctgttgatggttcttctgcttgtgcacctggagaggatgttggaggggctggtgtacaaagccttgatgacacaccagtggacatctcattgcatagatacacaacgaataacaaatcagtgaaacgagggtgtattaccactgaaaatagtccactgaagaaggttaagaaccccatggttaaggtgatgaagaatattcagtccactttggacaccaattgtagtattgccaacaagattggcatgtatgcaagtgatgatgaggatgaggatgaaacttttgttgttgctagcagacaactagacatgatgagaaaagttggacctgtattgacagcatttggtatgttatatgctgaaacttatttgaacaagtcaaagtatagagaagctactttagctggttatgattgggttatgagaaacctcaatttcccacaagattgttatgatatgtttagaatgagtaggccactgtttgagaggttacataatttgttggtaacatcttatggtttgaagtcaactagtaagatggattcaattgaagcgttgggaatgtttttatggactattggggctccacagtcatttgttcaagttaaaaaccgatttgagagatcaaaaggaacaatcagcgtgaaatttgaggaagtgttgcagagtgtttaccttctctcaaaagatctagtcaaacctagagatccacacttcacaacgattcacccaagactacatggtgatcggtttcagcctcatttcaataattgcataggtgcaatagatgggacgcatatactagttgttgtgcccgcatcaaaggtggttcagcatgtgggtaggaacaagtatcccactcaaaatgttttggctgtttgtgactttgatatgaggtttacattcattgttgcgggatggcccggatcggcacatgatatgagggtgtttaatgatgctttatgcaaatatgccactatcttccctcatcctccaccagggaaattttaccttgttgactcgggctatccaaatcgaatgggatttctagctccatataaagggaccaaataccatttaccagagtttcgagcgggtccacgtcctagtggcaagaaggaggtgttcaaccacttacattcatctcttcgtaacgtgattgagcgttcttttggcgttttgaagatgaaatggagaattctattggacttacgagttatccgatgctcaagcaaacaaaaataa

SEQ ID NO: 33223 - DNA, 907 bp, Oryza sativa
  Clone ID: PAT_MRT4530_37356C.1
cacgagggcagacactaaccgtggagtagtctgatcgatctatagaaatactaagtagtagaacgcagtactgtagccaaaaactaggccaagagagagattgggcgttctgagcgtagccaaagacatggcaactgatgcccacataacacacttcgcccatccacaacaccgccttctcaagaccccgtacagcagcgcctcgcgccatgtctgcgacatctgcgaagccaagctctccggcctcgtcggctaccgctgcaacgcctgcgacttcgacatccatgaggcgtgcgccgactacttcaaggagaccatctccttcttcgcccacccgtggcacaccctcacgctctgccgcatgcctcctgagaataaaggatgggtatgtgacctctgcatggagcattgtcccccaggaaatttcgtgtaccgctgcatccagtgcaagttcgacgtgcaccccctgtgcacgttgctccctcagacgatccgcagcccgcttcacccacaccacgacctcaacatggtaccttcttcagggcactgcaatgcttgccctgaacgtttgcccgtgtggcactacatctgtggcccttgtacgtctccgtcttatcggctacatatcgggtgcgtctctggcgcgccaagcggtgtcggtcagggtagcggcagcaccaccaaccagaacaacagtagcagccgtggccagggcaccggcaacaccagcagcggtgccaaccaaactaccagtgatgctcggaacactactgctgttgttgagcggagccgcagcactagcgtcagcaagtttctcctcaagaaaagcttcatgatagcgattgacctagcaaccggcgggctggcatcgccggtgctcgacgtccttcaagcggtcctcgattaa

SEQ ID NO: 33224 - DNA, 387 bp, Oryza sativa
  Clone ID: PAT_MRT4530_37357C.1
atggagttcgggcaagcaatgatggccatctccttcatcttcttcaaccacgccatggattcctctggactggggaagaagacgggacatggagttgggaacgcggcggcgcggccgggggtggagaaggctgctcgcgcgccgggggtggagaaggcggcgcgattgggaaagaaggagaggtttaaactcaagcggaggtcgaggtggcggttccaagattggaagatcgagagtctcttcgggttccgcttcttccttgatgaagtcagggacttcatcttccaaaagggcctcgggagactcaagggaaaaaggcttcatgacatcatcgatgatgtcaacaccggcgagaggctcgggacatcacggtcaccggcgatctag

SEQ ID NO: 33225 - DNA, 198 bp, Oryza sativa
  Clone ID: PAT_MRT4530_37358C.1
tgttatgtccgacagcctgatgctcgcatagtaagggagctatatcgatcttttgcgcattctaaccggcctgcggccatggataagggcatgctataccaaattccatgcattggaaggattcacgaatacccattctacttcttctgccactttcaggggtaaacgcgcgtgagaatttaccagatccgccccccc

SEQ ID NO: 33226 - DNA, 2334 bp, Oryza sativa
  Clone ID: PAT_MRT4530_37359C.1
atggcggaagaaagagaaagcttcgagagtcagtgggcgccctccgatgtgacggaagataatctgaaggagatggtggcacacggcgttcttccgacgaaggagatcatcgggtggcgaccggcattcggcgaagcattcccaacccccaatacgcatgaaatcgtggtatttgctcatttcttctgtggcggtttctcccttctaacctcaagatttttccggggaattctaaatttctatggaatcaacttgcatcatctgaatccaaactccatagtgcatattgccaattttattcatgcctgcgaagcttttctgggcattaggcctcattttgccttgttccgccgcatcttcttcctcaagccccagccaaacaagagcaaaccatgtgttgttgggggggctggtttccaactcaggggaaccttaagccaaaaatacttctctatgcctttcaaaacctcaaacaaaggctggcacacaaattggttttatgttcaaaaccctgagcctgctctccccgagtactcctgtcttcctacagtttatcgggatacttggaactcactgccaatgggagatgaagctgcgcaagcagtggaactgatggagaggatgataaagctaaaagaacaaggccttcaaggagaacagatcacccagcactttatcaagtgtcggttagctccaatcaaagagagatctcgcacagcctttgagtttgacggcaaacatgacccaaatcgtgaagatcctgactctcttgacttcaaggtcatgaaggaaaagatgtataagatcttctcaaatgctatcgttgtcagctattcacacttgctgccagtcgtaccgttcaatgcattcaatcctcctccaccggaatttgctttgatgaagtcggatcccccaatcgctcaacaccaatcacctcgccgccaaactggtcagggaagaggaggaccaaaaattcggtctgaaacccaaccaagtgcttctgatccaatcggccagtcagattctcgcaagaggaagctagttttaagtgacgacgaaggcgatgataccggaaagctcagagataaaggagcgaccggaagacctccgaagccaactaatctgaagaagaaaacctccagtcgtcctgtaccaaaaattagaaagtcttccaggaaaccatccgacatagatccttctaagaaagactctgacccgactaatatggaagcagattcctcaaaagaaaccgagccgactgcaaaagatcacccgagtgataatccgcaggccagcgacaatgtaaaacccagcaacgaacccacgaccgcaagccagtcggccgaagctggagtcggagttaaccaggagcccccgactggaaaccagtcggatgcagggccaagccaaaaaattcccgaggttgaagctcaaacaaacagtcctcccggaaaggatgctggcaatgactcagaaaccagatctcccgtgaagacacaagagtccactcgtccccgaccgggaatcatcatagggccaatgattggtgatgaagaagagatcctccggatacaagcagctgaggattcgcgccctcccatcctggtcaagtggtgggatgacaacatgcagcctcaaggaattgtaataaataagcaaaaagaagatgaagaagtatgcttgctgaaaaaggcgatcagccaagccacccgcattgtaaataggattcatcttaggaacgaagctaaaacggcaaccttagagagagtcaatgtagtgcaagctgccaagatatctcaactggagaagcagattcaaactctggaaaatgataaggcagaactggcaagacagagggactcagctttaaaggaggttgaagaccgcaagatcaagtcccaggcacagtttgatgtcttagttgacaagatcaataggcttgaaggggccagggataaagtcactaatgctgctactccactcatccaagccatgttcttcaataacgccggtccgagtacacttgatgctgccgaaatcttcaacaagctgagagtcgctccggatacttacttcaagaacatcaaagaagctggaagtatgggagcaagtctggcgttggcgatgaccaaatccctttatccaagagttgacattgatgccattgatggctttgcaaacgggacgagcgaagaagctgctcttgacctcatcaatgatgcgataaaagccgctgacaagattgctgctgacgtggttgagagattccaagatgtcgaccttcggccgactgggtctgataattctgatgatgaaaaaactgatactgattga

SEQ ID NO: 33227 - DNA, 382 bp, Oryza sativa
  Clone ID: PAT_MRT4530_3735C.1
ttgtatcttgagctcaatcagcagcaacatctggctggttcttgcttagttgaggcctgcgccctcccaagaagatgaagaggtcttgctgcggcggctactgcggttgcggcagctgctgacactgcggcggaggttgctgcggatgcacgatgttccttgatgtggaggccacagccaccaccaagacctacgtcctcgctggtccatgcaacaaggcgagctctggaggtatggagatggccgtggagagcgcgtagaacggcggctgccgctgcaacacctgcaagagtggaaccagctgccgaggcttgtgctgctgctcctgcaactggaatttatcgacgttgtcacccggctgcatgaggatttatcgtatgga

SEQ ID NO: 33228 - DNA, 2058 bp, Oryza sativa
  Clone ID: PAT_MRT4530_37360C.1
atggcggaagaaagagaaagcttcgagagtcagtgggcgccctccgatgtgacggaagacaatctgaaggagatggtggcacacggcgttcttccagcaaaagagatcatcgggtggcgaccggcatttggtgaggcattcccgacccccgatacacacgaaatcgtggacacatggaactcattgcctatgggagatgaagctgctcaggcagtagaactgatggagaggatgataaagctgaaagaacagggtcttcaaggagagcagatcacccggcactttatcaagtgtcggttagcaccaatcaaagaaagatcccgcacagcttttgagtttgatggcaagcatgatccaaatcgggaagatccagattctcttgactttaaggtcatgaaagaaagaatgtacaaaatcttctcaaacgctattgttgtcagctactcacatctgctgcccgttgtgccattcaacgcattcaaccctcctccaccggaatttgctttgctaaagtcggatccaccaatcgctcaacgccgatctccccgccaccaaactgggcaagggaacggaggaccaagattttggtctgaaactcaaccaagtgcttctgatccagtcggccagtcagactctcgaaagaggaagctggtcttaagtgacgacgaagccgatgatactaccaggaggcctggagaccgagagacaaccaagaaactaccaaaacaggctactccaaggaagaaaacatccagtcgccctgcgccaaagatcaggaagtcttctagcgtggacgcaagttcttccaaagaaaccgggccaactgccgaggaccgtccgagtgacaatcagccggcaaccgataatgtagaatccggtgatcaacccctgactggaaaccagtcggccgaagccgaagccggagttaatcaggagcccccgactggaaaccagtcggacgcagggctaagccaagagattccagaagttggagctcaagcagacagccttcgcggtcaagacgccagcaataaccagagatctggatctcctttaaaggcatccaaatctactcgtcctcgtctagaaatcattacggtggatacattagggccaatgatcagtgatgaagaagaaattccccgcatacaagcagctgaggattcacgccctccgattctggtcaagtggtgggatgacaacatgcagcctcaagggatcgtgataaataagcaaaaagaggacgaagagttatgcctactgaagaaggcacttggtcaggcaacccgcattgtaaataggattcatcttaggaacgaagctaaaacggcaaccttagagaggctagtccctcatctcgggacccttgaaaccaccaggagtctgctgcacgagacaaaagagcttgccaggaaaaatgagcatgatctgaggaatcgaattgctgagctccaggaatccaattttgaactgagtggctcatcgaaagtaatcaatgtagtgcaagctaccaagatatctcagttggagaagcaaattcaaactctggaaaatgacaaggcagaactggcaagacaaagagacctggctttgaaggaagttgaagaccgcaagatcaaatctcaagctcaattcgacgtcctggttggcaagatcaaaaaacttgaaggagcccaggatgaggttgctaacgctgctgccccaattgttcaagcgatgttcctcaataacaacggcccgagtgcacttgatgcttctgaaattttcgacaagctgagagttgctccggatatatatttcaagaacatcaaagaagctggaagtatgggagcaagcatggcgttggcgatgactaaatccctttatccgagagttgatattgacgccattgatggctttgcggacgggacgagcgaagaagctgctcttgacctcatcagtaatgcgcagaaagcggctgacaaaattgctgctgatgtagttgagagatttcaggacaccgatcttcgaccgactggtcctgatatttctgatgatgaaaagactgatactgattaa

SEQ ID NO: 33229 - DNA, 272 bp, Oryza sativa
  unsure (1)..(272): unsure at all n locations
  Clone ID: PAT_MRT4530_37361C.1
acctctgaacgcatacatcaantagaattncccgtcatacttcattgaagttgcancnctggcgcncctcacaagtganaaaatcnngaatccccctcaaatctccnggngggtgnngggaggggtgactccttctaantcnttcatcctcccaaaaanctgttnaacgtaatgtcnncaaanccnntatcctccaatcacattgcatntatgggntatccaaaaatgtccnagagcccgcgacccaaganggttgaccccttnctggggcg

SEQ ID NO: 33230 - DNA, 2136 bp, Oryza sativa
  Clone ID: PAT_MRT4530_37362C.1
atggtggcgcacggcgttctcccagcgaaggagattatcgggtggcgaccggcgttcggcgaagcattcccgacccccgacacacacgaaatcgtggtatttgctcatttcttctatggcggattttctcttccaatctcaagattctttcaggggattctgaacttctacgggattagcttgcatcacttgaatccaaactccatagtgcatattgccaattttattcatgcctgcgaagcttttctgggcattaggccttatttcgccttgttccgccgcatcttcttcctcaagccccagccaaacaaaagcaaaccgtgcgttgttggaggagctggtttccaactcagaggaaccttgagccaaaaatatttctccatgcctttcaaaacctcaaacaaaggctggcatgcaaactggttctatgttcagaatcctgagcccgcactccccgagtactgctgtcttcctccggaacaaggtttgcagggagaacagatcactcggcactttatcaagtgtcggttagctccaatcaaagaaagatctcgcacagccttcgaatttgacggcaagcatgacccaaatcgtgaagatccagattctcttgactttaaggtcatgaaggaaaggatgtataagatcttctcaaacgccatcgttgtcagctactcacacttgctgccagtcgtaccgttcaacgcattcaatcctcctccaccggaatttgctttgatgaagtcgaatcccccaatcgctcaacgccgatctccccaccaccaaactggccaagggagcagaggacccagaattcggtctgaaactcaaccaagtacttctgatccagtcagccagtcagattctcgaaaaaggaagctggctctaagtaacgacgaagccgatgatactgccaggaggcctggagaccgagagacaaccaagaaactaccaaaacaggttactccaaggaagaaaacatccagtcgccctgtgccaaagatcaggaagtcttctaggaaaccatctgatatagatccttctggaaaagactctgacctggccggcagggaagcggatccctcaaaagaaaccgggccgactgcaaaagatcacctgagtgataatccgcaggcaagcaacaatgtagaacccagcgacgaacccccaactgagcccccgactgaaaaccagtcggatacagggccaagccaaaaaactcccgaggttgaagctcaaacaaacagtcctcccggaaaagaagctggcaacgactcagaaaccagatctcctgtgaggacacaagagtccacccgttctcgtccgggaattatcacagggctaatgattggtgatgaagaagagatcctccggatacaggcagctgagaattcacgccctcccattctggtcaagtggtgggatgacaacatgcaacctcaaggaatcgtaataaataagcaaaaagaagacgaagagaggattcatcttaggaacgaagctaaaacggcaaccttagagaggctagtccgtcatctcgggaccctcgaagccaccaggagtcagctggataatgtagtgcaagctgccaagatatctcagctggagaaacagatccgagatctggaaaatgacaagatagagctggcaagacagagggactcagctttaaaggaggttgaagaccgcaagatcaagtctcaagctcaattcgacgtcctagttggcaagatcaaaaaacttgaaggagcctgggatgaggttactaacgctgctgccccaattgttcaagcgatgttcttcaataaccatggcccgagtgcacttgatgcttctgaaatttttgacaaactgagagtcgctccggatacatatttcaagaatatcaaagaagctggaagtatgggagcaagtctggcgttggcgatgaccaaatctctttatccgagggttaacattgatgccattgatggctttgcagacgggacgagcgaagaagctgctcttgaccatatcagtgatgcacagaaagtcgctgacaagattgctactgatgtagtcgagagatttcaggacaccgatcttcgactgactggtcctgataattctgatgatgaaaagactgatactgattaa

SEQ ID NO: 33231 - DNA, 2184 bp, Oryza sativa
  Clone ID: PAT_MRT4530_37363C.1
atggcggaaaaaagagaaagcttcgagagtcagtgggcgccctctgatgtgacggaagataatctgaaggagatgttggcgcacggcgttcttctagcaaaggagatcatcgggtggcgaccggcattcggcgaagcattcccgacccctgatacgcatgaaatcgtggtatttgctcatttcttctatggcggtttctcccttccaacctcaagattttttcggggaattttgaatttctacggaatcagcctgcatcatctgaatccaaactccatagtgcatattgccaattttattcacgtctgcgaagcttttctgggcattaggcctcattttgccttgttccgccgtatcttcttccttaagcctcagccaaacaagagcaaaccatgtgttgtcggaggggctggtttccaactcaggggaaccttaagccaaaaatacttctctatgcccttcaaaacctcaaacaaaggctggcatgtgaattggttttattgtcaaaaccctgagcctgctctccccgaatactcctgtcttcctccagtttatcaggatacttggaactcattgccaacgggagatgaagctgcgcaagcagtggaactgatggagaggatgataaagctaaaagaacaaggccttcaaggagaacagatcacccggcactttatcaagtgtcggttagccccaatcaaagagaggtcccgcacagcttttgagtttgacggcaaacatgatccaaatcgtgaagatccagactctcttaactttaaggttatgaaagaaaggatatataagatcttctcaaatgctattgttgccagctattcacacttgttgccagtcttaccgttcaatgcattcaatcctcctccaccgaaattcgcattgatgaagtcaaatcctccaatttcccagcaccaatcacctcgccgccaatctggtcagggaagcggaggaccaagaattcggtctgaaactcaactaagtgcttctgatccaatcggccagccagattctcgcaagaggaagctggttctaagtgacgacgaaggcgacactgctagaaagctcagagaccgagaggcaaccaagaaactgctgaagcagccgaccagcagggaaacgaacttaaaaggaaccgagccaactgccgaggatcagctgagtgacaaccagccagcaaccgataatgtagagtctggtgatcaacccccgaccggaaatgagtcggccgaagctggagccggaattaatcaggagcccccgactgaaaaccagtcggacaccaagccaagccaagagattccagaagttggagctcaagcagatagtcctcgcggtcaagatgccagccacgaccgaaggtctggatctccttcaaaggcatctgagtccactcgtcctcatccagaaattatcacgggaccaatgattggtgatgaagaagagatcctccggatacaagcagctgaggattcgcgccctcccattctggtcaagtggtgggatgacaacatgcagcctcaaggaatcgtaataaataagcaaaaagaagatgaagagaggattcatcttaggaacgaagctaaaacggcaaccttagagagagtcaatgtagtgcaaactgccaagatatctcaactggagaagcagattcaaactctggaaaatggtaaggcagaactggcaagacagagggactcagctttaaaggaggttgaagaccgcaagatcaagtcccaggcacagtttgatgtcttagttgacaagatcaataggcttgaaggggccagggataaagtcgctaatgccgctactccactcatccaagccatgttcttcaataacgccggtccgagtacacttgatgctgccgaaatatttgacaagctgagagtcactccggatacttacttcaagaatatcaaagaagctggaagtatgggagcaagtctggcgttggcgatgaccaaatccctttatccaagagtggacattgatgccattgatggctttgcagacgggacgagcgaagaagttgctcttgacctcatcaatgatgcgcaaaaagcagctgacaagattgctgccgacgtggttgagagatttcaagatgtcgaccttcggccgactgggtctgataattctgatgatgaaaaaactgatattgattga

SEQ ID NO: 33232 - DNA, 2331 bp, Oryza sativa
  Clone ID: PAT_MRT4530_37364C.1
atggcgaaagaaagagaaagctttgagagtcagtgggcgccctccgatgtgacggaagataatctgaaggagatggtggcgcacggcgttcttccagcgaaggagatcatcgggtggcgaccagcattcggcgaagcattcccaacccccgatacgcatgaaatcgtggtatttgctcatttcttctatggcggtttctcccttccaacctcaagattttttcggggaattctgaatttctatggaatcagcctgcatcatctgaacccaaactccatagttcacatcaccaatttcattcatgcctgcgaagcctttttaggtattaggccacatttcgccttgttccgccgcatcttcttcctcaaaccacagccaaacaagagcaaaccatgtgttgttgggggggctggtttccaactcaggggaaccttaagccaaaaatacttctctatgcccttcaaaacctcaaacaaaggctggcacgcaaactggttttatgttcaaaaccctgagcctgctctccccgagtactcctgtcttcctccagtttatcgggatacttggaactcactgccaatgggagatgaaactgcgcaagtagtggaactgatggagaggatgataaagctaaaagaacaaggccttcaaggagaacagatcacccggcactttatcaagtgtcagttagctccaatcaaagagagatctcgcacagccttcgaatttgacggcaagcacgacccaaaccgtgaagatccagattctcttgacttcaaagtcatgaaggaaaggatgtataagatcttctcaaatgctatcgttgtcagctattcacacttgctgccagtcgtaccgttcaatgcattcaatcctcctccaccggagttcgcattgatgaagttagatcctccaatctcccagcaccaatcacctcgccgccaaactggtcagggaagcggaggaccaagaattcggtctgaaacccaaccaagtgcttctgatccagtcggccagtcagattctcgcaagaggaagctggttctaagtgacgacgaaagcgatgataccggaaagctcagagataaaggagtgaccagaagacctccgaagtcaactaatccgaagaagaagacctctaggcgtcttgtaccaaaaatcagaaagtcttctaggaaaccatctgacatagatccttctgagaaagactctgacccgactaacatggaagcggattcctcaaaagaaaccgggctgactgcaaaagatcacccaagtgataatccgcaggccagcgactatgtaaaacccagtgacaaacccacgactgcaagccagtcggccgaagctggagtcggagttaaccaggagcccccgactgcaaaccagtcggatacaaggccaagccaaaagattcccgaggatgctggcaatgactcagaaaccagatctcctgtgaagacacaagagtccactcgtccccgaccgggaatcatcacagggccaatgattggtgatgaagaagagatcctccggatacgagcagctgaggattcgcgccctcccattctggtcaagtggtgggatgacaacatgcaacctcaagggatcgtaataaataagcaaaaagaggacgaagagttatgcctactgaaaaaggcacttggtcaggcaacccgcattgtaaataggattcatcttaggaatgaagctaaaacgacaaccttagagaggttagtccctcatctcgggaccctcaaagccagcaggaatcaactgcacgagacaaaagaacttgccaggaagaatgaacatgatctgagggatcggattgctgagctccaggaatccaattttgaactgagtggctcatcaaaagaccgcaagatcaagtcccaggcacagtttgatgtcttagttgaaaagctcaacaggcttgaaggggccagggataaagtcgctaatgccgctaccccactcatccaagccatgttcttcaataacgccagtccgagtacacttgatgcttccgagatcttcgacaagctgagagtcgctccggatacttacttcaagaatatcagggaagctgggagtatgggagcaagcatggcattagctatgaccaaatctttataccccaaaatcgatgtcgataccattgatgggtttgcagacgggacgagtgaagaatcagccctcgacctcatcaatgatgcgcaaaaagccgctgacaagattgctgctgacgtggttgagagattccaagatgtcgactttcggccgactgggtctgataattccgatgatgaaaaaactgatactgattga

SEQ ID NO: 33233 - DNA, 411 bp, Oryza sativa
  Clone ID: PAT_MRT4530_37365C.1
aattcctgcagcccggcttcgcacgttgccactctgcccaccgtcgccccacttcgcctgcttgctctacccgccggcttcatgcggcgccgctccgcctattctgctcccctctggtcggctgctcccatgggagagagcggacagatacagagaagagaggggatgagagaggagaggatagaggaagagaggttgaaaggggaggggaagaagaggctgacgtgtggcggtagggaaggtctcctcgccaccttgctaatgggctcgtggatctgggccgacgatggccggatccgtcatcctgcctcgtcacatggtgtcatcagggatgatggagacggcggcggtggagcgaagcagtcgtcaatgctagctacgaagaggtccatcatagataccggctacgag

SEQ ID NO: 33234 - DNA, 2061 bp, Oryza sativa
  Clone ID: PAT_MRT4530_37366C.1
atggcggaagaaagagaaagcttcgagagtcagtgggcgccctccgatgtgacggaagataatctgaaggagatggtggcgcacggcgttcttccagcgaaggagatcatcgggtggcgaccagcgttcggcgaagcattcccgacccccgatacacacgagattgtggacacctggaactcactgcctatggggaatgaagccactcaggcagtagaactgatggaccgtatgataaagctgaaagaacaaggtctgcaaggagaacagatcacccgacatttcatcaagagccggctgcccccaatcaaagaaagatctcgcacggcctttgaattcgacggcaagcatgaccccaaccgtgaagatcctaaatatcttgatttcaaggtcatgaaggagagaatgtacaaaattttctcaaatgcaattgtagtcagctattcgcacttgctgccagtggtgccgtacgacgccttcaaccctcctccaccggaattcgctctgatgagatctgaccccctgattgctcaacaccgcttacctcgtgggaaaactagccaagtcagcggaggaccgaaaattcggtctgctgatcaatcggacacttcaaaacctaccagtcagtcggacttccgcaagaggaaactagccttgagtgatgatgaaggcgatgacgctaaaaaaactggtggtgaggaaacaaccggaaaacaaccacgacaggcgaatccaaagaagaaaacatccagtcgtcccatgccgaaaatcagaaaatcttccagatccttctggaaagaccccaagccgactgacatggagacaagttctttaaaagagaccgggccgactgcaggggatcactcgagtgacaaacagccggtgaccgacaatatagaacccagcaacgagcccccgactgagagccagtcggccgaagctggggttggttctaatcaggagcccccgactggaaaccagtcggatacggagcagaacaaggacatccctgaagcagagactcgagctgacaaccctcctaaaaaagatgccaacactgacccagggtcgagctctccgtctaaaatacaagggcccactcgtccccgaccggaaataatcacaggcccgatgatcggcgatgaagaagaaatcctgaggatccggtcacctgaggattcacacccacccactttaatcaagtggtgggacgatgataaacaacctcagggaatcataataaataggcaaaaagaagacgaggaagtgtgcttgttgaaaaaggcactcagccaagccactcacattgtaaacagaatccatctcaggaacgaggcgaagaccgcaactcttgaaaagttagtacgtcatcttggaactctcgaggccaccagaaaccagctgcacgaagttaaggagctcggcaggaaaactgagcatgatctgagagatcgagttgctgagctccaagaatccaacttcgaactactcagttcatcgaaagtgcaagctgccaggatttctgaattagagaagcaggtcgaagctctggagaaggacaaggccgaactagcaaagcagagggacttggccttaaaagatgttgaagaccgcaaaatcaagtcccaagcccaatttgatgtcctggttaataaaatcaagaggcttaagggagctagagatgaggtcgccaacgccgctgcaccactcgtccaagccatgttctataataacagcagtccgagtacacttgatgcttccgagatcttcgacaagctaagagtcgctccggatacttacttcaagaatatcagggaggctggaagtatgggagcaagcatggcattagctatgaccaaatctttataccccaaaatcgatatcgacgccgttgacgggttcgcagacgggacaagcgaagaaacagccctcaaccacatcaatgatgcacaaaaagccactgacaagattgctgctgacgtagttgagagattccaagatgtcgaccttcggccgactgggtctgataattccgatgatgaaaaaactgatactgattga

SEQ ID NO: 33235 - DNA, 230 bp, Oryza sativa
  Clone ID: PAT_MRT4530_37367C.1
gaatactaacagatatcagaactgaagtatacttcatttacatactggcattacaattttcaaaaacatgattaagcacatattcttgcagtgctatatatatatatacacgagtactccggagtctatacccagggaacacttaccccggggggcattaactaaaaaaggaaaacttacacaaggagtattattagaacataaaaaggcaccaaacaagtccttactgg

SEQ ID NO: 33236 - DNA, 2352 bp, Oryza sativa
  Clone ID: PAT_MRT4530_37368C.1
atggcggaggagagggaaagtttcgagagccagtgggcgccctccgatgtgacagaggaaaatctaaaagagatggtggcgcacggcgttcttccaacgaaggagatcatcgggtggcggctggcatttggtgaggcattcccgacccccgatacacacgaggtcgtggtattttctcactttttctatggcgggttttctcttcccacttcaagatttttccggggaattctgaacttctatggaatcagcttgcatcatctgaatccaaactccttagtgcacatcgccaattttattcacgcctgcgaagcttttctaggcattaggcctcatttcgccttgttccgccgcatcttcttccttaaaccccagccaaacaagagcagaccgtgcgttgttgggggcgctggcttccaactcaggggaacactaagccaaaaatatttctccatgcccttcaagaccttaaacaaaggctggcacgccaactggttctatgttcaaaatcctgaatcagcccttcccgagtactcttgtctccctccggtctaccaagatacatggaattcattgcctacaggagatgaggcggcccaagtagtggaactgatggagcgcatgataaagctgaaagagcaagatccagactctcttaactttaaggttatgaaggagaggatgtacaagatcttctcgaatgctatcgtcgtcagctattcgcacttgctgccagtcgtgccattcaatgttttcaatcctcctccactggaatttgctttgatgaagtcggatcccccagtcgttcaacgccgatcaccccaccaccaaaccagtcaagggagcgggggtcccaagatccgttctgaagactggccaaatacctccaatccagccggccagccatattcacgcaaaaggaagttggtgtcaagtgacgacgaaagcgatactgctagaaagcctggagaccgagaggcaaccaagaaactgccgaagcaggctactccaaggaagaaaacatccagtcgccctgtgccaaagatcaggaagtcttctaggaaaccatctgatatagatccttctggaaaagactctaacctgaccagcagggaaatgaacttaaaagaaaccaagccaactgccgaggatcagccgagtgacaaccagccagcaaccgataatgtaggatctggtgatcaacccccgactcgaaacgagtcggccgaagctggagccggaattaatcaggagcccccgactgaaaaccagtcggacactaggccaagccaagagattccagaagttggagctcgggcagacagccctcgtagacaagacgccagcaacgacccgatgccagggtcccccgttaaggcgcaagagtcaactcgtccccgtccagaaatcctcacaggaccaatgactggtgatgaagaagaaattccccgtatacaagcagctgaagactcgtgccctcccatcctagtcaagtggtgggacgatgataggcaacctcaaggaatcgtaataaacaaacaaaaagaagatgaggaagtatgcttgctgaaaaaggcactcagcgaggctactcgcattgtaaatagaatccatctcaggaatgaggcgaagaccgcaactcttgagaaattagtccctcatcttggaactcttgaagctaccagaagccagctatatgaggttagagagctcgcgaggaaaactgagcatgatctgaggaatagaatctccgagcttcaagaatctaactatgaattaagtggttcatccaaagtgcaagccgccaggatttccgacctagagaagcaggtcgaggctctggagaaggacaaggccgaactagcaaagcagagggacttggccttaaaagatgttgaagatcgcaaaatcaagtcccaggcacagtttgatgtcttagtcaacaagatcaataggcttgaaggggccagggataaagtcgttaatgccgctaccccgctcatccaagccatgttcttcaataacgccggtccgagtacacttgacacttccaagatcttcgacaaactgagagtcgctccggatacttacttcaagaatatcagggaggctggaagtatgggagcaagtatggcattagctatgaccaaatctttataccccaaaatcgatattgacgtcgttgatgggtttgcagacgggacaagcgaagaaacagccctcaacctcatcaatgatgcacaaaaagccgctgacaagattgctgctgacgtagttgagagattccaagatgtcgaccttcggtcgactgggtctgataattccgacgatgaaaaaactgacactgattag

SEQ ID NO: 33237 - DNA, 2163 bp, Oryza sativa
  Clone ID: PAT_MRT4530_37369C.1
atggcggaagaaagagaaagcttcgagagtcagtgggcgccctccgatgtgacagaagataatctgaagaagatggtggcgcacggcgttctcccagcgaaggagattatcgggtggcgaccggcgttcggcgaagcattcccgacccccgacacacacgaaatcgtggtatttgctcatttcttctatggcggattttctcttccaacctcaagattcttccgggggattctgaacttctacgggattagcttgcatcacttgaatccaaactctatagtgcatattgccaattttatccatgcctgcgaagtttttctgggcattaggcctcatttcgccttgtttcgctgcatcttcttcctcaagccccagccaaacaagagaaaaccgtgcgttgttgggggagctggtttccaactcagaggaaccttgagccaaaaatatttctccatgcccttcaaaacctcaaacaaaggttggcatgcaaactggttctatgttcagaatcctgagcccgcactccccgagtactactgtcttcctccggaacaaggtttgcagggagaacagatcactcggcacttcatcaaaagtcgattagctccaatcaaagagagatcccgcacggcttttgagtttgatggcaagcatgatccaaatcgggaagatccagattctcttgactttaaggtcatgaaagaaagaatgtacaagatcttctcaaacgctattgttgtcagctattcacatctgctgcccgttgtgccattcaatgcattcaaccctcctccaccggaatttgctttgatgaagtcggatcccccaatcgctcaacgccgatctcctcaccaccaaactgggcaagggagcggtggaccaagaattcggtctgaaactcaaccaagtgctcctgatccagtcggccagccaaattctcacaagaggaagctagttttaagcgacgatgaaggcgacactgctagaaagcttggagaccgagaggcaaccaaaaaactgccgaagaaaccatctgatatagatccttctagaaaagactctgacccggccggcagggaagcggatccctcaaaagaaaccgggccgactgcaaaagatcacccgagtgataatccgcaggcaagcgacaatgtagaacccagcgacgaacccccgactgtgagccagtcggccggagttggagtcggagttcaccaggagcccccgactgaaaaccagtcggatacagggccaagccaaaaaactcccgaggttgaagctcaaacaaacagtcctcccggaaaagaagctggcaacgactcagaaaccagatctcctgtgaggacacaagagtccacccgttcccgaccgggaattatcacagggccaatgattggtgatgaagaagagatcctccggatacaagcagctgaggattcacgccctcccattctggtcaagtggtgggatgacaacatgcagcctcaaggaatcgtaataaataagcaaaaagaagacgaggaggtatgcttgctgaaaaaggcgctcaaccaagccacccgtattgtaaatgaatccaattttgaactgagtggctcatcaaaagtgcaagcagccaagatatctcagctggagaaacagatccgagatctggaaaatgacaagacaaagctggcaagacagagggactcagctttaaaggaggttgaaaaccgcaagatcaagtctcaagctcaattcgacgtcctagttggcaagatcaaaaaacttgaaggagcccgggatgaggttgctaacgctgctgccccaattgttcaagcgatgttcttcaataaccacggcccgagtgcacttgatgcttctgaaatttttgacaagctgagagttgctccggatacatatttcaagaacatcaaagaagctggaagtatgggagcaagtctggcgttggcgatgaccaaatctctctatccgagggttgacattgatgccattgatggctttgcagacgggacgagcgaagaagctgctcttgaccttatcagtgatgcacagaaagccgctgacaagattgctgctgatgtagtcgagagatttcaggacaccgatcttcgaccgactggtcctgataattctgatgatgaaaagactgatactgattaa

SEQ ID NO: 33238 - DNA, 627 bp, Oryza sativa
  Clone ID: PAT_MRT4530_3736C.1
atgcgtaaggagaaaataccgcatcaggcgccattcgccattcaggctgcgcaactgttgggaagggcgatcggtgcgggcctcttcgctattacgccagctggcgaaagggggatgtgctgcaaggcgattaagttgggtaacgccaggatatttgagaaacattccaaaggatctccagatatatcagaagagttgtttgctctagcaagaggtcctgatgctcgagtaacccattacacaagttatatgattaatggatggagatttaacaccagggaccgagacatgttggttcaatcacaaaacagtggagtctttgttaaagaagaagaagaaaatgatccaactttatcaaataagtctagttctgaagcatgccaagagaatgagcatatcacggctgcattgaattacactacaattgatgatggtgacttccctacggttctcagtaaagatggagtcgaatgtgaacccattgaagcagaaccagtaacacattctgaagatgatatgtttgaagaggaagaagaagaggaagattctgaaagtgatggcgctgagtatacagatacagatgatgaaagtgacatccaaagtgaagaagatgtagatgacagttaa

SEQ ID NO: 33239 - DNA, 1901 bp, Oryza sativa
  Clone ID: PAT_MRT4530_37370C.1
atggcgaactacttcgacccggagtcgtccggccgccgggaggagtaccgccgctacagaaagagattatcttcttcaaatgcctctccactgttgggtactgcggtctccaaattttcagaagcaaggctgttctgtgatggaaacagcatacagaggcggcccaatgctggtctactccttgaagatatcaagcaggaggctgctgatatttctgattttgatagcctggatgaatctaagctgtttggatcaggaaaaaaaagggcatcattggatgcctcagatgcaggtttcagttcaggtaggcaggcagtgcggtcggcattgaaatcagtcaaactggaggaggatatgccacatgaaggagaaacaacttctacaatttttgcatccctccttgattctgcaatccaaggattgatgcccttctcggatgtgattttacaatttgagaggacatgtcgaaatgcttcagagtcgataaggtccgctgggacaggaaagcttcggatggtggaggatagacttatgcagcaaaaagcgcaattgttactggatgaggctgcttcttggtcacttctttggtacctctatgggaaaggaaatgaggagcttcctggagagctatttgtggcaccgactacttcccatcaagaagcttgccgctttgttgtaacagaccttacggcacagttatgtctacggattgtactttggcttgagggtcttgcttctgaagctcttgatttggagaaaaaggtgagaggatctcatgttggttcatacctaccaagttctggtgtttggcatcgtacacaaaggtacataaagagaaagaacaatgatactactatagtgaagcatgtggattttgatgctccaactcgtgaaggagcccaacttcttcctgatgacaagaagcaagatgaattgcttttagaggatatctggactctcttgagagcaggaaggttagaagaggcatctgaactgtgtcggtctgctggtcagtcatggagagctgcaactctttgcccctttggtggcatagatttgtttccttccttggaggccatgctgaagaatggaaagtctagaacactgcaagcgattgaattggaaagtggtgttggacggcagttatgtctttggaaatgggcttcatattgtgcttcagagaaaattgctgaacaagatggtggccgatatgagatggcagtatatgctttacaatgcagtaacttaaagcgtatcttgccgatctgtactgactgggagtcagcttgttgggcaatgacaaaatcctggttaggtgttcaagtggatctagtattgtctcagtaccaaaccagtagaccagaagagaaacagtttgatgacgagatgaatggaacccaacctatgttgaactcagctggcccagaaagttggccacacagtgttcttgatcagcaaccccgtgatatatctgcgcttctgcagaaactccactcgagcgaccttgtccatgaaactgtttctcgagcatgccgggagcagcatagacaaatcgagatgaatctcatgagtggaaatatagctcatcttcttgatcttttatggtcatgggtgtcaccgtctgaagacgaccaaaacatattgaggccccgtgatgaccctgatatgatacgcttcggagcacatattgttcttgttctgagataccttttcagcgacgaaatggaagatgagtttgaggaaaagctagttgctgttggtgatctcatcatcaacatgtatgtgaggtacttgttttcagagcagcaagaggaattggttggagtatatgcttctcagcttgagcgtgacctttgcattgagttgtttgttgaaatgatggaactaagattaaatagcag

SEQ ID NO: 33240 - DNA, 2004 bp, Oryza sativa
  Clone ID: PAT_MRT4530_37371C.1
atggcggaagaaagagaaagcttcgagagtcagtgggcgccctccgatgtgacagaagataatctgaaggagatggtggcgcacggcgttctcccagcgaaggagattatcgggtggcgaccggcgttcggcgaagcattcccgacccccgacacacacgaaatcgtgaatcctaagcccgcactccccgagtactgttgtcttcctccggtctaccaggacacatggaattcattgcctatgggagatgaagctgctcaggcagtggaattgatggaacgcatgctaaaactgaaggaacaaggtttgcagggagaacagatcactcggcacttcatcaaaagtcgattagctccaatcaaagagagatcccgcacggcttttgagtttgatggcaagcatgatccaaatcgggaagatccagattctcttgactttaaggtcatgaaagaaagaatgtacaagatcttctcaaacgctattgttgtcagctattcacatctgctgcccgttgtgccattcaatgcattcaaccctcctccaccggaatttgctttgatgaagtcggatcccccaatcgctcaacaccgatctccctaccaccaaactgggcaagggagcggtggaccaagaattcggtctgaaactcaaccaagtgctcctgatccagtcggccagccaaattctcgcaagaggaaggtggttttaagcgacgacgaaggcgacactgctagaaagcttggagaccgagaggcaaccaaaaaactgccgaagaaaccatctgatatagatccttctggaaaagactctgacctggccggcagggaagcggatccctcaaaagaaaccaggccgactgcaaaagatcacctgagtgataatccgcaggcaagcgacaatgtagaacccagcgacgaacccccgactgtgagccagtcggccggagctggagtcggagttcaccaggagcccccgactgaaaaccagtcggatacagggccaagccaaaaaactcccgaggttgaagctcaaacaaacagtcctcccggaaaagaagctggcaacgactcagaaaccagatctcctgtgaggacacaagagtccacccgttctcgaccgggaattatcacagggccaatgattggtgatgaagaagagatcctccggatacaagcagttgaggattcacgccctcccattctggtcaagtggtgggatgacaacatgcagcctcaaggaatcgtaataaataagcaaaaagaagacgaggaggtatgcttgctgaaaaaggcactcagccaagccacccgtattgtaaataggattcatcttaggaacgaagctaaaacggcaaccttagagaggctagtccctcatctcgggaccctcgaagccaccaggagtcagctgtacgaaacaaaagagcttgccaggaaaaatgagcatgatctgagggatcgaattgctgagcttcaggaatccaattttgaactgagtggctcatcaaaagtgcaagctgccaagatatctcagttggagaagcagattcaaattctggaaaatgacaaggcagaactggcaagacaaaaagacttggctttaaaggaagttgaagaccgcaagatcaagtctcaagctcaattcgacgtcctggttggcaagatcaaaaaacttgaaggagcctgggatgaggttgctaacgctgctgccccaattgttcaagcgatgttcttcaataacaacggcccgagtgcacttgatgcttctgaaattttcgacaagctgagagttgctccggatatatatttcaagaacatcaaagaagctggaagtataggagcaagtctagcgttggcaatgaccaaatctctttatccgagggttgacgttgatgccattgatggctttgcagatgggacgagcgaagaagctgctcttgacctcatcagcgatgcgcagaaagccactgacaagattgctgctgatgtagttgagagattctag

SEQ ID NO: 33241 - DNA, 151 bp, Oryza sativa
  Clone ID: PAT_MRT4530_37372C.1
gtcagatagaattcagacgaaggcagtctgcatgattcacaagaatgtatgcatacgcattctggatcaagcacaccactggatgatggagctgaagcgatctgagtactactgtgtgatggtgcaagaagctatcgaatcttgctttggg

SEQ ID NO: 33242 - DNA, 207 bp, Oryza sativa
  Clone ID: PAT_MRT4530_37373C.1
atggagaagaagggcggcggcgcggggatggagggcggcggacagatccctaacccttttcgcagccgcgccggctcaccgaagagcgaggggcccatccctccggcggtggtgggggcaaaggagtggtggggggagaagggcgaggccccgcagagagaagggcggcttcctggagacgacggctccaacgagcgcaagaactag

SEQ ID NO: 33243 - DNA, 2061 bp, Oryza sativa
  Clone ID: PAT_MRT4530_37374C.1
atggtggcgcacggcgttcttccagcgaaggagattatcgggtggcgcccggcgttcggcgaagcattcccgacccccgacacacatgaaatcgtggtatttgctcatttcttctatggcggattttctcttccaacctctagattcttccgggggattctgaacttctacgggattagcttgcatcacttgaacccaaactccatagtgcatattgccaattttatccacgcctgcgaagcttttttgggcattaggcctcatttcaccttgttccgccgcatctttttcctcaagccccagccaaataagagcaaaccatgcgtagttgggtgtgctggtttccagctcaggggaacactgagccaaaaatacttctccatgcccttcaagacctcaaacaaaggctggcatgcaaactggttctatgttcagaatcctgagcctgcactccccgagtactgctgtcttcctctagtttaccaggacacatggaactcattgcctatgggagatgaagctgctcaggcagtggaattgatggaacgcatgctaaaactgaaggaccaaggcttgcaaggagaacagatcactcgggacttcatcaaaagtcgactagctccaatcaaagagagatcccgcacagcttttgagtttgatggcaagcatgatccaaatcgggaagatccagattctcttgactttaaggtcatgaaagaaagaatgtacaagatcttctcaaacgctattgttgtcagctattcacatctgctgcccgttgtgccattcaatgcattcaaccctcctccaccggaatttgctttgatgaagtcggatcccccaatcgctcaacgccgatctccccgccaccaaactacgcaagggagcggaggaccaagaattcggtctgaaactcaaccaagtgcttttgatccaatcggccagtcagattctcgaaagaggaaactggttataagcgacgacaaagcagatgatgccaccaggaggcctgaagaccgagagacgaccaagaaactaccaaaacagactactccaaggaagaaaacatccagtcgctccgcgccaaagatcaggaagtcttccaggaaaccatctgatatagacccgtctgggaaagactctgacccgactaacatggacacaagttcttccaaagaaaccggaccaactgctaaggatcatccgagtgacaatcagccagcaaccgacaatgtagaacccagcaacgagcccccgactgggaaccagccggccgaagctgaagtcggtgctggccaggagcccccgactggaaaccagtcggatgcaggggtaaacgaagagattccagaagtcgaaacccaagcagacaaccctcacggacaagacgccagcaatgaccggagatctagatctcctttaaaagcatccgagtccactcatcctcgtccagaaatcattacagtggatacattagggccaatgatcagtgacgaagaagaaattccccgcatacaagcagctgaggattcacgccctccgattctggtcaagtggtgggatgacaacatgcagcctcaaggaatcgtaataaataagcaaaaagaggacgaggagatcaaatctcaagctcaatttgatgtcctagttggcaagatcaaaaaacttgaaggagcccgggatgaggttgctaacgctgctgccccaattgttcaagcgatgttcttcaataacaacggcccgagtgcacttgatgcttttgaaattttcgacaagctgagagttgcttcggatacatatttcaagaacatcaaagaagctggaagtatgggagcaagtatggcgttggcgatgaccaaatccctttatccgagagttgacgttgatgccattgatggctttgcggacgggacgagcgaagaagctgctcttgacctcatcagtgatgcgcagaaagcggctgacaaaattgctgctgatgtagttgagagatttcaggacactgatcttcgaccgactggtcctgataattctgatgatgaaaagactaatactgattaa

SEQ ID NO: 33244 - DNA, 223 bp, Oryza sativa
  Clone ID: PAT_MRT4530_37375C.1
ctgtaaggttctcacagctgcttccacttgtataggggtttcacagagatatagaaaaattgcccacttctgcttgaataaggttaaatcagcactaagttcacttctctctgtaggtccacttgtgaacactaagctagtgtttgggtttttgttttgtgaggtttgtaaaatcacggttcctgcttgtgcccgggttttggaaaaaaaaaaaaaaaaaaaa

SEQ ID NO: 33245 - DNA, 147 bp, Oryza sativa
  unsure (1)..(147): unsure at all n locations
  Clone ID: PAT_MRT4530_37376C.1
cgctgttgacagcttgtcgttcaagggggatgagtccgcgnagttgcattcaccgnngctacagcaaccgtcaacggtctccaacctcctacgactcaccgcctccccatctgtgagctcacctacacctttaagtgctccggcacg

SEQ ID NO: 33246 - DNA, 2006 bp, Oryza sativa
  unsure (1)..(2006): unsure at all n locations
  Clone ID: PAT_MRT4530_37377C.1
aaaggtgaaagcagccatgnccccttatatccattaatattaggatgtaggtcttcagcaaaagagtcctgcttttaacttgtaagctttattttggatgcctcctttcttctacagtggacataggttttgtacaaacacccaaaatatctgttggatggctggacacaagcatctcattcactttgatcctttgtgtgctgggaatgttctttgaatagcttcttagcaggtggagctggaactgaagctatagtgttggtcctttttttgcttgcacttttgctaggcacagaagggctaataggtggatcatcaggtgtattgacaaaagttcctttgatcttatgttcagattcagattcagatggtccagctgcaggaagagatggatgttccaaagttttctgtccactctttggctttgtggccttatcatcaatggaaggctgcattgtttgagattgcataggatatgctaagacaacatatttctttttggtggatcctgaggggttggacttgctagttggtgtgtcatctgctgcagcgctaacaacatattttgttggtgttgatagacttggctgtagagatgcactttgctttcctctggttgatgactgtgattcaatactgctttcgcttgctgcgggtggtgtttggagtgaagtgccagggctcagtggtacgatagttgaggtgcgtcctgaagcagacggtgagataggcaggaagtgctgttttggggcaccagatgatacaatgctattgacctgtaaggattcttgattccgtttaactgtgtgttcagtgaagctgacattccatacaaaggcttgatctacaagagcttggatctcagctgggataaagtcaggtggattttcttcgattagagactccactggtctgtgtattaggcgatgtgcaattcgtccgaagaggacaaatgcagcttcagaagtgttgtctgcggtagtgagcacaactttgtatcttggcactggcattcctatataacaacagctagagcatctataggtagaaccatatggctttgaagttctgcagcatcggtcacatgaattgtaccaccagcagttttcatcatgtatgctcttgatagtaacattgacaataaaacgtgctcgcttatatttgtgcggatttagttttagaatttctttaatggttttttcctctggagtgtcttggttgaatgcaggagcagcattttcaacccatttgattggctggaagttgacactgaagctttctttcaatttgagcacgtcaggtatgtccagattgatataccatttgcatggtgagctaccagttattgttaagcctatccctgcataatctctgacaagtgttccaacaaacacgacaacctggggtttagtttggccatccttatatattttctctgcatcaaaagcagttgatcgatctccccacagtgtgacaggcagtgttgagttgctgtgttttgcattaacagtaaaattagtgtagcttgcatcacagatctgcaatgttctttttaaactatcagcatcccttgaccttggacgcacgatagatgtggaactgatctcagtaatgacgcccataatatcaacatagaatatgtttttaccaacaagagaggggatttcttggaaatgtgtcaatgaaaatgttatggtagggaaatcagctgggatgtcaatgcattcttctaaggttgtccatttactgaataaaatcatgaagtcatttgaaactggtctataagtcctgtttgcatctttgacagtgaacgactcaatgtagtagatcttcccttcatggatgagaggtttcagaacttcaattgcgcctcgatacatctgaacatgaatgctattgcctctgtccacggcctgctcgcgctccactgctcggcctgccgccgcgctcgcaccttccgctgctccgttgctgcgctcgccctccgctacgccggccgcatccat

SEQ ID NO: 33247 - DNA, 849 bp, Oryza sativa
  Clone ID: PAT_MRT4530_37378C.1
atggacaagacgaacagtgtgccgtgccttgccctgtacgtgaagcacggcgccgactcagacaagccggcgctattcagcatctcggagaagaaggccatcaacaacaacatccccgggctgaccaacacaaactcctgggtgacgccgcagggctggatcctagtccgcgacaccgtctccaccgccacgtttctgcagaatcctcatgattcgaccgataagattcagctaccgcacctatcccagaatgtgcacagcagttccacatgtctgctctcctgcaagcccacgatgcctggctgtgtcgttctccttgttgagccagtcggcactatcatctggtactgtcacattggagacgatgacaagtggggcaagttctacttcaatggtgacttcgaaagcatcggcgtgctggagttctcccccgagccaacattcagctccatcacaatcaccgaccccatcatcggaggattaggggtggtgggcatggcaaacgtgtacctggtggagtccttggatgaactttacatggtctgccaaatgtatgactctgaaatggagaccatctacgatgtcactgtttataggatggatttctcgaagcagcaatggtgcgtagccgaggacattggtggccgtgcgttcttgacagcttcatgctattttggtgcttcacggtcggctgatgagtatgggttggagaaggattgtgtctacgctatttttgcgcgtgataagtattacgaggtatccaaggtggaagatggagaaaccgaggagcacgagctcatcgaagctccagattcgaaaggagggacgtggattttgcccgttgaataa

SEQ ID NO: 33248 - DNA, 1992 bp, Oryza sativa
  Clone ID: PAT_MRT4530_37379C.1
atggagaacgcaagcccagtcgtcagtgtccctgtgccttgcctctccatggagcaacgcgacgagtctgcagataagcccgtgctgttcagcatctccgacaagaaggccatcatcgacggcgacatcccggggctgaccaacgccaacgcctggttcacgccgcagggatggatcctactccgcctgagcaccgccacgttcctgcagaaccctcaggattcccaagacaagatccatctccctcatctaccagaaggcttgtctaccagatgctcgtgccagctttccggcaagccttctctccccggctgcatcgtcctcgtcgtcgagcccatcgccaccgtcatatggtactgtcgcatcggcgatgacgagtggacgagacacgagtacgacattggaacgttgcccttcgatccacccatcgatggaaaggaccacgatgatgtggcgatatgccagattgccgcttgccatggcaagttctacttcaacggtttcttcgacaccatcggagtgctggagttcaccccaacaccggtgttcagctcgattgagatcgtcgacccgaccccgggaggattaggggtgacgggcgcggcgcacgtctatcttgtagagtccgaggacgaactatacatggtgtgcttgcggattgactatgagtttaccatctacgatatgacagtccacaagatggatttcttgagccgtcaatggcgcagagccgacgagattggcggccgcgcattctttctagctccgttgtacttcggcgcttcatgttcggctgatgagtacgggcttgagaaggattctgtgtatgcctcgtatgcagtggataaatgttttgaggtatccaaggctagtttcgcgtgagcttcggccagtgattgctgtgatcgactcggaatctgtctgtacgtactccgattgacacatctgcatgcccggcctatataagagatggttaagcacagttgcagttgatccaacgcgaggagccgacgtcgcatcaccacagttcaccatggacaagacgaacagtgtgccgtgccttgccctgtacgtgaagcacggcgccgactcagacaagccggcgctattcagcatctcggagaagaaggccatcaacaacaacatccccgggctgaccaacacaaactcctgggtgacgccgcagggctggatcctagtccgcgacaccgtctccaccgccacgtttctgcagaatcctcatgattcgaccgataagattcagctaccgcacctatcccagaatgtgcacagcagttccacatgtctgctctcctgcaagcccacgatgcctggctgtgtcgttctccttgttgagccagtcggcactatcatctggtactgtcacattggagacgatgacaagtgggtgaaacatgagtacgacatcggaacgcagccattggacccccccccccccccttggacggcaaggaccacgagaaggtgccgatatgctcgatcgccgctttccagggcaagttctacttcaatggtgacttcgaaagcatcggcgtgctggagttctcccccgagccaacattcagctccatcacaatcaccgaccccatcatcggaggattaggggtggtgggcatggcaaacgtgtacctggtggagtccttggatgaactttacatggtctgccaaatgtatgactctgaaatggagaccatctacgatgtcactgtttataggatggatttctcgaagcagcaatggtgcgtagccgaggacattggtggccgtgcgttcttgacagcttcatgctattttggtgcttcacggtcggctgatgagtatgggttggagaaggattgtgtctacgctatttttgcgcgtgataagtattacgaggtatccaaggtggaagatggagaaaccgaggagcacgagctcatcgaagctccagattcgaaaggagggacgtggattttgcccgttgaataaagt

SEQ ID NO: 33249 - DNA, 574 bp, Oryza sativa
  Clone ID: PAT_MRT4530_3737C.1
tagtggatccccgggctgcaggcaacagtcaggctcacgcagagtaggcagcaccgcagcagcaccggcggcgaaggcgtgaacctcggcacgggggaaggattgcaggccaagacgctgaggctgctattggaggttgagctgctgcaacatcaggccccgtaatggtggctacaggagctctgcgacctcaatccgacggcgggtgcacggcgaactcgatacggcgcggcggggtcgcggcgggatccatcctgcattcgagttgcgtcgagctcaatccaaagcttcagagggaggttgagcagtggtagcgggacgcggcacgatcggagcacgagtggtggacgtacgcaggcgcaccccgagcttactgatggcagaaccaacagtggaggaaagtcatacaaatcacgtggtttcgtcttgactacaacaaaccatttagggtctctagtatctttgacataatatacttgctcagcttgtgttgccaaaatatatggctcatcaattggcaatgtatgggaagtattaattaagcatgcaggatgaaataagaacttcccatcac

SEQ ID NO: 33250 - DNA, 335 bp, Oryza sativa
  Clone ID: PAT_MRT4530_37380C.1
cgaccaaggacgtgaacacgcaccccggccgagccgaagaagacagttttcggctgcgtgaactttacgcttcggccggagcgttcggacgcctggccggtgcctgcgttgatggcaaaatgggaccgcaactggatgcagaagtggttctacgtcgacaacccatactccaccgaggacgacaaggcgaactggctccgctttcggcgccttcctgtttccatcatcgccaagccaagtgtagagatcgacggcacactagtcccggctcatccttcttcacaacattacgcggcggctaagtacccgcgacctctatgaggaatggtgcagaa

SEQ ID NO: 33251 - DNA, 396 bp, Oryza sativa
  Clone ID: PAT_MRT4530_37381C.1
atgatgagtgatggagcggtcaagctcatgtggagtcgtcgtccacgcttaccgttgaaagcttcagaagttcagagcacttatccttccgtcggtgaggtagctggcagcggcatccgtgcgccaggagcggcagatcacacaaaggcggatgcggtcggggagggacgggaggtggaggagcaagagcgcaagcaggaggcagccgtgcgcgagaccggcagcagtggcgaggagtgcgagcaggaggcggccgcgcggggggcaggcggtggccacgtcgatggcgtggagcgcgaccaggaggtggccgcgcgtgaggcggctgcggcggcgctccgtgttaggggcaatttcgctattttgaaaaatttctcgcctcttttgacccagtag

SEQ ID NO: 33252 - DNA, 5878 bp, Oryza sativa
  Clone ID: PAT_MRT4530_37382C.1
ccccctgaattcccgacgatgagatcgatgaagaggccgggaattcacctccagatttgaggggatcgatggtggaatctccttctccctttcccaccaccactaccacttctgctgctgctcctcctcctcctcgtcggcggcaaccaccacctcccgccgctagcctgccttcccccggctaacctcgccctcactcactccactactacttttcctcttccgccccgccccctacatcctagatccatccatgctcatgctcatggacccccccgcccgcagccgcaggtgcactctcctcacgcgggccctcctcctcgccgtcgccgccctcgccctccgcctcatctacgccgccttcctcgccggcatggcgctctacccgcccctccccgccgccgccgtccttggctccaagacctacctccactccgccgtcgccacccccgacgcctggcgcacccgcgactggcggaaggccgtcgactaccacgccaccctcctcgccccccacctcgccgacggcatcctctccccgacctcccgcgccgtctgcctcggcgccgtgcaggaggccctcgccatgcgcgagctcggcgtctccaccgccgtcgccgtcgccaggaagcgctcccccccgctcgccgtcgccgggaacgaccgccgcctccccttccaggactcctccgtcgacttcgtcttcgccgcccgcgccctcgactcctccaagcgcccggctgacctcgccgccgagtccgcgcggatcttgaagccagatggacatctcgtcgtcctcactaccagcgccgccgacgcattcagcctccgcgcgctccaggcactcctcccctctctccgcttgctccgatctcgccagatcaaaggccccgacgactccaccctgcgggagctcgtcttccagaagatccaggactccactgacgatcctgtaaacaagtgcacaattggggatcacaagctccaactcctcacacatgcggagccactcatccaagaggagccgcgcaagccatggatcacgctaaagcggaacatcaagaacataaagtatctcccaactctcgcagacatcagcttcaagcgcaactatgtgtatgttgatgttggcgcccgtagctatggctccagtatcggcagctggttccggaagcactaccccaagcagaaccatacattccaggtgtttgccattgaggccgacccggccttccactctgagtacgccgcaaagaaggctgtcacgttgcttccatatgctgcttgggtcaagaatgagaccctcaattttgagatcaatgctgatcccgggaaggaggatgaggccaaggctaatggccgcggcatgggccgcatccgccccatggctggcaagaagatgtccggtgaggtgcggagtgtcccggcattcgactttgccgagtggctcaagcgcacggtgtcggagcaggactatgtggtgatgaagatggatgtggaggggacagaattcgacttgatcccaaggctgtttgatacaggcgcaatctgcttgatcgatgagctgttcctcgagtgccattacaaccgatggcagaaatgctgccctgatagagctgaagcatttgagatggcaaaaggggtctcatgcttctactggagtattcagtttccaaatttcaaagaccacctctgtttcagaaactgcagcaatgctagtagtacaaggcacttcagttacaggtctcttttgatccgaacagaaaagccagttactactagaaaccatgcatatgcagaagtagttgtatttgtcttggatcagaatcctatgtttttcctattcctccgttttttctaccctgcgattcaaaggggccctaactgctggtcatctgctaactccacagtgatgaggcaagcatttgaggtgttttatgatggatcatggcatggggtaaattgtataaggataaggaacggcaacctgtttgttaaatttatctactctggatcaacagtcgagcataatgttgatggggattgtctacgcttacggtcgagaagggcgacttgttctgattgttcaaatgttctcaagccaggtgttgatgtctgtgtgcagtcatctcatacacccgaagcaagttcacaaggaggaacaaacgcttctgtgttactgcgtcatgatgcaaggcttatcacaatcaagaagaatcatcaagaagataagtgtctctgcttgtttgttgttatactctacaagaaccagtgtcctggcaatgcagaaaaagtgataactgatagaagagcagaggtagtaaccataaacgatattttcctcctgcaaaagcttcaacctgaggtccatgaaggaagcatgaaatggagtttttcaaaggatcgcctctctcttaataaaggcaggctaataagtgctagattctcctcagaaattacacatctgatagtcttgtcgatcttgaggggaatggaattcaacatcaaattggtagaaggccagatcgtttatcaaataatcaaaggagatcaagcacaatggaatcttgattccatggccatccctccaggcttcgggaatacaatggagataatatcattccaattgcgtgatgaggccttgcgcccaacaatcacaaatatccctatcactcatgtgaaaaagaacaatatcacagaagacatgagattcactgtgaagagtgaaatggatagtgaactggatagggcattagatgttgagatcttgtatgagcatgtggatctgaggcgttcaaagcgcttgaagactcagccagatcgctttacaagttacgatacacctaggttccttagtggctacaagaagaaagaagcaagttcatcacccaccaagcatgtaaggggagctgtgcattgtgattcaccggtagacgattccaaaaaagaagtagaatcatgctgtgtagagattccagggaatgttacacagaagcaaacaggtgtacactctcccatggtcgatgaaaagtcaaactctccagaaggacagcataagaacacaactaagagaactacatgctctcttgtgaaggaaaaagcaagctctccagaaggacagcatgagaaaacaacaaagagaactacatgcgctttgcctgtgaaggaaaaagcaagctctccagaaggacagcataagaacacaataaagagaactacgtgctctttgcctgtgaaggaagagccaagctcagtggaaatagaggagaaaagctcaaaagagcaaagtgcaccggagtttcacattccacggacacctgcacagaataaagagaagcataatcgtcctcctttctcatgtaagccgaagctatttacttcatcaggcacccttggtgttaactgtgaaccagcattctgccaaaaggtgggcgggaaaagaaagaggcacatgtgcgagagagaatacaaacaaatgattgaccaatgcataggaaacattgagagtgaaatggagagggactctatgtttaacttcgatgccaatatgatgaattacgttcagcattcttatcgagaagaggattttacatggccaccttctgctgataaccaagaggtggaggaggatgagcttgaagaactgtggaaagaaatggattattcactgacgacattagcacttcttgagcaaaagcaggtgatggctcaaagtaggataaacatgctggtggataattttgatgggttgaggctggattgtttaactttgacggatgattacagatgctattatcaaaaaaaagaaaagtttgcagagtcaggatcagttaatgagagcaccgattattttggaaaagttggaggaataccatgccatcatgaatgcatactggatgaggagcttggactagcatgcagattatgcaatgttgtatgcactgaggcaaaggatatatttccagaaatgttcaatggaaatgactacaaggacagacctggatgcagcaatatttgccttgatgatgatatacttgatccttctcttcttgcaaacttggcaccagagttgtcagaattgaagaactcagggagcgtgtggagtgcaatatctgatcttgatccaaagctgcttcctcaccagagaaaagcactagattttctgtggaaaaatttggcggggtcgatacaggttgaaggaatggataactcaaatgtcagtacaggtggctgtgtgatagcacacactcctggatctgggaaaacactgctgcttatctcatttctggtgagttacatgaaagctcacccaagaagccggccattggtccttactccaaaagctgcaattcatacatggaagagagaatttgagaaatggggcatttcacttcctttacatgtgttccaccatgctaacagaagtggcaagccgttgggggcaatggattctaaactgcggtcgttattaaataattttcacagaccaacctggacaaatatgcgccttatggattctttggacaaactattcaagtggcatgcacatccaagcgtcctcctcatgacatactcatctttcttagggatgacgaaacaagactcaaaagtgcgaaaccgataccgagaatttatcgcagaggtcctgatgaacaaccctggactcttgattcttgacgaggggcacaacccaagaagcaacaagtccaagttgaggaagctgctgatgaaggtgaagactgagttcagaatcctcttatctggcacggccttccagaacaactttgaagagtacttcaacaccctatgtttggccagacctcggtttatcggtgatatcatgagtgaactagtgccagagaggaaaagagaaacagttggcaggagagccaaacatcaagaagcagtggcacgccgcgcctttgtggagaaagtgggccagaagattgagtctgacaacaaacatatcagaagtgatggtatcagtttgctaaacaagcttactcgtggattcatagattcattcgagggagcgaagctgatcaaccttccagggatacatgtgtataccgtgttcatgaagcccacggacattcaggaggagatgctggcaaaggtaacaatgcccaagctcgggtcgtcccggttccctctagaggttgagctgctcatcacgattggctccatccatccttggctcataaaaacgacgaaggccgtcagcaccttcttcagtccagccgaagtgaagaaggttgagaggtacaagcgagacttcgcggcggggtgcaaggccaaatttgtgatcgatctgctgcacaagtcgtcgttcagaggggagagggtgctgatattctgccacaacgtgtccccgatcacgttcctggtgaagctgatagagatggtgtttgggtggcggctcggggaggaggtgctggtgcttcagggtgatcaggagctgcctgtccggtccgatgtgatggacaagttcaacggcgacagcgcggggaagaggaaggtgctgatcgcgtcgacaacggcatgcgcggaggggatcagcttgacaggcgcgtcgaggctggtgatgctggactcggagtggaaccactccaagacgaggcaggcgatcgcgcgggcgttccggcgtgggcaggagaggacggtgtacgtctacctcctggtggcatctgggacatgggaggaggagaagtacaacagcaacaggaggaaagcttggatgtccaaaatggtgttcctgggacgctatgttgatgattcctcgcaaaaccgtgtcactgacatcgatgatgaggtcttgaaggagcttgccgatgaagatcacaccggcaccttccatatgattgtcaagcaagactga

SEQ ID NO: 33253 - DNA, 325 bp, Oryza sativa
  Clone ID: PAT_MRT4530_37383C.1
atcaaaaagtcaacaacgtcgtatattaaaatacggagggagtatgaaagtgagacttgtctctcaatccaaccaagaagcgataggttggactaactctcgtcctcaaacaaggagcaagtacaggtaacataagttatacataagaatctatactaaactgtataaatattttcccttgctttgacaaacttgctgtatcagatattcagatatcagcatggagaattcctcaggttcggggaaggtggctctccagctcttagtgttcctccgagctccgtcggcactagaggaacaagagagtggagcacatctgtgatca

SEQ ID NO: 33254 - DNA, 431 bp, Oryza sativa
  unsure (1)..(431): unsure at all n locations
  Clone ID: PAT_MRT4530_37384C.1
cggacgcgtgggtaaaaagtctctgtaagcattatctatctttagtttgagcatgataggctggcggcagcatcagatagtattcgattgtttgtgttatatgacctatctgtcatagactcagacgcaactaagaatttatttctctggtagagtcaactaatagtagatactctttatttgttttgaatatttacaataaagagcttgcttggtcttattattaaaggaccatgaactaaaaaaaaaaaaaaaaaaaaaaaaaaaaaaaaaaaaaaaaaaaaaaaaaaaaaaaaaagggngaacgatatagaggaaaaaaagataaaaaacaaaagaatgcaacccccaaaatgattaaatagaggaaccaaaaaatcaattcactggcccataaatttaaaaaagggggggccggttaaagaaagccc

SEQ ID NO: 33255 - DNA, 228 bp, Oryza sativa
  Clone ID: PAT_MRT4530_37385C.1
atggcaaagatcgcattcctgctcgctgccgctctgctcctcggcctcgtgtcagtgtcgcaagccatccaaggcaccgcgaccttctacaccacttacaacccgtcggcgtgctacggaaaccaggacaacgggaggatgatcgcggcggctagcgacgggctgtgggccggcggcaagatctgcgggacgatgttcacggctctagatgaagaaatgatcatctga

SEQ ID NO: 33256 - DNA, 258 bp, Oryza sativa
  unsure (1)..(258): unsure at all n locations
  Clone ID: PAT_MRT4530_37386C.1
agaanaaaaaaaaaaaaaaaaaaaaaaaaaaaaaaaaaaaaaaaaaaaaaaaaaaaaaaaaaaaaaaaaaaaaaaaaaaaaaaaggcctattgaaaagagcagtcttgaaaaaatacttctcatgattttctaaaagttgaaaaaaaagggttcgccaatatgctctatatgaaaggaccttgctttgatgcccactaaactgtaataactatggcaagttatgatgcaacagaagggctataatcctttatgggagc

SEQ ID NO: 33257 - DNA, 328 bp, Oryza sativa
  Clone ID: PAT_MRT4530_37387C.1
gaataaaaccctattcaagctcaagaagaacgggtgccaaacattaactgcacgagcattaaatacaatcgatatctaaggtttttctcgtatggcggattacatctacagactgtccagcttttgctgtgtacaacgcttataaacatcattataacaactcttgaacgacaagatcaacgctcacacgtcactttattttgtacacaatgaacaacctatcagctcctatcactactaaactgatcactacgttaacctatcttaacaaaccaacttgattacaccctcttcattataatacatcatcagaccactacatactttt

SEQ ID NO: 33258 - DNA, 203 bp, Oryza sativa
  Clone ID: PAT_MRT4530_37388C.1
ctctatgtcacagatgtggagcggcgagttggtggccggcgatgggcgtggcgggggcgccgcgagcgtgatggagaggtgggctacctccggcgttcggctgacgccgtcgccctcgcacaccaccgagagattattgaacttcacgctccgtcgagctcctgctccacgcgcgccacgggcacggtggggcgcgaggcggc

SEQ ID NO: 33259 - DNA, 2814 bp, Oryza sativa
  Clone ID: PAT_MRT4530_37389C.1
gcatatcttcatgttcacagtgcctttcaagtttgatacaccatctccggatgacgtggtcgctacaggactaaaatcgtcgagaagttttagaaaaggtattatctttgcattcccccactcccatgcgtgctatagttccatagtaacttgattcacatcagttgacacagatgctccccatgtcactgaaaagagggtgatggataatgatagttctacacctgagaaggatacaactgcagactcaaatttgcctgtaaagtcgaatgaattcggtgaaagtagtgagagtgtttctgttggtagtcaaaatgaaacactttgcttggaccatgagctacagcatttgagtttggagaggaagtcacaaaaaagtaaagccaatattaaaaagccagtttcttcatccctgtacaagccagaaccatggatgctccagcatgaagatgaaggcatccctagacaattaaatcttgctattgttggccatgtcgattctgggaaatcaactctatgtggtcgtttgttacatgccctggggaggatttcaaaaaagcaaatgcataaatatgagaaggaagctaaagaaaaggggaaaggatcatttgcatatgcttgggcaatggatgagagtgctgatgaaagggagcgtggcattacaatgactgtcggtgttgcatactttgacaccaaagattaccatgttgttttgctggactcccctggccacacagattttgttcctaatatgatatctggagcaacacaatctgatgcagctatcctagttattgacgcttctataggatcatttgaagcaggtatgggcatcaatgggattggacagacaaaggagcactcgcagcttgttagaagctttggcgtggataacttgatagttgttgttaccaagatggactcggtggaatattcaaaagagcgatttaattttatcaaaatcacagcttggtgcttttctgcggtcatgcggttacaaagactcagcagttgcctgggttccaattagtgcaatggagaatgagaacttaatgacaacagcttcagatactcgactatcatcatggtatgatggaaattgcctgttgaaagccattgacacattaccgcctccttctcgtgatgtttcaaagccactgcgccttccaatttgtgatgtcttttcgtcacataagctggggcaagttgcaattggtggtaaagtagaggttggagcaacccgaagtggttctaagatcctcgccatgccttttggggagttagctgtggtgaaaactattgagcggaattcctctagttgcaatttagcaagagctggggacaatgtcgctattggtttgcaagggattgaccctagtcatgtcatgcctggcggagtcatatgccatccagattaccctgtgtccgtggcttcttgcttggagctaaaaattttggtcctagatatcactgtaccaatactggttggcttgcagtttgagctccacatccatcatgcgaaggtgtctgcaagcatggtgaaaatactgtcattgctggagcagaagaccggcaaagcctcaaagaagataccacgatttctcacctcgagacagactgctgtaatcgaggtgaagctggagaaagagtatgcccgtatgtatgggtgcggcacacacagcggaaaacgatacagagaggaggtcgcggccacgtcaaaaggatcccttggtggtgggacccgcaaggaggctggaggccacgtgcttttcgttgatttggacgacccaaccgtactagtacacccaaaggagtttgtggcgcattcatccaatgtcaactgcctcaagattgggaggaagacttcacgagttctcgtgacaggaggagatgaccataaggttaatctttgggctattgggaagcccaattcaattttgagtttatcagggcacaccagtgctgtggagtctgttaattttgattccacagaagttttcgtggccgcaggagcagccagtggaacaataaaactatgggatttagaggaggcaaaaattgtccgcacgcttactggacataggtcaaactgcatgtcagttgatttccatccttttggagaattctttgcctcggggtcactggacacaaatctgaagatatgggatataagaaggaagggctgtatccacacgtacaaaggccacacaagaggtgtaaatgcaattagattcacacctgatggccgctgggttgtgtctggtggtgaagataatgttgtgaagctctgggatctgacagctggaaagttattacatgatttcaagtgtcatgaaggccagattcaatgcatagatttccatccccatgagttccttctggcaacaggttcatccgataaaactgtcaagttttgggatttggagacctttgaattgattgggtctactggacctgagaattttagcaaaattgatgtggtgcctgtgataataccaagaactagctcaggaccagagctggctactgattctaggagtgatgctgctgatgtgggccctgttctttctaagagtggtagaagaatagagattgcaaatgattctaggaaagaaagttctgatgtggcagcagctgttgttcccagaacaaactctagaacagaaatggcctctgattcagcacctgttgttggtcccagagctaacttaagaatggaagtaagcgctgactcggcacctattgttcccaagtcagatgtttctagaatgcgtaagccaagagataactgctatattgaagtttcaagagcag

SEQ ID NO: 33260 - DNA, 2565 bp, Oryza sativa
  Clone ID: PAT_MRT4530_3738C.1
tggtgttagattatataaagattgatacatgtttgaatgactgcattcttttcagaggtgaatatgctaaagctgaaacatgccctgtttgtggaatttcaagatggaaagaggatggagaaaatagtgctcgcaagtcaaggaggagaaaagctaggaaagttccgcagaaggttttatggtactttcctttgatcccaagattaaagcgtatgtacatgtgttcaaaaatagctgttcatatgcgatggcacaaagagaagctagttgatgatggatatatgagacatccagtagattctaatgaatggaagaactttgacaagaattttgaatcattcgcattggacgcacggaatgttaggctaggccttgctagtgatggattcaatccttttggaaatatgagctcatcatatagcatatggccagttgttattgctatatataacttaccaacttggatgtgcatgaaagattcttatatgataatgtcaatgcttatccctgggcctaaagcacctggaaatgacatagatgtatacttgcagccattgattgatgaattgatacagctatgggaaggcgtgccagcctatgatgctcatgcaaagtcctcttttaagctacggggaatgctgctttggacaatcaatgatttccctgcatatggtaatttatcaggcatgagcacgaaaggaaaatatgcatgtccttcttgtcacatggacacttggtcccataggctcgttaatggacacaaatactgctatatgggacatcgtcgcttcttgccaacaagacattcgtggaggagcaatgcaaaatcttttgatggccaaaaggaaagacgtagcgccccaaaagcgttgtcaggagatgacattatgcgtcaatatcaaaatttcaatcaggtactcgtgaaatttgggaaacataacaataagagaaaacgctcaagcacattatatggagtttggaagaaaaaaagtatatttttccagctgccatattggtgtacgttatcgataagacataatctagatgtcatgcacattgaaaagaatgtttgcgatagtattgtgggtaccttgttaaatctggatgggaagaaaaaggacaatattaaatcccggtttgatttggaactcatgaaaatacgacctgaacttcatgcacctccaactggtgatgggaagatcttatttcgtcctgcatgctatacaatgacactagctgagaagaaagcattttgtgagttccttagagaaataaaagtgccagatggatactcttcaaaaatttcacactatgtggatgcaacaaaagctaaaatatcagggatgaagtgtcatgattgtcatgtatttttacacagataccttccattttctattcgtggagttctgcctgctgatgtttgtgaggctataattgagctatgtagcttttttagagaaatttgttccaagaaattagatactgaaattctcaagaagcttgcatcatcaattgctgttaccctctgtaagttagagatgattttccccccttcattctttgatgtaatgttgcatctaccaatccatttagcccaggaagctattgctggtggacctgtccagtatcggtggatgtatcccattgaaaggtttttgcgaaggttgaagtcttttgtaaaaaacaaagctcgccctgaaggatcaaacaagaatcctgcaaggagttgaaacaagaatattttgcaagaatgtgtaaatttttgttctatgtaccttcaaggagttgaaacaagaatcaatcgaccaagtcgaatcgaggacgtgcagagtgacaacagcagtacaaaatttcagatatttggtactgttggcaggccactccttggtaacaaatactgccagatggatatgaatgagttggagaaagctcggatatatgttctaaagaattatgaagaaatatcagaatacgcaaacatttacaaagaccaacttagcatccagaacagtaaaggtgtggaaaagcgccatgacaaagaattttttgtatggttcaagaatcatatatttgagaaacattccaaaggatctccagatatatcagaagagttgtttgctctagcaagaggtcctgatgctcgagtaacccattacacaagttatatgattaatggatggagatttaacaccagggaccgagacaagttggttcaatcacaaaacagtgtagtctttgttaaaggtgatgaagccagtggaagcaaagactattttggtgtcttgacagatattatcaagctaacatatggtacttttagtgtcatattgtttaaatgtgaatggtgggatgtacacactaaaaggggagtaaaagaggacaagcatagatttaccttaattaatacttcccgtacagtgccaattgatgagccatatattttggcaacacaagctgagcaagtatattatgtcaaagatactagagaccctaaatggtttgttgtagtcaagacttcaaatccgctttgaaggaatgttgtagggggtctccaagcatctattg

SEQ ID NO: 33261 - DNA, 1965 bp, Oryza sativa
  Clone ID: PAT_MRT4530_37390C.1
atggaattgcatattatggtagggcttctgttgcataatcaggcagagtttaacatggttgatatcaacccagattctgacgataaccggtctgatcctcaggagccatcaagaaatcctggcatttggcaatgcaccatttgcgaacacggaaatgatgcaaaaaaaaaatcatgtgagcaatgcggtgttcttcgatatttctcgctgtatttcaataatgcccttgaagttgatggcagagctaaacggagagacaagcattatgcggtatctgtactggcaagaactcttttctcaccatccagtgccaagtcaaaagacgttgttctttctggtggctttaaagctagcagaaatgcaacaggaagtacacgagctacgttggatgcgctgcataagacatacatgacccgtaaagaacgccacattaacatagtgcctttcaagtttgatacaccatctccggatgacgtggtcgctacaggactaaaatcgtcgagaagttttagaaaagatgctccccatgtcactgaaaagagggtgatggataatgatagttctacacctgagaaggatacaactgcagactcaaatttgcctgtaaagtcgaatgaattcggtgaaagtagtgagagtgtttctgttggtagtcaaaatgaaacactttgcttggaccatgagctacagcatttgagtttggagaggaagtcacaaaaaagtaaagccaatattaaaaagccagtttcttcatccctgtacaagccagaaccatggatgctccagcatgaagatgaaggcatccctagacaattaaatcttgctattgggaaaggatcatttgcatatgcttgggcaatggatgagagtgctgatgaaagggagcgtggcattacaatgactgtcggtgttgcatactttgacaccaaaaattaccatgttgttttgctggactcccctggccacaaagattttgttcctaatatgatatctggagcaacacaatctgatgcagctatcctagttattgacgcttctataggatcatttgaagcaggtatgggcatcaatgggattggacagacaaaggagcactcgcagcttgttagaagctttggcgtggataacttgatagttgttgttaacaagatggactcggtggaatattcaaaagagcgatttaattttatcaaatcacagcttggtgcttttctgcggtcatgcggttacaaagactcagcagttgcctgggttccaattagtgcaatggagaatgagaacttaatgacaacagcttcagatactcgactatcatcatggtatgatggaaattgcctgttgaaagccattgacacattaccgcctccttctcgtgatgtttcaaagccactgcgccttccaatttgtgatgtcttttcgtcacataagctggggcaagttgcaattggtggtaaagtagaggttggagcaacccgaagtggttctaagatcctcgtcatgccttttggggagttagctgtggtgaaaactattgagcggaattcctctagttgcaatttagcaagagctggggacaatgtcgctattggtttgcaagggattgaccctagtcatatcatgcctggcggagtcatatgccatccagattatcctgtgtccgtggcttcttgcttggagctaaaaattttggtcctagatatcactgtaccaatactggttggcttgcaggtgtctgcaagcatggtgaaaatactgtcattgctggagcagaagaccggcaaagcctcaaagaagataccacgatttctcacctcgagacagactgctgtaatcgaggtgaagctggagaaagaggtatgcgtggaagaattctcaaacctgaaagcgctaggccgagtgttcctacgatctcagggaaacaccatcgcggttggcattgtgagccgagtacgagagcaggcttag

SEQ ID NO: 33262 - DNA, 243 bp, Oryza sativa
  Clone ID: PAT_MRT4530_37391C.1
atgggcagcgatgtagttgacaaggagcaggtcctctaccatccatgccctgcactggaggtcatcacaacggtcgtgtccttcgtgctaagaaggtacttgatcatccatgcctcgcaccggaggtcatcgctggcagccctcctctttgagcaggtcctcctccataccctgccgctggcggttgcatcctcctcactgagcaagtcctcctccatggcccgtgctggaggtcgtcactag

SEQ ID NO: 33263 - DNA, 3334 bp, Oryza sativa
  Clone ID: PAT_MRT4530_37392C.1
atgacgaccaacaccaagcgcgcctacaagctccgtatcctcgcgaattcgtttccagtatttttgactagtattttttgtattttttttcgagaggagtttgtggcgcattcatccaatgtcaactgcctcaagattgggaggaagacttcacgagttctcgtgacaggaggagatgaccataaggttaatctttgggctattgggaagcccaattcaattttgagtttatcagggcacaccagtgctgtggagtctgttaattttgattccacagaagttttcgtggccgcaggagcagccagtggaacaataaaactatgggatttagaggaggcaaaaattgtccgcacgcttactggacataggtcaaactgcatgtcagttgatttccatccttttggagaattctttgcctcggggtcactggacacaaatctgaagatatgggatataagaaggaagggctgtatccacacgtacaaaggccacacaagaggtgtaaatgcaattagattcacacctgatggccgctgggttgtgtctggtggtgaagataatgttgtgaagctctgggatctgacagctggaaagttattacatgatttcaagtgtcatgaaggccagattcagtgcatagatttccatccccatgagttccttctggcaacaggttcatccgataaaactgtcaagttttgggatttggagacctttgaattgattgggtctactggacctgagacaacaggtgttcgatccatgacattcaatcctgatggaagatctctgttgtgtgggttgcatgaaagtttaaaggttttctcttgggaaccaataagatgtcatgataccgttgatgtgggatggtctagactgtctgatctaaatgtccacgagggaaaacttcttggttgttcatttaatcaaagttgtgttggaatatgggttgtagatctaacgcgtcttgagccatatgcaacgggtacttcaacaaaattaaatggtcattcagagttgaaaagttcgtcaagtagcactatgccattacaaaatgacagtggttcaagggctaacattgggcggttatcagttctacaaaattctgagaataacataaagtcttctacaggaagattatcagtttctcaaaattcagactctgcattgaaagagacaaaatcaacaacttcaagcgggttggttccagtcacacctcagagagctggtaatggctccagtaccaaaacagttggaaattcaacctttgcatctagtggcaccaacctgaagagaggttcactgaagagtaacaactcttctagtcttcagaattttagcaaaattgatgtggtgcctgtgataataccaagaactagctcaggaccagagctggctactgattctaggagtgatgctgctgatgtgggccctgttctttctaagagtggtagaagaatagagattgcaaatgattctaggaaagaaagttctgatgtggcagcagctgttgttcccagaacaaactctagaacagaaatggcctctgattcagcacctgttgttggtcccagagctaacttaagaatggaagtaagcgctgactcggcacctattgttcccaagtcaggcagaaggttagagtcttctgttgaatctaggaaagaaagtactgatgtagcatctgctgctgctccgaagactagttcacggatggaagtggccccagattctgcacctcttctttctaaggcaggcagaagggtagagtctgctactgattcaaggaaagaaagtgctgatgtggcacctgttgttcccagaacaacttctagaatggaaatggctccggattctaggagagaaatttctgctggaagaatgtcaccgtttagggtccaatcaagatatagtgaactacgaaagttaaataatgccaaagctgatgcagataaagttgatgcagggagcaaaaacagtgaaacagatgattttacttgtcaaatataccttcctcggaggaatggtgttgttcagtctggaatttctgaagaaacccgggaagatgcaaaacctggtgtgattgacaggatgggatttccaagttctgctgaaccaaatacacaccgcaatgtttctagaatgcgtaagccaagagataactgctatattgaagtttcaagagcagctctagcttatacctggaagagaggaagcagtcaagctgctgaaactccaacgatagcaagtgatgaggatgttctatctgttctaatggagcagcatgagctatttctaagctcaactcgatctcggttgacaaaattgcagattgttcatcaaatgtggcaaagaaatgatatacggggcattattgcagcaatggagaagatgtctgatcatgccgtatctgctgatgttgcaagtgttctgatggagaaaagtgaaacaatcacactagatttatgtactgttattctgcccgtccttactgaccttctggagagtaaaactgacaggcacttaggtgtttcactggaattgttggtgaagcttgtcaggacgtttggatcagtaatacattcaacagtatcagctggtccctcttctgttggtgtagatctgcaagcagagcaaaggcgggagcgttgcaacctatgctttattgaattggagaaggtcaaaaataagcttccatttctttccagaagaaaaggggcagtcgcaaacacggcacaggagctcagtcttgtcttccaggaagttatgtagttgactgaccacacactgtcatacatacacaactgaatgggaaatgcattcccgctgatggcaccaatgttgggcatcagttgccatggagagctgttcgttcgtgcccagtcaccgagctccaaggcacagcagcagtggataacattttgttgccactgtttgttcctcttgtacacacactaaccaacagtgctcgagatccttgtctgttgtcacttttgaagggaagctgccatgagcggtgacatctgccggcagcgttcttcgcgtttgtctcattggtttctgaagataccagtttgcccttgatagatgtggatgaccgtgagatggagcgaatgtcagcgattgtaatgccttgctggctgtagcctcttctctcgtgtcttgtgttagcgggttgcatttgatagtttattgtttggttgtgatgtctggtcgattcaatgacaagattgatgaagagtgattgagctccttgtacacctgtacatcagttttcttttgaatagtatttgagatctatactcttgatcgacacctttgttaaaaaaaaaaa

SEQ ID NO: 33264 - DNA, 769 bp, Oryza sativa
  unsure (1)..(769): unsure at all n locations
  Clone ID: PAT_MRT4530_37393C.1
ccggccaggctcgagtaggcggcggtgcagcgaagacgcgacggcgggggcggcgcgacccggaggcgatggcgacggcacggcgctctcctccggccgccatattatctccgattgcacgtgcacctcctccttcctgggaccttgtaccctctccttcctaggatagtgctgtgcttcaggaagatggcaaagaagaagaacccaattgtctttatggatatttcgataggtgatgaacctgaggccattcccaacccaatgactaggatggtgtctatagcattaaataagctgccacctaggatgaaaaatgatgtggcaagtgaataaatgaggaaatagaaggaaaccatgtcttgcatgagacatggtttctacacaacatccaagacatcatgtgagataagtaacattaaatttaagtatagaatagttgtgtttgcattggaagattagtgtttagtactagtttcttgatgatgtggagtctatggaaactatgtctagtgtcatgggttgggaatgacctgatgaaagaatgttttttgaggtgccatgtggctctagctatgtgcttcattattcctgtgttttgtcaaggcctgaaaaaaaaaaaaaaaaaagcggcttttcaaagagagaaactagnagaanggggtgaggtgggtcattctttttctacattcaccatatatctgtctatccactatatatgatttctgcatcctcttaaaatcaggcaaaaaaaaaaaaaaaatttgcggcc

SEQ ID NO: 33265 - DNA, 2467 bp, Oryza sativa
  Clone ID: PAT_MRT4530_37394C.1
atgacgaaagaaagagaaagcttcgagagtcagtgggtgcccttcgatgtgacggaagacaatctgaaggagatggtggcgcacggcgttcttctggtgaaagagatcatcgggtggcgaccggcattcggcgaggcattcccgacccccgatacacacgaaatcgtggtatttgctcatttcttctatggcggattttctcttccaacctcaagattcttccggggaattctaaaattctacgggattagcttgcatcatctgaatccaaactccatagtgcatatcgccaattttattcatgcctgcgaagcttttttgggcattaggcctcatttcgccttgttccgccgcatcttcttcctcaagccccagccaaacaagaacaaaccatgcgtcgttgggggtgctgatttccaacttaggggaaccctaagccaaaaatacttctctatgcccttcaaaacctcaaacaaaggctggcatgcaaattggttttatgttcaaaacctgagcctgctctccccgagtactcctgtcttcctcctgtttatcaggatacttggaactcactgccaatgggggatgaagctgcgcaagcagtagaactgatggagcgcatgataaagccgaaggaacaaggtttgcaaggagaacagatcacccggcactttatcaagtgtcggttagccccaatcaaagagagatcccgcatagcttttgagttcgacggcaaacatgatccaaatcgtgaaaatccagactctcttgactttaaggtcatgaaggaaaggatgtacaagatcttctcaaatgccatcgtcgtcggctattcgcacctgctgccagtcgtgccattcaatgccttcaatcctcctccaccggaatttgctttgatgaagtcggatcccccaatcgctcaacgccgatctccccgccaccaaactgggcaagggagcggtggaccaagaattcggtctgaaactcaacctagtgctcctgatccagtcggccagccaaattctcgcaagaggaagctggttctaagtgacgacgaaggcgacactgctagaaagcttggagaccgagaggcaaccaagaaactgccaagcaggctactctaaggaagaaaacatccagtcgtcctgtgccaaagatcaggaagtctactaggtgcaactcagatatagatccgtctgggaaagactctgacccgactaacatggacacaagttcttccaaagaaaccgggccaactgttgaggatcatccaagcgacaatcagccggcaaccgataatgtagaatccggtgatcaacccccgactagaaaccagtcggccgaagccgaagccggagttaatcaggagcctctgactggaaaccagtcggacgcagggccaagccaagagattctagaagccaaaacccaagcagacaacccttgcggacaagacgccagcaatgaccggagatctggatctcctttaaaggcatccgaatccactcatcctcgtccagaaatcattacggggccaatgatcagtgatgaagaagaaattccccgtatacaagcagccgaggattcgtgccctcccattctggtcaattggtgggatgacaacttgcaacctcaaggaattgtaataaaccggcaaaaagaagacgaagaggtatgcctactgaaaaaggcactcaaccaagcgattcgcattgtaaataggattcatcttaggaacgaggcgaaaaccgcaaccctagagaaactagttcctcatcttggaacccttgaagccaccaggagtcagctgcacgaggccagagaacttgccaagaagaatgaacacgatctgagggatcagattgctgagctccaggaatccaattttgaactgagtggctcatcaaaagtgcaagctaccaagatatctcaactaaaggagcagatccaaactctggaaaatgacaaggcaaagctggcaagacagaggaattcggctttaaaggaggttgaagactgcaagatcaagtctcaagcacagtttgatgtcttagttgacaagatcaacaagcttgaaggagccagggataaagtcgctaatgccgctactccactcatccaggccatgttcttcaataacgccggttcgagtacacttgatgctgccgaaatcttcgacaagctgagagtcgctccggatacttacttcaagaacattaaagaagctggaagtatgggagcaagtctggcattggcgatgaccaaatccctttatccaagagttgacattgatgccattgatggctttgcagacggaacgagcgaagaagctgctcttgacctcatcaatgatgcgcaaaaagccgctgacaagattgctgctgacgtggttgagagattccaagatgttgactttcggccgactgggtctgataattctgatgatgaaaaaactgatactgattga

SEQ ID NO: 33266 - DNA, 1152 bp, Oryza sativa
  Clone ID: PAT_MRT4530_37395C.1
atggaggcgggttcctcaaaagaaaccgggccgactgcaaaagatctcccgagtgataatctgcaggccagcgacaatgtagaacccagcgacgaacccctgactggaaaccagtcggccgaagccgaagctggagttaatcaggagcccccgactggaaacctgtcggacgcagggccaagccaagagattccagaagttgaaacccaagcagacaaccctcgcggacaagacgccagcaatgaccggagatctggatctactttaaaggcatctgaatccactcgtcctcgtccagaaatcattacggtagatacattaggaccaatgattggtgatgaagaagaaattccccgtatacaagcagccgaagattcgtgccctcccattctggtcaagtggtgggatgacaacttgcaacctcaaggaattataataaaccggcaaaaagaagacgaagaggtctgcctaatgaagaaggcactcaaccaagcgactcgcattgtaaataggattcatcttaggaacgaggcgaaaaccgcaacccttgagaaactagttcctcatcttggaaccctcgaaaccaccaggagtcaactgcacgaggccagagaacttgccagaaagaatgaacacgatttgagggattggattgctgagctccaggaatccaattataaactgagtggctcatccaaagaccgcaagatcaagtctcaagcacagtttgatgtcttagttgacaagatcaacaagcttgaaggagccagggataaagtcgctaatgatgctactccactcatccgggccatgttcttcaataacgccggttcgagtacacttgatgctgccaaaatcttcgacaagctgagagtcgctccagatacttatttcaagaacatcaaagaagctggaagtatgggagcaagtctggcgttggcgatgaccaaatccctttatccaagggttgatatggatgccattgatggctttgcagatgggacgagcgaagaagctgctcttgacctcattaacgatgcgcagaaagccgctgacaagattgctgctgatgtggttgaaagattccaagaagtcgaccttcggccgactgggtctgataagtctgatgatgaaaaaactgatactgattga

SEQ ID NO: 33267 - DNA, 2211 bp, Oryza sativa
  Clone ID: PAT_MRT4530_37396C.1
atggcggaagaaagagaaagcttcgagagtcagtgggcgccctccgatgtgacggaagataatctgaaggagatggtggcgcacggcgttcttccagcgaaggagatcgtcgggtggcgaccagcattcggtgaagcattcccaacccccgatactcatgaaatcgtggtatttgctcatttcttctatggcggtttctcccttccaacctcaagattttttcggggaattgtgaatttctatggaatcagcctgcatcatctgaacccaaactccatagtgcatattgccaattttattcatgcctgcgaagcttttctgggcattaggcctcattttgccttgttccgccgcatcttcttccttaagcctcagccaaacaagagcaaaccatgtgttgttggaggcgctggtttccaacttcggggaacactaagtcaaaaatacttctccatgccctttaagacctcaaacaaaggttggcacgcaaattggttctatgtccaaaatcctgagcctgctctccccgaatactcctgtcttcctcccgtttatcgggatacttggaactcactgccaatgggagatgaagctgcgcaagcagtggaactgatggagaggatgataaagctaaaagagcaaggtttgcaggcagaacagatcactcggcacttcataaaaatccggttagctccaatcaaagagaggtcccgcacagcttttgagtttgacggcaaacatgatccaaatcatgaagatccagactctcttaactttaaggttatgaaggaaaggatgtacaagatcttctcgaatgctatcgtcgtcagctattcgcacttgctgccagtcgtgccattcaatgctttcaatcctcctccaccgccagattcacgcaaaaggaagttggtgtcgagtgacgacgaaagcgatactgctagaaagcctggggaccgagaggcaaccaagaaactgccaaagcaggctactccaaggaagaaaaccaccagtcgtcctgtgccaaagatcaggaagtcttccaggaaaccatctgatatagatccttctggaaaagactctaacccgactagcagggaaacgaacttaaaaggaatcgagccaactaacgaggatcagccgagtgacagccagccagcaaccgataatgtaggatctggtgatcaacccctgactgagaatgagtcggccgaagctgtggacggagttaatcaggagcccccgaccgaaaaccagtcggactctaggccaagccaagagattccagaagttggagcttggtcagacagccctcctagacaagacgccagcaacgtcccgatgccagggtctcccattaaggcgcaagagtcgactcgtccccgtccggaaatcatcacagtggatacattaggaccaatgattggtgttgaagaagaaattctccggatacgagcagctgaggattcgcgccctcccattctggtcaagtggtgggatgacaacatgcagcctcaagggatcgtaataaataagcaaaaagaggatgaagagttatgcctactgagaaaggcgcttggtcaggcaacccgcattgtaaataggattcatcttaggaacgaagctaaaatggcaaccttagagagagtcaatgtagtgcaagctgccaagatatctcaactggagaagcagattcaaactctggaaaatgacaaggcagaactggaaagacagagggactcagctttaaaggatgttgaagaccgcaagatcaagtcccaggcacagtttgatgtcttagttgacaagatcaataggcttgaaggggctagggacaaagtcgctaatgccgctactccaatcatccaagccatgttcttcaataacgccgatccgagtacacttgatgctgccgaaatcttcgacaagctgagagtcgctccggatacttacttcaagaacatcaaagaggctggaagtatgggagcaagtctggcgttggcgataaccaaatccctttatccaagagttgacattgatgccattgatggctttgcagacgggacgagcgaagaagctgctcttgatctcatcaatgatgcgcaaaaagccgctgacaagattgctgctgacgtggttgagagattccaagatgtcgaccttcggctgactgggtctgataattctgatgatgaaaaaactgatactgattga

SEQ ID NO: 33268 - DNA, 2187 bp, Oryza sativa
  Clone ID: PAT_MRT4530_37397C.1
atgggcggcaatgtcggtttgggaaccgacttgcgcggtcaaaggcgcgagctggtgctcggcggtcgcggccaaagcggcgacagggaggatgacaccggcgaggaggaaaaaggggaaaaggagggggagaaagggggcttgcccctttgccgattcgggaaaaaggaggaggtgagcgggggcgacgcggcagagggaggagggatgctgcctccgtcccttggcggcttgcgcgcggagtggcggggccaggcgatgacgacggcgatgacggcggggcggtttggagcggagcggcgacactggcgacaggcgcgtgcagaggctgacagcggcggcgaccgggcggcgccacgacggaacgggcgctacaggcgaccagcatttggtgaggcattcccgacccccgacacacacgaaatcgtggtattcgctcatttcttctatggcggattttctcttccaacctcaagatttttccggggcattctgaacttctacgggattagcttgcatcacttgaatccaaactccatagtacatattgccaattttatccacgcctgcgaagcttttctaggcattaggcctcatttcgccttgttccgctgcatcttcttcctcaagccccagccaaacaaaagcaagccgtgcgttgttgggggagctggcttccaactcagaggaaccttgagccaaaaatatttctccatgcccttcaaaacctcaaacaaaggctggcatgtgaactggttctatgttcagaatcctgagcccgcactccccgagtactgttgtcttcctccggtttaccaggacacatgggactcattgcctataggagatgaagctgctcaggcagtagaactgatggagaggatgataaagctaaaagaacagggtcttcaaggaaagcagatcacccggcactttatcaagtgtcggttagctccaatcaaagaaagatcccgcacagcttttgagttcgatggcaagcatgatccaaatcgggaagatccagattctcttgactttaaggtcatgaaagaaagaatgtacaagatcttctcaaacgctattgttgtcagctattcacatctgctacccgtcgtgccattcaacgcattcaaccctcctccaccggaatttgctttgatgaaatcggatcccccaatcgctcaacgccgatctccccgccaccaaactgggcaagggagcggaggaccaagaattcggtctgaaactcaaccaagtgcttttgatccagtcggccagtcagactctcgaaagaggaagctggttctgagtgatgacgaagccgatgatactaccaggaggcctggagaccgagagacaaccaagaaactaccaaaacaggctactccaaggaagaaaacatccagtcgccccgcgccaaagatcaggaagtcttccaggaaaccatctgacatagatccgtctgggaaagactctgacccgactagcgtggacgcaagttcttccaaagaaaccaggccatctgccgaggaccgtccgagtgacaatcagccggcaaccgataatgtagaatctgtggatacattaggaccaatgatcggtgatgatgaagaaattccccgcatacaagcagctgaggattcacgccctccgattctggtcaagtggtgggatgacaacatgcagcctcaagggatcatgataaataagcaaaaagaggacgaagagttacgcctactgaagaaggcacttggtcaggcaacccgcattgtaaataggattcatcttaggaacgaagctaaaacggcgaccttagagaagctagtccctcatctcgggaccctcgaagccaccaggagtctgctgcacgagacaaaagagcttgccaggaaaaatgagcatgatctgaggaatcgaattgctgagctccaggaatccaattttgaactgagtggctcatcaaaagaccgcaagatcaaatctcaagctcaatttgacgtcctggttggcaagatcaaaaaacttgaaggagcccgggatgaggttgctaacactgctgccccaattgttcaagcgatgttcctcaataacaacggcccgagtgcacttgatgtttctgaaattttcgacaagctgagagttgctcggatatatatttcaagaacatcaaagaagctggaagtatag

SEQ ID NO: 33269 - DNA, 990 bp, Oryza sativa
  Clone ID: PAT_MRT4530_37398C.1
atgctcgacgtggatctgccggcgatgctgggctccgccggcgagaccggcgcctcgtcgtggaagaggaggagaggtgcggcggcggtcgcctcctcgtggtcgtgcatgaggacaagagagggagggaattatagatggccatctgggccgcctggcacggcacggcccaagcccggccgtgcctgggccgaggcttgtcgggccggcacggctcgaccgacgcaccgggccgtgccgtgccagcccacgggtggcatacacggcccaggcacggcccaatactactcggggtttgccgggccggcccgaaggccggcgttcctcacgtgggccaccgacataacaggcctcatgagcccaataggaatggaactgtattattatctgggcaagagcgtggtggcggagtcgaggtggcggaagacggcggcagcgatggcgccgcccatggagaagaggacgaagccatcacctccgagaaggccgggagcgcgggaggcaggccagagcgcagagtgcggtggcagcgtcgatgcggtggaggacagcggcggctatggtgccgcccatggagaagaggacgaagccatcaccgtcgaggaagccgggggtgcgggaggcaggccagagcacggtggcggtgtcgaggtggcggaggaggatggtcgttgctgtggaggaggttgcccccaccaccagatcggcaagccaacagctggatccatgaaccgcccgaggaacccgtcgcgaatcccgtccccacctccttccgacatgtacatgctatgcacgccggccacgccgagcgggtcgccgccgtcggtcgctgtgtactacacccactgcccgccgatgccgacgtgctgctcgagcacatcatgtcgagaccctctcgccacttcgctcctctcctcgcagaccaccgaccaccgccctgaagaaaaaggggagaaaatgagaaaagaaagaggggagaagaaaatatga

SEQ ID NO: 33270 - DNA, 1764 bp, Oryza sativa
  Clone ID: PAT_MRT4530_37399C.1
atgccgccagctgctagcctccgcgactccgcgccggcgccgtctcggctggccggctcccccgctgtccgcgccggcgttgcgccatcccttcccctccttctgcgactccacgccagcgctgccactgccgtcccctcccctccccgcgaggccgccactccgcgtctccgtgccggcgccaccgccgccgtccgcacagtccccttctctccggcctccccgccgtccacgctgacgccgcaccgcgccgccgtcccctcccctccgtggctcagcccagccttcgaatttgacggcaagcatgacccaaaccgtgaagatccagattctcttgacttcaaggtcatgaaggaaaggatgtataagatcttctcaaatgctatcgttgtcagctattcacacttgctgccagtcgtaccgttcaatgcattcaatcctcctccaccggagttcgcattgatgaagtcaaatcctccaatcgcccagcaccaatcacctcaccgccaaactggtcagggaagcgggggaccaagaattcggtctgaaacccaaccaagtgcttctgatccagtcggccagtcagattctcgcaagaggaagctggttccaagtgacgatgaaggcgatgataccggaaagctcaaagataaaggaacgaccggaaaacctccgaagccaactaatccgaagaagaaaacctccagtcgtcctttcccaaaaatcagaaagtcttccaggaaaccatctgacatagatccttctgagaaagactctgacccaactaacttggaagcagattcctcaaaagaaaccgggccgtctgcaaaagatcacccgagtgataatccgcaagccagcgacaatgtagaacccagcgacgaacccacgactgcaagccagtcggccgaagctggagtcggagttaaccaggagcccccgactggaaaccaatcggatacagggccaagccaaaagattcccgaggttgaagctcaaacaaacagtcctcccgggaagggtgctggcaatgactcagaaatcagatctcctgcgaagacacaagagtctactcgtccccgaccgggaatcatcacagggccaataattggtgaggaagaagaaatcctccggatacgagcagctgaggattcgcgccctcccattctagtcaagtggaagaatgaacatgatctgagggatcggattgctgagctccaggaatccaattttgaactgagcggctcatcaaaagaaaatgacaaggcagaactggcaagacagagggacttggctttaaaggaggttgaagaccgcaagatcaagtcgcgggctcaattcgacgtcctggttggcaagatcaaaaaacttgaaggagctcgggatgaagtcgctaacgctgctaccccacttgttcaagcgatgttcttcaataacaatggctcgagtacacttaatgcttctgaaatcttcgacaagctgagagttgctccggatacatatttcaagaacatcaaagaagctggaagtatgggagcaagtctggcgttggcgatgaccaaatccctttatccaagagttgacattgatgccattgatggctttgcagacgggacgagcgaagaagctgctcttgacctcatcagtggtgcgcaaaaatctgccgataagatagcaatcgatgtagttgaaagatttcaggacatcgatctccgaccgactggtcctggtaattctgatgatgaaaagactgatactggttga

SEQ ID NO: 33271 - DNA, 2277 bp, Oryza sativa
  Clone ID: PAT_MRT4530_3739C.1
agcaatgcaaaatcttctgatggccaaaaggaaagacgtagcgccccaaaagcgttgtcaggagatgacattatgcgtcaatatcaaaatttcaatcaggtactcgttaaatttgggaaacataacaataagagaaaacgctcaagcacattgtatggagtttggaaaaaaaaaagtatatttttccagctgccatattggagtacgttatcgataagacataatctagatgtcatgcacattgaaaagaatgtttgcgatagtattgtgggtaccttgttaaatctggatgggaagacaaaggacaatattaaatcccggtttgatttggaactcatgaaaatacgacatgaacttcatgcacctccaactggtgatgggaagttcttatttcgtcctgcatgctatacaatgacactagctgagaagaaagcattttgtgagttccttagagaaataaaagtgccagatggatactcttcaaaaatttcacactatgtggatgcaacaaaagctaaaatatcagggatgaagtgtcatgattgtcatgtatttttacacagataccttccactttctattcgtggagttctgcctgctaatgtttgtgaggctataattgagctatgtagctttttagagaaatttgttccaagaaattagatactgtaattctcaagaagcttgcatcatcaatagctgtaccctctgtaagttagagatgattccccccccctcattctttgatgtaatgttgcatctaccaatccatttagcctaggaagctattgctggtgaacctgtccagtatcggtggatgtatcccattgaaaggtttttgcgaaggttgaagtcatttgtaaaaaacaaagctcgccctgaaggatcgatagctgaggcatatattttgcaagaatgtgtaaatttttgttctatgtacctgcaaggggttgaaacaagaatcaatcgaccaaatcgaaacgaggatgtgcagagtgacaacagcagtacaaaatttcagatatttggtactgttggcaggccactccttggtaacaaatactgccagatggatatgaatgagttggagaaagctcggatatatgtactaaagaattgcgaagaaatatcagaatacgcagaaacattcacaaagaccaacttagcatccagaacagtaaaggtgtggaaaagcgccatgacaaagaattttttgtatggttcaagaatcctatatttgagaaacattccaaaggatctccagatatatcagaagagttgtttgctctagcaagaggtcctgatgctcgagtaacccattacacaagttatatgattaatggatggagatttaacaccagggaccgagacatgttggttcaatcacaaaacagtggagtctttgttaaaggtgatgaagccagtggaagcaaagactattttggtgtcttgacagatgtatgttagcttgataatatctgtcaagacaccaaggtactttcagtgtcatattgtttaaatgtgaatggtgggatgtacacactaaaagggtagtaaaagaggacaagcatagatttaccttaattaatacttcccgtacattgccaattgatgagccatatattttggcaacacaagctgagcaagtatattatgtcaaagatactagagaccctaaatggtttgttgtagtcaagacgaagccacgtgatttgtatgactttcctcctacagaagaagaagaaaaaaatgatccaactttatcaaataagtctagttctgaagcatgccaagagaatgagcatatcacggctacattgaattacactacaattgatgatggtgacttccctacggttctcagtaaagatggagtcgaatgtgaacccattgaagcagaaccagtaacacattctgaagatgatatgtttgaagaggaagaagaagaagaggaagattctgaaagtgatggcgctgagtatatagatacagatgatgaaattgacatccaaacactgttggttctgccatcagtaagctcggggtgcgcctgcgtacgtccaccactcgtgctccgatcgtgccgcgtcccgctaccactgctcaacctccctctgaagctttggattgagctcgacgcaactcgaatgcaggatggatctcgccgcgaccccgccgcgccgtatcgagttcgccgtgcacccgccgtcggattgaggtcgcagagctcctgtagccaccattacggggcctgatgttgcagcagctcaacctccc

SEQ ID NO: 33272 - DNA, 381 bp, Oryza sativa
  unsure (1)..(381): unsure at all n locations
  Clone ID: PAT_MRT4530_373C.1
agcagattgcaatgtctagcaaaatttgctaaacaaggcaaacagaaatggacagtcggtttagtgatgtttagcatattccaatgtcagacgctcagagccccatcaaacaaacagcaatggatatactccagtgcggaagttttcacagttatttatacagcattggagtaaaggtttattttatcgactttgcttttgacaatttgttttttcgattatgtggtccgttttaactctaatagcaagctaagcctagaaatttcagtacagaagtgaactaaatatcgngaaaaccatgtatacacaatanatgggtcttctttacaggaagcancttgtgacatnnntcatttggantccctacccganaaaaatgct

SEQ ID NO: 33273 - DNA, 241 bp, Oryza sativa
  Clone ID: PAT_MRT4530_37400C.1
attgtaggccatgactcttttttctgtccatacactgtgtcagttttctttatcgagtttcatgtcaaaatgttcattttgcagtcttaatagaaacaactatgacaatgttttgactatcccaggccttctatagtgagactatccgaagcatcaaaaactgaaattattgaccaatttctgattgcgcttaatgtatttcccggaaaagatatttcattgtccaataccatgaccactc

SEQ ID NO: 33274 - DNA, 1097 bp, Oryza sativa
  Clone ID: PAT_MRT4530_37401C.1
ctcttctccgcacgcggtgcccgtctgctactctgccgtgttggccgccgcgcccacctttcctcccccgcccctttccgctaaagccgccgtgttcatcgcgtcggcgacctacctacctaccctccttactccgaactcaggcaggctctcgtctcttcttcctccctcctccctctctcgccccaagccctaaatggcggcgcaggggatcgcggaggcggtgcaggcctacacgggcctctccccggcggcggccgtcaccatcctggccctcatgctcgccacctacctcctcgtgtcctccctgttcgtcgccccggacgccgcgccccccaagccgcctccgcagcggaaggaggaagagcagcagcagcagcaggaggaggaggaggcgggggcgtttgtgccttatccggaccctgtacaggtgggcgagatcacgctcgagcagctcgcggcctacgacggcaaggaccccgcgaagccgatcctaatcgccatccgcggccaggtctacgacgtcacgcgcgggaggctcttttatggtcctcaaggaccatattccttgtttgctgggagggatgcaactcgggcccttgcattgatgtcgtttgaccctattgacctcactggagatttggatggccttggtccagacgagctagaggtcttgcaagattgggaagataagtttaaagagcggtatcctacggtgggccaccttgcttcagaaaatgcagcggatggtaaccacggtggcgcagcttgatcacgaggaaggaatgctttactccatcggtttgtcagtttctctgttcttttttactggattgcaagtgggtagatctgatcatatgatgctctggtaggctctgttgcttgtgtgctgttgtcgtgcgtgactaatgtaccagctttccccatctgcttttattttggtttgcagtggatgaggaggaaattttgagcgacttgactaaaaacttgagctgtgactctcttgagtgctcagaccatgtgtatatgctttcaagtttatgccataatttgcggcttacttctcgcaagtcgcaacaattaaaaaaaaaaaaaaa

SEQ ID NO: 33275 - DNA, 213 bp, Oryza sativa
  Clone ID: PAT_MRT4530_37402C.1
atggaggcgcacggtgttctcccagcgaaggagattatcgggtggcgaccggcgttcagcgaagcattcccgaccctcgacacacacgaaatcgtggtatttgctcatttcttctatggcggattttctcttccaacctcaagattcttccgggggattcccgaccctcaagattcttgcagggagaacagatcactcggcacttcatcaaaa

SEQ ID NO: 33276 - DNA, 949 bp, Oryza sativa
  Clone ID: PAT_MRT4530_37403C.1
tgggttcgccctgcgagttcgctggctttggcttcagtgctcattgcatccctactgggctggccttaaggcccccgttgagcggagtgtctccgacatgtttgctgcgtcacattcttcgtgtcaagagatggtgaatcaactctcttctggactgaccagtggatcgacggtcgcctggtggcctccttggctcaagacctcctcgtcgtcgtgccctcgcgtctccggggttcacgcacaattggttctggcgtcgcaaacaattcctgggttagtgatatccgcggcgccctcattgttctggtcatctcctagttccttcttatttgggatgcagtacttcctacccacctctcgccgggcgtagagccgtagaggacgtcttgtttggcaatggacgagcgaccagcgttactcggtgcactcagcttaccaggcgttcttccttggccagcactcctttgcgtatgccaatctgctctggcacgtgaagggccctgctaaatgcaaattcttcctctggtttggttttcaatagcgctgctggatggctgatcttctccagaagcgtggtatcaatagccactcagcctgccccttttgccctcatgatcttgagacggcgaaccacatcccccttgactgtgtgttcgctcgataggtctggcaccacgtgttgttgcccgctggctaggctgccctctttcccccatggcagctggctttaggactggtggccgtcttctagggcctgcttacttgagcatcttcagccagcttcgactccctagtcctcttggtctcttggtagctgtggaagtaatgaaactctagggtttttgactctacgctctcttcggtctcagtggttctggagtccattctctcggaaggccatctgtgatcttccgctggcattgctatttttgagggcttcttgggagtg

SEQ ID NO: 33277 - DNA, 2064 bp, Oryza sativa
  Clone ID: PAT_MRT4530_37404C.1
atgccgccagctgctagcctccgcgactccgcgccggcgccgtctcggctggccggctcccccgctgtccgcgccggcgttgcgccatcccttcccctccttctgcgactccacgccagcgctgccactgccgtcccctcccctccccgcgaggccgccactccgcgtctccgtgccggcgccaccgccgccgtccgcacagtccccttctctccggcctccccgccgtccacgctgacgccgcaccgcgccgccgtcccctcccctccgtggctcagcccagccttcgaatttgacggcaagcatgacccaaaccgtgaagatccagattctcttgacttcaaggtcatgaaggaaaggatgtataagatcttctcaaatgctatcgttgtcagctattcacacttgctgccagtcgtaccgttcaatgcattcaatcctcctccaccggagttcgcattgatgaagtcaaatcctccaatcgcccagcaccaatcacctcaccgccaaactggtcagggaagcgggggaccaagaattcggtctgaaacccaaccaagtgcttctgatccagtcggccagtcagattctcgcaagaggaagctggttccaagtgacgatgaaggcgatgataccggaaagctcaaagataaaggaacgaccggaaaacctccgaagccaactaatccgaagaagaaaacctccagtcgtcctttcccaaaaatcagaaagtcttccaggaaaccatctgacatagatccttctgagaaagactctgacccaactaacttggaagcagattcctcaaaagaaaccgggccgtctgcaaaagatcacccgagtgataatccgcaagccagcgacaatgtagaacccagcgacgaacccacgactgcaagccagtcggccgaagctggagtcggagttaaccaggagcccccgactggaaaccaatcggatacagggccaagccaaaagattcccgaggttgaagctcaaacaaacagtcctcccgggaagggtgctggcaatgactcagaaatcagatctcctgcgaagacacaagagtctactcgtccccgaccgggaatcatcacagattcctcaaaagaaaccgggccgtctgcaaaagatcacccgagtgataatccgcaagccagcgacaatgtagaacccagcgacgaacccacgactgcaagccagtcgsccgaagctggagtcggagttaaccaggagcccccgactggaaaccaatcggatacagggccaagccaaaagattcccgaggttgaagctcaaacaaacagtcctcccgggaagggtgctggcaatgactcagaaatcagatctcctgcgaagacacaagagtctactcgtccccgaccgggaatcatcacagggccaataattggtgaggaagaagaaatcctccggatacgagcagctgaggattcgcgccctcccattctagtcaagtggaagaatgaacatgatctgagggatcggattgctgagctccaggaatccaattttgaactgagcggctcatcaaaagaaaatgacaaggcagaactggcaagacagagggacttggctttaaaggaggttgaagaccgcaagatcaagtcgcgggctcaattcgacgtcctggttggcaagatcaaaaaacttgaaggagctcgggatgaagtcgctaacgctgctaccccacttgttcaagcgatgttcttcaataacaatggctcgagtacacttaatgcttctgaaatcttcgacaagctgagagttgctccggatacatatttcaagaacatcaaagaagctggaagtatgggagcaagtctggcgttggcgatgaccaaatccctttatccaagagttgacattgatgccattgatggctttgcagacgggacgagcgaagaagctgctcttgacctcatcagtggtgcgcaaaaatctgccgataagatagcaatcgatgtagttgaaagatttcaggacatcgatctccgaccgactggtcctggtaattctgatgatgaaaagactgatactggttga

SEQ ID NO: 33278 - DNA, 387 bp, Oryza sativa
  Clone ID: PAT_MRT4530_37405C.1
tccaagcattcggacggctttttatctttactctttacgtttaactactcggatccgtttagggattagtgtagggatatgggggttgagatagccactcaccactactactactgctgtttctgctgagacatcgcctacacctccctctacggctacctggacacctactgctacacctacgactacatcctcttctccacagaatcaccgacagagccaccgccgactgttactagcgattcgcctcggcatcgccgacacggccgccagatgtcccatcgattttccataccatttcgcgtctgcatctgtagcagacgattctccccatcgtcagcgctgacgattcgcctaagcatccgccaccgtgggccgtgccggctg

SEQ ID NO: 33279 - DNA, 918 bp, Oryza sativa
  Clone ID: PAT_MRT4530_37406C.1
atggcgcaaaaatttggccagcggagctccggtgagggagatctgccggtggccggtggtggtctgcacgagaggcccaacagagtcgccagcggcgagaaggaggagtgggccgtggcgtatgtgcggttgtcgttgtcgtcggacgccatctcctactcctccagcatctccacggacatgccgctctatgagccccccgaggtgtcgttcgacgagtacctcctcgactgcgcgcgcatgttccacgccatgttccccgacgagagcaggagccagcgccccagcgacacgaagtgggagctacgtgggctggagcgcggctacgcatcggcgagcttcgaccttggcatccgcgggtcgctctacaccgatagaagagtagcaggccgcaggtggaagcgcgcggcgctggcggcgtcagcagaggccagcgcgagcaggagggagctgagcaggttgcagacaggcggcccgcggccggccgccggcgccagcgacgccacgggaggtcgggtgcgtgcatactgcctgcagtctgcagcagaccagcagcaggccggcggctgcaacctgccaatctgcaaaacaactaaacaagtacagaaccgcgccgacgaagctaggccatatctcggaccaaatttaaccatccagttcacattcatggcggaagaaagagaaagcttcgagagtcagtgggcgccctccgatgtgacagaagataatctgaaggagatggtggcgcacggcgttctcccagcgaaggagattatcgggtggcgaccggcgtccggcgaagcattcccgaccccggacacacacgaaatcatggatacatggaactcattgcctatgggagatgaagctgctcaagcagtagaactgatggagaggatgataaagctgaaagaatag

SEQ ID NO: 33280 - DNA, 2472 bp, Oryza sativa
  Clone ID: PAT_MRT4530_37407C.1
atggcggaggagggagaaagtttcgagagccagtgggcgccttctgatttgattgaggaaaatctgaaagagatggtggcgcacggcgttcttcctacgaaggagatcatcgggtggcggccggcatttggcgaggcattcccaacccccgatacacacgaggtcgtggtattttctcactttttctatggcgggttttctcttcccacttcaagatttttccggggaattctgaacttctatggaatgagcttgcatcatctgaatccaaactccatagtgcacattgccaattttattcacgtctgcgaagcttttctaggcattaggcctcatttcgccttgttccgccgcatcttcttccttaaaccccagccaaacaagagcaaaccgtgcgttgtcgggggcgctggtttccaactcaggggaacactaagccaaaaatatttctccatgcccttcaagacctcaaacaaaggctggcacgctaactggttctatgttcaaaatcctgaaccagcccttcccgagtactcttgtctccctccagtctaccaagatacatggaattcattgcctacaggagatgaggcagcccaagcagtggaactgatggagcgcatgataaagctgaaagagcaaggtttgcaaggagaacagatcactcggcacttcataaaaagccggttagctccaatcaaagagaggtcccgcacagcttttgagtttgacagcaaacatgatccaaatcgtgaagatccagactctcttaactttaaggttatgaaggagaggatgtacaagatcttctcgaatgctaccgtcgtcagctattcgcacttgctgccagtcgtgccattcaatgctttcaatcctcctccaccggaatttgctttgatgaagtcggatcccccagtcgttcaacgccgatcaccccaccgccaaaccggtcaagggagcgggggtcccaagatccattctgaagcccggccaaatacctccaatccagccggtcagccagattcatgcaaaaggaagttggtgtcaagtgacgacgaaagcgatactgctagaaagcctggagaccgagaggcaaccaagaaactgccgaagcaggctactccaaggaagaaaacatccagtcgtcctgtgccaaagatcaggaagtcttctaggaaaccatctgatatagatccttctggaaaagactctgacccgaccagcagggaaacgaacttaaaagaaaccgagccaattgccgaggatcagccgagtgacaaccagccagcaaccgataatgtaggatctggtgatcaacccccgaccggaaatgagtcggccaaagctggagctggaattaatcaggagcccccgactgaaaaccagtcggacactaggccaagccaagagattccagaagttggagctcgggcagacagccctcgtagacaagacgccagtaacgacccgatgccagggtccccagttaagacgcaagagtcgactcatccccgtccggaaatcatcacagtggatacattaggaccaatgattggtgatgaagaagaaattccccgtatacaagcaactgaggactcacgccctcccatcctagtcaagtggtgggacgatgataggcaacctcaaggaatcgtaataaacaaacaaaaagaagatgaggaagtatgcttgctgaaaaaggcactcatccaggccactcgcattgtgaatagaatccacctcaggaatgaggcaaagaccacaactcttgagaaattagttccccatcttggaactcttgaagccaccagaagccagttacatgaagtcagagaacttgcgaggaaaactgagcatgatctgaggaatagaatctccgagcttcaagaatccaactatgaattgagtggttcatccaaagcctccaggatttccgacctagagaagcaggtcgaagccctggagaaggacaaggcagaacttgcaaagcagagggacttagccttaaaagatgttgaagatcgcaaaatcaagtcccaggcacagtttgatatcttagtcaacaagatcaataggcttgaaggggccagggacaaagtcgctaatgccgctgccccactcatccaagccatgttcttcaataacgccggttcgagtacacttgacgcttccgagatcttcgacaagctgagagtcgctccggatacttacttcaagaatatcagggaggctggaagtatgggagcaagcatggcattagctatgaccaaatctttataccccaaaatcgatattgacgctgttgatgggtttgcagacgggacaagcgaagaaacagccctcaacctcatcaatgatgcgcaaaaagccgctgacaagattgttgctgacgtagttgagagattccaggatgtcgaccttcggccgactgggtctgataattctgacaatgaaaaaaccgacactgattag

SEQ ID NO: 33281 - DNA, 354 bp, Oryza sativa
  Clone ID: PAT_MRT4530_37408C.1
atggcgtggaggccgagccccgagtggtggcgaggagatccatcggtgaggggtggtgtcgtcatgcatccaggtaggagagggcgattggtggcgtcgggctgcctccctcttgaaggtgcccgatctgaaggccggcgccggtggtcattcttcggagcccgtgagggtggcggcggccggctacgtcgtccatggcgtgcctcatggtcggttcagggagcacggttcagggagcacacgagtaggcggccagtggcagtggtggccctgaaacaacgttcaagctggaatggaggggaaggttgctttccaccttgtgcggcggcgacggtcttcaggcccggcgattag

SEQ ID NO: 33282 - DNA, 138 bp, Oryza sativa
  Clone ID: PAT_MRT4530_37409C.1
atggagaccggcggatgggatgtgctcggtgcggttcgcggtctatggagggtggggcctacggggagagactggatggaggaggctgccctccaatgccacgtggccctcccccgaggggggtcgggcccgaggtag

SEQ ID NO: 33283 - DNA, 555 bp, Oryza sativa
  unsure (1)..(555): unsure at all n locations
  Clone ID: PAT_MRT4530_3740C.1
cacgcgtacgccagcgcggaattcggctcgagctttgactataggagagaagagaaannaaccctccagggttcctcanaggaagacgaganggnacaaaaggcgcaagagcgcacagaatccgaatcaacaccccccacacgagccacttcctcaaatagccacacctcaaaccaccgaacgcaacacccgatgctacagaggactggccgtgcaacgaatccaaagcgcggccccagggcaaggctgccacacgagttgttaggcgctctataggcgcaggacatcctaaagagcgaaggcgacacagcacgcgaggccaagggatagaagtgagtatggaagcacatgaaaggcagaaagggcgctgagaaaacaacaaggctcaagagaaggcgcgtgatgaggacgaaaacggatggcctcaacgctgctataagccacacctctggggccaccctcctggagagtcctgctggagggacattctttctctgacctcactcaacaaccaaaacaacctctgtcaccccatatacaaattgaagcgcatat

SEQ ID NO: 33284 - DNA, 2343 bp, Oryza sativa
  Clone ID: PAT_MRT4530_37410C.1
atggcggaggagggagaaagtttcgagagccagtgggcgccttctgatttgattgaggaaaatctgaaagagatggtggcgcacggcgttcttcctacgaaggagatcatcgggtggcggccggcatttggcgaggcattcccaacccccgatacacacgaggtcgtggtattttctcactttttctatggcgggttttctcttcccacttcaagatttttccggggaattctgaacttctatggaatgagcttgcatcatctgaatccaaactccatagtgcacattgccaattttattcacgtctgcgaagcttttctaggcattaggcctcatttcgccttgttccgccgcatcttcttccttaaaccccagccaacaagagcaaacccccttcccgagtactcttgtctccctccagtctaccaagatacatggaattcattgcctacaggagatgaggcagcccaagcagtggaactgatggagcgcatgataaagctgaaagagcaaggtttgcaaggagaacagatcactcggcacttcataaaaagccggttagctccaatcaaagagaggtcccgcacagcttttgagtttgacagcaaacatgatccaaatcgtgaagatccagactctcttaactttaaggttatgaaggagaggatgtacaagatcttctcgaatgctaccgtcgtcagctattcgcacttgctgccagtcgtgccattcaatgctttcaatcctcctccaccggaatttgctttgatgaagtcggatcccccagtcgttcaacgccgatcaccccaccgccaaaccggtcaagggagcgggggtcccaagatccattctgaagcccggccaaatacctccaatccagccggtcagccagattcatgcaaaaggaagttggtgtcaagtgacgacgaaagcgatactgctagaaagcctggagaccgagaggcaaccaagaaactgccgaagcaggctactccaaggaagaaaacatccagtcgtcctgtgccaaagatcaggaagtcttctaggaaaccatctgatatagatccttctggaaaagactctgacccgaccagcagggaaacgaacttaaaagaaaccgagccaattgccgaggatcagccgagtgacaaccagccagcaaccgataatgtaggatctggtgatcaacccccgaccggaaatgagtcggccaaagctggagctggaattaatcaggagcccccgactgaaaaccagtcggacactaggccaagccaagagattccagaagttggagctcgggcagacagccctcgtagacaagacgccagtaacgacccgatgccagggtccccagttaagacgcaagagtcgactcatccccgtccggaaatcatcacagtggatacattaggaccaatgattggtgatgaagaagaaattccccgtatacaagcaactgaggactcacgccctcccatcctagtcaagtggtgggacgatgataggcaacctcaaggaatcgtaataaacaaacaaaaagaagatgaggaagtatgcttgctgaaaaaggcactcatccaggccactcgcattgtgaatagaatccacctcaggaatgaggcaaagaccacaactcttgagaaattagttccccatcttggaactcttgaagccaccagaagccagttacatgaagtcagagaacttgcgaggaaaactgagcatgatctgaggaatagaatctccgagcttcaagaatccaactatgaattgagtggttcatccaaagcctccaggatttccgacctagagaagcaggtcgaagccctggagaaggacaaggcagaacttgcaaagcagagggacttagccttaaaagatgttgaagatcgcaaaatcaagtcccaggcacagtttgatatcttagtcaacaagatcaataggcttgaaggggccagggacaaagtcgctaatgccgctgccccactcatccaagccatgttcttcaataacgccggttcgagtacacttgacgcttccgagatcttcgacaagctgagagtcgctccggatacttacttcaagaatatcagggaggctggaagtatgggagcaagcatggcattagctatgaccaaatctttataccccaaaatcgatattgacgctgttgatgggtttgcagacgggacaagcgaagaaacagccctcaacctcatcaatgatgcgcaaaaagccgctgacaagattgttgctgacgtagttgagagattccaggatgtcgaccttcggccgactgggtctgataattctgacaatgaaaaaaccgacactgattag

SEQ ID NO: 33285 - DNA, 391 bp, Oryza sativa
  Clone ID: PAT_MRT4530_37411C.1
cggacgcgtgggcagctcgccatttcgacatggcccccgccgccgcatcatcgtccgcgctgctccccgaggggaccttttacaccggccggcccgtagcgggccggaccgtcgggcagcgccttcccacgagggtaagccggcgcgagctaagactactacagctcgttctagtgccgactgcctattcgttggcggcaggaggcggtgagcggaggccttccgcacgtccgcgatgggagcgcttgtcgagaaacgtgatgtggttcttctaggtgactgcaacagcttgctagtggacacggcacagggccgtctctgtaggttctttcaagggagaggaagacaaacgggatcttgcgacatctgtgattgcaaaggcaatagaaaa

SEQ ID NO: 33286 - DNA, 1059 bp, Oryza sativa
  Clone ID: PAT_MRT4530_37412C.1
atgtcgaagagatctcgatcagccatgtcttcggccggagaggaggtcgaggcaagcacgctcatcaccctaagggtcaaggacaacgaaggtgtcaggatcacctgcacgatgcgcaggacggacaagctgcgcgtcctcatcggtttctacctcgacatggtgacgccgaccgacaagggcaagggcgccgccgtcgccgccgccgccggtggtggcgtcttcatgcactacggccgttgtgtgaccggcaaccggacgccggcggactacgacatggaggacggcgacgaggttagcttcttccccgacggaactaggaccatgcccgtcaccctcaccgtgaaggacaacaaaggccgccgggtcacacacaccatgcgtaggttggacgtcatctgcaccctgttccgtctctactttgacatgttgccctcgacagcgcccagggaaggtgttttcatgtacaacggcagggagatcagtttctatcagacgccggagaaatgtgacatgaacgacggcgatgagatcaccttccatctgttcagcaagccgagcaccttcgtcaccctcacgatcaagggcagcaccgacgatggcggccgcagcggcgtcgtcgtcacccgccccatgcgcaggaccgacgagttgcagcgcctgatcgattactacttcgccatggtgccaactgatgatcagaacggcgagtgggcggtcacgtacggtggcaggcaggtcggcggcgaggagacgcccgcggattacgagatggaggacggcgatcagctccgcctcgttccggcgagcaaaccgagcaggttcgtgaccatcgatttgttaaccatggtgaaggccaagcgcacatacaccctgcgaaggactgacaagctgcagggtttgatggacctgtgcttaagcagggagcctgcaagtatgtacaggcatgggtgtgttttaatttacgagggccgtcgtgttcaggactcgcaaactccggatgatctcaaactggaggatggtgatacaatccacgctatagcccgtcaggtcggataa

SEQ ID NO: 33287 - DNA, 417 bp, Oryza sativa
  Clone ID: PAT_MRT4530_37413C.1
atgccgaccactgcccctatctatggtgcccgcagcctgactcctgacctgaccgagtttgctggagacgttcggtggctcggcggcaagggttggtggcgtggccgcggcggcgctcgtcggggccgcggtggagcccggctggaggcagcgctcgtcagggccgcggcggaggtgggcaagctggagacggcgccgaggcgagcctggctggaggcggacgacggcgccggttggggccacggcggagcccggctggaggtggcgcccgtcagggccgcggcggagctcggctggaggcagtgctcgtcggggccgcggcggaggagggcaagctggaggcggcgcggcgcgatggatgccggcagaggcggcgcggcgcgatgtgcggaggcggtgcgatggatggggatctga

SEQ ID NO: 33288 - DNA, 555 bp, Oryza sativa
  Clone ID: PAT_MRT4530_37414C.1
acttctagtgattgtctgattgatcatcaatggctagctaggtcgttttcttggtggcggtgctcatggcggccatgatggccatcttcgtcgcgcagttgagcgagtcggagatgaagttcagggacaggcagagccacaggcaggtgcaggacaggccgctggacacgtgcctgcaggtgctcgaccgggagctcacccgccgggtgaggttccagccgatgttccagcccccgggcgcgctcggcctgccgatgcagcgctgccagcagctgtaggacgtgagccaggagtgccgctgcgcctgcatccgccggatggtgaggagctacgaggagagcttgccgatgcccctggagcaaggctggtcgccagcgtcgtcggagtactacggcggctagtagtcgtcgtcggagcaggggtactaccgcgagggctccgtcgaggagggctactacggcgagcagcaccagcagccgcagatgacccgcgtgatgctcaccagggcgaggcactacgcggggcatctcccgtcgcagttcccggttgagcccc

SEQ ID NO: 33289 - DNA, 873 bp, Oryza sativa
  Clone ID: PAT_MRT4530_37415C.1
atggcagagaaattgggacctgagcacgcaagtcgcagcagcactcagcatcgcggcggccggggcccggggcaacggcgacgaggcggcgcgccggcagcgcgggcgcatcggctccaagcagatacccaaatattccctgttaactagagtatcttccccttcccttggcgtaaaagaaaaaaaatctcccgtctcgtctcctccgctccttgcgccatctcgctgctgaacaggggaggggcgccgatctccatccggcgagcagagcaggggagggggaggggaggggatcctgagccttgacatggcagagaaattgggacctgagaagcggcacgccttcgtccacaacgggcagaaggtctttgagtgggaccaaacactggaggacgtgaacatgtacattgagctcccgaggggtcaggattcgacttctcccaggctcagttcaccggaacctgccctgacccaagaaccttcatgggtggaattcgctctgactgaagcttggcccaacgtcatgtatctggctaaatgatgttgctaacctcacagtggcttgtcaaataatcaaatgtggtggctgtacatatctcgcatctgtaaattgtgaaattcgccggtttcctatggctgcctttgtgccttagaaataatggtgaatgtttggcctatcaatcgccgagccagacgtaggattctgaagttatttattcacttattgatctagcatccttgatgatgtagtaagtttgtgatcaccaggtacttgtgactgttcgaatgaaaatataccatctacccatgccgggtcatttcaaaaaaaaaaaaaaaaaaaaaaaaaaaaaaaaaggggggaggccttcgtgc

SEQ ID NO: 33290 - DNA, 225 bp, Oryza sativa
  Clone ID: PAT_MRT4530_37416C.1
gttctttttttcttttttttctttttttttcccgtcttcgctctcggattgttggttctgggagcaaaacgcccggacgcagcgcaccgttcactggataactgttcactcactgaccgccaaggaacaaaacccgactcaattcgttcccccccaacaggagcaaacaaaacttcggcaatccaaaaacccataccccccccttctcgccactgccctattaca

SEQ ID NO: 33291 - DNA, 876 bp, Oryza sativa
  Clone ID: PAT_MRT4530_37417C.1
atgtcgtcgtcggcgaccaggggggaggcggacagcccgtcgccggaggtcgagccgagcgtcctcgtcaccctccgggtgaaggacagcgaaggcgtcaggatcacccgcacgatgcgcaggacggacaagctgcgcgacctgaccgatttctacctcgccatggtggtgccggccgccgtcgcgcaaggccatgtctgccgccccgttggtgttttcatgcactatggcaggagggtgaccggctatgagacgccggcggactacgacatggacgacggcgacgaggttagcttcttccccgatagagtcatgagcttgcctgtcaccctcaccgtcaaggacagcaaagggcgcacggtcacgcgtaccatgcgtcggatcgagaagctgaacgtcttgttcgatctgtaccaccccatgtttcgtgtaccgtggccgcaagctagcgtcacccgcaccatgcacaggacggacaagctgcaagacctgatcgatttctacgacgccatggttcccgccgataagtattgcgacggcgagtgtcaggtcgtgtacggcgggaagacggtcgaaggcgagaagacgccggcggattgcgagatggaggacggcgatcagatcaaacggatgtcgagcatgttcgtgaccgtcaccgtcgggttcgtaagcttggggaagaacatcgagcacgcacacaccctacgaaggactgacaagctgcagggcttgatggatttatgctcgagtatgatgccaagtaggtacaagcatggatgtcgcttcttgttcgacggccgttttgttcttggctcacaaactccggatgatctcgcgcaggaggatgtggatatgatcgatctaacatgttattag

SEQ ID NO: 33292 - DNA, 264 bp, Oryza sativa
  Clone ID: PAT_MRT4530_37418C.1
atggagaatgagaatgagcatgagcatgagcagaggaggccacagccgtcggagtccacacgctgcaggagattgacggcggccggcggcggccgtgcgcgcgaaagaaggaatggagatggcggtcgtgtagtggccattcttctgaaaattctcaattgcatctattttcatttacctcaccaaagaatcaaaaatggcccaaaaaaaacttatggggaagatagtgtggatcaacagaccgcctacatgaaggcaacataa

SEQ ID NO: 33293 - DNA, 174 bp, Oryza sativa
  Clone ID: PAT_MRT4530_37419C.1
attcggcaggcggcggcggtgagagacacacacaccactgggagtcgacggcgctactatccacccggaactgtcccctgcggtggtgatcttttctccggcgactaggaaatacgctggtcactgtttgatatacgactaggatacaagcaatggactgcaggatatacatgt

SEQ ID NO: 33294 - DNA, 547 bp, Oryza sativa
  Clone ID: PAT_MRT4530_3741C.1
gggcgggatatttttccactcgtctcaaattttatcttttcctctagcaacactcgtcccacagtgtaaatcactttcttgttttttctcccctgtatagtgtcacgaggaagatctacgtcgcggtcaacgctcattgccaatcatagaagaatccactacaggccattgtatcgcaatggtagcaagggatcacacccggcggagtgataggtcgaaaagtatgtcgataagataacaccattttcttcaacaaagacagttcggtcgataaagtgaatgatcatgcgcgagagaagatcaccatcgatattgctctgaggacacctcagaccctctagcactactgcacgtgcatcaacgcccctgggaaccgtaaatctatgaagaatttgagcggggtaaactccataacatgcatgtgctgaggtcatcattgattccaccaatgttggcatggagattggggattgcaagtatggacaatacagtgcccacgatcatattgctttaaatcgtggtgtgagactcatgagctgctgcagca

SEQ ID NO: 33295 - DNA, 285 bp, Oryza sativa
  Clone ID: PAT_MRT4530_37420C.1
tccttctacagccgttgtccgtcgaagtggcccaagttgccggagccgtcactcagcctccctcttctccgcaagtctggcaccgacgagccgaacaataagtctgcactggtaccgacgtccgcgtccatgcccagaaggaagcagggacgcatgctgcgggccgccgtgcgacgcaacgaggagtggatgatgatgagcaacagagacgagcaccagagctgcatgccacaggcctcatcgttctcccgagccttcactgttgtcacttccatcggcatccgt

SEQ ID NO: 33296 - DNA, 2238 bp, Oryza sativa
  Clone ID: PAT_MRT4530_37421C.1
atggatctcggcaaatctacttccaccaacgcgtcgctgaagaaactccaggaagagggcgcccttcccggtcgcggagtcatggagagagaagtaggaggtactgaaccccagcctgtcctaggtcgcatggttgcgatcgaggacaacattctttgtggttttctccctccaccttctgaatttcttctattggttctgcacttctacggcctttctttgctccacttgaaccccaattccattgccttcctcagtatttttgcgcacctttgtgaggcttacattggggtagagccttttctcgatctcttccgcttctactatgagttgcgttggatggaatccaacagggtgtccggatgcgtcggattccgacttcgggatggcttgaaatcgcgctacatcccgttccagtgcacttcttctcgaagcaaatggcgggcgaggtggttctatcttcagatagagaattcggatcctgtctttgtcgtccctgaggaacaaccagacaagatttcgtcttggaccgcaaagcccgccttgaccccttccctccaatccttcatcgatgccatcgacgacctccgagtacgaggcttggatagcgccaccgtggagcgccgcgttggccaactgatgatcagcggcccgacaacggcagacgacgtccccgttcctctttgtgagaaggaggcgaccgagcgcgaagccgcaatcaacgctctccctctgactgacgccattggaccgctcgtggaccaccaggcggcggccttgttgaaggagggcatcgctcaggaggcgtccgatgtggccgttgccgctacgactagtggcagccgtgtcccaaggatagggagaaagttcacctccgtgctcggcagccgccggagagcgtcctccccatcggcgaaggcggcgcaagacaggtctggagggaactccagcgcatctcctgcggtggcctcgaccgatgtcgtggtcgtgccgaggagccgtgaggcgacgccgagtgggccagccagtgacctcgggcctactcgcggcccgtctgccgacgtcctcacctggggggagtttcaagccgagatggggcgcatcctcgaggctggtgctcacggcataagtcgcgagattgcggaggcgagggcagcagcagcgtcgtcggcgaacgagcgtgccgacaagctggagcacgacctagcggagggtcggatgtcagaactcgagaacaacttgtcggagatccgtggctcgttgcgggtcacctacaccggcctacaccagctcgccggggaatgtggtgttacgacaaccatcccggcgaaccccgacgagttctcgctgacgtcttcactcgcggaactagcaacgacgatggaggcgataccctccaagcatgcggccaggatcgtggaggaggcgtccaacgggatctataccggggcctgtcacgtccttgcatgtgtaaggttggcgcaccccgagctcgatcttcggcagatcttggatcggggggccgccaacgacgcgcgtaagggcgtgatggaggaaatcggcgagctgggagagtctgttctcccgctttttgaagagtatgtcgatgtcgaggatgtccagcagcgtgggcagcccgagttaccggtggtcgtcccggcgattgcgctccaaccatatgtgtcccaggacgatgtaggtcaaagtttgcccgtgaatacggatctcgagagtaggcttgctgaccaagatcgtcgcatccagtattggaagacgaagtgtgaggtcgcggaactcgagagagccatgttggaggtgagaaaggaccaggccgtagaggcactccgaggccgcgaggtgtggttcgactcgtatctgaagagttgctgcacgtccatgtcgagggtctgcagagagctccgagtacctcgtggggatcccgaagagtcggcggccggatacatctcgtggctgaacggagcctgcgctcagcttgagggcattggtcaacgcatcgacgaggccttgaagcaggagtgtcgtcgctcaagccggtatgccgggggacacgtgttggcctgtatacgagatcaccgtccgcagctgcacctcgaggtcctccgcgaaggtttttcacgttctcggaggactcctacggagatagatggcctggcgaagtcgatggtgccgctggcggagaaagttttccagtcgatggactggcgttggccttcctag

SEQ ID NO: 33297 - DNA, 2036 bp, Oryza sativa
  Clone ID: PAT_MRT4530_37422C.1
atgctgacaaggcctccaaggaacctaagggatcttcggctggggacgcccagagccgataaggccttgtcggattctgtggagacgaaagaccatgtcagacctggtcgtgtcaaaggtccaagagccatgtcctccgagaagaatcctccgacgacaaggctagggtctagggagagtgtacaactcaaacgactggccaaagtcgggaactgaggaggcactcttacacactcgcggcctcggagtgcctctacggcctggtcctttctcacctccaacatggctctctcgagttccgcgacctcacacttcgtcttccaatactggatgcaacgattttggtcagcaagcctactctcgagatccgtattcacgggcaaactatgacctacatcgtcctgggacacatatggttggagcgcaatcgccgggacgaccaccggtaactcgggctgcccacgctgctggacatcctcaacatcgacatcctcttcaaaaagcgggagaacagactctcccagctcgccgatttcctccatcacgcccttacgcgcgtcgttggcggccccccaatccaagatctgccgaagatcgagttcggggtgtgccaaccttacacacgcaaggacgtgacaggccccggtatagatcccattggacacctcctccgcgatcctggccgcatgcttggagggtatcgcctccatcgccgttgccagttccgcgagtgaagacgtcagcgagaactcgtcggagttcgccgggatggttgtcgtaacaccacattcctcggcgagctccgccaggtcgtgctccagcttgtcggcacgctcgttcgctgacgacgctcctgctaccctcgcctccgcaatctcgcgacttatgccgcgaacaccagcctcgaggatgcgccccatctcggcttgaaactccccccaggtgaggacgtcggcagacgggccgcgagtaggcccgaggtcactggctggcctgctcggcgtcgcctcacggctcctcggcacgaccacgacatcggtcgaggccaccgcaggagatgcgctggagttccctccggacctgtcttgcgccgccttcgcctgtgtcgacttctcgcccagcgtcaccagcttccgccatcgcgaaggtggcggagacgcagccacggctgatggggaggacgctatccggcaactgccgagcacggaggtgaactttctccctatccttgggacacggctgccactagtcgtagcagcaacggccacatcggacgcctcctgagcgacgccctccttcaacgaggccgccgcctggtggtccacgagcagtccaatggcgtcagtcagagggagagcgttgattgcggcttcgcgctcggtcgcctccttctcaaaaagaggaacggggacgtcgtttgccgttgtcgggccgctgatcatcaattggccaacgcggcgctccacggtggcgctatccaagccgacgaagttggtagcgacttcataccccgacaaacctcgtactcggaggtcgtcgatgccatcgatgaaggactggagggaaggggtcaaggcgggctttgcggtccaagacgaaatcttgtctggttgttcctcggggatgacaaagacaggatccgaattctctatctgaagatagaaccacctcgcccgccatttgctacgagaagaagggcactggaacgggatgtagcacgatttcaagccatcccgaagtcggaatccgacgcatccggacaccctggtggattccatccaacgcaactcatagtaaaagcggaagagatcgagaaaaggctctaccccaatgtaagcctcacaaaggtgcgcaaatatactgaggaaggcaatggaattggagttcaagtggagcaaagaaaggctgtagaagtgcagaaccaatagaagaaattcagaaggtggagggagaaaaccacaaagaatgtagtcctcgatcgcaaccatgcgacctaggacaggctggggttcagtaactcctacttctctctccat

SEQ ID NO: 33298 - DNA, 753 bp, Oryza sativa
  Clone ID: PAT_MRT4530_37423C.1
atggtcaggcgtgaactaagccaacgccgccgggagcaccggtccgggtaccggacgcccgagccgtcatcgcccaaggtctcctgcaagaacggcgcatgcccgctgccgccccggccgctggccgactccgccgccaccgcagcgcgcagccggcagaagagctcgctcgtcgggagggtgcttttccgtcgcagcaagtcgaggaaggcgtcgccgtcgctcccttcctccgcgagccgccgccgcagcccccttcctccgcttcccgccgccgccgccccttcccttcacggccgggcgccggcgcggatcccgccgccgccgctcccttcctccacgagccgccgccgcccccttcctctgcttcgcgccgccgccgctccttcccttcacggccgggcgccggcgcggatcctgccgccgctactcccttcctccgtgagccgccgccgccgctccttcccttcacggccgggcgccggcgcggatccccccgccgccgctcccttcctccgcgagctgccgctgccgccgccccctttctccgcttcccgccgccgccgctctttctcttcatggctgggcgccgcgcgtgggtttgccgagcgggcgccggcgggggtcggcttcacgccgccgctgcttcctcagagtgccgccgttgccgccgcgccgcccgacgccatcgtcgtcgcaccgcctgacgccgccgcaagcccacaagcacaagagacacggagttgtggatag

SEQ ID NO: 33299 - DNA, 2040 bp, Oryza sativa
  Clone ID: PAT_MRT4530_37424C.1
atggcggaagaaagagaaagcttcgagagtcagtgggcgctctccgatgtgacagaagataatctgaaggagatggtggcgcacggcgttctcccagcgaaggagattatcgggtggcgaccggcgttcggcgaagtattcccgacccccgacacacacgaaatcatggacacatggaactcattgcctatgggagatgaagctgctcaggcagtggaattgatggaacgcatgctaaaactgaaggaacaaggtttgcagggagaacagatcactcggcacttcatcaaaagtcgattagctccaatcaaagagagatcccacacagcttttgagtttgatggcaagcatgatccaaatcgggaagatccagattctcttgactttaaggtcatgaaagaaagaatgtacaagatcttctcaaacgctattgttgtcagctattcacatctgctgcccgttgtgccactcaatgcattcaaccctcctccaccgcagactggtcaggcgagtggaggaccaaaaattcgatctgacgctcgaccaagtgcttccgatccagtcggccagtcagatgctcgcaagaggaagctggttctaagcgacgagaaaggcgatgataccggaaggctcggagacagagaagcgaccggaaaatccccaaagccaactaatccgaagaagaaaacctccagtcgtcctttgccaaaaatcagaaagtcttctagcataactcaaactcgtaggaagccgtctgacatagatccttctgaaaaagaccccgagccggctgacatagaggcaaaccgttcaaaagaaaccgggccaactgcagaggatcgtccgagtaacaaacaaccggcaaccaacaatgtagaacccagcaacgagcccccgactgggaaccagtcggccgaagctgaagtcggtgctaaccaggagcccccgactggaaaccggtcggatgcagggccaagccaaaagattcccgaggttgaagctcaaacgaacagtcctctcgggaaggatgctgacagtgaatcagaaaccagatctcctgtgaagacaccaaagtccactcgtccccgaccgggaatcatcacagggccaataattggtgatgaagaagaaatcctccggatacaagcagctgaggattcatgccctccgattctggtcaagtggtgggatgacaacatgcagcctcaagggatcgtgataaataagcaaaaagaggacgaagagttatgcctactgaagaaggcacttggtcaggcaacccgcattgtaaataggattcatcttaggaacgaagccaaaacggtaaccttagagaggttagtccctcatctcggaaccctcgaagccaccaggaatcaactgcacgaagcgaaagaacttgccaggaagaatgaacatgatctgagggatcggattgctgagctccaggaatcaaattttgaactgagtggctcatcaaaagtgcaagctgccaagatatctcagttggagaagcagattcaaattctggaaaatgacaaggcagaactggcaagacaaagagacctggctttaaaggaagttgaagacggcaagatcaaatctcaaactcaattcgacatcctggttggcaagataaaaaaacttgaaggagcccgggatgaggttgctaacgctgttgccccatttgttcaagcgatgttcttcaataacaacggcccgagtgcacttgatgcttctgaaattttcgacaagctgagagttgctccggatacatatttcaagagcatcaaagaagctggaagtatgggagcaagtttggcgttggcgatgaccaaatctctttatccgagggttgacgttgatgccattgatggctttgcatacgggacgagcgaaggagctgctcttgacctcatcagcgatgcacaaaaatctgctgataagatagcagttgatgtagttgagagatttcaggacaccgatcttcgaccgactggtcctgataattctgatgatgaaaagactgatactgattaa

SEQ ID NO: 33300 - DNA, 564 bp, Oryza sativa
  Clone ID: PAT_MRT4530_37425C.1
atggtggctagctgtgtggggtggcgcattgggcgtggaggacgctcgtcggagccggtgcctgccgttgtccctgtcgccgttgccccacctccgcgggggtcgaggcgacgacgagaagctcggcgacgggtgcggaccccggccgccgaggaggacgatgacggcgcggcctcggcaagggtcgccctcaagctcgcctcccttaccgcgctgctctggcttcccgccctcgttggtcttctcatcggctgttccacctcgacgactatcggattcgccgctgcctcctcctccacactctgcctcgccgaccaccggattcgccaccgcctcctcctcctccaggctacccaagtaccaggtatcatgggtaccaggtaccaggtatcacgggtaccagatgcaaatcagagtgtcatttcctcacttgcttgttttgtcaatgtcgccgacgtggagcagtcgtcggttgttgctcttagcacctccttgctagttaaggtgctgaccggcgtccgactgcgaggcccgaagcagcgccttcgcctcaaccgccgctag

SEQ ID NO: 33301 - DNA, 2409 bp, Oryza sativa
  Clone ID: PAT_MRT4530_37426C.1
atggcggaagaaaaagaaagcttcgagagtcagtgggcgccctccgatgtgacagaagataatctgaaggagatggtggcgcacggcgttctcccagctaaggagattatcggatggcgaccgacgttcggcgaagcattcccgacccccgacacacacgaaatcgtggtatttgctcatttcttctatggcggattttctcttccaacctcaagattcttccgggggattctgaacttctacgggattagcttgcatcacttgaacccaaactccatagtgcatattgccaattttatccatgcctgtgaagcttttctaggcattaggcctcatttcgccttgttccgccgcatctttttcctcaagccccagccaaataagagcaaaccatgcgtcgttgggggtgctggtttccaactcaggggaacactgagccaaaaatacttctccatgcccttcaagacctcaaataaaggctggcacgcaaactggttttatgttcaaaaccccgagcctgtccttcccgagtactcctgtcttcctccagtttatcgtgatacttggaactcactgccaatgggagatgaagctgcacaagcatgtcggttagctccaatcaaagaaagatcccgcacagcttttgagtttgatggcaagcatgatccaaatcgggaagatccagattctcttgactttaaggtcatgaaagaaagaatgtacaagatcttctcaaacgctattgttgtcagctattcacatctgctgcccgttgtgccatttaatgcattcaaccctcctccaccggaatttgctttgatgaaatcagatcctccaattgctcaatgccgatcacctcgccagcagactggtcaggcgagtggaggaccaaaaattcgatctgacactcgactaagtgcttccgatccagtcggccagtcagatgcccgcaagaggaagctggttctaagcgacgaggaaggcgatgataccggaaggctcggagacaaaggagcgaccggaaaatccccaaagccaactaatccaaagaagaaaacctccagccgtcctttgccaaaaatcaaaaagttttccagcataactcaaactcgtaggaagccgtctgacatagatccttctgaaaaagaccccgagccggctggcatagaagcaaacccttcaaaagaaaccgggccgactgcagaggatcgtccgagtgacaaacaaccggcaaccgacaatgtagaacccagcaacgagcccccgactgggaaccagtcggccgaagctgaaatcggtgctaaccaggagcccccgactggaaaccagtcgaatgcagggccaagacaaaagattcccgaggttgaagctcaaacgaacagtcctctcgggaaggatgctgacaatgaatcagaaaccagatcttccgtgaagacaccaaaatccactcgtccccgacaaggaatcatcatagggccaataattggtgatgaagaagagatcctccggatacaagtagctgaggattcacgccctccgattctggtcaagtggtgggatgacaacatgcaacctcaagggatcgtgataaataagcaaaaagaggacgaagagttatgcctgctgaagaaggcacttggtcaggcaacccgcattgtaaataggattcatcttaggaacgaagccaaaacggtaaccttagagaggttagtccctcatcttgggaccctcgaagccaccaggaatcaactgcacgaagcgaaagagcttgccaggaagaatgaacatgatctgagggatcggatcgctgagctccaggaatcaaattttgaactgagtggctcatcaaaagtgcaagctgccaagatatctcagttggagaagcagattcaaattcttgaaaatgacaaggcagaactggcaagacaaagagacctggctctaaaggaagttgaagaccgcaagatcaaatctcaagctcaattcgacgtcctggttggcaagatcaaaaaacttgaaggagcccgggatgaggttgctaacgctgctgccccaattgttcaagcgatgttcttcaataacaacggcccgagtgcacttgatgcttctgaaattttcgacaagctgagagttgctccggatacatatttcaagaacatcaaagaggctggaagtatgggagcaagtctggcgttggcgatgaccaaatctctttatccgagggttgacgttgatgccattgatggctttgcagacgggacgagcgaagaagctgctcttgacctcatcagcgatgcacaaaaatctgctgataagatagcagttgatgtagttgagagatttcaggacaccgatcttcgaccgactggtcctgataattctgatgatgaaaaaactgatactgattaa

SEQ ID NO: 33302 - DNA, 715 bp, Oryza sativa
  Clone ID: PAT_MRT4530_37427C.1
ctactttgctaccttgcttggatgatggatataaatatacagaaaacctacaccacgggcttccgggacaacagcacgaagatgacgatggtggctagctgtgcggggtggcgcgttgggcgtggaggacgctcgtcggagccagtgcccgccgttgtccccgtcgccgtcgccccaccgccgcggggtcgaggcgacgacgaggagctcggcgataggtgcggtgaataagagggagagtgggagcgggacgtggaggccgctgctggcgccggggacggcgttgccgggcgggagcttctcctgtcggctcaagacctcggccgccgaggaggacgacgacggcgcggccccggcaagggtcgccctcaagctcgcctcccttaccgcgctgctctggctccccgccctcgttggtcttctcatcggctgccccaccttgacgaccatcggattcacagctgcctcctcctccacactccgcctcgccgaccaccggattcgccaccgcctcctcgtcctgctccaccacgcggctgccttctcctttctccctctctctctcctccttctcctccaggctaccaggtatcaggtactaggtatcacggtactagataacatgtaccagccggcagccggtaccagatgtgatgagtcgggcaaagctgaagtgtcattgctatgtttattataccttgccagggcaagctaa

SEQ ID NO: 33303 - DNA, 660 bp, Oryza sativa
  unsure (1)..(660): unsure at all n locations
  Clone ID: PAT_MRT4530_37428C.1
ttttttttttttttttgtctgtacttcctcgatgtggtgagagtttctctccccggcgtgttactacggtcggcactttgtggctttgccactttgcctcggggcttggatcctgcacctatgctccttccgctctctgctgggcggcttcggctgccacgatagtgtcgcacatgtccttcctatccacttatctcacactcccgagaccgttggtcaccgtcatctgtcgagcggttcgttggaaccgttctttctctccgcggtccatgggacctgcgagggcgtccgcgacgccccgccctcctgccccgcgcagaacaccctcttctgccccttcgcctccctcttcattctgtgtgtgggtggccacgtgctccctacgcgacttgttgccgatctcttgcgctgctcgtcctcccccaccaccctgcccctacctcatggcgcctgggcgccacaccacggaccctctgacttgctggagctgataatctggcaatgagagtgaccttntgtccagcagcataaccggacgtattcgattgcagtaaaacgtctgagtcacaacccacgcgtccgcggacgcgtgggtcgaccggaattccggacggtaactggaagcgtacagtttccctatagggagtccgtataaacttg

SEQ ID NO: 33304 - DNA, 2397 bp, Oryza sativa
  Clone ID: PAT_MRT4530_37429C.1
atggcggaagaaagagaaagcttcgagagtcagtgggcgccctccgatgtgatagaagataatctgaaggagatggtggcgcacgacgttcttccagcgaaggagatcatcgggtggcgaccggtattcggcgaagcattcccaacccccgatacacataaaatcgtggtatttgctcatttcttctatggcggattttctcttccaacctcaagatttttccggggcattctgaacttctacgggattagcttgcatcatctgaatccaaactccatagtgcatattgccaattttattcatggctgcgaagcttttctgggcattaggcctcatttcgccttgttctgccgcatcttcttcctcaagccccagccaaataagagcaaaccatgcgtcgttgggggtgctggtttccaactcaggggaacactaagccaaaaatacttctccatgcccttcaagacctcaaataaaggctggcacgcaaactggttttatgttcaaaaccccgagcctattcttcccgagtactcctgtcttcctccagtttatcgggatacttggaactcactaccaatgggagatgaagctgcacaagcagtagaactgatggagaggatgataaagctgaaagagcagggccttcaaggagaacagatcacccgacactttatcaagtgtcggttagctccaatcaaagaaagatctcgcacagccttcgaatttgacggcaagcatgacccaaaccgtgaagatccagattctcttgacttcaagttcatgaaggaaaggatgtataagatcttctcaaacgccatcgttgtcagctactcacacttgctgccagtcataccgttcaatgcattcaatcctcctccaccggaatttgctttgatgaagtcggatcccccaatcgctcaacgccgatctccccgccatcaaactgggcaagggagcagaggaccaagaattcggtctgaaactcaaccaagtgcttctgatccagtcagccaatcagattctcgaaagaggaagttggttctaagtgacgacgaagccgatgataccaccaggagacctggagaccgagagacaaccaagaaactaccaaaacaggctactccaaggaagaaaacatccagtcgccctgtgccaaagatcaggaagaaaccgtctgatatagatccatctgggaaagactctgacccgactaacacagacacaagttcttccaaagaaaccgggccaactgctaggaatcatccgagtgacaatcagccggcaaccgataatgtagaatccggtgatcaacccccgactagaaaccagtcggccgaagccaaagccggagttaatcaagagcccccgactagaaaccagtcggacgtagggccaagccaagagatttcagaagtcgaaacccaagcagacagccctcgcggacaaaacgccagcaataaccagagatctggatctcctttaaaggcatccgaatccactcgtcctcgtccaggaattattacggccgaagattcgtgccctcccattctggtcaagtggtgggatgacaacttgcaacctcaaggaattgtaataaaccggcaaaaagaagacgaagaggtatgcctactgaaaaaggcactcaaccaagcgactcgcattgtaaataggattcatcttaggaacgaggtgaaaaccgcaaccctagagagactagttccgcatcttggaaccctcgaggccaccaagagtcaactgcacgaggccagagaacttgccaagaagaatgaacatgatctgagggatcggattgctgagcttcaggagtccaatttcgaactgagtggctcatcaaaagttaatgtagtgcaagctgccaagatatctcaactagagaagcagatccaaactctggaaaatgacaaggttgagctggcaagacagagggattcggctttaaaggaggttgaagaccgcaagatcaagtctcaagcacagtttgatgtcttagttgacaagatcaacaagcttgaaggagccagggataaagccatgttcttcaataacgccggttcgagtacacttgatgctaccgaaatcttcgacaagctgagagtcgctccagatacttatttcaagaacatcaaagatgctggaagtatgggagcaagtctggcgttggcgatgaccaaatccctttatccaagggttgatatggatgccattgatggctttgcagacgggacgagcgaagaagctgctcttgacctcatcagtgatgcgcaaaaagctgctgacaagattgctgctgatgtagttgagagattccaagatgtcgaccttgggccgactgggtctgataagtctgacgatgaaaaaactgatactgattga

SEQ ID NO: 33305 - DNA, 424 bp, Oryza sativa
  Clone ID: PAT_MRT4530_3742C.1
tttttgttaggatacaacagaagaaaaggatatacctatgattccatgcataccataaggaaagattcttacgtaccaaccttcctacatacagcccaagctgatttcatattctagaacatctaatgaaaccgcacgcacattaaccaaaattaattctaaaaacacaccttgtgagcaagccacgaggctcacttgacaacatcagttaataagcagccttaaatcacatcagacgaaactgcaagccggggaattctttcttaatgaggaagtcctacagcagctgcttactgcgacagccacgaggtgttcacgatccaaagctgtagtgggcagctttagctgcttcgccgccgtgcggattaaggtcagactcagcctagcccaccacggggacgccgctgttgactttaggcgtgca

SEQ ID NO: 33306 - DNA, 948 bp, Oryza sativa
  Clone ID: PAT_MRT4530_37430C.1
tttgtctctttcccttccttctcccttctctctctctctctgactaccagcacgaagatgacgcccacgaagttcgccgtctcccctccacaagtgcgtcaccgagatcccccgacgctgcctagctgtgcggggtggcgcgttgggcgtggaggacgctcgtcggagccggtgcccgccgttgtccccgtcgccgtggccccacctccgcggggctcgaggcgacgacgaggagctcggcgactggtgcggtgaacaagagggagagtggtagcgggacacggaggccgccccctccccgcctcgccgcccccgccccgccgccccgcccctgcgcccccccccgcgtgctggcgccggggaaggcgttccctggcgggagcttctcctgtcggctcagaccccggccgccgcggaggacgatgacggcgcggcctcggcaagggtcgccctcaagctcgcctcccttaccgcgctgctctggctccccgccctcgttggtcttctcatcggctggtccacctcgacgaccatcggattctgcgcagcctcctcctccacactctgacccgtgggcttccacctagttgtaggtacggggcgacgcccgtctccggtgtccgattaatcaagtttgttaggtgttaattgttgtgtgcattagtattctccagtgagcctgcaatgttgttatgtccagatgtgatgagtcgggcaaagctgaagtgtcattgctatgtttattatacccgaccaccggattcgccaccgcctcctcctcctccaggctacccaagtaccaggtatcatgggtaccaggtaccaggtatcacgggtaccaggtacctgcaggtatcctgctccaatgtaggattgcatcttgtcacaccaataagaaaaatccaatccgtcgaaaacatgtggcttagttgaaaacttcttagccat

SEQ ID NO: 33307 - DNA, 2208 bp, Oryza sativa
  Clone ID: PAT_MRT4530_37431C.1
atggcggaagagagagaaagctacgagagtcaatgggcgccctccgatgtgacggaagagaatctgaaggagatggtggcgcacggccttcttccagcgaaggagatcatcgggtggcgtccggcgtttggcgaagcattcccgacccccgatacgcacgaagtcgtggtatttgctcatttcttctatggcgggttttcccttccaacctcaagatttttccggggaattctaaatatctatggaatcagcctgcatcatctaaacccaaactccatagtccacattgccaactttattcatgcctgcgaagcttttctaggcattaggccacatttcgccttgttccgccgcatctttttcctcaagcctcagccaaacaagaacaaactatgtgttgttgggggggctaatttccaactcaggggaaccttgagccaaaaatatttctctatgcccttcaaaacctcaaacaaaggctggcacgcaaattggttttatgttcaaaatcctgagcctactcttcccgagtactcctgtcttcctccagtttatcaggacacttggaactcactgccaatgggagatgaagctgctcaggcagtggaactgatggagcggatgataaaactaaaagagcaaggtcttcaaggagaacagatcacccgacactttattaagagtcggttagctccaatcaaagaaagatctcgcacagccttcgagtttgacggcaagcatgacccaaaccgtgaagatccagattctctcgactttaaggtcatgaaagaaagcatgtataaaatcttttcaaatgccatcgttgtcagctattcgcacttgctaccagtcgtgccattcaatgctttcaatcctcctccaccgtgcggaaataatactgataaccaaacttgcaggaaaccatccgatatagatccttctggaaaagactctgacccgaccaacataggaacaaacttaaaagaaaccgagccaactgctgaggatcagccgagtgacaaccagccagtaaccgataatgtaggatctggtgatcaacccccgactggaaacgagtcggccgaagctggagccggaattaatcaggagcccctgattgaaaaccagtcggacactaggccaagccaagagattccagaagttggagctcgggcagacagccctcgtagacaagatgccagcaacgacccgatgccagggtcccccgttaaggcgcaagagtcgactcgtccccgtccggaaatcatcacaggactaatgattagtgatgaagaagaaattccccgtatacaagcagctgaagactcgcgccctcccatcctagtcaagtggtgggacaatgataggcaacctcaaggaatcgtaataaacaaacaaaaagaagatgaggaagtatgcttgctgaaaaaggcactcagcgaggctactcgcattgtaaatagaatccatcttaggaatgaggcgaagaccgcaactcttgagaaattagttcctcatcttggaactcttgaagctactagaagccagctacatgaggttagagagctcgcgaggaaaactgagcatgatctgaggaatagaatctccgagcttcaagaatctaattatgaactaagtggttcatccaaagtgcaagccgccaggatttctgacctagagaagcaggtcgaggctctggagaaggacaaggccgaactagcaaagcagagggacttggccttaaaagatgttgaagatcgcaaaatcaagtcccaggcacagtttgatgtcttagtcaacaagatcaataggcttgaaggggccagggataaagtcgctaatgccgctaccccactcatccaagccatgttcttcaataacgccggtccgagtacacttgacgcttccgagatcttcgacaagctgagagtcgctccggatacttacttcaagaatatcagggaggctagaagtatgggagcaagcatgacattagctatgaccaaatctttataccccaaaatcgatattgtcgccgttgatggatttgcagacgggacaagcgaagaaacaaccctcaacctcatcaatgatgcgcaaaaagccgctgacaagattgctgctgacgtagttgagagattccaagatgtcgaccttcggccgactgggtctgataattccgacgatgaaaaaactgacactgattag

SEQ ID NO: 33308 - DNA, 335 bp, Oryza sativa
  Clone ID: PAT_MRT4530_37432C.1
cgcttctgcttgcgtgctcttttttctcgttgatcggtttgctcgatcagatcggttctttggagagatggagcagctcttcatcatgatcaagcctgacggcgttcagagaggctctgattggagacatcatcagccggatcgagaagaaaggattctacctgagggggatgaagttcatgaatgtcgagaggacctttgcacagcagcactatgacgaccttaccgacaaggcctttttacctgggatagaggagtacatcatctatggccccctcgatacgatggtttgggaagggaaagatgctgttgacactggccggaggatcattggg

SEQ ID NO: 33309 - DNA, 2333 bp, Oryza sativa
  Clone ID: PAT_MRT4530_37433C.1
atggcggaagaaagagaaagcttcgagagtcagtgggcgccctccgatgtgacggaagataatctgaaggagatggtggcgcacggcgttcttccagcgaaggagatcattgggtggcgaccggtattcggcgaagcattcccgactcccgatacgcatgaaatcgtggtatttgctcacttcttctatggcggtttctcccttccaacctcaagattttttcggggaattctgaatttctatggaatcagcctgcatcatctgaacccagactacatagttcacatcgccaactttattcatcatgacccaaaccgtgaagacccagattctcttgacttcaaggtcatgaaggaaaggatgtataagatcttttcaaatgccatcgttgtcagctactcacacttgctgccagttgtaccgttcaatgcattcaacccccctccaccggaatttgctttgatgaagtcggatcccccaatcgctcaacgccgatctccccgccaccaaactgggcaagggagcggaggaccaagaattcggtctgaaactcaaccaagtgcttctgatccagtcggccagtcagattctcgaaagaggaagctggttctaagcgacgacgaagccgatgataccaccaggaggcctgaagaccgagagacgaccaagaaactaccaaaacaggctactccaaggaagaaaacatccagtcgccctgcgccaaagatcaggaagtcttccaggaaaccatctgatatagacccgtctgggaaagactctgacccgactaacatggacacaagttcttccaaagaaaccgggccaactgttggggatcacccgagtgacaatcagccggcaaccgatcatgtagaatccgcgaatacattaggaccaatgattggtgatgaagaagaaatcccccgtatacaagcagccgaagattcgtgccctcccattctggtcaagtggtgggatgataacttgcagcctcaaggaattgtaataaaccggcaaaaagaagacgaagaggtctgcctaccgaaaaaggcactcaaccaagcgactcgcattgtaaataggattcatctcaggaacgaagccaaaacggcaaccttagagaagttagtccctcatctcggaactctcgaagccaccaggagtcaactgcacgaggccagagaacttgccaagaagaatgaacatgatctgagggatcggattgctgagctccaggaatccaactttgaactgagtggctcatcaaaagtgcaagctgccaagatatttcaactagagaagcagatccaaactctggaaaatgataaggcagagctagcaagacagagggatttggctttaaaggaggttgaagaccgcaagatcaagtctcaagcacaatttgatgtcttagttgacaagatcaacaagcttgaaggagccagggataaagtcgctaatgccgctactccacttatccaagccatgttcttcaataacgccggttcgagtacacttgatgctgccgaaatcttcgacaagctgagagtcgctccagatacttacttcaagaacatcaaagaagttggaagtatgggagcaagtctggcattggcgatgaccaaatccctttatccaagagttgacattgatgccattgatggctttgcagacgggacgagcgaagaagctgctcttgaccttatcagtgatgcacagaaagccgctgacaagattgctgctgatgtagttgagagattccaagatgtcgaccttcggccgactggcctcccacctcggcgtcgcctcctccggtttcgccgcaccgtcgccgtcctcgtccacctctccgtttcggtcaccgaccgccggaacgccaccgtccccgtcgacccgagccgcgccaccgcctccctccgctccggccgcctcctccgtcgccgccgttgcctcggggtgagccgtggaccgccgcctcgtttccccctctccgtcccctctctcggccgccactccgccgtacctatggccgccgccggcgaccataggggcgagggcgcctcctcccgccggccgtgccggcctggccaccctcgggcgcgccgagtggctgccacgtggggcccggccgtcagccgcccgtgccctcaggtgcggctgacgcgtgggacccacggcgccggccggtgtgagcccgggtgcacccggtccaccgtggaccgtgagtctgccgcgtgggccccactcccgtggacccggtccgcgcgcccctccccctcggcttgttgaccctagaacaaacaaaacccccaactagtggatactctattcat

SEQ ID NO: 33310 - DNA, 2346 bp, Oryza sativa
  Clone ID: PAT_MRT4530_37434C.1
atggcggaagagagagaaagcttcgagagccagtgggcgtcctccgatgtgacggaagataatctaaaggagatggtggcgcacggcgttcttccagcaaaggagatcatcggatggcgaccagcattcggcgaagcattcccgacccccgatacacacgaaatcgtggtatttgctcatttcttctatggcggattttctcttccaacctcaaggttcttccggggaattatgaacttctacaggattagcttgcatcatctgaatccaaactctatagtgcatatcgccaattttattcatgcctgcgaagcttttctgggcattaggcctcatttcgccttgttctgccgcatcttcttcctcaagccccagccaaacaaaagcaaaccatgtgttgttgggggtgctggtttccaactccggggaacgctaagccaaaaatacttctccatgcccttcaagacctcaaacaaaggctggcatgcaaattggttttatgttcaaaaccctgagcctgctctccccgagtactcctgtcttcctccagtttatcgggatacttggaactcactgccaatgggagacgaagctgcacaagcagtggaactgatggagcgcatgataaagctgaaagaacaaggccttcagggagaacagatcacacggcactttatcaagtgtcggttagctccaatcaaagagagatctcgcacagccttcgaatttgacggcaagcacgacccaaatcgtgaagatccagattctcttgacttcaaggtcatgaaggaaaggatgtataagatcttctctaatgctatcgttgtcagctattcacacttgctgccagtcgtgccattcaatgcctttaatcctcctccaccggaatttgctctgatgaaatcggatccgccaatcgctcaacgccaatcacctcaccgccaaactggtcagggaagcggaggaccaagaatccggtctgaaactcaaccaagtgctcctgatccagtcggccagccaaattctcgcaagaggaagctggttctaagtgacgacgaaggcgacactgctagaaagcttggagaccgagaggcaaccaataaactgccgaagcaggctactccaaggaagaaaacatccagtcgtcttgtgccaaagatcaggaagtcttctagcaacaatgtagaacccagcgacgaacccccgactggaaaccagtcggccgaagccgaagccggagttaatcaggagcccccgactggaaaccagtcggacgcagggccaagccaagagattctagaagttgaaacccaagcagacaaccctcgcggacaagacgccagcaatgactggagatctggatctcctttaagggcatccgaatccactcgtcctcgtccagaaatcattacggtggatacattaggaccaatgattggtgatgaagaagaaattcaccgtggtcaagtggatacactttgccgaagattcgtgctctcccattctggaattgtaataaaccggcaaaaagaagatgaagaagtctgcctactgaagaaggcactcaaccaagcgacttgcattgtaaataggattcatcttagaaacgaggcgaaaaccgcaacccttgagaaactagttcctcatcttggaacccttgaaaccaccaggagtcaactgcacgaggccagagaacttgccagaaagaatgaacacgatctgagggatcggattgctaagctccaggaatccaattttgaactgagtggctcatccaaagttaatgtagtgcaagctgccaagatatctcaactagagaagcagatccaaactctggaaaatgacaaggcagagctggcaagacagtgggattcggctttaaaggaggttgaagaccgcaagatcaagtctcaagcacagtttgatgtcttagttgacaagatcaacaagcttgaaggagccagggataaagtcgctaatgccgctactccactcatccaggcaatgttcttcaataacgccggttcgagtacacttgatactgccgaaatcttcgacaagctgagagtcgctccagatacttatttcaagaatatcaaagaagctggaagtatgggagcaagtctggcattggcgatgaccaaatccctttatccaagggttgatatggatgccattgatggctttgcagacgggacgagcgaagaagctgctcttgacctcattaacgatgcacagaaagccgctgacaagattgctgctgatgtggttgaaagattccaagaagtcgaccttcggccgactggatctgataagtctgatgatgaaaaaactgatactgattga

SEQ ID NO: 33311 - DNA, 2178 bp, Oryza sativa
  Clone ID: PAT_MRT4530_37435C.1
atggcggaggagagagaaagtttcgagagtcagtgggctccctccgatgtaacggaagagaatctgaaagaaatggtggtgcacggcgttcttccgacgaaggaaatcatcgggtggcgaccagcgttcggcaaagcattcccgacccccgacacacacgagattgtgccaaacaagagcaaactgtgcgttgttgggggtgctggtttccaactcaggggaacactaagccaaaaatatttctccatgcccttcaagacctcaaacaaaggctggcacgccaactggttctatgttcaaaatcctaaaccagcccttcccgagtactcttgtctccctccagtctaccaagatacatggaattcattgcctacaggagatgaggcagcccaggctgtagaactaatggagcgcatgataaagctgaaagagcaaggtttgcagggagaacagatcacttggcacttcataaaaagccgattagctccaatcaaagagaggtcccgcacagcttttgagtttgacggcaaacatgatccaaatcgtgaagatccagactctcttaactttaagattatgaaggaaaggatgtacaagatcttctcgaatgctatcgtctcgtccaatgccgatcaccccaccgccaaaccggtcaagggagcgggggtcccaagacccgttctgaagcccggccaaatacttccaatccagccagatttacgcaaaaggaagttggtgtcaagtgacgacgaaagcgatactgctagaaagcctggagaccgagaggcaaccaagaaactgccaaagcaggctactccaaggaagaaaacatccagttgtcctgtgccaaagatcaggaagtcttccagaaataatactgaccagccagatttacgcaaaaggaagttggtgtcaagtgatgacgaaagcgatactgctagaaagcctggagaccgagaggcaaccaagaaactgccaaagcaggctactccaaggaagaaaacatccagttgtcctgtgccaaagatcaggaagtcttccaggaaaccatctgatatagatccttctggaaaagactctgacccgactagcagggaaacaaacttaaaaggaatcgagccaactgacgaggatcagccgagtcacagccagccagcaaccgataatgtaggatctggtgatcaacccccgactgagaatgagtcggccgaagctggagccggagttaatcaggagcccccgactaaaaaccagtcggacactaggccaagccaagagattccagaagttggagctcgggcagacagccctcgtagacaagacgccagcaacgacccgatgccagggtctcccattaaggtgcaagagtcgactcgttcccgtccggaaatcatcacagtggatacattaggaccaatgattggtgatgaagaagaaattccccgtatacaagcagctgaagactcgcacccttctatcttagtcaagtggtgggacgatgacaggcaacctcaaggaatcataataaacaaacaaaaagaagatgaggaagtatgcttgctgaaaaaggcactcagccaggccactcgcattgtgaatagaatccatctcaggaatgaggcaaagaccacgacacttgagaaattagttccccatcttggaactcttgaagccaccaaaagccagttacatgaggtcagagagctcgcgaggaaaactgagcatgatctgaggaatagaatctctgagcttcaaaaatctaactatgaattgagtggttcatccaaaggggccagggataaagtcgctaatgccgctaccctactcatccaagccatgttcttcaataacgccggttcgagtacacttgacgcttccgagatcttcgacaagctgagagtcgctccggatacttacttcaagaatattagggaggttggatgtatgggagcaagcatggcgttagctatgaccaaatctttataccccaaaatcgatattgacgccgttgatgggtttgcagacgggacaagcgaagaaacagccctcaacctcatcaatgatgcgcaaaaagccgctgacaagattgctgctgacatagttgagagattccaggatggcgaccttcggccgactgggtctgataattccgacgatgaaaaaactgacactgattga

SEQ ID NO: 33312 - DNA, 343 bp, Oryza sativa
  Clone ID: PAT_MRT4530_37436C.1
tcggccatccgccacctctccgccgggcggggggttgtagatgctatgcgagttcggccacgcctgtgcctgctccgagccgtggcgccgtgcccagtacgaccaccaccccgggcctcgctcgccggtcgtcgcacggtctcctcgtggggcggagcggcgaggaccgcgaccgccggagatgcgccgccgccggcgcaccgaaccaggcctcaagggcgggaggaagagcgcgccaccgacgccgcctgccagggggtcgtccgggaacccggggcatggcttcccgccgggggtggatcgggacgcgtcggtggtggcggagaaggtgacaccggcgtcg

SEQ ID NO: 33313 - DNA, 2325 bp, Oryza sativa
  Clone ID: PAT_MRT4530_37437C.1
atggcggaagaaagagaaagcttcgagagtcagtgggcgccctccgatgtgacggaagacaatctgaaggagatggtggcgcacggcgttcttccagcaaaagagatcatcgggtggcgaccggcatttggtgaggcattcccgacctccgatacacacgaaatcgtggtatttgctcatttcttctacggtggattttctcttccaacctcaagatttttccggggaattctgaacttctacgggattagcttgcatcatctgaatccaaactccatagtgcatattgccaattttattcatgcctgcgaagcttttctgggcattaggcctcatttcgccttgttccgctgcatcttcttcctcaagccccaaccaaacaagagtaaaccatgcatcgttgggggtgctggtttccaactcaggggaacactaagccaaaaatacttctccatgcccttcaagacctcaaataaaggctggcacgcaaattggttttatgttcaaaaccccgagcctgttcttctcgagtactcctgtcttcctccagtttatcgggatacttggaactcactgccaatgggagacgaagctgcacaagcagtagaactgatggagaggatgataaagctgaaagaacagggccttcaaggagaacagatcacccggcactttatcaagtgtcggttagctccaatcaaagaaagatctcgcacagccttcgaatttgacggcaagcatgacccaaaccgtgaagatccagattctcttgacttcaaggtcatgaaggaaaggatgtataagatcttctcaaacgccatcgttgtcagctacttacacttgttgccagtcgtaccgttcaatgcattcaatcctcctccaccggaatttgctttgatgaagtcggatcccccaatcgctcaacgccgatcgccccgccaccaaactgggcaagggagcggaggaccaagaattcggtctgaaactcaaccaagtgcttctgatccaatcggccagtcagattctcgaaagaggaagctggttctaagtgacgacgaagccgatgataccgccaggaggcctggagaccgagagacaaccaagaaactaccaaagcaggctactccaaggaaaccatctgatatagatccgtctgggaaagactctgacccgactaacgtggacacaagttcttccaaagaaaccgagccaactgctgaggatcatctgagtgacaatcaaccggcaaccgataatgtagaatccggtgatcaacccccgactggaatccagtcggccgaagccgaagccggagttaatcaggagcccccgactggaaaccagtcggacgcagggccaagccaagagattccagaagtcgaaacccaagcagacaaccctcgtggacaagacgccagcaatgaccggagatctggatcccctttaaaagtatccgaatccactcgtcctcgtccagaaatcattacaggaccaatgatcggtgatgaagaagaaattccccgtatacaaacagccgaagattcgtgccctcctattctggtcaagtggtgggatgacaacttgcaacctcaaggaattgtaataaaccggcaaaaagaagacgaagaggtatgcctactgaaaaaggcactcaaccaagcgactcgcattgtaaataggattcatcttaggaacgaggcgaaaaccgcaaccctagagagactagttcctcatcttggaaccctcgaagccaccaggagtcaactgcacgaggccagagaacttaccaagaagaatgaacacgatctgagggatcggattgctgagctccaggagtccaatttcgaactgagtggctcatcaaaagttaatgtagtgcaagctgccaagatatctcaactagagaagcagatccaaactctggaaaatgacaaggcagagctggcaagacagagggattcggctttaaaggaggttgaagaccgcaagatcaagtctcaagcacaatttgatgtcttagttgacaagatcaacaagcttgaaggagccaaggataaagtcgctaatgccgctactccacttatccaggccatgttcttcaataacgccggttcgagtacacttgatgctgccgaaatcttcgacaagctgagagtcgctacagatacttacttcaagaacatcaaagaagctggaagtatgggagcaagtctggcattggcgatgaccaaatccctttatccaagagttgacattgatgccattgatggctttgtagacgggacgagcgaagaagctgctcttgacctcatcagtgatgcgtag

SEQ ID NO: 33314 - DNA, 479 bp, Oryza sativa
  Clone ID: PAT_MRT4530_37438C.1
tctatctatgtttacaaagtgcatcaacagcactccttacaaaaatctcgactaaacttgaaaccctaactaaactagcaactcaattgctctcaaaagcgataccggcacgcttcatattctcacgagtcttcacttggtcattaatttgtgatttagcgtattttaccgaaataacagccaggtttaatgattttgtgggatacctggatttagcggctggaaaaccgtttcttcttcaataaagattgagacaaaactgagtttgggtagaactaaagaaaatttggcagacgaagaaaaaatggccaaacggtttcgtataaaaaaatggaaaggaggttattcaatagccattgtaggtttcattacttttcttccattcaaaaagctaaaaatggatagtaaattatcgattcatcgttgatagctctgaccggacggatattgtgataatagcggtggatcaaacaagaact

SEQ ID NO: 33315 - DNA, 303 bp, Oryza sativa
  unsure (1)..(303): unsure at all n locations
  Clone ID: PAT_MRT4530_37439C.1
attttttcattcgtatccgaaaaccccttcgacatccggtgaaatatctgatatgacatataaaaaatttcttttcacgaaaccgcgttatgaaattagttttttcattcgtatctgaaaacctctttcgacatccggtaaaatatctgatgtgacatataaaaattttcttttcacgaactaaacaggccctnatntgctacacatcactaagtnttggaaaacagtttgttggctaccattatttngttggagtcttgaatgcaagttaggaggcaccttnggttgggaccnagtcctttg

SEQ ID NO: 33316 - DNA, 4635 bp, Oryza sativa
  Clone ID: PAT_MRT4530_3743C.1
ctaatcttgatgtgcctgctccaaacccatcttcttccggagttcaagaaaccgaactcgtccaacaggcttagtcagtatatctgcaagctgatcttctgttcgcacatactccacagcgatttgcttcttctccacacactccctgataaaatgaaatcgagtgtcaatgtgcttacttcgatcatggagtaccggattcttgcagagattgattgctgatttgttatcaactttcatcacagtttggccagggtcctctccaagtaattctgccaatagcctattgagccaaatcccttgacaagcaccagtagtagcagcaatatactcagcttcacatgacgacaaagctaccaccttttgtttctgagattgccagctgatcaaactgtctcccagcatatacagtacacctgtggtgctcttcctatcatccaaatccccagccatatcactgtcactgaacccaatcaatctgagttcacccttttcccttctcccaaaccagcagccaacatcaagagtacctgcaatgtatctcagaatatgcttcactgctgcccaatgttcagaagttggtttctccataaatctgctcacatacccgacagagtaagcaagatctggccttgtgttcaccaaatacctgagacttcccacagtgcttctatacatggttgaatcaactccttcccctccactctccctcttcagtttcaacctagcttccatgggaacttgagtagaattgcagccttccattcctgtcttttctaggatttttgctgcataagcagtttgtgacagaaacactccatcatccttttggacaacctccattcccagatagtaactcagcagacctaagtcactcatgcgaaatttcttcttcatctcctcatacactgcactctcagtttcagacttgatgaaattcagagaaatcaaagtgttgtgcagttttgcattccatgctcggggagcctgctttagcccatacaaagctttcttgagcctcaacacctggccttcttttcctttctcaataaaaccaggtggctgcacaacataaacttcctcttccaaatcaccattcaggaaagcagacttcacatccatgtgatgaatctcccatcctttgtttgcagctactgcaatcaggagcctcacagtttccattctagccactggggcaaacacttcctcaaaatcaattccttgttgttgcacatatccctttgctaccaaccttgctttgtgtttcaccacaactcctgatggatcctttttcaccttatagacccactttaacccaattgctttatgtccaacagggagctcagcaaagctccaagtctgattgtcttcaatggactttagctcctcttgcattgcctgcctccaacacaactgttgttcagcttctgcaagactcattggttcctcacttgccagcaagcattggtcgctataatcaaaatcaaggacaggttcagtagcagataggatatcctgcactcggcgatacctgatagggccttcatttgtccctggcgtgacagagtttggtggtgagcaaaactccacccccgccggcacttccggtggtgagggcggagtggccgtcgacgccgggtacgtgcctccctgcacaggcgtgctagcctgttcgcccaagtcggcaacaacagagtccacgggattcacaaagaaatccaccgtgaattcctcctcttcagtcgcctctgtctcaggatcacgccacgcccatgtcgccgcctcgtcgaagacgacatcacgcgacacgcaaacgcgccgcaccacagggtcatacatgcgatacgccttcgacccctgttcatagccaataaacaccatcctcgtacctcgatcgtcgagcttgcgcaggttcggcttcaccgtcttgacgtagcctacacagccaaacaccctcaagtgttcgaccgagggacgtcgcccatgccacgcctcatggggggtcacgccattcaatgccttcgtcggcgaccggttcagcacatacaccgccgccacaaccgcctccccccagaagcacgccggcatcccagccgccttaagcatggagcgcgccgccgcaaccacggtctgattccgccgctccacgactccgttctgctgaggggagtaaggagcagtgagctctcgcctcatcccatgatcggcgcagtagtccatgaactccacggaggtaaattcccccccacgatctgtcctcagagcccgcagctttcgcccggactccagctcaacgccgacttggaactgcttgatcgccgtcgccgcttcatgcttgccggagaggagccgtatccacatatgccggctcatatcgtcgacgaggagcaggaaatacttcctgccgcctggggtcgcaggcgtgatcggcccacacaagtcgccgtgcaccagttcgagcgcctcctgtgctctaaacttggcctcctccgggaacgggagtcgtcgttgcttgcccgcgagacaaccgtcgcacagttgatcagtgtgatcaatgatcggaagcccgcggaccatgttcccctgggccagcctccggagcgactggaagttcaagtgtccgaaacgcgcatgccaccgccatgccgtgtcgccaccgctcgccgccatgcagactggatttgcaatatgcagcttgagtatatagagataatttatgtctcgttttacctttgcgaggagaagaccatcgggatcacggagtgtgcagaccccgccccagatatgtgcgtcgtagccgcgcgcgtcgagacggccgacactgatgatgttcttgcgcagcttcgggatgtagtacaccgtgtcgagagaccgatgatcaccattcttgcatcggaacaccacggtcccgcgcccctggatttcaatcacagagccgtcgccaaacttcaccgtcccaacaacgccggtgtcgagctcggcgaacgccgaacgcactccagtcatgtggttggtggcgccggtatccagaaaccaatctcttgtcacctcctcctcaccaccatcctcgtggtccaggatcaccttcttctccgtgaggtgtacctcctgtccaccaggtgttcgtccgagtgtcgcctcgccagcaagtgacacccctacgacatgtgccataagcaacgtcggttcttcctcggcggcttgcaccaggttcgcctctccccggcgttggcgtcgtggcttgcggcactgccttgcatagtgaccaaattcatcacaattgaagcactttaccctcgagatgtcgcggctgctgttcgcaccagtggccgcctctttgccctttggcgacccaccgggcttgcctcggtgattctgcgtgccgggcgcgccgcggcccttattgccgctgttgccggagccctcctgctcccgctgcttcacacgtgcctgccattgttcctccgtgaggtacaattttccgccatcgcttccctcctcatcatcgctgtaagaatccactgttgacagccgcccaactagctcctccagcgccatggtcttcacatcgagcagctgctcgagagagatagccaccggcttatacttcttgggaacaacgcgcagcagcttcttgttgacgtgttcatcttccatgactccacccatgtcgcgaatgtccgcgacgacggcagtgagccgcatcgcaaactcctccggcgtctccctctccttgaatcgcatcgactcaaattgacgacggaagccctgctccttcgcctcacgcacacggtcaacgccgacccgcatggtcttgatggcgtcccacgccgccttcgccgtgtcatgctttgccagcccgcgcaacatctcacgcggcaccgcctgaaggattgccgagagagccgcccaatcttcacgaaactccgcgtagccgggatcgatcgccgtccacagcccctgcgcctgcaggttgacgcgcatcaggagcgcccaatccgggtagtttgtcctcgagaggactgggaggcgagcggtgtgcgatgcgtctctcccctgagacacgagcggaagtaatgcgccgtctgctccattccccccgccgctgccgcttgcgccgccgcggccgttgccgctccccccgccgccaccgccaccacgacggccaggcggtgtgtatgacatcgccggatcgttccagtactgcaccgacagcgccacgtcgccggcgtacggcagcaggatcttctggatcgactccccgaccctaccgtagtccaggctagcgagagccacgtcggcctcgccgacgacgagctccgcgccttggttgtagcagtggatctcggggaggccggagcaagggttgacggcgatgcggtcggcgagcgggaagaagtggttgagcaacgacggcaagccggcggcgaacgccgcgacgacgtcgtggaagccgccggcggaggtgggtgggttggggtagatgcagatcatggagacctggatggactgcgggaggaggtcgaggttggagacggcgaggacgtgcggccggagggactcgtcggaggcctgcacgagtcgccggctcacgacccgaacttgcagctcgccgccattgatgcaggtggccat

SEQ ID NO: 33317 - DNA, 319 bp, Oryza sativa
  unsure (1)..(319): unsure at all n locations
  Clone ID: PAT_MRT4530_37440C.1
aaatatgaaagataattttatttctatttatatcaccttaagtttcacatgtcacatatcgatgataccctgagtcttatatctttcatcttccgaactacaatattgggaaatttcattacaagataccgccaagggggggaatattacccggtgcactatagtaccaagggnagataccatatgtagatggcaagttaaaagccaacagtgcttgcgcttgagccagatcccggtcaatgcagagatcnccaaacagccggaggtccagcggccgcgctatggcccgnacaacgntaatgcccaggtagagagattg

SEQ ID NO: 33318 - DNA, 553 bp, Oryza sativa
  Clone ID: PAT_MRT4530_37441C.1
gtgtaaatattgttccagagaccgcgggccgctccaatgtctattatcaacaacgaattcaagtcgcttcctcacccacccaaggttgaattcacaataatccatgtatatggggatcttgttgaggagtctgaactagagaccgacttttcgatcttatctaaaatcatcaaggctaggctcagttctcctcttcaagattataaaggatacacgtgggagcccttccacaagcaatgaagcacaatagcatgaactgagaataacacccgcagaaacaagctgtgtatacatgcacccaagcccgaacctgctgtccaaattcctgtcatcttcaaaatgttattttccttcagaacaattcctatccaaacttcgcaaagttaacgaggcaatatttaacagtagattatagccagatttcagtagtagatgtttttcagctatatatgtttttttagtccaaacagtagctaaggatcctaccgtgtgtttttgtgcatataaataaataacaaaggtgcaaatgttccagataaaaaaaaaaaaaaaa

SEQ ID NO: 33319 - DNA, 660 bp, Oryza sativa
  Clone ID: PAT_MRT4530_37442C.1
atgggttgctgccggatgggcaccacggtgggcaacggcaccgtcgacgcccatggcgagagctgggaggcggagcagctgtatgtgtgcaatgacagcgtgctgcccaccgcagtgggcatcaaccccatgatcaccgtacagtccgtggcgtattgcgttgccaaaggcattgctgactccctgtccggcggcgtcgattcgtgggtagtggaggactttggagctggccgctgggggcggagctcgagcctcagggaaacaacctcgaggtcgacgttccacagctcgccgatgttgtccaaggcttgtcaccgccaaccatctgccaaggagcttcgtctccacaccgccggcctctacaggcaccccaccgtgtcgccccatctctcccgccaccgcgaggcggtggcttcccccttatgctgccgtcgccgccgcatcccccttccacggcgcccggtaatgtggcgaatggccttctcctccaccatcgcgcagccacaccccggcggtatgcccaacagcgcccccgtcaaggacagtctctggccgaccatgctccaccattggtgccctgggcgactagtcttcgcctccatcgccgaccgcgctcagtcaccagtgcccccaggggaccactctccatcgtcaccctag

SEQ ID NO: 33320 - DNA, 600 bp, Oryza sativa
  Clone ID: PAT_MRT4530_37443C.1
atggaggcgaagactagtcgcccagggcaccaatggtggagcatggtcggccagagactgtccttgacgggggcgctgttgggcataccgccggggtgtggctgcgcgatggtggaggagaaggccattcgccacattaccgggcgccgtggaagggggatgcggcggcgacggcagcataagggggaagccaccgcctcgcctgacgctttgtgcgctaacccctcggtcctacttgaggtgcgaccctgttggatcgacgaccggcagcgtcagatcgaggagaggccaccatcgtggagattcttcccgccccgcatccaccacccccatcggttacagcttctcccctaccgtcgccgagaagctcgcggtggaggaaggggcgtcatcgagctcgttgttatcgcacaatccatgcggcggcagagatggacaaggcaggggaaatacggtggcgggagagatggggcgacacggtggggtgcctgtagaggccggcggtgtggagacgaagctccttggcagatggttggcggtgacaagccttggacaacatcggcgagctgtggaacgtcgacctcgaggttgtttccctga

SEQ ID NO: 33321 - DNA, 555 bp, Oryza sativa
  Clone ID: PAT_MRT4530_37444C.1
atggagtccactgtcgctaacctcaactccgccttagtggctgatgctgggcctccgccccctcaagaccctctccagaacgatgaggttctcgaggacgctaacgctgccaacggccctatgccaacaacaaagatagagttctctgacatcgactacccttctctgacgacaacccctggacgatacccgatagtagtcaagcctactattcagaacgttctagtcgcgcgatttctcattgacggtggcagctcaatcaatctcctcttcctcagcgcgcttgacgcaatggggattcctagaagcgagctcatcccctcagaacagcccttccatggcattaccccagagtcatcatcaagaataacaacactcaccaaattcatggcggcttcgcattacgcctaccagttgattaagattccgggacctaaaaggataatcacggtgccagggaacgcgaagatggccgtgcaatgtgacaagatgagccttgatatagtcgagcaaactaccgcagtcccgccacaatcgagcctcctgggaaagtga

SEQ ID NO: 33322 - DNA, 719 bp, Oryza sativa
  unsure (1)..(719): unsure at all n locations
  Clone ID: PAT_MRT4530_37445C.1
gtggaagaggagaaatctggtaagggtgaggatggcattgaggaggctgccgataccgttgattccgtgaaggattcagcaaagcctgaaggcatggatgcaaaggaggaggcggtggagcaggagggtggggccgcagcggataaggcaaaggatattcctgtgactagtaacggtaagacggatgctggcggaaatgaggtggctgaaatgaaggttgaaaaattggagaatggtgatgggcatttgaaggcggacggcgatagcaatggtgataacaagggtgctgatggtgagaaacagcttatgttagcgtcagctggggaggacgtggaggacccggtgctgtccaagcttgcaagcaactccttcatgtttgattacagctgtggtggtgatgactcggggactgaggaggagcaggctgctttcatgaaggaacttgagcggttttacagggagaagcttatggaattcaagcccccgaagttctatggtgaagggttgaattgcctcaagttgtggagacaagtgactgggttgggtggctatgatcaggtgacatcgtgcanactgtggcggcaagtgggagagtctttcanacctccgaagacatgcacaactgtttcatggaccttccgtaacttctatgagaaggcactcctttgatatgagaaacacaaaatcgaaacgggcgagtttcaagttgctgcatctaa

SEQ ID NO: 33323 - DNA, 809 bp, Oryza sativa
  Clone ID: PAT_MRT4530_37446C.1
ctaatccctcccttctccttccttagggcacgccggagctcgtccgccggtcgccgtcgccccccgtggcttgccgtcgccattcgccatcgtcttcctccgcgccggccaccctcggtgaggcatctcctctcctctccttccccgtttccccgtgcgtcgccgccgcccgcgctcgccgtcgctttgggtcgttgccgccatccgctgccgccgctttcgcgtcgcctccgccgccggttgccgtcgccagcgacgcgacgcgcacgcaccgccgccgctagccccgggtcggccgatcggctttgatgccgatccgagcccggggggctgccgccgccgccgtccgtccgatcggcccgagggcgatccgggccgtcggtcccgtggatcggcggtggatcacccgcgtggtcccggtccacggtagaccgccctccccgtgccgctgaccggtgggccccgcatgtcggcgccgcgccacccgtgctgacgtcagccctggttaatattgcgcaataaatgatttaagtagtcttatagcctgtttgcaatgtttgccttgtatgtcgctagattccggttcctccgacgctccggtgtacttcgagatagtcgccgaggttcctccagcagcagagcaaggcaagtcatgcttgtcacttgatcatattgatcctatattgcaaatgctctattgttttctttcaaataccgcatttgttttgcaatattactatagagatggttacctattgttacggccatactattttgataccatgctcctttgttagcttgggttataa

SEQ ID NO: 33324 - DNA, 180 bp, Oryza sativa
  Clone ID: PAT_MRT4530_37447C.1
atgccatttttgacctccctgggccatagtcgtcgtcgccaagtaaccgaggactactgccgccacaacactcgctatggctgtggtggtggtagcgtagctgtgcatgaggaaagaggtgacaatggggacacatacatcgaggcgatgacaggggtgcacgtcggcagtggtgcctag

SEQ ID NO: 33325 - DNA, 2403 bp, Oryza sativa
  Clone ID: PAT_MRT4530_37448C.1
tttttttttttttttttttttttttttttttttaacactaaaaacaattgatacaccatcagtaatagtttcaagggatggtcaggcacagttgtcaattcagttatacagatacaacagcaatgcacaaggcaacagttacatccaagaatctatcttgtcttcatgttctgagtagtatgagaactgagtattaggaataacctcacaagctacatgctacaaattatcaccttttctttagttgagaaaaaaaaaaggaagaaagaaaccatgaacatgtttagcatcaggctattaacattctaaactaatagagctgaacttaagctacatatcacaattaacgaactacaagatacataactagaccatctagttaactagaattaatcaatacagaatagacaacatggcaggagtaatgaagcagaaagtaactagtttgcaacgaagatcaggatgaacaggcccaagtcaatcacataaacccccacctacaaaagcaaccttgcatgttgcgcttcatcttgtagagcaccatttactttgactgctcgaatggtgcacggacaaatagctgtccatggagagtgacaactgccgaagtttgatgaggatcaatgcgggagggcaaactaataaccttcttgaatggagtaacaccccaaggattgtctagttgctcaggctctccagtaactatcaaacggccagcaggatctgactgaacatgtacctcctcacgcagaaggccaggaaccaatgcatagacttcatagcaatctttggttctccgaacgtttatctttacccaatcagctggagggccaaggtcaagaaccattgagtcattttgtagcttgtcaggtttatatggtacaatcctgtcatcttccaaggtcggtgtccttttcctcttggcagaaccgctgcttttaggagttttatccttttttaagacagacaccgtccctttatctttaattattggatcagcaatttcaccattgccaagcaagcgctgagagtgccagccttgcatagctcgggttgcagattctcttctagctcttccagaaccagaagcatggatgccaacctgactttcagaagtaatcctctctgttaaattagatgcagcaacttgaaactcgcccgtttcgattttgtgtttctcatattcaaggagtgccttctcatagaagttacggaaggtccatgaaacagttgtgcatgtcttcggaggtttgaaagactctcccacttgccgccacagtttgcacgatgtcacctgttcatgcacccccaactagctacccaacctagtcacttgtctgcaaaacaacccagtaacttgttttcataacttgaggcaattcaacccttcaccatagaacttcgggggcttgaattccataagcttctccctgtaaaaccgctcaagttccttcatgaaagcagcctgctcctcctcagtccccgagtcatcaccaccacagctgtaatcaaacatgaaggagttgcttgcaagcttggacagcaccgggtcctccacgtcctccccagctgacgctaacataagctgtttctcaccatcagcacccttgttatcaccattgctatcgccgtccgccttcaaatgcccatcaccattctccaatttttcaaccttcatttcagccacctcatttccgccagcatccgtcttaccgttactagtcacaggaatatcctttgccttatccgctgcggccccaccctcctgctccaccgcctcctcctttgcatccatgccttcaggctttgctgaatccttcacggaatcaacggtatcggcagcctcctcaatgccatcctcacccttaccagatttctcctcttccacagcattggcttcatccacagggccatcggcgcctggctccgcctcgctttccacaggcgcagacctaaactgggccatgggggttcagcttcaattaggctcaaatccagatgctcgccgtccgggcgcgcgcgcgcgacgacgcctccacacagcgtagaaggctagggcagagagagtgagatagagagagagggtcggggaaggagaggaggagggccgtcgcccgcaccgtgcctccgaggaggagccgcgacgccgcggccgcgcctccgcccgccggaaacagcgtccccgcgggcgaacagacacgagccgaggcggggagggtgtagagccgtagcccgtcggggtcgacggggagagagagacgggagcggtgaggtgagaagggctccccctggcgagcggcggcggcggaggcggaggcggaggcgagggcggcgagcggccgaaaccctagccggagacgggggagacgacgacgggagaggaagagagcgggcggcatgaac

SEQ ID NO: 33326 - DNA, 675 bp, Oryza sativa
  Clone ID: PAT_MRT4530_37449C.1
atggggagctcgggagagatcggcgaaatggggaaaaagcgagagagggggacggcgatgcttaaaaagggggagagggagccggacgtggccgggagcggcgggattcgacggccgacgtgggggagtggggaggagagagaggcgggattcggttttcgaatcccggccatctcgggcgcgggcgcgaacgggagggagaggggaaagggcgcgggagacgcggcgcacgcgcgggcgtggccgacgtggcccgggagagacggaggcgtgggcgcggcggcggtttcggcgcggcggcgcgccggggatcggcgggaggtgggggaaggacccgacaggtgggccccacctgtcggcgaccccgagagaggaggcgggcggcggctgccagactgggccctcggcctgcggccggcccagcaaggaggagggggaggaaggaggggaatgggccggcggcccatccgaaaagaaaaaaggagggaaaaagggagggaaaagaaaaagaaaaaaaagaaaagggttttccttggaattaaaaattgcactttagtgatttttaattggttgaaattatttctagagctctgaaaattccactaaaaatcacacatgcttcaaagtcactagccgaaacgtcttcatcagttattgccacttctcattataaac

SEQ ID NO: 33327 - DNA, 4281 bp, Oryza sativa
  Clone ID: PAT_MRT4530_3744C.1
atgtcatacacaccgcctggccgtcgtggtggcggtggcggcggggggagcggcaacggccgcggcggcgcaagcggcagcggcggggggaatggagcagacggcgcattacttccgctcgtgtctcaggggagagacgcatcgcacaccgctcgcctcccagtcctctcgaggacaaactacccggattgggcgctcctgatgcgcgtcaacctgcaggcgcaggggctgtggacggcgatcgatcccggctacgcggagtttcgtgaagatcgggcggctctctcggcaatccttcaggcggtgccgcgtgagatgttgcgcgggctggcaaagcatgacacggcgaaggcggcgtgggacgccatcaagaccatgcgggtcggcgttgaccgtgtgcgtgaggcgaaggagaagggcttccgtcgtcaatttgagtcgatgcgattcaaggagagggagacgccggaggagtttgcgatgcggctcactgccgtcgtcgcggacattcgcgacatgggtggagtcatggaagatgaacacgtcaacaagaagctgctgcgcgttgttcccaagaagtataagccggtggctatctctctcgagcagctgctcgatgtgaagaccatggcgctggaggagctagttgggcggctgtcaacagtggattcttacagcgatgatgaggagggaagcgatggcggaaaattgtacctcacggaggaacaatggcaggcacgtgtgaagcagcgggagcaggagggctccggcaacagcggcaataagggccgcggcgcgcccggcacgcagaatcaccgaggcaagcccggtgggtcgccaaagggcaaagaggcggccactggtgcgaacagcagccgcgacatctcgagggtaaagtgcttcaattgtgatgaatttggtcactatgcaaggcagtgccgcaagccacgacgccaacgccggggagaggcgaacctggtgcaagccgccgaggaagaaccgacgttgcttatggcacatgtcgtaggggtgtcacttgctggcgaggcgacactcggacgaacacctggtggacaggaggtacacctcacggagaagaaggtgatcctggaccacgaggatggtggtgaggaggaggtgacaagagattggtttctggataccggcgccaccaaccacatgactggagtgcgttcggcgttcgccgagctcgacaccggcgttgttgggacggtgaagtttggcgacggctctgtgattgaaatccaggggcgcgggaccgtggtgttccgatgcaagaatagtgatcatcggtctctcgacacggtgtactacatcccgaagctgcgcaagaacatcatcagtgtcggccgtctcgacgcgcgcggctacgacgcacatatctggggcggggtctgcacactccgtgatcccgatggtcttctcctcgcaaaggtaaaacgagacataaattatctctatatactcaagctgcatattgcaaatccagtctgcatggcggcgagcggtggcgacatggcatggcggtggcatgcgcgtttcggacacttgaacttccagtcgctccggaggctggcccaggggaacatggtccgcgggcttccgatcattgatcacactgatcaactgtgcgacggttgtctcgcgggcaagcaacgacgactcccgttcccggaggaggccaagtttagagcacaggaggcgctcgaactggtgcacggcgacttgtgtgggccgatcacgcctgcgaccccaggcggcaggaagtatttcctgctcctcgtcgacgatatgagccggcatatgtggatacggctcctctccggcaagcatgaagcggcgacggcgatcaagcagttccaagtcggcgttgagctggagtccgggcgaaagctgcgggctctgaggacagatcgtgggggggaatttacctccgtggagttcatggactactgcgccgatcatgggatgaggcgagagctcactgctccttactcccctcagcagaacggagtcgtggagcggcggaatcagaccgtggttgcggcggcgcgctccatgcttaaggcggctgggatgccggcgtgcttctggggggaggcggttgtggcggcggtgtatgtgctgaaccggtcgccgacgaaggcattgaatggcgtgaccccccatgaggcgtggcatgggcgacgtccctcggtcgaacacttgagggtgtttggctgtgtaggctacgtcaagacggtgaagccgaacctgcgcaagctcgacgatcgaggtacgaggatggtgtttattggctatgaacaggggtcgaaggcgtatcgcatgtatgaccctgtggcgcggcgcgtttgcgtgtcgcgtgatgtcgtcttcgacgaggcggcgacatgggcgtggcgtgatcctgagacagaggcgactgaagaggaggaattcacggtggatttctttgtgaatcccgtggactctgttgttgccgacttgggcgaacaggctagcacgcctgtgcagggaggcacgtacccggcgtcgacggccactccgccctcaccaccggaagtgccggcgggggtggagttttgctcaccaccaaactctgtcacgccagggacaaatgaaggccctatcaggtatcgccgagtgcaggatatcctatctgctactgaacctgtccttgattttgattatagcgaccaatgcttgctggcaagtgaggaaccaatgagtcttgcagaagctgaacaacagttgtgttggaggcaggcaatgcaagaggagctaaagtccattgaagacaatcagacttggagctttgctgagctccctgttggacataaagcaattgggttaaagtgggtctataaggtgaaaaaggatccatcaggagttgtggtgaaacacaaagcaaggttggtagcaaagggatatgtgcaacaacaaggaattgattttgaggaagtgtttgccccagtggctagaatggaaactgtgaggctcctgattgcagtagctgcaaacaaaggatgggagattcatcacatggatgtgaagtctgctttcctgaatggtgatttggaagaggaagtttatgttgtgcagccacctggttttattgagaaaggaaaagaaggccaggtgttgaggctcaagaaagctttgtatgggctaaagcaggctccccgagcatggaatgcaaaactgcacaacactttgatttctctgaatttcatcaagtctgaaactgagagtgcagtgtatgtgagaggaacaggaagctcaaggttgatagtgggagtgtatgtggatgatctgattatcagtggggctcaagcaagtgaaattgattttttcaaggaggagatgaagaagaaatttcgcatgagtgacttaggtctgctgagttactatctgggaatggaggttgtccaaaaggatgatggagtgtttctgtcacaaactgcttatgcagcaaaaatcctagaaaagacaggaatggaaggctgcaattctactcaagttcccatggaagctaggttgaaactgaagagggagagtggaggggaaggagttgattcaaccatgtatagaagcactgtgggaagtctcaggtatttggtgaacacaaggccagatcttgcttactctgtcgggtatgtgagcagatttatggagaaaccaacttctgaacattgggcagcagtgaagcatattctgagatacattgcaggtactcttgatgttggctgctggtttgggagaagggaaaagggtgaactcagattgattgggttcagtgacagtgatatggctggggatttggatgataggaagagcaccacaggtgtactgtatatgctgggagacagtttgatcagctggcaatctcagaaacaaaaggtggtagctttgtcgtcatgtgaagctgagtatattgctgctactactggtgcttgtcaagggatttggctcaataggctattggcagaattacttggagaggaccctggccaaactgtgatgaaagttgataacaaatcagcaatcaatctctgcaagaatccggtactccatgatcgaagtaagcacattgacactcgatttcattttatcagggagtgtgtggagaagaagcaaatcgctgtggagtatgtgcgaacagaagatcagcttgcagatatactgactaagcctgttggacgagttcggtttcttgaactccggaagaagatgggtttggagcaggcacatcaagattag

SEQ ID NO: 33328 - DNA, 1199 bp, Oryza sativa
  Clone ID: PAT_MRT4530_37450C.1
tatgattttccccattgtgaactagttgaactaagcatggctaagcaaaccctagtcctaactctaatcaggttataacccaagctaacaaaggagaccagggctgacgtcagcacggaggggtgcggcgccgacatgcgggacccaccggtcagcggcccgggagagagagaaaggggtggcggcgcgcgggcccactagtcagtggcacgggagagagagaaaggggcggcggcgccacgtggcagccggaccgacggccccgatctacccaagggtagatcggacggcggtgggagctcgcggccggggcacgcgggcacggcgcaagccgaaccggcgaccatggcgccggcggcgcagcgctcacgcggcggcggcgcgcatgcagcagcggcgcaaggcgacggccgacggcgagcgcgggcggcggagagcggcggctagaggaggagcggcggctacgcagctaggcggcgacgcggcggctaaacggtgcgggagagagaaaacgaggaggagggcctcaccgacaacggtcgacgacggcgggcgacgaaggacgatggcgacggcggaacgagctccggagcctcctaacgaacaaaaggagaggggttagagagagagggaagggcgcgagagcgcaagggcgccggccgaaggcggcggccatggcgtcactcaccggcgcacggcggggatgggtctccggcggcgaacctcaacggaggagggggggagagggaaccggacgtggccggaagaggcgggaatcgccggccgacgcgggggagtggggaggagagagaggcgggattcggttttcgaatcccggccatctcgggcgcgggcgcgagcgggagagagaggggaatgggcgcggagagcgcggcgcacgcgcggacgtggccgacgtggcccggggaaggcggaggcgtgggcgcggcggccgttacgggtgcggcggcgcgagcgggagaggcgggaggagggagacgggaccgacaggtgggccccacctgtcggcgaccccgagagaggaggcggcgggcggcctggctgggcctcggcctgcggccggcccagaaaggaggagggggaaggaaagagggaaatgggccgacggcccatttgacaaaaaggaggaaaaagagaggaaaaagaaaaagaaaaagaaaaaggattttccctgtaat

SEQ ID NO: 33329 - DNA, 524 bp, Oryza sativa
  Clone ID: PAT_MRT4530_37451C.1
aaaaaaaaaaataaaaaaaaaaaaaaaaaaaaaaaaaaaaaaaaaaaaaaaaaaaaaaaaaaaaaaaaaaaaaaaaaaaaaaaaaagaacaaaaaaaaaggaaccaaacataaaaaaggggggcctgctttgggggtcccacttttcttgcgccgccttgccccagtttaccctcctttttggggccccctaatgacttggcaggccccggcttttcccaccttagtgctggggaaacccttgcgtttcccacctttttgccttttggacaaatggccctttccgccggtgggtgcaaacagaagggggccccccctggcgcctttcccacacattgtccacgcctattggttaagggggccccccctgttacccccccttaaacccccccgcttgggggggtcctcccccccggtccctttactttctcccctcccttactccccccctttttcgttttttcccttccttttttgccccggtgggcggcttttcccggggggtttttatatggggggcccctt

SEQ ID NO: 33330 - DNA, 194 bp, Oryza sativa
  Clone ID: PAT_MRT4530_37452C.1
acattaaaatacattcattcaggggattggagcaaagcggacaccaaacaatctctattatcgcgatcaaaaacacagatgttttataccacagtatcacagactagataatagttgcacacaaaactaacgatgataacgctcgaatgatcatgatagagattagctttgatatataaataacttggtcataa

SEQ ID NO: 33331 - DNA, 306 bp, Oryza sativa
  Clone ID: PAT_MRT4530_37453C.1
tcggtcaaagctgcacgagctgtgacgcgagccatctattagagccttgtactgtggactttgtcatcaatgtgattgacttcttaccaacgcctggcgggtcctttcatcataagacgtatgtggagagagaccacctttttgttagtgacagtggagaaagactacgtcccgctagtcggcatgatggtcctgcacgtggagactcgaggatggctggaattggttgcttaaacaagaggacataaggccaatgtacactacggcattcgggatgatagaatagccctacttaaaaaacatttt

SEQ ID NO: 33332 - DNA, 138 bp, Oryza sativa
  Clone ID: PAT_MRT4530_37454C.1
atggcggctgctgtagctcagcgtagggaggaggtgcggctgctcgacgtgtcgaggaggcgacggggaggaggacaacaggcctgcgacagcctgccaaccatctttgcagttgcagccttcgacatctgtggttga

SEQ ID NO: 33333 - DNA, 1083 bp, Oryza sativa
  Clone ID: PAT_MRT4530_37455C.1
atggaaggaaacggctgcggcggaagcggggcgacaccacgtggtgtcgttgggatgcactgggctcccgtcgtcacctcgccgcctagcccgcagccgccgttcctcccgccggcgccatgcaggcccgacgtccagatgcaacagcaaggcgggctgacctgcctcaagctcgggaagcggccgtgcttctggggtggcgacggcgccggccaggtggcgcaggggagcggcggcggcggaggcggaggcggtggtggttccgcggatcaggggaagaggaaggagaaggcggcgacggcggtgccggtggtgccccgttgccaggtggaggggtgcgacattacgctccagggagtcaaggagtaccaccggcggcacaaggtgtgcgaggtgcacgccaaggccccgagggtcgtcgtgcacggcaccgagcagcgcttctgccagcaatgcagccggttccacgtgctcgcggagtttgacgacgccaagaagagctgccggcggcggctggccgggcacaacgagaggcggcggaggagcaacgccagcgaggccatggccaggggctctgcgcacccacacggtatgccggtgctgggacacggtttcccgccgtacggcctgccgacgtcgtcggctggtgctctctctcttctgtcatcggctagagccaccggcccatggctgatgccgacgcccgacatctccgcccgctcaagcgcggcgctcgacgagctcatcgccgagaaccgcgcggccctcctctcgtggcaattcttctccgaccgacagccgccaccagctggccgtccaacgggccgcagcccgggctccgaaacggccggtggctggcacgcgcacctgcaggcgcggccgccaccgcccggcgccggagggcagcacgagaatcagtcggggcacgtgacgctcgacctcatgcaggccaccaccgcggcaggaggcagcggcgcgccgttccggcccgtgccagcgaggccccccaaggagggcggcgacgccggctgcacctccgacgcgtggacgccgtcgcccatggagggcgcccgcgtggtctga

SEQ ID NO: 33334 - DNA, 1428 bp, Oryza sativa
  Clone ID: PAT_MRT4530_37456C.1
atggcgaaggctctcctcgccgtcgtcgtcgtcgccgtggcggcggtgctcgagctggggctcgtcggagccaacttccaggatcagtgtgacatcacgtgggagccacagaacgccaagatgacggagggaggagaccacctcacgctctcccttgtcagcaactcctctggttgtatgctccggaccaagaagcagttcatctacggcagcgtgtcgactcgcatccagcttgtgaagggcaactcggccggcaccgtcaccacctactacacatcgtccatcggcgacaaacacgacgagatcgacttcgagttcctgggcaactccagcggcctcccctacaccttccacaccaacgtcttcgccgacggcgtcggcagccgcgagatgcagttccgcccctggttcgaccccaccgacggctaccacaactacaccatcttctggaacccctgcatgatcgtgtggttcgtggacagcatcccaatcagggtgttccggaaccacgagaaggaaggggtgccgttcccgacaaagcggccgatgtacgccttctccagcatctgggcggcggaggattgggccacgcagggtggccgcgtcaagacggactggaccaaggcccctttcgtcgccgagtaccgtgacatcggcctcaacatctgtgagtgccccggctcaggctctggctccagctccagcttcagctccagctccagctctacctccggcgatgccgaggacccagcgtgcgcgcagcggtgcgcgacgtcggaccactggtacgcggcggaggggctgtgccagctgagcgacaagcagctgcggcagatgaaggcggtgcagctgggctacaccatctacgactactgcgccgacgcccaggccaagggacgccccgtgccgccggagtgcagcatgccgcacctccaccttcgccgaggtgctctcggcgacggccatggaggtgcgcgggtagaagggaggcagtgggaggtatcgggcgatggatccgactatggagaggctcgtgggcagcggatccagcaacggggaggttcgcggctgcgggtgagccgacggaagtcggacgtgccttcgggcgggtggcaaagctcaggcagttgcggggaggttcgtgtctgcgggctggccagtggaactcaggcgcagttgcgggcgggtggtgaccgcaaggctcgcggggcttgggtcatgtggaagggaaatatgtcaccggcagtggaggcgagatcggcggctggttgcggtgacattgggggaggtggttgtcacggaggggatggaagcaccaggacgccaacggcggaggcgcagtcagtggccggttatggccacgctgccggcggcgtcgcctgggaggacgacaacgatggcggcgccaaatcgtcactgaggtactga

SEQ ID NO: 33335 - DNA, 769 bp, Oryza sativa
  unsure (1)..(769): unsure at all n locations
  Clone ID: PAT_MRT4530_37457C.1
gaggcgatgtcgtcgtcggcgtcgccggcggcgtggtgggcgcgcagccgcgtccgcatcctcctaccggtcatcttcctcgcccccgcgctctacttcctcctctctccaccctcctctccgcctttcttcttcactcttcccacctccagggaggagtcgccgtcggcgtcggggtcgcgggtcatatgggcgcagcggcgggtggcggagtggcggtcgtgcgggtggtggcgggcggcaatgccggctccgtcgaggaggaatgggtacatccggatcgactgctacggcgggctcaaccagctgcgacgcgatctatgtgatggaattgcggttgcgcgccttctcaacgcaacaatggttctgcccaagtttgaggttgctgcctactggaatgaatctagtggatttgcagacgttttcgatgttgattacttcattgagcaaaccagaggttatgtggaagttgtgaaggacatgcctgaagagatagcatcaaaagagccctttaaggttgattgcagcaaacgaaaaggacattttgattacgtggaaacggtgcttccagctctcttggagcatcagtatatttcactgacacctgccatgagccaaagaagagacagaaatccttcatacgcgaaagcttcttactgccaaggctgctacaatgcactgcggttgaataagaatgtggaaacaaaagctattgagcttctccaagccataccaaaacctttcttgtctcttnacctgagatttgaac

SEQ ID NO: 33336 - DNA, 627 bp, Oryza sativa
  Clone ID: PAT_MRT4530_37458C.1
gtacctctgaagctggtgggctccaaaaaagattgtcacataacttggagtaatatatatgcttgtattgggtgtggcatgtaattgtattgggtgggataggtcagtaccaccactttgaatgatgagggtgatgctggacaagggaactgtaaacggaattattcgatgtaaccttcagagagtcatcattacccagtcagaaaattttccagttatatcttgcatgactctataaggtctcagctttacaaatctggggcttaactttagatcctagctcgggcccatctttagatcctaagtttgctctatcactgtctctgtagctttgatagtgctggtctgtagtaaccaaacggttgaatggaagataatcttctttgatgcaatatcataattttattgagctcatgccactgtgtgcacctaaacaagatttatttgatatgaacttttttgcatcttaaatgaaaatttactatgggtgcaaaagcaatcgtacgaccaaatgatggaggattctaaacatccatcggatataattgcctgaagacaggaattttgattgttcttcgctaaaaattgatttttcttttacatggaatttcattggatggatcaggt

SEQ ID NO: 33337 - DNA, 1338 bp, Oryza sativa
  Clone ID: PAT_MRT4530_37459C.1
atggctggtctcactgtcaaactggccccacgcgaccagtttgctctgccgtccgtgcacacattcttctcactttcatgccgtctcccttccatcgccacaaaggcagtacgaaatttcgagttcctggtctcctggagagggcagcagaaagggagagagtatggagatggcgctaactccattgccgctcctgtgttcgtccgtcttgttcttggtgctatcttcgtgctcgttggccaatgggagggatacgccttcttcttcttcttcttcttcttcttcttcttcttcttcttcttcttcttcttcttcttcttcttctccggcgacgtctactgtggccaccggcatttccgccgccgccgccgccgccgccaatgggacggccgccttgtcttcggcagttccggcgcctccgcctgttgtgatcgtagtgcaccaccatttccaccgcgagctggtcatcgccgccgtcctcgcctgcatcgccaccgtcacgatcttcctttccacgctctacgcttggacactatggcggcgatctcgccggagcaccggcggcaagacgcagcgaaggggatcaagctggtgccgatcttgagcaggttcaactcggtgaagatgagcaggaagaggctggttgggatgttcgagtacccgtcgctggaggcagcgacagagaagttcagcgagagcaacatgctcggtgtcggcgggtttggccgcgtctacaaggcggcgttcgacgccggagttaccgcggcggtgaagcggctcgacggcggcgggcccgactgcgagaaggaattcgagaatgagctggatttgcttggcaggatcaggcaccccaacattgtgtccctcttgggcttctgtatccatgaggggaatcactacattgtttatgagctgatggagaagggatcactggaaacacagcttcatgggtcttcacatggatcaactctgagctggcacatccggatgaagatcgcccttgacacggccagtccaccagtgatccatagggatctgaaatcgtctaacatacttttggattcagacttcaatgctaagattgcagattttggtcttgctgtgtctagtgggagtgtcaacaaagggagtgtgaagctctccgggaccttgggttatgtagctcctgagtacttgttggatgcggccatgtcgatttcagggaagttgactgaaaagagcgatgtatacgcgttcggagtagtgcttctagagctccttatggggaggaagcctgttgagaagatgtcaccatctcagtgccaatcaattgtgacatgggtacagtgcaatgtttaa

SEQ ID NO: 33338 - DNA, 1716 bp, Oryza sativa
  Clone ID: PAT_MRT4530_3745C.1
gtgacacctctcttagcaagcaagctagcttagccaggagagctccattgccatggcggccaccaccaccatccctctcctcctcctcctcctggccgccaccgtcgccgccgccgccgccgagctctccgtgtaccacaacgtgcacccctcgtcgccgtccccgctcgagtccatcatcgcgctcgcccgcgacgacgacgcccgcctcctcttcctctcctccaaggcagccaccgccggcgtctcctccgcccccgtcgcctccggccaggcccccccgtcctacgtcgtccgggccggcctcggctcgccgtcgcagcagctgctgctggcgctcgacaccagcgccgacgcgacgtgggcgcactgctcgccgtgcggcacgtgcccgagcagcagcctcttcgccccggccaactcctcctcctacgcctccctcccgtgctcctcgtcgtggtgcccgctgttccagggccaggcgtgcccggcgccgcagggcggcggcgacgcggcgccgccgccggcgacgctgccgacgtgcgccttctccaagccgttcgccgacgcgtcgttccaggcggcgctcgccagcgacacgctgaggctgggcaaggacgccatcccgaactacacgttcgggtgcgtgagctcggtgacggggccgacgacgaacatgccaaggcaagggctgctcggcctcgggcgtggccccatggcgctgctctcccaggccgggagcttgtacaatggcgtcttctcctactgcctcccgagctacaggtcatactacttctccggctcgctccggctgggcgccggcggcgggcagccgaggagcgtccggtacacgccgatgctgaggaacccgcacaggtcgtctctctactacgtgaacgtgacggggctcagcgtggggcacgcgtgggtgaaggtccccgcgggatcgttcgcgttcgacgccgccaccggcgccggcacggtggtggactccggcacggtgatcacgcggtggacggcgccggtgtacgcggcgctgcgggaggagttccggcggcaggtagcggcgccgagcgggtacacgtcgctgggcgcgttcgacacgtgcttcaacaccgacgaggtggccgccggcggagcccccgcggtgacggtgcacatggacggcggcgtggacctggcgctgccgatggagaacacgctcatccacagcagcgccacgccgctggcctgcctcgccatggccgaggcgccgcagaacgtcaactccgtcgtcaacgtcatcgccaacctgcagcagcagaacatccgggtcgtcttcgacgtcgccaactcccgcgtcggcttcgccaaggagtcctgcaactaattaagaattaagattaattaagatgatctaccgctatctcatctagagccaagctgctgctagcaaatgcacgagaacggcttgtgcagtctatgtattctcttcttttccctttctgaaatcacggtgtcctcttgtgggcttgtagctttccgatctgtgcaataaggtatacgtgacatcaaaacttggtcacgggcgcctgtctcatctgtatgtgccaatagggctatatctaggtgattacgtacgtactcagggttttaccagtgtgaattggtatgtttacatcgatcttaaagatcttcatcaaaaaaatcgatagaaaaacttcatatgagaatacc

SEQ ID NO: 33339 - DNA, 436 bp, Oryza sativa
  Clone ID: PAT_MRT4530_37460C.1
cccacgcgtccgggagcttttgatatgtgtagtggttgtcttcagggtcttcacatgggggaactctgagctggcacatccggatgaagatcgcccttgacacggccaggggattagagtaccttcatgagcactgcagtccacgcgagtgatccatagggatctgaaatcgtctaacatacttttggattcagacttcaatgctaagattgcagattttggtcttgctgtgtctagtgggagtgtcaacaaagggagtgtgaagctcgccgggaccttgggttatgtagctcctgagtacttgttggatgggaagttgactgaaaagagcgatgtatacgcgttcggagtagtgcttctagagctccttatggggaggaagcctgttgagaagatgtcaccatctcagtgccaatcaattgtgacatgggcaatg

SEQ ID NO: 33340 - DNA, 405 bp, Oryza sativa
  Clone ID: PAT_MRT4530_37461C.1
tcagtcgtgttctcgagagagagaagcagtctgacgtagtcgtttccgtgttggacagacctcgaggacgcacttgctggccaagatcgtcgtatccaatattggaagacgaaatttgaagtggcggaactcgagagagccatgttggaagtaaaaaaggagcaggccgtggaaacgctccgaggtcgtgaggtgtggtttaactcgtatttgaagagctgctgcacatccatggccagagtttgcagagaacttcgagtggtctgcggagaacctgaggagtcggcggctggatacatctcgtggctgaacgggtgaaggcgtcggcaagcggattgacgaagctctgaaacaggagtgccgtcggtcgagccgatatgccggagggcatgtgttggcttgcat

SEQ ID NO: 33341 - DNA, 411 bp, Oryza sativa
  Clone ID: PAT_MRT4530_37462C.1
atggctgcgggcaggcgagggtgggggcaagcagagcttgctcgggcactggtggcgctggctatggcagcggaggcggaggtcccacaggtggccgacagaggaggaggtagctcgagcggccgatgggggaggcgtggctcgttcgggcggcagacggtggcgtgcggggtcgggcggtgggtgggggtgcgagacaatgagtgggatccagtcagtgggctccgcacagggaaggggaagagggcggttgcagcaacgccagcgtgtcggagctccgcgccaccgcagccgccacgctccacatcccatcgctcttgccaccgccgccgctgccaccggagccagctaagtgctgcccatgacgaagccggagttgtgggcggccacaacaagcatctgcccccttga

SEQ ID NO: 33342 - DNA, 175 bp, Oryza sativa
  Clone ID: PAT_MRT4530_37463C.1
tggtaaatcaacagtaaattaagcatcaacgggagcggccgtattaatcttatggcgactgataccaacccaccacccaaacactccaacccatatatcacatattcaatagaaccaccatttcaagactccactacagcaagagctaacaaccaccagatcaagaccatgaacg

SEQ ID NO: 33343 - DNA, 402 bp, Oryza sativa
  Clone ID: PAT_MRT4530_37464C.1
atgaagacgaggtcgcagacggcgccgaagccgctgaaaacggtgcggctgcctcctgtcaagccgcggcccaagccgccgccgccgcagccgcagccgccgccgtcccggaagaaggggcagcccctcgtcgaccggcgccgccccaagaagccgcccaccgccttcttctacttcatggaggattttcggaaaacttacaaggaagaaaatccaagtgtaaaatcaatgcaagaagtagggaaggcatgtggcgagaaatggaatacaatgacatttgaggaaagagtgaagtattatgatatagcaaccgagaagcgtgcagagtatgagaaggcggtggctgaatttgacaagaaaaaggaaagcggtgaattgtccgaggaatcagattacgactag

SEQ ID NO: 33344 - DNA, 582 bp, Oryza sativa
  Clone ID: PAT_MRT4530_37465C.1
atggatccatctgaggaaacaagtgcagggaaagatgatcttctggcgattgatgactctaaccaggataaggctaaacaggctacggttgtatcagatgaaagtaaggcgccaatcatagaaaagaagaagaaaaaaaagatggttcgctatactcaagagcagatcgaatactgcattgctaacccagaggagttgtgggacatcaaagtcattaagctgactgagttgttgagcaaggagtgcctggcccgaatggggcaggagcaagtagacaagttgtacgctatggaacgtactgaggaggagcagattgttagacggaagaagctacaggaagtcctccgcaatgaacgggagaacatctacaaaatccccgataaaccgcaggacgtcctcaagcagtactacgccaaaggctatgccgagtacgaggttgttgttgacgatggagatgtcgatgtcgatgaagacgatgaagttcctgcacgagttgctcaccctggccggagaagattccgcaacgggattgtcgtgaagaagaatcagtcaggaggaggaagtattaggaagataaactga

SEQ ID NO: 33345 - DNA, 461 bp, Oryza sativa
  Clone ID: PAT_MRT4530_37466C.1
aagcactgtagaaattcagtttcatgtcatagcaccaaactgttaatcatatagtaacaagtaacaaaaggtcgaagcctctggttattatttcaagtttgtatatactgaagcaagagaagtaattaaaaccccagtatcagagcaaactgttcaccgtctactagcagcgtagacgacggaagcagcagcgagcacggtggtggtagctggatgacacatccatgtccaaaccccgttcttccccctccgatgcgcctcggcggccgcgatccgcagctgctcaaactgcctgctcatgccatccaccatcccttctctgtcctcagcttcagaattcagaatcccaatctcattgtccttgttgctgacatagctctcgagctccctgagtttcagtctcagcttggtggattcggatttctcgttgctcagagctctcatgactgaattcttgtcag

SEQ ID NO: 33346 - DNA, 639 bp, Oryza sativa
  Clone ID: PAT_MRT4530_37467C.1
atgaactcatcaaggagacaagaagggagccccctggacctgaacaacctgccggatgagttcggcaagcaaacggtggagagctcaacgaccaccgccgcatccagcgccgaagcatccagggttactaagaagaagagtaatggagggaaggatgaagctggcaaggtgtacgagtgtagggatgtgaacatgggaggaggcggcgccgctgctcctccaccgacgatgcagatgggaggaggaggcttccggggaggcggtgtcggcggcgacccgtgcatcccgctccggccggtgcagccacggctgtcgccgccgcagccgccgccgtaccaccactacctctacacgacgacggcgccgccgtccgccttgcacccgatgagctacccggcgacgtacccggccccgccgcgccaccagcagccggcggcggtcggcgactacgtcatcggccacgccgtctccgccggcgacgcgctggtggccccgccgccgccgccgcaccgcgccagcttctcctgcttcggggcgccgctcgccgcgccgccggcgaacgtgcagcccgacaacggcaactgcaactgcagcttcgggtgcggccacagcaacaggaacgtgaacgccgcctcctga

SEQ ID NO: 33347 - DNA, 534 bp, Oryza sativa
  Clone ID: PAT_MRT4530_37468C.1
atgcgcgtggctaagggcggcggcctcggcgcggagctgcgcgttggcgaggcggacgaggcccacgcggtcgcgggtggcgtgcccgcgcgccgcgagctcgcggttgcagcgtcagagctgcccagcgcgtgtgcggagctcgtcgaggtgccgctgtttgcgcgcggactcctggttggagatcttccggcggaggcgccgctcgtcggcgtcggcatcggccttcctctccggcggctgggtcatcatcacgcggtggctgcagcggtggcgccgtcgaaagcgagggcgacacgcgggagcgagcggcggcggccagccggcaaggcgcgcacggcggcgcgccctctctctcctcccttcctttgctgcggcgagcggcggtggctgacggcccagcaccgcacgatagtggtgcttccgcggcgccctgcggcggcacctcgctttgacgatagccgccccacgcttctcttcggcgtggctagtgagctggtgagggaagggagcaaagagagagagtgggattag

SEQ ID NO: 33348 - DNA, 642 bp, Oryza sativa
  Clone ID: PAT_MRT4530_37469C.1
atgcatattgctgcacaagctccggtgtggcatggggtgtggatggtggaggacgcggtcaccggtgacgagttcccggcgtggcatggctatggacgacggaggatgcagcctccgggacaagctccggcgtggtgcagagcatggatagcgaaggacgtggtgtggggcgtggcggcggaggccgcgaccgccagcaacaagtctagtgtggggcgtggcagtgaaggacgaggctgccggtatcatctaatacctcacaagtatcacccgatgcgtggtagaaatcatctgatacctgataggtaccacatgataccttatgagtatcaccagatacgtagtatgaatcgtctaatacttgataggtatcacttgataccggttatgtttcaggacatgatacctcagagcgccacgtacgccaacgatgaggaaggttgcagtggccatgttcttcgtggtgatggccatgtcggcctcatggtcgccggccacggcgaggccgtatgccgagcaaccctccgccggtggctccgccaacaccgcgttgccgccaccgacgcattggagaggttacaagctactgccgttggagcaaaagcaatggcgcccaccgtgccattataccaacgatcctaa

SEQ ID NO: 33349 - DNA, 833 bp, Oryza sativa
  Clone ID: PAT_MRT4530_3746C.1
ttttttttttttttttggcacaacaaacaaatcttacatcaattaatcggagagaaaaatggagattttattccacaactcgttatttgcacaattacatcttaaccatgggggatacaaacgaaacaccaactaatttgcaatattggccgagttcacatactaatatgtacaatattcttccatggcgagatagctgagccccttgataaataaactttcacctcaacaccaaatattcctatgttttgctaactgactcggtagctcctgacaatggccgatgatcctccaacgatgtttgtgctgaaggaagactagaaaggctcattctggcaggccctttatcctgaagatcttctgtctctttaccatctgaaatacctgatgttctcatgcccctagaaggtatcgaaaaactgcgggatataggcccaggtggtgtcggtaaaggtgatgcagtttggggagcacttggtggtgtttgcctcggcctaaaatgatcctggcctctgggtgccaaaggagcagaatttggcaccaacggtgcagagtgggcgactaaactgggaaatgttgtatgttttgatgcattagcaggtggccccggaggctcgtcgtcctccttgctccctggtgtggtctacggtggtggcgaggtattgggagaaactctgacatgtattgacggctgatgtgaagagctgtgcctaggtggtacagaaacaacatcaatattctctgttgaccttgacctgggaacaatagaccagaaagatcctctcttcaccttttgttgtcagaagccttcgagtcatgataaccaggtaaag

SEQ ID NO: 33350 - DNA, 208 bp, Oryza sativa
  Clone ID: PAT_MRT4530_37470C.1
aacaaaaaaatcatctttgcataagcatctactacatccagcaacatgaacattagtgttaaggtatggaatggaagatcttaatctaaccaacgttatattaaatactacctaacgttatattcataatatcattattattttgtccataagattaatgtttgctaaatttactgattttaatgtttgactctatgaaattttttta

SEQ ID NO: 33351 - DNA, 782 bp, Oryza sativa
  Clone ID: PAT_MRT4530_37471C.1
accttatggtccttatatatctgttgtcagtaaagagaggagaaaaaagagggggagtggggatgggccgatagctgacctggtgctaggtgggcctcttaacagaaccgcttacgaaaataagtttattttcgcatgcgggcctgttaggaagttgtgggaaagaaattgtactagagctcttgagcatatttctatgggtaataataataataataataataataataataataataataataataataataataataataataataataataataataataataataataataataataataataataataataataataatgtgttcaaagcaaccaacgagacatcccatgtggccgtggaccccacagcccaatcacccttttccagctcggctggcccacttcgggctcctcagcttcgtcttcttcctactctactccactccactccactccagctggaacttgctcttcttcttcttctgcttcctcctctgcttctagactttaaaaagcacctagaagtctaccaaaattacaaaccccctcatcaccatttcaccacccaaaaaaaccacaaaaaaatcacgagtagtgatttcaaaaacaaaataaaaaacacaacacaatctgatcacccaacaaaaacgacagtagcaaggaatcagagcatacgcagggaccccaattgtttctttcataatcagacgacaaggacccatttcattgacaggagccgaaccatgagtagaaaacagagtgcatggctgatgcaat

SEQ ID NO: 33352 - DNA, 591 bp, Oryza sativa
  Clone ID: PAT_MRT4530_37472C.1
ccacaagaccacgagaaaaatcacacaagaccacaagatgaatcacccaaaaccacaaaggggagaggaatcacacaaaaccacaaagaggaatcacacaaaagtccattgtcccgaacccgtttcgtcctccccgccgtttgttcccgccgccctcgccgcccccgccgtgggaaaaggcggatccatcccccgccgcgtcaattgataacggacctaactgcgggggccccgggggggtaaggatcagcggcgcggccaacaggaaggaggccgccccgcggcggcgtggaaggcaagaagaaggccgccccgctttttttaccaaaccgcctccgccgggcctttttttggggagggaaaccgttgccccggggccttccggggaactcctcctcctcctggccgttgcctaaaatggttggccgttcctcctcgggccaacaagcgccgggtccgcaaaatccgccgccggccaagcctacccgttcctcctaacgggggggggggttgctcaaggtctccctcgggaaggccgccgcgggggaggcgtccttgggtcgagcctccgccaccgggccagccgccgcc

SEQ ID NO: 33353 - DNA, 443 bp, Oryza sativa
  unsure (1)..(443): unsure at all n locations
  Clone ID: PAT_MRT4530_37473C.1
ccggccgggacgaagtgagccccggccaccgcccgccgccgccgccgccatggcgctccgccgcatcaacctccggaagaagccgctcctcctcttcccgcggcccttctcctcgtcctcctacnccaaccctgccttccctactccctcgccaccggccaacgaccgcgacgacgcctaaccaaagcccagagagggggaggcacgcaacaccaagaaccacgctcttccataactatcgagaacggataatgttcacccaatggcgatggccgtcgagagcgatcagaaccggtgctgcggctgcaacatctgaaaacaccgaaccagctgacatgattgatgctgctagtcctgcagctgaaattatccatgaaaccaaccgcgtgaatgaggatctatcgtgtggtatactgctactgncgatcaaagcttgtgatcaa

SEQ ID NO: 33354 - DNA, 867 bp, Oryza sativa
  Clone ID: PAT_MRT4530_37474C.1
atggcggcggcggggcttcgcccattaagcactcgggtggcccgggagctggcacggcggcgatggtggcaaacgtccggatccgcgcccgcccggccggatccggcggggacgcagttggcggcggggcggagtggtggcggcggcatctggcggtgtgtggtggcggcggacagggctggcggcggtggaaacccgctcagatccacgccgttttggccggatcttgcggggctgacgccgagcgacggcgggcggcggggaagcgggcgtgctggtggcggggaagaggcggtggcggggaagaggcggtggcggcgacggttgcgcgggcggcgcagctggccgcgggtgaggccgggcgcgggcggcgcggccgggcgcgtcggtaggcggcggttgaagcggggcgatggcagggaggccgcttcccgggcgccgttgaggatggcgacggcgggcagaggcgggtccccccgccccctccccccctcccccccgagggcggatccagtgtggggaagctcgtggtggtggcgacaccgcggagctcgcggcgacgttggcggcagcaacggcacgggagcacggggcgacgtcgacggcgtggagttcatggcgacggtggcagcagcagcttggtcagcggcgacagcacagtggagcaacggcacgggagcacggggcgacgccgacggcgtggagttcatggcgacggtggcagcagcagcttggtcggcggcgacagcacggtggctggtcgatggcattggcggctgtcggctgcggtggctttggggttctcatggcagaggcagcggcgcggagctcgttgtgacagttgcggtagcggctggacgacggtga

SEQ ID NO: 33355 - DNA, 4368 bp, Oryza sativa
  Clone ID: PAT_MRT4530_37475C.1
tcagatcatgttgatcggaagccgggtcatgtatgtcaagtttccaccaaattgagagttctcaatacctatcggaagatcgggcatcacgttgccatcacgtatgtgttgggtcccaatgctgagctgaccacggtcacaactgggcgcggatgcaggcttaggacatctagggcttgagcctaagcctacctccaaaatcttcaccaatatgtcgaacaccggagacaacggcaacactggatacaaggagaaggaggctcccgtcaacaccaacggaggcaatactgcctcaaactccagcggaggaccattcttggggtataacaagttagaggttatagttaaccaggattgaattttctgccagtttgattcattggttctcatgctccaaagatcaagggtgtctgagacttgctgtgtgatgtgctgtaggttgtcaagctgaccttcaaacactctgttgttgcgggatttccatagcgtgtaggcgcaagcagcgaaccaaattggttctattccttttgaagaccgattgctgtctatgattgcttgaaggaaagccgagcttgattctgagttgttggccagcatattggctttggtgtttagcctgtctctgaatgctagccaaaggaaaatcttacagtttgttgggatggtgtgaatccaaataaagtctgccggtttccataaggatccatggtatgtcagcatctgataggcattttttgttgagacctgcggtgcaggataaagaaattctcttgtgtctgcttcctctgggattgggttgacatgctgtaagatctgtaacagagtgtgcagttctgtttctgcttggtaggatagatttgggtggagctgtatttgccaggagctttgtctgaactgcgactgaactgtgcactctttatgtatagcaaaggagaataaaactgggtaagcaaactctagacgttgatggaaccaattatctttccaaaacaaagttgttttgccatttccgagcttgactcgtgttatcgagcagagagtctgaaaatgtgaaaggataagtttccaggtcggtgtatcgttgcttctgggatgcagctgtataatgtattgcagatatctctctcgaaaccatttagccattggatcccctgtgcctgagagcaccttgtttcctagctttaaaattaatgctgtattgtgtgctcttaggtctttgaaacctagtcctccttgctgtttttgtaggactgtcttccaggctaccaggcagtgtcctcctctgacggttttttcccctttccaaaagaaagcacgccttattttgtcaattgcctcgatagatttttctggccagatgcagcaggacatgtagtaagttggaattgctgaggttactgcatttatcatagttagtcttcctccttttgaaagtggcatccaacctgaaaatcttgtaaaggagtccagaatttctttaagagctgtagcttggtctgcttcaccctttagtaggatcagggtgtcatctgcatattgcaaggtaggtggagcaccttcgatgtctagcgggtgttgtagggttcctgtgttaaaggcctgaatatcgaaagctttgtggaagtcaagtttgaggactaacatcggcttcctattcttgagggctgcttgtaccatttctgaggcaaggatgaagttttcaatgattgatctgtatctctcgcgccaattcggcctccctccatcggccgtgcctctcgcgccaagccggcctccatctccgccgcccgcgcctctcgcgccgagccagccttcgctgccatcggttgtgcctctctgcaccaagccggtctccgtcccctccaccgtactctcccgcgccggcgaaatgcagccgtctgccatgccctcggctagcccaccgaggccaccatgccacctcccaccaccaccgcagccactgctgccaacgaccacctcgccgccggccagccgcagccccatcgccgtcgtccagccgctaccgcaactctcgcgccaattcggcctccctccatcggccgtgcctctcgcgccaagccggcctccatctccgccgcccgcgcctctcgcgccgagccagccttcgctgccatcggctgcgcctctctgcaccaagccggtctccgtcccctccaccgtactctcccgcgccggcgaaatgcagccgtctgccatgccctcggctagcccaccgaggccaccatgccacctcccaccaccaccgcagccactgctgccaacgaccacctcgccgccggccagccgcagccccatcgccgtcgtccagccgctaccgcaactgtcgccacgagctccgcgccgctgcggggctcaaaggagccaagactgggctttcgcccggcaaccacccttgagggccgttcaccacctgcgaatccacggctgacgcaccgatgctccaccaccactcatcctctgccgacatgtgggacccccgcaccggcgcctcccgtcgaccagcctttgtatgccgaagaccgtgccacacccaccagcagctcctccatgcaccagggtcgcctcctccaccgccggccgcgcctctcacgccaaatcggcctcctccaccggacgcacctctcgcgccaattcggcctccctccatcggccgtgcctctcgcgccaagccggcctccatctccgccgcccgcgcctctcgcgccgagccagccttcgctgccatcggctgcgcctctctgcaccaagccggtctccgtcccctccaccgtactctcccgcgccggcgaaatgcagccgtctgccatgccctcggctagcccaccgaggccaccatgccacctcccaccaccaccgcagccactgctgccaacgaccacctcgccgccggccagccgcagccccatcgccgtcgtccagccgctaccgcaaaataactgtcgccacgagctccgcgccactgcctctgccgcgagaaccccaaagccaccgcagccgacagccgccaatgctgtcgaccagccatcgtgctgccgccgccgaccaagttgctgctgccaccgtcgctatgaactccacgccgttgccaccgtcaccgttgccccgtgctcccgcgccattgccgccgccgatgtcgccgcgagctccgcagtgccgccaccaccgcgagcttgccccacaccggatccgccctcgggggggccagatccgcctctgcccgccatcgtcatcctcagcggtgcccgggaagcggcctcccatccatcgcctcgcttcaaccgccgcctaccgacgcgctcgaccacgccgcccgcgcccggcctcacctgcggccagctgcgccgcccgcgcaaccgtcgccgcgaccgcctcttccccgccaccagcacgcccgcttctccgccgcacgccgtcgcccggcgtcagccccgccagttccggccaaaacggcgcggatctgagcgggtttccaccgccgccagccctgtccgccgccaccacacaccgccaccactccgccccgccgccaactgcctccccgccgttggcatagtatccgggcgggcgcggatccggatggttgccaccgtcgccgcccggctagtaacccgggccacccaagtgctgtcacgcccggaatttctatccaaaattccaaacgcttacatggctacacctaatcctccacagccgccaatgctgtcgaccagccatcgtgctgccgccgccgaccaagttgctgctgccaccgtcgctatgaactccacgccgttgccaccgtcaccgttgccccgtgctcccgcgccattgccgccgccgatgtcgccgcgagctccgcagtgccgccaccaccgcgagcttgccccacaccggatccgccctcgggggggccagatccgcctctgcccgccatcgccatcctcagcggtgcccgggaagcggcctcccatccatcgcctcgcttcaaccgccgcctaccgacgcgctcgaccacgccgcccgcgcccggcctcacctgcggccagctgcgccgcccgcgcaaccgtcgccgcgaccgcctcttccccgccaccagcacgcccgcttctccgccgcacgccgtcgcccggcgtcagccccgccagttccggccaaaacggcgcggatctgagcggcaatgatggaggggcggacgaggacgacaacgcgacggcgaccacgacggcggccttcccgagcaacggcgacgactggagcgatggcggcgcacggctggagcagcggcaacgacggcggcgcgaggctacacggggcaaggaggcggcggcgaaggcccacggcgaccggcgacggcgaaggaaggtctag

SEQ ID NO: 33356 - DNA, 516 bp, Oryza sativa
  Clone ID: PAT_MRT4530_37476C.1
tccaatttcgttcgccattttctccttccattttctcggcgaggaggagggggaagagctaggatgccggcgtggtggaagagggggaaggggaagaaggggaaagggggatcggcggcggcgggggaggaggaggaggggaggaggaaggcggggagcttcgacgaggtgctcctagccggtaagcatactcgttaggagacgttgggggaggtgatgatgcttttaacaccttcttcagtgagactggtgctgggaagcatgtcccccgtgctgtcttcgtcgatcttgagcctaccgtgattgataggtcaggactggagactaccatcagttcttttatcctggacattttattattatgtaatgatgcttttgccattctctccttgagcgctctacatctatttcgactaatctgttgatctgtgccttgaccgcatcaggaagcttgccgacaactgcactggtcttcagggctttcttgtgttcaacgctgtttggagaagaacgggc

SEQ ID NO: 33357 - DNA, 339 bp, Oryza sativa
  Clone ID: PAT_MRT4530_37477C.1
atgatcggcggcggaggagcagacgacggcgggtctgaccgacggaagaagaggcgcgccgagttggaagtggcaatcaagggcactctcgccgtgcaggcctacatcagaatcacatgtacgatcatggcgtaccttgcatttacatggtcgacagtcgtcctcttgggcggctacgtcagctcgctgcagagaaaggatttccagtgcttaacagtaattactgttatagaggcaaccagcttgtcgaacatagatatgcaagaaagagcctactgcttggtgcctgggtgctgggtcatcgagcttgaagatgctagagatagggaccaggcttga

SEQ ID NO: 33358 - DNA, 445 bp, Oryza sativa
  Clone ID: PAT_MRT4530_37478C.1
aatgttcttgggtggttattcttgatttctttttggtggtgaggaaaacaaaccatggtttttgttaaattcaccctaaaaaacagtttaaaaactctttgcgtcacaaccacaatgttaaacaggaggcaacaaaaattggggggggaaaacccagttcccaccggggccaagaaaaacccaaaattaaaggggacccaattttggttaaacaaatgggcgaaaacgggggtcctcccccaaaggttaccgacaaaaaattggtggaccaaaaaatcctcaccaaaaaagtgggggggccaagttcagggtcccccccccagagggacccgcaacccctgaaacgttttgttgggttcccgaagcaaagggagccatatcttgaacccccttgggctccctcaagaccccaaaacaattaaaggccctttgggggggggttttt

SEQ ID NO: 33359 - DNA, 1464 bp, Oryza sativa
  Clone ID: PAT_MRT4530_37479C.1
tcatcttttgttggctttaatggctgcggcagtgtccatatctatgtgaacgactgatttactaatcagatatatattctctgatgttgtattccgcttcggtttgacttcagtcgtcaacaatgatgtgatcatatccctgaggtaatgcttctctcgcgtcgctctcccccagagcggcttgggaggcgacgacccggccgccctctcaccacctccttcctcctccgcctccttcccgtctgagcggtggccgcaaggacagcagtggcgaggcttcttgccaacttcgcgcacgggcggccaggggagatgcccagggtggcggcagctgatggcgggaacggcggcggggatggcgaaggcgacgacaagggcgagtccttgaggtggcagggacagcgacggcggcagcggtgaccgccagatccgcgccgctcggccggatctggcggggtggcggttgacggcggaaacgacggcgggtatggccacggcggcggcaggggagtcattgcggtggcagggtcggcgacggcggcggcggtgaccactagatccgcgccgctcgggaactagtagcgggaacggcagcaaggatgatgacggcgatagcatggacgagtccctgcggtggcaggaatggcgacgacagggttgcacgttgctcagccgggaggtcacgggtgctctgtgccggatgggcgggaggacggggacggcgatggcagcgaggacgacgatgcctgcggagatggtgacgacgctacggcggcggcgcgcttggatccggcagtcccatgcttggatctggcgcccccgcgctggatccagccggaggacgtgccggcgctgggagaagccggtggccggtggctgcagctggaggaggttgccggcatggcgcgcgtggcgcccggcgccgccggccgcggaggtatggcagacggctgcatttggccggcacgggagcggtgggaggagtgctcggaggccagctcggtgcgtagaggcacggtcgatggcagcgaggccggcgtgatgcgaggaggcgtagccggcagcggtggaagccgacttggcgcgaggaagcgtggccagcgatgggaggccgacttggtgcgaggaggcgtggccaacggtggacgaggctggcctggcgcggtgaggtgcggccagtggtggaggcatgcacggtgcgaggaggaggagctgccgatgggtgcggtgcggtctacgatgcacagaggccggccggcggggggtgccgatgcagtggtccctcatgtcggtagaggttggatggtggtggagcatcggggtgccagccgtagactcgcaggtggtgagcggcgggtgaaaacccagcccggcctcggccgggcggcagcggtggtgctttccgtcgcttctctccttggagacgtcgtttaggcatcccctagcagacctccccccccccat

SEQ ID NO: 33360 - DNA, 428 bp, Oryza sativa
  Clone ID: PAT_MRT4530_3747C.1
tggttattgtacgttgccaacgattgaaggaaatgctcatcatagctgttaacaatcagctagataatgttatatggcttgtgttgttatagccacgttaacttgatcaatattgtcactctaaatcttctgtaaactcttaagatatattccatcaagtactcccttcgtcccaaaatataactttgaacaatgcataattcatcccaagatataacatctaacattcaaaacttatctcaaatataacagcttggcttacattctcttatcaaccaatcacaaccttgcactattcaaattctacacctatttactcttaaccgaccacaactttgccccattatacccatgtacaaccctaaaactccttatattttgggacagagatagtaagtcttttccatagctgcatttgatcatagaca

SEQ ID NO: 33361 - DNA, 681 bp, Oryza sativa
  Clone ID: PAT_MRT4530_37480C.1
atggcggcggcagtcaccgtcaagccgctgaacggcgccgaggagtacctccggtggaaggagtcgatgctcctcgtcctccacaccgccggcgtcgcccacgtgctctccgacgagcccccgccaccgacgccggcggcggcggcggccggagtcaaggaggaagacggcgaggccgaggccgcggccgcggcggcgaggaggaggtgggcgcgcgacgacgcggtgtgccgcggccacatcctggcggcgctctccgaccgcatcttcccggactacgtccgccacggcacggccagggcggcgtgggaggccgtggcgcgcgcctacgacggcgcgggcgcgctctcggccggcgtggcgcgcagggcgttcgacgacctcgagttctacgcgaacgcgccgctgctggagcagatcgcgcacgccgaggccctcaacgccgccacgaggctcccgctcggcgacgaggacctggccggggcgctgtgcgagatgctcccggagagcgtgggcgggccggcctccgcgcgctccggcggcggcgccaccatgcgcgacgtctggcgcgtcgcccggctcgtggagacgcgccgcgtttgcagggaggacatggagcgccatggcaggtgctggaggtgcggcaagccgggacaccataccagcaactgcatgggttga

SEQ ID NO: 33362 - DNA, 1966 bp, Oryza sativa
  Clone ID: PAT_MRT4530_37481C.1
gccccgggcgcaacgcgagcgttcctcaagaacccgacgaacaagcatgaactgcctcaccatccaccgccgccacgtcgccccttccccaatcccatccaaaattcctccgatccccgccggaatcgaagacaggagccgaccacatcaccaccccggcggcgcatcgatcgcgtatgcgctggatgcggccaaaaaaaaatcccaaaaatcagcacggatcggagagaagttatgagtcatggtcgtcatcatcataccaaagcagatgttggcgcgacagtgggaagcgatctaggtatatctgaaccgcggagacatcattaacaccatcgtctgccgtatccttctaatgactatctgcgaagttcgttctccacaggtgcggaagacagtgttcaatttcatccatgtctcatttcaggaacgtcaaacggagggtatttcatatataatgtattggagatattaattatcatcgtatgcagcatctcattttcgccattccttgatgtcagttgttcagaggttgcatatgctacttttcaactgtattgtgtaagaaataatgaggtgcaacgtcttatgcttgggcctcatctacttggggatgctccaaggatatatatcacccctcctggaaacgaaatagccgaggaagaagatacctcggaatattttccagacataaagatatatgatgaagatgtgaacttgaagcttcttatttgtggagcacattgcacccttgattcatctctattgaactcactagaggatggtttgaatgctcttctcaatattgaaactatgcagcatacccacatcgaaaaacttagtagtggtggtggtgactggtggtttcgatggtgcaaactccaggatagagtcagcgctgctcctcctcttcatgttgattcaactctgttggacgggatggttacaatatgttgtgatatcacaacatctagttcttcccatgtgtcactgcttctttctggcagtccacagacctgttttgatgataagcttttggagaagcatattaaaaaagaacttattgagagccgccagttagttcgtgttgtctcggttagcgaggatgggccatcttcagctgagccgttgacttcaatgtccgtggcttctggagcttccacttttgaagtcttgatgaccttacctaagtgggcagcacaggttttgaaatatcttgctcaagaaacatcttacaaaagcctggttccacttggaattgcttctgtaaatggtactccagtttgttcgttcgatagtcaagatgtggattggcttcttttctttcgcacaatccaagatgaagctattggaactagtctatatccccatccgccaagatggtctgcatcccttgcgaagaacagagttaagggaagtatggtgtcaaaaccagctaggtttgatgacgcgcttggggcgagcctttatccccatccgccaagatggtctgcatcccttgcgaagggcacgggggtgggggcggtcgtctcaccacctgctggggggccgttgccttcgctgtcgctggttgtagttgcgcaaaggtggtgtctatgccggatgctgagagaatgcgcagctcacttgcacatcaacaatgctccatagcaagggcaaggctctatgttgagcgaatccaaactttttctcctttgatgaacatgtcttgctttttgctgtggatctcattatccggttgttggtttgttaaccgcgaccaaaatttgaattttgctagtttctcttcggcctggttggtctgctccccgtggtgtggtctctcgcttgggctccccagtgtcttatccttgttctggttgcgccattcgagtcgctgtggcccagcaccctccgttcaacttgttagagccaaaacgttgaacactcctgtaaattattactatgggaaaatctcttattagtaacg

SEQ ID NO: 33363 - DNA, 855 bp, Oryza sativa
  unsure (1)..(855): unsure at all n locations
  Clone ID: PAT_MRT4530_37482C.1
atggatattactagatcaaagaccaaaaatcagaagaaggcagctgctcccgcctatgccgcccgccaactccagtacccccgcgcctccctacagacccgccgcctccccgtgctgccccatatctccccggaccctacgcaacctcgactaccacaagccccagcccacgccggcgccacacccagtgtcgcggcagtggcggaggtgtggctgatgggcggcgcagggcaaaggagcgatgtggcgtgggtggatgggcgatgcggctcgggcggtggccagctcgacgacctcgggtggttgtcgacgacaacaaggaggcagccgggagcgctacggccaggagttgctgcagtgggcaaggggctcctcctccaccaccgggcaggaggcgtggcactgacgtatctggcaccccctctccctcccgcgtggatccggctgctgctccgcccctacacactggctgcggcgacctcggcggcggcaggcaagggcaatggctacgaggattttggtggtggcggctgcgatgacctcggtggtggtggcctcagccttagacggttggcaagcgtggggccgccgctggcgaaggagtggggagtggcggggctaggtcatggaccccgaggcatcttcctgatgctggtggccaacatcaagacgaggtcgtcgtcgatgcaggtggtgaaggaggagatcgaggaggaggagntggcgggaggaagagnccggagaagaggagggctgaggcggtcggtatcggggagggtgagggagcagcgcgcgcgtctgtacatcatgcgccgctgcgtctccttgctcatctcctccaccttccacgactag

SEQ ID NO: 33364 - DNA, 1362 bp, Oryza sativa
  Clone ID: PAT_MRT4530_37483C.1
atggtgcgacttgaagaaattcaggaaacaccagaaaatgcttcaacgtccacacaaccacaacaagctgagcaagatgttgttcaacaggttgaacaagttgttgttgaaccagctgtggaagcactggcttcacgaaggtccaaaaggatacggcgtacacctgcaagaaaagatgaacttactacctatgaggaagcaatggtgggaccagactctcagaaatggcttggagccatgaaatccgaaatagaatccatgcatatcaatcaagtttggaacttggttgatccacctgatggtaaatccatttatgggttgaagcaagcatctcggagttggaatattcgttttgatgaagtaggcaaggcgttgggctttgtcaaaaatgaagaagagccttgtgtatacaagaagattagtgggagcgcactgacatcattgaaaaatagtttttcaatggagaacttaggggaagcagcatatattctaggcgtaaggatctatagagatagatcaaagaggataattggattaagccagagtacatacattgacaaggtgttgaagaggttcaacatgcaagattctaagaaaggtttcttaccgatgtcatatggcattaatcttggcaagaatcagtgtcctcaaacgactgatgagcgaaacaagatgagtgtgattccatatgaatcggcaatcggatccatcatgtatgctatgctatgtacacgtccagatgtttcatatgcacttagtgcaacaagccgataccaatcagatccaggtgagagtcactggatagctgtaaagaatatcctgaagtacctgagcagaactaaggatatgttcctagtctatggaggacaggaagagctcgttgtaaatggttacactgacgcaagcttccaaaccgacaaagatgattttagatcgcagtctggatttgtgttctgcctgaatggaggcgctgtgagttggaagaggtccaagcaagatacagtcgttgattctacaacagaagccgaatacattgccgcttctgaagcagcaaaggaggctgtttggataaagaaatttgtttctcaactaggtgtgatgactagtgcttctagccctatggagctctattgcgataatagtggtgccattgcgcaagccaaggagcctagattgcatcaaaagtccaaacacattttatggcggtatctcctcattcgcgagatagtgggtagaggagatgtgaaaatatgcaaaatacatacggacttgaatgttacagatccgttgacaaagccactccctcagcctaagcatgaggcacacactagggcaatgggtataagatacattcgtgattga

SEQ ID NO: 33365 - DNA, 1100 bp, Oryza sativa
  Clone ID: PAT_MRT4530_37484C.1
cggacgcgtgggcggacgcgtgggccgacatgcgcaacagccgtagctatgtgatccgtgcaccatttgatctgctgtggcttgagatgcaggtgcacacgctgatcaatcctacggttgatcaatttctggaggcacaacgtgctttgcagccccgcttcatgtacttccagggtcagcagcttgacaaggaggaagaaattggtagacttgtctggggcgatgctgatgtatcggatccacagatattttcttcactcatttgtccgccttttcctaccatagtttatttggaagttccaagtggagaaaagattgctcaatctcttcaatcgaaggattcatctatattgaactcactagaggatggtttgaatgctcttctcaatattgaatttcgatggtgcaaactccaggatagagtcagtgctgctcctcctcttcatgttgattcaactctattagacggggtggttacaatatgttgtgatatcacaacatccagttcttcacacgtgtcactgcttcattctggcagtccgcaaacctgttttgatgacaagcttttggagaagcatattaagaaagaacttattgagagccgccggttagttcgtgttgtctcagttagcgaggatgatagaccatcttcagccgagcctttgacttcaatgtccgtggcttctggagcttccacttttgaagtcttgatgaccttacctaagtgggcagcacaggttttgaaatatcttgctcaagaaacgtcttacaaaagcctggttccacttggaattgcttctgtaaatggcactccagtatcttcgttcgatagacaagatgtggatcggcttcttttcttttgcacaaaccaagatgaagatgaagctattgcaaatggtctatatcaccatccgccaagatggtctgcatcccttgcgaaggacagagtgaagggaaatatggtgtcaaaaccagtgtattttctagcctaggtatatgttcaaaaccagcgaggcagatcggttacaagggcagcgacaatgtggaggggtggcaaagccgcgtcgatgctaaaggtggggattactcacttccacatg

SEQ ID NO: 33366 - DNA, 3669 bp, Oryza sativa
  Clone ID: PAT_MRT4530_37485C.1
atggcgaggacgacggccggcggagtggaacagggcatcggctacggcgtagcggagctggcggccgaagcaggtgggcgagcgcgcggtggccggcggggtggagttgggcgcgtcggcgacggcgggcgatcgcacggcggctggcggggcggggcggagtggagcggcgtcgggagaacgggggatgaggccggcgggagaggggggatagatgtcggacatctatatgcagagattattggtttacttgacaagatcatggcagctcctgcagcatccaattttaacttgcggtctattattgagaaagagaagttgactggaacaaacttcatggattgggagcatgaaaagcgatgcaatgattatcttgatataagctgtctcatgcttgctactatgtcccctaagcttcaaaggcaatatgaggcattggatgctcatacgataatcacgggactacgtaacatgtctgaagaccaagcaagagctgagaggtctaatacctcaaagtccttgtttgcgtgcaggcttgcagaaggtaatccagtgagcccacatgtgatcaaaatgattggttacaccgagagtctggataagcttggctttccccttaaccgagagttggttactgatttgattctccagtcgcttcctcccagctttgagccgttcataatgaatttcaatatgaacaacctgaacaggaccttggcagaattgcatgggatgctaaagactgccgaggaaagcattaagaaaaactccaaccatgtgatggttatgcataagcgcaagcccaacaacaagaagagtggtcaaaagagaaagctaaactctgatgagatcacgagtactagcaactctaagaccaaggttcaaaagacagggcccgctaaggatgcagagtgcttcttttgcaaggagacaggtcattggaagagaaactataagaaatacctagagcagctcaagcagaagcagcaggatggaaagagttccacctcaggtattaatgttatagaaattaatcttgctacttcctctactgattcttgggtatttgatactgagtcagttgctcacatatgcaaatcgttgcaggggctgaaaagaagtaggagcttagcaagaggcgaagtggacattcgtgtgggcaatggagcaagagttgctgctgttgcggtcggcactatgccattatctttaccatcaggaatagttttggagttaaataattgttattgcattcgagctttgtgtaagaacgttatctctgcttcttgtttgcaagcagagggttatggttttagatctgtggacaatggttgttcagtctattataatgacattttctatttccatgtacccatgatgaatggcttatatattgtgaatcttgatggatgttcagtctataacattaatgcaaaaaggcaatgtcctaattatttgaatcccacttttatttggcattgtcgcttgggtcatataaatgagaaacgcatggagaagcttcatagagatggacttctacactcttttgattttgaatcatttaagacatacgaatcttgtttacttggcaaaatgacaaagggacctttcacgggtcaaagtgaaagggcaagtgaactattgggactagtacatactgatgtatgtggaccaatgagctcaactgccagaggtggttttgggtactttattacctttaccgatgactttagtaaatatggttatgtctacttaatgaggcataagtctgaatcctttgaaaagttcaaggaatttcagaatgaggtacaaaatcatttgggcaagacaatcaagtatctacgatctgatcgtggtggagagtacttgagcctagaatttggcaatcatcgaaaggaatgtggaattgttccacaactcactccgccaggaacgcctcagtggaatgcggtgtctgaacggaggaatcgtacattgttggacatggtgcgatcaatgatgagccaaactaatctaccgctaagcttttcgggttacgctctagagacaactgcgttcacactaaactgggttccatcaaaatcagtggataagacaccatatgagatatggactgggaatcgtcctagtttgtctttcctaaagatttggggctatgagataaatgcttctttgtgggggtatcctaaggaaacgaaaggatattatttttataatcgggaagagggcaaagtgtttgtcgcccgacacggtgttttcttggaaaaagagtttatttcaagaaaggatagtgggagcatggtgcgacttgaagaaattcagaaaacaccggaaaatgcttcaacgtccatacaaccacaacaagctgagcaagatgttgttcaacaggttgaacaagttgttgttgaaccagttgtggaagcaccggcttcacgaaggcccgaaagaattcggcgtacacctgcgaggtatacgttgttaactataggacaacgtgatatattgttgttagacaacgatgaacctactacctatgaggaagcaatgaaaaagacagatgtagatggaaatgttcacatctacaaggcacgattggtggcgaaaggtttcagacaaattcaaggtgttgattatgatgaaactttcttgccagtcgccatgctaaaatctattcggattgttttagcgattgctgcctatttcgattatgagatatggcaaatggatgtcaaaacagctttcctcaatggaaatctcgatgaggatgtgtacatgacacaacccaagggttttgttgatccacaatcagctaaaaagatatgcaaattgcagaaatccatttatgggttgaagcaagcatctcggagttggaatattcgttttgacgaagtagttaaggcgttgggctttgtcaaaaatgaagaagtgccttgtgtatacaagaagattagtgggagcgcactggtgtttctaatcctatatgtagatgacatattattgattgggaacgatattcctatgcttgaatccgttaacatatcgttgaaaaatagtttttcaatgaaggacttaggggaagcagcatatattctgggcataaggatctatagagatggatcaaagaggctaattggattaagcgagagtacatacattgacaaggtgttgaagatgttcaacatgcaagattctaagaaaggtttcttaccgatgtcacatggcattaatcttaacaagaatcagtgtcttcaaacgactaatgagcaaaacaagatgagtgtgattccatatgcctcggcaatcggatccatcatgtatgctatgctatgtacacgtccagatgtttcatatgtacttagtgcaacaagccgataccaatcagatccaagtgagagtcactggatagctgtaaagaatatcctgaagtacttgagaagaactaaggatatgtttctagtctatggaggacaggaagagctcgttgtaaatggttacaccgacgcaagcttccaaaccgacaaagatgattttagatcgcagtctggatttgtgttctgcctgaatggaagcgctgtgagttggaagagttccaagcaagatacagcggctaattctacaacagaagccgaatacattgccgcttctaaagcagcaaaggaagctgtttag

SEQ ID NO: 33367 - DNA, 2217 bp, Oryza sativa
  Clone ID: PAT_MRT4530_37486C.1
atgtctcatttcaagagcggctcaagggtgaagtgcacgatgcttgcagttctgtgcggtaaggtaggcaagcagcggacgccacctggtccagtgcccgagtcccagcggccgcggccgtcattcccattcctggagttgatctcgtccgggaggttggacgtgcacacgctgatcaatcctacggttgatcaatttctggaggcacaacgtgctttgcagccccgcttcatgtacttccagggacagctgcttgacaaggaggaagaaattggcgcacttgtttggggcgatgctgatgtttcggatccacagacattttcttcactcatttgttcgccttttcctaccatagtttatttggaagttccaagtggagaaaagattgctcaatctcttcaatcgaaggggatttcatatataatgtattggagatattcattatcatcctatgcagcatctcattttcgccattccttgttgtcagttgttccgagctcatgcagccatgcatgggatgcatttcagcttgcatatgcttcttttgaacaatactgtgtaagaaataatgacgtgcaacgtcttatgcttgggcctcatcttcttggggatgctccaaggatatatatcacccctcctggaaacaaaatggctgaggaagaagatacctctgaatactttccagacataaagatatacgatgaagatgtgcacttaaagcttcttatctgtggagcacattgcacccctgattcatctatattgaactcactagaggatggtttgaatgctcttctcaatattgaatttcggtggtgcaaactccaggatagagtcagcgctgctcctcctcttcatgttgattcagctctgttagacggggtggttacaatatgttgtgatatcactacatccagttcttcacacgtgtcactgcttctttctggcagtccacaaacctgttttgatgacgagcttttggagaagcatattaagaaagaacttattgagagccgccggttagttcgtgttgtctcggttagcgaggatgatggaccatcttcagccgagcctttgacttcaatgtccgtggcttctggagcttctacttttgaagtgttgatgaccttacctaagtgggcagcacaggttttgaaatatcttgctcaagaaacgtcttacaaaagcctggttccacttggaattgcttctgtaaatgatactccagtttcttcgttcgataaagaagatgtggatcggcttcttttcttttgcacaaaccaagatgaagatgaagctattggaaatggtctatatcaccatctgccaagatggtctgcatcccttgcgaaggacagagtgaagagaaattttgtgtcaaaaccaggatgctatgtgatccgctgcggcggcagcattagcatccgcagcagctgtagcaatgcctttgcagggttcaacggttgcggatctgtggtgtttttttgttcaaccatgcctcatttcctgagcagctcaagggtgaagtgcacgatgcttgcagtgctgtgcggtaaggtaggcaagcagcggacgccacctggtccaatgcccgagtcccagcggctgtggccgtcattcccattcccggagttgatctcgtctggaagcggcggcatcagcatccgcggcagctatagctatgtgatccgtgcaccatttgatctcccgtggcttgagagcatccgcaacagccgtagctatgtgatccgtgcaccatttgatctcctgtggcttgagagcacttctattcgttataggggcactaggcccaaatatatacagaaacagaacaaaagcctgattccacttggaattgcttgtgtagatggcactctagtttgttcattcaatagacaaggcgtgggtccacttcttttcttttgcacaaaccaagatgaagatgaagatattgaaaatgatttatattccgatctgccaagatggtctgcatcccttgagaaggacagagtgaagggaagtataggttcaaaaccagcgaggcagatcggttacaagggcagcgacaatgtggagtggggcaaaggcggtgtcgatgctaaagttggtgattactcactcgcacatgaacagtatgtcatagcatgggcaaggctcattgtttggcacaatgaactgcatgaaaatttggatgcgatattcaaagaatcgagctga

SEQ ID NO: 33368 - DNA, 616 bp, Oryza sativa
  Clone ID: PAT_MRT4530_37487C.1
caaagcaaagcatcaactactggaaaatccaaataatccatcaggcaaaacccccccccacccatcagggctcccatcttaagcatcacagccggaaagctcattccaccatcctccacaggcccatccattggacaaagtggcagggggctaaaagggccccaaaaccccaacccagcgagaaacgggggcctgggctgcaaacggcagcaggctccatcgcaccccaaagcaaacataggtccatataggacccagcagacgacacccttactacccaacccatacccgactcaacatagtaaacggggagcagcagcgggcggcctaaattactagaaccatctacgttataccacagtagtagaggaaaaataggaaaacaacactcgacttccatccgtttgggcctcggaaaggccccccccccccctcggcctggggggggcagaaaacgctggcctaggagcaaaaacaagcgggagcacgcggggggctcacacttaaaagggaggagggggacgggttgccccaggggtggccctctcataggcgtgggacgatgatttccttctgaagcaaccaccggccccggcaaacggaaaaatggaagggg

SEQ ID NO: 33369 - DNA, 1980 bp, Oryza sativa
  Clone ID: PAT_MRT4530_37488C.1
atggcacctcctgtaccatccaattttaacttgcggtctatttttgagaaagagaagttgactggaacaaacttcatggattggtatcgcaacctgagaattgttctcaggcaagagcacaaagagtttgtacttacacagccttttccagctgacttacccaacaatgctcctgctgctcaacgtagggagcatgaaaggcgatgcaatgaataccttgatataagctgtctcatgcttgctactatgtcccctgagcttcaaaggcaatatgaggcattggatgcccatacgataatcacgggactacgtaacatgtttgaggaccaagcaagagctgagaggtttgcagaaggtaatccagtgagcccacatgtgatcaaaatgattggttacaccgagagtctggataagcttggttttccctttagccgagagttggctactgatttaattctccagtcgctccctcccagctttgagctgttcataatgaatgtcaacatgaataacctgaacaggaccttgacagaattgcatgggatgttaaagactgccgaggaaagcattaagaaaaactccaaccatgtgatggttatgcataagcgcaagcccaacaacaagaagagttgtcaaaaaagaaagctaaactctgatgagatcacgagtactagcaactctaagaccaaggttcaaaagacagggcccgctaaggatgcagagtgcttcttttgcaaggagacaggtcattggaagagaaactgtaagaaatacctagagcagctcaagcagaagcagcaggatggaaagagttccatcttaggtattaatgttatagaaattagtcttgctacttactctactgattcttgggtatttgataccggatatggttatgtctacttaatgaggcataagtctgagtcctttgaaaagttcaaggaatttcagaatgaggtacaaaattatttgggcaagacaatcaagtatctacgatctgatcgtggtggagagtacttgagccttgaatttggcaatcatctaaaggagtgtggaattatttcacaactcactccgccaggaacgcctcagtggaatggagtgtctgaacggagtaatcgtacattgttgaacatgttgtggaagcactggcttcacgaaggtccgaaaggatacggcgtacacctgcgagacaaagttgaacctactacctatgacgaagcaatggtgggaccagactctgagaaatggcttgaagccatgaaatccgaaatagaatccatgcatgtcaatcaagtttggaacttggttaatccacctgatggtgtaaaagccattgagtgcaaatgggtctttaagaaaaagacagatgtagatggaaatgttcacatttacaagacacgattggtggtgaaaggtttcagacaaattcaagatgtttcatatgcacttagtgcaacaagccgataccaatcagatccaggtgaaagtcactggatagctgtaaagaatatcctgaaatacttgagaagaactaatgatacgttcctagtctatggaggagaggaagagctcgttgtaaatggcgctatgagttggaagagttctaagcaagatacagtggctgattctacaagagaagccgaatacattgtcgcttctgaagcagcaaaggaggctgtttggataaagaaatttgtttctcaactaggtgtgatgactagtgcttctggccctatggacctctattgcgataatagtggtgccattgtgcaaaccaaggagcctagatcgcatcaaaagtccaaacacattttacaacggtatcacctcattcgtgagatagtaggtagaggagatgtgaagatatgcaaaatacatacggatttgaatgtcgcagatcagttgacaaagccactacctcagccaaagcatgaggcacacactagggcaatgggaataagatacattcatgattga

SEQ ID NO: 33370 - DNA, 2991 bp, Oryza sativa
  Clone ID: PAT_MRT4530_37489C.1
atggtcaccgccggcgaccaccggcgcggcggagcggcacccgagagagcggagggaagggggaaggcgaaagggcggtcttcggctcaccccgggtcgacggcgacgacgggaacggcggccgaagcggaggaaggcggcggcgcgattcgggacggcgagggcgacggtgctccggcggtcggcgagcgaatcggaggagcggacggggtcgacgacgacgcggcgaagccgaaggaggtgacgccgagtggggaggaggtccggagcgacgacggcggcgaaccggagctcggcggcgacggcggagagaaggtgcgacggatagatgtcggacatctatatgcggagattattggtttacttgacaagattatggcagctcatgcaccatccaattttaacttgcggtctattcttgagaaagagaagttgactggaacaaacttcatggattggtatcgcaacctgagaattgttctcaggcaagagcacaaagagtttctgcttatacagccttttccagctgacttgcccaacaatgctcctgctgctcaacgtaggaagcatgaaaggcgatgcaatgattaccttgatataagctgtctcatgcttgctactatgtcccctgagcttcaaagccaatatgaggcattggatgctcatacgataatcacgggactacgtaacatgtttgaggaccaagcaagagctgagaggtttaatacctcaaagttcttgtttgcgtacaggcttgcacaaggtaatccagtgagcccacatgtgatcaaaatgattggttacaccgagagtctggataagcttggttttccccttagccgagagttggctactgatttgattctccagtcgctccctcccagctttgagccgttcattatgaatttcaacatgaacaacctgaacaggaccttggcagaattgcatgggatgctaaagactgccgaggaaagcattaagaaaaactccaactatgtgatggttatgcataagctcaagcccaacaacaagaagagtggtcaaaagagaaagctaaactctgatgagatcacgagtactagcaactgtaagaccaaggttcaaaagacagggcccgctaaggatgcagagtgcttcttttgcaaggagacaggtcattggaagagaaactgtaagaaatacctagagcagctcaagcagaagcagcaggatggaaagagttccacctcagctttgtgtaagaacgttatctctgcttcttgtttgcaagcagagggttatggttttagatctgtggacaatggttgttcagtctattataatgacattttctatttccatgcacccatgatgaatggcttatacattgtgaatcttgatggatgttcagtctataacattaatgcaaaaagacaacgtcctaatgatttgaatcccacttttatttggcattgtcgcttgggtcatataaatgagaaacgcatggagaagcttcatagagatggacttctacactcatttgattttgaatcatttgagacatgtgaatcttgtttacttggcaaaatgacaaaggcacctttcacgggtcaaagtgaaagggcaagtgaactattggcactagtacatactgatgtatgtggaccaatgagctcaactgccagaagtggttttgggtactttattacctttaccgatgactttagtagatatggttatgtctacttaatgaggcataagtctgagtcctttgaaaagttcaaggaatttcagaatgaggtacaaaatcatttgggcaagacaatcaagtatctacgatctgatcatggtggagagtacctgagacttgaatttgagtttatttcaagaaaggatagtgggagcatggtgcgacttgaagaaattcatgaaacaccagaaaacgcttcaacgtccacacaaccacaacaagctgagcaagatgttgttcaacaggttgaacaagttgttgttgaaccagttgtggaagcaccggcttcacgaaggtccgaaaggatacggcgtacacctgcgaggtatgcattgttaactacaggacaacgtgatatattgttgttagacaacgatgaacctactacctatgaggaagcaatgaaatccattcatgggttgaagcaagcatctcggagttggaatattcgttttgatgaagtagtcaaggtgttaggctttttcaaaaacgaacaagagccttgtgtatacaagaagattagtggaagcgcactggtgtttctaatcctatatgtagatgacatattattgattgggaatgatattcctattcttgaatccgttaagacattgttgaaaaatagtttttcaatgaaagacttaggggaagcagcatatattctgggcataaggatctatagagatagatcaaagaggctaattggattaagccagagtacatacattgacaaggtgttgaagaggttcaacatgcaagattctaagaaaggtttcttaccgatgtcacatgacattaatcttggcaagaatcagtgtcctcaaacgactgatgagcgaaacaagatgagtgtgattccatatgcctcggcaatcggatccatcatgtatgctatgctatgtacatgtccagatgtttcatatgcacttagtgcaacaaaccgataccaatcagatccaggtgagagtcactggatagctgtaaagaatatcttgaagtacttgagaagaactgaggatatgttcctagtctatggaggacaggaagagctcgttgtaaatggttacactgatgcaagcttccaaaccgacaaagatgattttagatcgcggtctggatttgtgttctgcctcaatggaggcgttgtgagttggaagagttccaagcaagatacagtggctgattctacaacagaagccgaatatattgccgcctctgaagcagcaaaggatgctgtttggataaagaaatttgtttcttaa

SEQ ID NO: 33371 - DNA, 1907 bp, Oryza sativa
  Clone ID: PAT_MRT4530_3748C.1
gctgcaggcaccggcccgacggcgaccgggccgccatatccctcctaccgttcgttcctcctcctcctcttcttctccccccctatctctctctctctctcccctccctcccctcctcgctcaccaactcctcctgtcccgactcgcgagcgaatccgccgagcagcccaagaacaagggggaaggaggaggaggaggagggatgggggagattgcctcgtgaagtgatccgacatacatatccctcccagcttggggttcgaatcccaatcccgagcgggagaaaaagtctgaaagttaacgcgtccttcggccgcggattcagaattctgcgaatataagtacattacggtgggccgtgataccaatttgtaccgagcaattaattgaaggttagagtttgagcttataggagatgaagtgattggagctgaatcctgttgctgaaagcagcgatttcgtgtcaaaatttgatgcctttgcttggttcgagagctgtacatgcttgatactgttgcgatcctgcaatgtcccgaaggaatgccggggcaatgcagcgggaggggtcagtcaaggactgggaggaatttgacccctcgccgtctcccaagctggcgtactcgcagtcctatgttgcaatgagggggcttctgacatcggtggcctcgctggaccttgtcctgatgtcgagcagcctcaagtctgcttgggcagctatatcatcccacaagcatgcccggtccttggagaggtcaaggtccaagggaatgagcttgaagagggccatgctgcagttattagtgtgcttcatggttggtatcttcattgggttcacgccacccttttccgtggatctaccaggaaagatagcttctgaaaatgggaggcttccatttgatggggatgccattgacagaagacaaatggtagagcgtcaaggcaccaagttggagccattcgtagccgaggctgaatctgaagcaagcagcgagccacaggttgaagagggcccaccagttcctgcaatgttggatgacgaggcggactttgttgaagcctcgcctatcgtacattctgttaatgattctggcattgttgtgaggaagcacctgataattattacaacaacctctgttcgaccacaccaggcatattacttaaatcgtttggctcatgtattaaaagatgtcccgcctcctcttctgtggatagtggcagagtggccatatcagtcccgcgaaactgcagaaatactgaggtcttctgggatcatgtacagacatcttatctgcaatcggaatactacaaatataaggaagattgttgtctgccaaaagaataatgcaatttttcacattaagaagcaccgtctagatggtatagtgcatttcgctgatgaagagagagcatactcagctgacctgtttgaagaaatgcggaaaataaggcgttttggtacatggccagtagcaatacatgttgggacaaagtacagagtggttctagaaggccccgtttgtaagggtaatcaagtcactggatggcatacaaatcagagaaggggtgtatcacgtcgatttccaattggtttctctggatttgcttttaacagcactatactttgggatcctcagagatggaacagccccactttagagtctattatagtccattcaggtggcagaggtggcttgcaggagtcaagatttatcgagaagcttgttgaggacgagagtcaaatggaaggccttggggataattgcactcgtgttatggtctggaatttcgaactggaacctcctcaagtcaactacccaattggctggctgctgcagaggaatctggatgctgttgtgccaataacataaacacgccctttcaagatctggtaagctcggttaacttat

SEQ ID NO: 33372 - DNA, 589 bp, Oryza sativa
  Clone ID: PAT_MRT4530_37490C.1
atggggcgctcgcccatatggcctgttgtgggttcgcgcactcaaggaacatccatttttggggctacttgatgaggcaggtgattagatccacactccttatccgattaatatttccgtgaccaaagggctgctgacttaatggaccaacaccctttgtggcttataagggatctcgcaccctggcaccttaaccagctttccagtgtatcccccatactcaccgctgcttactaaaaatgggctacttggggttccccatcacatggcttggttcacgggattgcccctcccgtactacccatgtaaagtttgagaatctgcttagtggcttagggcgcccgatccccctccttattagctgtcccctatggaggtcttgagctcatggctgttgaatatggaaacttcagggggacgaatccaatggaccggtgaatgagaacttctcccataaaaggaaaaaaggctatcaattgaacgacaggctgatggttgaaactacgcccgactaatccctgggttgaaccgaataatggatgcaatacccccttaaggttcctgactggcgagctcatggtagaaccct

SEQ ID NO: 33373 - DNA, 978 bp, Oryza sativa
  Clone ID: PAT_MRT4530_37491C.1
atggacaggaccttggccgaattgtatgggatgctaaagactgccgaggaaagcattaagaaaaactctaaccatgtgatggttatgcataagcgcaagcccaataacaagaagactggtcaaaagagaaagctaaactctgatgagatcacgagtactggcaactctaagaccaaggttcaaaagacagggcccgctaaggatacagagtgcttcttttgcaaggagacaggtcactggaagaggaactgtaggaaatacctagagcacctcaagcagatgcagcaggatggaaagagttccaccttaggtattaatgttatagaaattaatcttgctacttcctctactgattcttgggtatttgatagcagtttttcaatgaaggacttaggggaagcagtatatattctgggcataaggatctatagagatagatcaaataggctaattggattaagccagagtacatacattgacaaggtgttgaagaggctcaacataagaactaaggttatgttcctagtttatggaggacaggaagagctcgttgtaaatggttacacggacgcaagcttccaaaccgacaaagatgattttagatcgcagtctggatttgtgttctgcctaaatggtggcgctgtgagttggaagagttccaagcaagatatagtcgctgactctacaacaaaacccgaatacattgccgcttctgaagcagcaaaggaggctgtttggataaacaaatttgtttctcaattgggtgtgatggctagtgcttccagccctatggacctctattgcgataatagtggtgccattgcgcaagctaaggagcctagatcgcatcaaaagtccaaacacattttacggcggtatcacctcattcacgagatagtgggtagaggagatgtgaagatatgcaaaatacatatggatttgaacgttgcagatccgttgacaaagccactcccttag

SEQ ID NO: 33374 - DNA, 823 bp, Oryza sativa
  Clone ID: PAT_MRT4530_37492C.1
atggccgatcggacggttggggatggccgggcggcgcggcctagccagcgcgcacacaaggctggcggcggcggcggccgggaccaaagcgacggcggcacacgggctgggcggccaccggtggcggcggcacggcgtgcgaaagcacgggaggcggccggccaaggggagaaagagggaagggaggaggagtgctcaccgagggcggcgacgaggggcggggaaaggcgggggagctcggcgtcggcgctccctgggacgaaggcggaacggcggcccgacggcgttccgcgaacgggaaccggcggacggcggctagaaggacctggggaggatgggggagaggttaggagggggagagagggctcccagcggcatgaatcgctggtcggagcggcggccgaggtgctcctcggcgctgcgaagcgagcggcggcgacagcgcgacttggggtggctaggagcggcgccaagcggccggctggagtcggcggcttcggtggaaggaggtggtgcgcgtggcgacggtgcttcggaggcggggaggggaaatggagcggacgccggggtgtggcacgacgcggcgaagccgctggtggcggtcgcgcggaacgacggtggtgggagcggctgtggcgaccggctggagggtcgtcggcgagcggcggcgggaggtgcgacggtggcggggtggttttcgtgcacgggagggctcgggagagaggggaaaatggagagggagcccttcttcgagtggcgcccggatatgatgggtcatacccacccccactccgccggggacatgggcgacgtgaggacatga

SEQ ID NO: 33375 - DNA, 1449 bp, Oryza sativa
  Clone ID: PAT_MRT4530_37493C.1
atgatcaaaatgattggttacaccaagagtctggataaacttggctttccccttagccgagagttggctactgatttgattctccagttgctccctcccagctttgagccgttcataatgaatttcaacatgaacaatctgaacaggaccttggcagaattgcatgggatgctaaagactgcggaggaaagcattaagaaaaattccaaccatgtgatggttatgcataagcgcaagcccaacaacaagaagagtggtcaaaagagaaagctaaactctgatgagatcacgagtactagcaactctaagaccaaggttcaaaagacatggcccgctaaggatgcagagtgcttcttttgcaaagagacaggtcattggaaaagaaactgggctgaaagaagtaggagcttagcaagaggcgaagtggacattcgcgtgggcaatggagcaagagttgctgctgttgcggtcggcactatgccattatctttaccgtcaggattagttttggagttaaataattgttattgcattccagctttgtgtaagaacattatctctgcttcttgtttgcaagcagagggttatggttttagatctgtggacaatggttgttcagtctattataatgacattttctatttccatgcatccatgatgaatggcctatacattgtgaatcttgatggatgttcagtctataacattaatgcaaaaaggcaacatcctaatgatttgaatcccacttttatttggtattgtcgcttgggtcatataaatgagaaacgcatggtgaagcttcatagagatggacttctacacttgtttgattttgaatcatttgagacatatgaatcttgtttacttggcaaaatgacaaaggcacctttcacgggtcaaagtggaagggcaagtgaactattgggactagtgcatactgatgtatgtggaccaatgagctcaactgccagaggtggttttgggtactttattacctttaccgatgactttagtagatatggttatgtctacttaatgagtcataagtctgagtcctttgaaaagttcaaggaatttcagaatgaggtacaaaatcatttgggaaagacaatcaagtatctacgatctgatcgtggtggagagtacttgagccttgaatttggcaatcatctaaaggagtgtggaattgttccacaactcactccaccaagaacgcctcagtggaatggggtgtctgaacggaggaatcgtacattgttggacatggtacgatcaatgatgagccaaactgatctgccgctaagcttttggggttacgctctagagacagctgcgttcacactaaacagggttccatcaaaatcagtggataagacaccatatgagatatggacagggaagcgtcccagtttgtctttcctaaagatttgggctgtgaggtctatgtaa

SEQ ID NO: 33376 - DNA, 451 bp, Oryza sativa
  Clone ID: PAT_MRT4530_37494C.1
tttggctgtcccacccatgctaactttctacccaccgcgagtctccgcggggggtgtttctggagatctctctctgtcccctcgcctcgcccaaatcagaagcctatgatggaggcgctcaggtcgtgagagggagcggaatcctctgagagagggaggcggcggttggtggttgcaggaaggctgtatcaaggataggcagtgggatagtaacaacaagaacccattcactgctgagattggaaccgcctcatttctggatcaatgccattatcaaccatggccgttgacaccactgtttcggagtactggctcaattggcggttcatgctctgagaggtctgggtctactcctgcatggtcctggcatgcttcttgatctggaagttccaggggccgagctcacaggacggaaatggctatggctgttaggacagtgaggatgcgcggc

SEQ ID NO: 33377 - DNA, 1158 bp, Oryza sativa
  Clone ID: PAT_MRT4530_37495C.1
atggagatccaatatgagcttaattcggatagggattcgaataggagtcctacgggccttggaggcccgagtgatggatcctatatattcgtgaggggtgtgaccggtggagataggatagatgtcggacatctatatgcagagattattggtttacttgacaagatcatggcagctcctgcaccatccagttttaacttgcggtctattcttgagaaagagaagttgactggaacaaacttcatggattggcatcgcaacctgagaattgttctctggcaagagcacaaagagtttgtgcttacacagccttttccagctggcttgcccaacaatgctcatgctgctgaacgtagggagcatgaaaagcgatgcaatgattatcttgatataagctgtctcatgcttgctactatgtcccctgagcttcaaaggcaatatgaggcattggatgctcatacaataatcacgggactacgtaacatgtttgaggaccaagcaagagctgagaggtttaatacctcaaagtccttgtttgcgtgcaggcttacagaaggtaatccatcgctccctcccagctttgagctgatcataatgaattttaacatgaacaacctgaacaagaccttggcagaattgcatgggatgctaaagactgccgaggaaagcattaagaaaaactccaaccatgtgatggttatgcataagcgcaagcccaacaataagaagagtggtcaaaagagaaagctaaactctaatgagatcacgagtactagcaactctaagaccaaggttcaaaagacagggcccgctaaggatgcagagtgcttcttttgcaaggagacaagtcattggaagagaaaccgtaagaaatacctagagcagctcaagcataagcagcaggatggaaagagttccacctcaggtattaatgttatagaaattaatcttgctacttcctctgctgattcttgggtatttgatactgggtcagttgctcacatatgcaaatcgttgcaggggctgaaaagaagtatgagcttagcaataggcgaagtggacattcgtgtgggcaatggagcaagagttgctgcatgttgttgtggttggcactatgccattatctttaccgtcaggattagttttggagttaaataa

SEQ ID NO: 33378 - DNA, 3150 bp, Oryza sativa
  Clone ID: PAT_MRT4530_37496C.1
atggcagctcctgcaccatccagttttaacttgcggtctattcttgaaaaagagaagttgactggaacaaacatcatggattggtatcgcaacctgagaattgttctcaggcaagagcacaaagagtttgtgcttacacagccttttccagctgacttgcccaacaatgctcctgctgctcaacgtagggagcatgaaaagcgatgtaatgattatcttgatattagctgtctcatgcttgctactatgtcccctgagcttcaaaggcaatatgaggcattggatgctcatacgataatcacgggactgcgtaacatgtttgaggaccaagcaagagctaagaggtttaatacctcaaagtccttgtttgcgtgcaggcttgcagaaggtaatccagtgagcccacatgtgatcaaaatgattggttacaacgagactctggaaaagcttggttttccccttagccaagagttggctactgatttgattctccagtcgctccctcccagctttgagccgttcatattaaatttcaacatgaacaacatgaacaggaccttgacaaaattgcctgggatgctaaagactgccgaggaaagcattaagaaaaactccaaccatgtgatggttatgcataagcgcaagcccaacaacaagaagagtgggcctgctaaggatgcagagtgcttcttttgcaaggaggcaggtcattggaagagaaactgtaagaaatacctagagcagctcaagcagaagcagcaggatggaaagagttccacctcagagggttatggttttagatctgtggacaatgattgttcagtctattataatgacattttctatttccatgcacccatgatgagtggcttatacattgtgaatcttaatggatattcagtctataacattaatgcaaaaaggcaacgtcctaatgatttgaatcccacttttatttggcattgtcgcttgggtcatataaatgagaaacgcatggagaagattcatagagatggacttctacactcttttgattttgaatcatttgagacatgcgaatcttgtttacttggcaagatgacaaaggcacctttcacgggtcaaagtgaaagggcaagtgaactattggcactagtacatactgatgtatgtggaccaatgagctcaactgccagaggtggttttgggtacttttttacctttaccgatgactttagtagatatggttatgtctacttaatgaggcataagtctgagtcctttgaaaagttcaaggaatttcataatgaggtacaaaatcatttgggaaagacaatcaagtatctacgatctgatcgtggtggagagtacttgagccttgaatttggcaatcatctaaaggagtgtggaattgttccacaactcactccgccaggaacgcctcaatggaatggggtgtccgaatggaggaatcgtacattgttggacatggtgcgatcaatgatgagccaaactaatcttctgctaagcttttggggttacgctctagagacaactgcgttcacactaaacagtgttccatctaaatcggtggataagacaccatacgagatatggacagggaagcgtcccagtttgtctttcctaaagatttggggatgtgaggtctatgtaaaacgtttgcaatcggacaaactcacacccaaatcagataaatgcttctttgtggggtatcctaaagaaacgaaaggatattatttttataatcaggaagagggcaaagtgtttgtcgcccgacacggtgttttcttggaaaaagagtttatttcaagaaaggatattgggagcatgttgtggaagcaccggtttcgcgaagatccgaagaaaaagacagatgtagatggcaatgttcacatctacaaggcacgattggtggcgaaaggtttcagacaaattcaaggtgttgactatgatgaaactttctcaccagtcgccatgctaaaatttatttggattgttttagcgattgctgcctatttcgattatgagatatggcaaatgtatgtcaaaactgctttccttaatggaaatctggatgaggatgtatacatgacacaacctaagggatttgacgatccacaatcagctaaaaagatatgcaagttgcatcaatccatttatgggttgaagcaagcatctcggagttggaatattcgttttgacgaagttgtcaaggcgttgggctttgtcagaaacgaagaagaaccttgtgtatacaagaagattagtgggagcgcactagtgtttctaatcttatatgtagatgacatattgttgattgggaatgatatttctatgcttgaatccgttaagacatcgttgaaaaatagtttttcaatgaaggacttaggggaagcagcatatattctgggcataaggatctatagagatagatcaaagaggctaattggattaagccagagtacatacattgacaaggtgttgaagaggttcaacatgcaagattctaagaaaggtttcttaccgatgtcacatggcattaatcttggcaagaatcagtgtcctcaaacgactgatgagcgaaataagatgagtgtgattccatatgcttcggcaattggatccatcatgtatgctatgctatgtacacgtccagatgtttcatatgcacttagtgcaacaagccgataccaatcagatccaggtgagagtcactggatagctgtaaagaatatcctgaagtacttgagaagaactaaggatatgttccttgcctatggaggacaggaagagctcgttgtaaatggttacactgacgcaagcttccaaatcgacaaagatgattttagatcgcagtctggatttgtgttctgcctgaatggaggcgctgtgagttggaagagttccaagcaagatatagtcgttgattctaccacagaagccgaatacattgccgcttctgaggctgtttggataaagaaatttgtttctcaactgggtgtgatgacgagtgcttctagctctatggacctctattgcgataatagtggtgccattgcgcaagccaaggagcctaggtcgcatcaaaagtccaaacacattttacggcagtatcacctcattcgcgagaagtgggtagaggagatgtga

SEQ ID NO: 33379 - DNA, 968 bp, Oryza sativa
  unsure (1)..(968): unsure at all n locations
  Clone ID: PAT_MRT4530_37497C.1
ctagctgagctcctcgccccgaagcagagccgcgtggaaccggcggccgcacgccgccaagaaccggccgcccagaaggtgccgccaccgccgcccgagacgcctcccgccgccgacttcatcatagttgccgccgcgccagttgctcccgtcggggacgtctcccgctgccgggccagccaccgcgcgagccggcaaccgtggctgccggagggaggagaagagaagcagagccggcgccggccaccggggacgccgcccgcttccgcccttctccctcgcccgcttcctcctcgccgccatccgctcccgcccttctcccgagcccgcttcctcccacgcgtgagagaagagaggcagagcgtgggacagagagggaggggaaaggctcgccggtgcgcgcgatttcttgcgacgaggcggcaccgtcaacctcaccgttttgtgggaggcgaggaggcgcgcgagcgtggcaggagaggaggaggcggtcgcgccgaggaggggaggcaaaaggctcgcgcgagtagtaggcgagggtagttgagagaaataattgtgtggtaacgcgtctggggtcacgcccactgtgggcttggtaccctttactagtgcctccattcaattaaaccacacaactagatgtgcttgcactatggaaatgggtgtctctgggccaattttttaggtgangggtacaggccccatggcttgcnctgtganaagcctnaaaaacaactctaatnattacagcccnctactaagctctaattcatttatatcccnatctaatanccnattccataccataaactgacctacnatactntnaatanntngtcccacngtgtnatacnncgcgggtctttctcggaagtccatgctgncgctggntacagatcaataccccgcngaatcttctctcnnaaccgtgtagnncactccaaatgnactttnaaagccttgct

SEQ ID NO: 33380 - DNA, 675 bp, Oryza sativa
  Clone ID: PAT_MRT4530_37498C.1
atggtgggaccagactctgagaaatggcttggagccatgaaatccgaaatagaatccatgcatgacaatcaagtttggaacttggttgatccacctgatggtgtaaaagccattgagtgcaaatgggtctttaagaaaaagacagacgtagatggaaatcttcacatctacaaggcacgattggtggtgaaaggtttcaaacaaattcaaggcataaagatctatagagatagatcaaagaggctaattggattaagccagagtacatacattgacaaggtgttgaagaggttcaacatgcaagattctaagaaaggtgagagttactggatagctgtaaagaatatcctgaagtacttgagaagaactaaggatatgttcatattctatggaggacaggaagagctcgttgtaaatggttacaccgacgcaagcttccaaacagacaaagatgattttagatcgcagtctggatttgtgttctggctaaatggaggtgctaaaattgagcgctcgccggtgatatcacaactacgcaaccgtggcacagagcaggcaaagtcatggatcggaggcacggtggatgctcctctcaccctccgccacaactccaacggtgcgcgcggcgtgatggcaatgccggcgaaagaggggatggcgacggcggcgaaatag

SEQ ID NO: 33381 - DNA, 441 bp, Oryza sativa
  Clone ID: PAT_MRT4530_37499C.1
gttcgttaataagcatcgatcgaaggcgaggccagccagccagccggggcgccgggggagctggggaagatggtgcaggggacgctcgaggtgctgctcgtcggagccaagggcctcgagaacaccgactacctgtgcaacatggacccgtacgcggttctcaaatgccgctcgcaggagcagaagagcagcgttgcgtcaggtatgttccaataccctttctcatatactcctacaatgcagaagaaaaatgttttgccttttgtgatcatagtctagggaaggttgtcaggatggtagctttgttcagataatctttctgccaaccaaaagattaaaacttcagatgctcttgtaacagtgctcatacagattgtttatcatagtgcatgagccattttttgaggaacgacgtgctattatatggttggaactttgagc

SEQ ID NO: 33382 - DNA, 846 bp, Oryza sativa
  Clone ID: PAT_MRT4530_3749C.1
atgggttatctaggcccggtaagactcgatggcagtctcactacagaaccattgtcaatattattgcaatgtatcctgggaatccatgatgtacttataaaccttggcaaagatacttcacaaaggactgaatggccaaaaatacatgctatagttggagtttttgagtcatttgattttattttcagtgctaacttgatgcttgtcattcttggatacacaaatgatttgtctgggcgtttgcaaagaagagaacaagatattcataatgaacgacatttgtccatttggcgaagagtagaattatgtcgacttgctgaattcttctaccctaatgatatttcaagttctgaattattaagacttgaaatacaacttgagaattatattgatggaatgagaaaagacaatggtttcaaaggcataaacaatcttggtgatctctcagacaagcttcgtcaaacaaaaaagcatatcgtttatgatttgatctacgtgcttcctaaattggtattgattctaccggttgtgacaagtgttgaaagagcattttcttctatgaatttcccatggcccaactcgctaatgttgcatgcgctttggatcggctacccttgcgatacactcaccccgccactcgccgaacgcgccccatttattatgtatttatgtctacatggaaatgcaaatcatcttataaaggaaaagtcaagcacatactggcatacctcgatgacatccctgcataactgggacgagaccttcttcagatttcaaaggctctcaaagggtccttggggtcgatatcatcgaacagaggaagatcaggctgaaaccaatgctttc

SEQ ID NO: 33383 - DNA, 679 bp, Oryza sativa
  unsure (1)..(679): unsure at all n locations
  Clone ID: PAT_MRT4530_374C.1
ctatttgtcaacgactccgctgctctccagtctccattcctcaatctgctccttgctcctcggcgtctccatcttcgccgcgatgccgttgcgacaacggacagtatatggcctcatgagcgaggagaagtctgcgatgcgctccctatcctccacctcctgcaatccctcctgctccttgggccgttggcgggtggttcgccgcggcgtcatagccacgacgcgcaggtggcagaggatccggcgcgacgccaccactcacccgtgcacgccgcctcctctcctctgctagctagcgccccctcccttctcctgatccggcctccgggtcgacggccaccactgccgctcttctcttcattgggctcaacggatcttgccgaagtttgtatcggcgacgactatcgcgtgcttgtggtgactcctgcagcatgacgacagccccgcgcgtcaaggaaggacagcancatggcggtggggagcgcanggganggcnangtggccgggcggtggtgancaanacagcccgcgccttgangggangacatgagcgggtggtccgctgcagcgccgggtngcggaagatccggtgggccgcnagcctgcatcngganganggatgggtggattagggtcaattccttttgcaaaanaantcaaacttcnttngntcntcntn

SEQ ID NO: 33384 - DNA, 2559 bp, Oryza sativa
  Clone ID: PAT_MRT4530_37500C.1
atggtggcgctggcgcggatgacggtgatcatggcagctcctgcaccatccagttttaacttgcggtctattcttgagaaagagaagttgactggaacaaacttcatggattggtatcgcaacctgagaattgttctcaggcaagagtataaagagtttgtgcttacagagccttttccagctaacttgcccaacaatgctcctgctgctcaacgtagggagcatgaaaagcgatgcaatgattatattgatataagttgtcccatgcttgctactatgtcccctgagcttcaaaggcaatatgaggcattgaatgctcatacgataatcacgagactacgtaacatgattgaggaccaagcaagagctgagaggtttaatacctcaaagtccttgtttgcgtgcaggcttgcagaaggtaatccatcgctccctcccagctttgagccgttcataatgaatttcaacatgaacaacctgaataggaccttcgcagaattgcatgggatgctaaagactgccgaggaaagcattaagaaaaactccaaccatgtgatggggctgcaaagaagtaggagcttagcaagaggcgaagtggacattcgcgtgggtaatggagcaagagttgctgctgttgcggaaagatccggttacttaatgaggcataagtctgagtcctttgaaaagtttaaggaattacataatgaggtacaaaatcatttgggcaagacaatcaattatctacgatctgatcgtggtggagagtacttgagccttgaatttggtaatcatctaaaggagtgtggaattgttccacaactcactccgccaggaacgcctcagtggaatggggcgtctgaatggaggaatcgtacattgttggacatggtctatgtaaaacgtttgcaatcggacaaactcacacctaaatcagataaatgcttcttagtggggtatcctaaggaaacgaaaggatattatttttataatcgggaagagggcaaagtgtttgtcgcccgacactgtgttttcttggaaaaagagtttatttcaagaaaggatagtgggagtatggtgcgacttgaagaaattcaggaaacaccggaaaacatttcaacgtcaacacaaccacaacaagctgagcaagatgttgttcaacaggttgaacaagttgttgttgagccagttgtggaagcaccagcttcacgaaggttcgaaaggatatggcgtacacatgcgaggtatgcgttgttaactataggacaacgtgatatattgttgttagacaacgatgaacctactacctatgaggaagcaatggtgggaccagactttgagaaatggcttggagccatgaaatccgaaatagaatccatgcatgtcaatcaagtttggaacttggttgatccacctgatggtgtaaaagccattgagtgcaaatgggtctttaagaaaaagacagatgtagatggaaatgttcacatctacaaggcacgattggtggcgaaaggtttcaaacaaattcaaggtgttgattatgatgaaactttctcaccagtcgccatgctaaaatctattcggattgttttagcaattgctgcctatttcgattatgagatatggcaaatggatgtcaaaataactttcctcaatggaaatctcaataaggatgtgtacatgacacaacccaagggatttgttgatccacaatcagctaaaaagatatgcaaattgcagaaatccatttatgggttgaagcaagcatctcggagttggaatattcattttgacgaagtagtcaaggcgttgggctttgtcaaaaacgaagaagagccttgtgtatacaagaagattagtgggagcgcactggtgtttctaatcctatatgtagatgacatattattgattgggaatgatattcctatgcttgaatccattaagacatcattgaaaaatagtttttcaatgaaggacttaggggaagcagcatatattctgggcataaggatctatagagatagatcaaagaggctaattggattaagccagagtacatacattgacaaggtgttgaagaggttcaacatgcaagattctaatatggtccggagagcctacgacaattttagatcgcagtctggatttgtgttctacctaaatggaggcgctgtgagttggaagagttccaagcaagatacagtggctgattctacaacagaagccgaatacattgccgcttctgaagtagcaaatgaggctgtttgggtaaagaaatttgtttctcaactaggtgtgatgactagtgcttctagccctatggacctctattgcgataatagtggtgccattgcgcaagccaaggagcctagatcgcatcaaaagtccaaacacattttacggcggtatcacctcattcgcaagatagtgggtagaggagatgtgaagatatgcaaaatatatacggatttgaatgttgcagatccgttgacaaagccactccctcagcctgagcatgaggcacacactagggcaatgggtataagatacgttcatgattga

SEQ ID NO: 33385 - DNA, 432 bp, Oryza sativa
  Clone ID: PAT_MRT4530_37501C.1
accaaatataaaggtcgacccatttaatataggagtattactccaaggtacacatattacaaattgccaacactttccaggagaaaaattatcgcatgcttccgtaatattagtccatagcaagtagtacaacttgatcgctgatcacatacagttagtgcatcacgtgtccactacaatcattttttccactggtgcaaacctcaaactacaacctttccagaattttctttgtttccaacaataagttgacaagctagccttcatgcatacagctttttatcatatatccggagctcaaataattctcttttataaatcttctaattgccaaaacatattttcccttctttacttgaaaaggaggttccgttaagtgaaccaaattgagtaccatatgcctcgtagagctcgatcttgttctccaccatg

SEQ ID NO: 33386 - DNA, 420 bp, Oryza sativa
  unsure (1)..(420): unsure at all n locations
  Clone ID: PAT_MRT4530_37502C.1
acaaagtggtntggccccaaacaaaagctccaaggtctggttagcgcgctatacaaatgctgcaactgacccaagggcacaatgtgagtgagcagtgtgcaagcgcgtattgtgcaagcaaactgactagtctggcagcagggtcaggttcgtttgtctactttttgatgcagactgcaagctgcaagctgcaagctgttggctggcgcacttgaaacttggccaatgcacaatgatggtgggtgatgctgtatgcctgaactgactgacatgtggctgccgaggacgcaattgccacaccgttgggtggtgtgctggtgtactggaattggtgaatagtataatggttcaaatgttaaaaataaagtcatgcatcatcatgcgtgacagttgaaacttgaaaaaaaaaaaaaaaaaaaa

SEQ ID NO: 33387 - DNA, 465 bp, Oryza sativa
  Clone ID: PAT_MRT4530_37503C.1
ggttatagttgcctacttgcctgacatttgtgtccaacttcaagctcatggaaatagctgttgataatgagattgaccctgaaaatgcatggagatgggatattgggatcgcatttcaatattgactcagtacttaccttttgatctgatggtcctttgaactacatggtcctttgaactaccaagctggggtaaatgctacactctgctctgaaactttagatgtaccaatcaaacatacagcaatcatgtgtttttgcataagaccttattcttatgtgttccttcccttcaagtcctgctatatgataatttagtgtataatgctgagtccagcatgttttgcttatatatggcaattgttgtttctacccaactaacgaagctctaattaagattgatatcatctcttttcttcgatgttggtatttagcactatctatattctgtagtagtcatcatgat

SEQ ID NO: 33388 - DNA, 171 bp, Oryza sativa
  Clone ID: PAT_MRT4530_37504C.1
cggaattccggggtgaacccccctcccgggcggctcgcgcggcggtagaggccagcccgactgccagagcctctagctacgactattggcgtgcgtatggcgcgctgtgtgtccctgctcgcggtcggggccgtggccctgcgcgcggtcctgcttcttgccccgccggcg

SEQ ID NO: 33389 - DNA, 5272 bp, Oryza sativa
  Clone ID: PAT_MRT4530_37505C.1
atgcgccgatccaacgatggccgccccttccgcccgccggactggggcccgccgccgcaccgctaccaccaccaccaccagaaccagtaccagtaccagcagcggtatcgccccgcgcagccggggccgcggcagttcgccgtgatcctcctccgcggggggagcaacctctcggcgccgccggccacggaggtcgaggcactcgtcgccggcctgccctcccctcccccggacagcctgagcgtctcctcgtcgggccgccaggccgcgcgcctcgcgttccgctccccgcaggccgccgccgccgccgcgcgcgagctctggtcgctccgcctcgagggcctccacctcctcaccccggacgtctccgatcccgccctcgccgcgcacgccgcccccctcatcgcctccctcttcgccgcccacgccgcccgcctcgtcgactccgacctcgtctccctcacggccgcccgctcctccgagctcgcggcctccatccaggcggtgaagcgccgcctggcggggcacaatcgcatccgcgacttcgagcagctccaggcccagaagagaactctcaaggctgagaaggagttggtagatgctaaaatcgatgagtacaaagccgcgatgagatcgatacggcgtgcattgttgcgtgggacggaggatgacgaggaggcagaggaggaagggttggaggtgtttgggattgggggaggtggtgagatgaatttcgctaggctgcacatgataatgctgcgggaatgtagaaggcttaaggaggggctacccatctatgcttaccgcaggaacattctagatcacattttcgctaaccaggtgatgattttgattggggaaactggttctgggaagagcacacaattggttcagtatcttgctgactcaggtcttgctgctaatggttcaattgtctgtactcaaccccgaaaaattgctgctatatcattggcacatagagtagttgaagaaagcaatggttgctacggggacaactttgtgttgaattcaacctttttagatcatcaagatttcagttcaaagattatatataccacagacaactgccttttgcatcactgtatgaatgatatgggactagatggcatttcatatattattgttgatgaagcgcatgaacgaagcttgaacaccgatcttctcttagctttgattaagaagaaactgcttgataggctggatttgagacttatcataatgtctgctactgccgatgctaatagactcgctgaatatttttatggatgccaaacattttatgttaaagggcgaagttttcctgttgaaattaaatatgtccctgatatatcagaagaggcttccttcaataccgtgccaaaccatctgcgcggttcttgtgctactgcttcatatgtttacgatgttgtgaaaatggtaagcatcattcacaagaatgaagaagagggtgctatccttgctttcttgacttctcaactcgaagttgaatgggcatgtgaaaacttcagcgatgcagatgctgtggtacttccgatgcatggaaagctttcccatgtagagcaaagtctagttttcaagagctatcctgggaagagaaaaataatcttctgcacaaatattgctgaaacatcattgaccataaaagaagtgaagtatgttgttgattctggactggctaaggagagcagatttgtgcctagcagtggtctcaatgtactgaaagttaattggatctcccaaagttctgctaatcagcgtgctggccgagcaggtcgaactggagcggggaggtgttacaggctttactctgaatctgacttcagtatgatggaagtgcatcaagaacctgaaatccgcaaagttcatcttggcactgctgttctgagaatacttgcgctgggtattagggatgcacagaattttgaatttgttgatgccccaaacccagaagctattaatatggctgtaaagaatcttgaacaactgggtgctgtaaaatataaatgtgatggttttgagctgactgatactggtcgctacctagttaaattgggaatcgagccgaggcttgggaaaatcatgcttgattgctttggttttggtttgaggaaggaaggtgtagttctagctgctgttatggcaaattctagcagcatattttgtagagtgggcacagatgaggagaaatacaaagctgaccgtctaaaggtcccattctgtcatcaggatggagatctgttcactttactagctgtatataaagagtgggaggatgagcatgaaaacaggaatacgtggtgctggcagaatagcatcaatgccaagaccatgaggaggtgccaggaaacaatatcagaccttgagaattgtttaagacacgagctgaacatcattgtcccaagttactggtgttggaaccctgaggagtccaccgtgcatgataagttgctaaaaagaattattctcacatctctttctggtaatattgctatgttttctggacatgaaaggtttggttaccaggtgatttcaacggatcaggctgtgaaactacatccctcttgctcattgctcatttatgatagcaagcctgagtgggtggtgttcacagaaatcttgtcagtaccaaatcaatatttggtatgtgtaactgctattgatcctgatgctttgtgttcgattcaccccatgcctttgattcagcaactggagaagcttaaattgcaggtgaaggtaataagtggacttggatataacttgctgagaaaattttgtggaaaatctggccaaaatcagcagaagataatctcacttctccaagaagaattcagggatgaccgtgtgactgttgaagttgacttcagaaataaagaggttgtgctatttgccaaagaacaagacatagaaaaggtgtttggcatcgttaatgatgcattggagtgtgaagctcggatgttgaggaatgaatgccttgagaaaagtttgttttctggaaaacctggtgattgttctcttgccctatttggttctggtgctgaaataaagcatttggaacttgagaagaggtatctgaccgtagaggttttgcatcaaaatgctcatgagttgaatgacaaggagcttatttgcttggtggatactcttatctctggtgttgctaatttttataaactttatggaaatcttcaggtggcctcagatgaaacgaagtgggggaagtttacattcctcaatcctgaatatgctgaagatgctgtttcaaaattgaatgggatggaatttcatggttctccattgaaagtggttccagtatgctcttccagtaatcgaggattaccatttccagcagtgagagctaaagtatcttggccacttaagcaaagtcggggactcgcgctggtaacatgtgccagtggggaagctgaatttgttgtaaaggactgctttgctctgggagttggtggaaggtatatcaactgtgaggttagtacaagacatgagaattgcatttttgtcagaggaattccaatgcatgtaacagagccagaattgtatgatgcctttcgtagcacgacaacaaggaaaatcgttgatgtgcatttgctcaggggaacacccatagctgccccttctgcttccttgtgtgcagaagcactaaatagagaaatttcttccttcatgccaaagaaaatttttcctgcccaaaatttccgtgttgaggtgttaactccagaggagaatgattcggtgatgagagccactattacttttgatggaagtcttcatcgagaggctgcaagagcattggaacatcttcaaggaagtgttcttccatgctgtcttccttggcagacaatacaatgccagcatgtgtttcatagtactgtgtcctgtcaagtacgcgtgtataatgttatcagccaagcagttgcttctcttcttgagagcttccgaagccaaaaaggcgtgtcttacaatttggaaaagaatgaatatggtatattccgtgtcaagcttactgcaaacgccacaaaaacaatagcagacttgagaaggcctcttgagattttaatgaaaggcaaaacaataaaccatcctgatctgacactaagtacagttcagttgctcatgtcccgtgatggtgtagcagatttgaaatctgttgagcaagagactggcacttacattctgtatgacagacaaagtctaaatattaaagtctttggactccaagatcaggttgctgcagcagaggagaaattgatccatgcccttctacaactccgtgataagaaacctttggatattcgtcttcgtggccgtaacctacctccaaacttgatgaaggaaatgttaaaaaagttcggggctgatctggaaggattgaagagagaggtgcctgcagtagagcttcgattaaatttacgacaacatacactttacgttcgaggcagtaaagaagacaagcaaagggtggaagaaatgatctctgagctggtaaattctacaaagtacaatggcctgcttcaacttccattagagaatgcatgccctatttgcctgtgtgaggtagaagatccctttaagcttgaatcttgtgggcatgtgttttgtctgacttgcttggtggatcagtgtgaatctgctttgaaatcacatgatggtttccctctgtgttgcctcaaaaatgggtgcaagaagcagctccttgttgttgatttgagatctctcctatcgagcgagaaactggaagagctatttagagcctccttgagagcatttgttgcttctaatgcaggaaaatatcgtttctgtcctactcctgattgcccatccatttaccaagtggctgctgcagatgctgaaagcaaaccttttgtctgtggggcttgctttgtggagatctgcaacaagtgtcatcttgaatatcatcctttcatatcctgtgaggcatacaaagaatacaaggaagaccctgatgcaactctgcttgaatggcgcaaggggaaggagaatgtgaaggtatgcccttctttccactttacaatcgagaaagctgatggttgcaaccatgtcgagtgtaaatgtggcagtcacatttgttgggcatgcttggagaacttcaggagcagtgatgattgttatagccatctcaggtctgtgcacctatcctattaacatatcatgtaaatttgtataaattggtacaaataattatgtgtataatataggcagctgatccattaccact

SEQ ID NO: 33390 - DNA, 1483 bp, Oryza sativa
  Clone ID: PAT_MRT4530_37506C.1
atcaagcaaagcagctcgatcgagtgttcgactgatcaccagttggagctaatcgatcgagagagagagtatgacggtggaagtggaggcggtgaccatggcgaaggaggagcagccggaggaggaggaggtgatcgagaagttggttgagaagatcaccgggctggcggcggccatcggcaagctgccgtcgctgagcccgtcgccggaggtgaacgcgctgttcacggagctggtgatgacctgcatcccgcccagcagcgtggacgtggagcagctgggggcggaggcgcaggacatgcgcggccgcctcatccgcctctgcgccgacgccgagggccacctcgaggcgcactactccgacgtcctcgccgcccacgacaacccgctcgaccacctcgccctcttcccctacttcaacaactacatccagctcgcccagctcgagtacgccctcctcgcccgccacctccccgccgccccgccgccctcccgcctcgccttcctcggctccggcccgctcccgctcagctccctcgtcctcgccgcccgccacctccccgccgcctccttccacaactacgacatctgcgccgacgccaaccgccgcgccagccgcctcgtccgcgccgaccgcgacctgtccgcgcgcatggccttccacacctccgacgtcgcccacgtcaccaccgacctcgccgcctacgacgtcgtgttcctggcggcgctggtgggtatggccgccgaggagaaggcgcgcatggtggagcacctcgggaagcacatggcgcccggcgccgccctggtggtgcggagcgcgcacggcgcccggggattcctgtaccccgtggtggacccggaggagatccgccgcggcggcttcgacgtgctcgccgtgcaccacccggagggcgaggtgatcaactccgtcatcatcgcgcgcaagccgcccgtggccggcgccggcgttggagggaggagacgcgcacgcgcacggccatggcgccgtggtgagccgtccatgccagcgctgcgagatggaggcgagggcgcaccagaagatggaggacatgtccgccatggagaagctgccctcctcgtaggcaggcatcgatgactgcttccatcgcttgctacctcaccagctcacctgataaatcacctcagttactatcgattaatcatttaccatgcattaattaagaagaaaacatatataccataattatctaccagtaaaacaaatctaatagtagtatttaataatctcgttggtaattaactgcagtcatgcatgaatgcatgccatattgcgtcgctatctttttttcccatgatgagactgatgagagagagagagaatatatgtcgctattgagtgttactgcttgattactgtactagtagcttattacaatcaaccattgtctctgttgcgtatttaaaaaaaaaaaaaaaaaaaaaaaaaaaaaaaaaaaaaaaa

SEQ ID NO: 33391 - DNA, 282 bp, Oryza sativa
  Clone ID: PAT_MRT4530_37507C.1
accgtgatcctgtcagaggcattttctgataccagtagcgtgggtaaacttttagccactaaaagactggatgatcatgacatcagaagcgccgaatcattggtactatgccattattggttagcctggttcgtgatggctacagcatacatgatgcagacatcctgcacatggagctcagcctgcatggtggtatgcagatcttggacgagaccgtcagaggcaagatcattaccctggaggttgagagctcggacaccatcgacaacgtcaaggccaaga

SEQ ID NO: 33392 - DNA, 336 bp, Oryza sativa
  Clone ID: PAT_MRT4530_37508C.1
atgacgtcatcgccggtggcggctcggcacctcgtgctcgccggcaatcgatggcgcggcgacgcaaacggagggcaccaacggcgatcttcggcggaaacggaggggtggacgaggtgctgctcctcctcgcgatcccgacggtggcgacgacgaccgaaggtggtggctggaccaacggcgcggcgtggctggaccaacggcagcggtggagagcttcggggcgacggagtcggcggcgctccgatgatctgcggcggaaacggaggacgggacaaggacggcggcgaccttgcgaacctggcgacggccttcccgagtgacggcggcgactag

SEQ ID NO: 33393 - DNA, 520 bp, Oryza sativa
  Clone ID: PAT_MRT4530_37509C.1
gggactaattgtatcaatcccaaagagacagatacaacaattaaatgagaaccactattttgattacaagaaatacaaaggagacctacaccacaatctgcactgggtgtagtcgtgtaagctgatcaaatcaatctaaaatcaagggatctgaaaatcatataatatctaaagttacagatgtaagttcgactaccacagcaatccttgtggatccaactactaacacaaaatccatgttttagccctgaaataccaaaattaaacagtttattctcaacgtccaagacatggggtgcttatattacaagacttgcttaagcaagcatgcattccagtgaaaaacttagatactagataacaagccaacaaatcattggttccaaaagttatctttttaccaccaatatggcaatagatgtatggaatgccaccaaactctaacaggacatcggcatggcaaattttagcaaccatccaaataagaccaaattcaaggggtagtatcaaacaattgaaa

SEQ ID NO: 33394 - DNA, 1270 bp, Oryza sativa
  Clone ID: PAT_MRT4530_3750C.1
gagggaggcgtgggaggagtccaagaagctgtgggagatcgtcggcccggccgtgttcctgcggctggtgctgtacagcttcaacatcatcagccaggccttcgccggccacatcggcgacctcgagctcgccgccttctccatcgccaacaacgtcatcaccggcctcaactttggcttcctgctgggcatggctagtgcactggaaacactctgcggccaggcctacggcgcaaagcagtgctccatgcttggcatctacctacaacgttcttggatcatcctcttcgtcttcgccgtgctcctcgtcccgacctacgtcttcaccgccccgctgctcgaggcgctgggccagcccgccgcgctggcgcgcaaggccggcatggtcagcgtgtacatgctcccgtcgcacttccagtacgccgtcctcctgccgctcaacaagttcctgcagagccagcgcaagaactgggtcaccgtggtgaccgcggcggcggcgttcccggtgcacatcgcggtgagctggctgctggtcagccgcctccggttcggggtgctcggcgccgccatgtcgctcggtgtctccggctggctcgtcacgctgctgcagctcgcctacgtcgtcggcggcgggtgcccggtgacgtggagtgggttctccccgttggcgttcgtggatttgtggggttttgtcaagctgtccgtctcgtctggagttatggtatgtttggagacttggtactacaagatactgatcctgctcacaggacacctgaagaattctgaacttgcagtgaatgctctttctatctgtatgagttttcaatcttgggagatgatgattccagtgggattcttagccggcaccggggtgcgagtggctaacgagcttggcgcgggcaacgggaagggagcaaagttcgcgacgatcgtgtcgacgacgacctccaatgcggtgatcgacgccgtggacaacatctcctttctgctagccgtcaccatcctcctcaacggcgtccaacctgttctttcaggggttgctattggttcagggtggcaagcggcagtggcctatgtaaacatcggatgctactacttcatcggagttcctatcggtgttctgcttggttggagtttcaaccttggagtttttggaatttgggctggaatgatcgctggcactgcaatccagactataattctggcgcacatgaccattcagtgtgattggaacaaagaggtgggtcgatttcaagcctatttgttaact

SEQ ID NO: 33395 - DNA, 1482 bp, Oryza sativa
  Clone ID: PAT_MRT4530_37510C.1
tttccatattctaagttgacgctcagatggtctaaaagtttgccaaaagttaatgctgctcgtcagctgtcacgcccagaaattaactagcaatttccgaatttatttgtgcattaaatcctcgtccaggaatcagccgaggcccaaccatcctgaacaaccatacccggctgcacagatctatctccaaaccaggaatgtaccattccaaaccaggagctaaattaattaccatcaattaccacattattattaatgtcttcttgaacacttccggcgcactcgagaaccttcgaaacgacggaaacgacaagctaacacgcaaaacgaggaaaaagactaataaaaaccaaataaacaatacataagaagtaaacaaacatgtagataataatgaattatgacgcaataatgaattatttttgaaaagcaaaagggatttattgcgtcatcaaagatggtccacggtagaccgggtgcatagaggcggtctacgaaaccaacggccgagatctaatctaaacaaaatggacggccaagatcgatctaatccaccacgggtctacggctgacgtcgacgatgacgtcatcgccggtggcggctcggcacctcgtgctcgccggcaatcgatggcgcggcgacgcaaacggagggcaccaacgggtagagggcgacgcggcgaactcaccgagctcttggatgacggcaaacgacgacggatgacgacggcggcgaggtcgaagcggcggcgatgattgggtcaacgacgacggcggtgttccagcgatcttcggcggaaacggaggggtggacgaggtgctgctcctcctcgcgatcccgacggtggcgacgacgaccgaaggtggtggctggaccaacggcgcggcgtggctggaccaacggcagcggtggagagcttcggggcgacggagtcggcggcgctccgatgatctgcggcggaaacggaggacgggacaaggacggcggcgaccttgcgaacctggcgacggccttcccgaagcttttccctaaccttagccgcctgcccgcgctcgtctcctcgctccgccgccggccgccgctccagtcggtcgtagccgtcgactccgacatctccggtcagcgccgtcgcctccaatgggaccaaagcgaagagtggaagaccggccaccatctgcccgaagccgaagaccccgggaagcccttcgtcgccgttaaggccgacttcgtcgccacctccgttgggttcgaaaggaggagctgcaccccggccacccctccgttgccgccgctcgttgtcggaaagccgccgtcgccgccgtcccgatctcatcgccgcctctacctcgccgccggccgtcttccgttgtcgttcgtcgtcgtgccgcccctcggtgagctcccgtcgtcgtgctctttcttccggtatcctcgatttgcgccgccgagccctagatcgccggcgatcgttggaagcccct

SEQ ID NO: 33396 - DNA, 578 bp, Oryza sativa
  unsure (1)..(578): unsure at all n locations
  Clone ID: PAT_MRT4530_37511C.1
ctagagccgccgccgtcgcaacctgccttctcctctgctcgctctgtctctgtctccgtctccgagccaccagncgcccccgagatggtcccgaagaaggacaaggccaccgccgccgccatccaagccgagcaagtccgtcggtggccgcagaacgaagaacaatttgttcaagggaaagcaaaaggagaacgcgaacaatttgatgctgatcgatcaggccactctacgacaaagctgctttccgaggttgccaaatgcaagcagagtaccccctccgttctctctgatagactacagattaacgactcccttggttcgtgagccactaatgaaatgatagagaccgaggctaattcgcatggactcgactgactcaagccattggaacttcacgcatggcaaccaacacctaagtgtgatggagacatgccaatttgtttgccctgaatgcaaactgcgggcttgtctactctaaaacaactgttacctatgttgaggaagctactgatacgttacaagagctacttgtcttggataggctatctatatgtgttaaacattccacagaaattggt

SEQ ID NO: 33397 - DNA, 261 bp, Oryza sativa
  Clone ID: PAT_MRT4530_37512C.1
tagtggatccccgggctgcaggacaataacattttttttcctttaattcacctgttgtcactgattgctgtgtatcctgtttgtcttactgcatacgttgcttggaattaactttttttttagataatggtgttgcttggaattaactgttgtccaattcaatacctctatactactatgagatatcatagcatctgttgtgtgtttttaagcaggagttcacaacctatatgaactgcagttaacagatctcggagagat

SEQ ID NO: 33398 - DNA, 872 bp, Oryza sativa
  Clone ID: PAT_MRT4530_37513C.1
ccgggctgcaggaatcggcacgagggtgactgtcacccagctcagtcaaagccagccagccagccacctctgcatcatcccgcgcatgtctgcctgcgacgcgccggccagggcggccgccgcctcgtctgctccgccggtccaggttgggtccccctcttgacgaggggcgggagggagggagcgaatctgaggtggtggctatggggtcgccgggggcggggagcagcggcggcggtggaggtgggcatgagtgcagcttcaagatcctgctcatcggggactccggcgtcggcaagagcagcctcctcgtcagcttcgtcgtcgccgccgccgccgcccacctcgacgacgacatcgctcccaccatcggagtggattttaagatcaagttccttacgattggtggaaagaaattgaagctgacaatatgggatactgctggccaggagaggtttaggacaattactagttcttactacagaggtgctcaaggcattattctagtatatgacgtcacgaagagagaaagcttcacaaatctggctgaagtatggagtaaggaaatagagtcacactcatcaaacaaagactgcataaaaatgcttgttggaaacaaaattgacaaggaggatgaaagaactgtcacaagagaagaagggcttgcctttgcagaagaatctggatgcctatttcttgagagtagcgcgaaaacacgagataatgttgagaagtgttttgaagaactcgcactaaagattatggatgtccctagcctcttggaggaaggctcctcttcggttgtcaaaaggaacattctgaagcagaagcaagaaagtcaagcaaagcatggtggcggatgctgtcaatag

SEQ ID NO: 33399 - DNA, 179 bp, Oryza sativa
  Clone ID: PAT_MRT4530_37514C.1
cataataacattgaaattcatcattgattccccatatatatataggcttcctgacaaaagaaaccacatgcgatccagctacccctctgaggcatacacacagctttctgcagtagcctagtaaccaccccttgctgtcctaagataacatacccagccaaagacacacaccttccgat

SEQ ID NO: 33400 - DNA, 429 bp, Oryza sativa
  Clone ID: PAT_MRT4530_37515C.1
atggaggaggaggaggaggaagacgcgtctccccgctcggctcaggttggcggcggaaggggggcggcgcggtgtatatatatagaggcgaacatggccagtgacaggtggggcccaccccgcctcggcgtcgacggcggctggcctgaaatggtaacaatggagaaacccccactcccgctcgccgctcgcggcagcggcttcccttcttccttcccacactgctgctctgctgctgcgttggcgcgggggacggaggtcggacggactcggcgacggcggcggccgcgcgctccgatcccctcccgctcgacggcggcggcggggaggcgcgcggcgcgcctccgggtttggttcgaagtggagatggggaccgggcgattccaaaagggggaagatgcgcacattgactgtacaggacaagactga

SEQ ID NO: 33401 - DNA, 1875 bp, Oryza sativa
  Clone ID: PAT_MRT4530_37516C.1
cacacccaagccgctgtcacaagcaaggcatccacacacacacagagaggtagagagggcgagatgaaggtggaggtggtggagacgacgctggtggcgccgagcgaggcgacgccgcagcacgcgctgtggctctccaacctcgacctcgccgtgcccaagacgcacaccccgctggtctactactaccccgcgccctcgccgccgccggcggatgcggggccggaggcggaggcggaggggttcttcgcaccggagaggctgcgggaggcgctggcgagggcgctggtgccgttctacccgctggcggggcggctggcggcggggcccggcggccggctcgagatcgactgcaacggcgagggggcgctgttcgtcgtcgccagggccgacttcaccggcgacgagatgttcaccgacttcgagccctcccccgaggcccgccgcctcctcgtccccttcgccgcctccggcgagcccccctgcgtcctcgccatggtccaggtgacgttcctgaagtgtggaggcgtggccgtcggcacgggcatgcaccatgtcacgatggacggcgcgggcgcgttccagttcatccggacgtggacggggctgtcgcgtgggctcgacgccgcggccgcgtcgccgtcgccgccgtcgcacgaccgcaccctcctccgggcgcgctcgccgccgcacgtcccgttcgagcacccggtgtactccccgagctacctcaacgggctgccgcggccgttcgtgacccgcgtctactccgtcccgcccaagctcctcgccgacatcaaggccgcctgcgcccccggcgtgtccacgtacggcgcggtgaccgcgcacctgtggcgcgccatgtgcgtcgcccgggggctcccccacgacgccgagtcgcggctgcgcgtcccggccaacatccggcagcgcgtccgcccgccgctcccgtcgccctacttcggcaacgccatcgtgcgcgacctcgtcacggtgcccgtccgcgacatcctgtcgcagccgctggggttcgtggcggagcggatcaagcacgcggtggcgcgcgtggacgacgcgttcgtccgctcggtgatcgacttcctggagctggagtccgagaaggggaaccaggcggcgcgcgggcagttcatgccggagacggacctgtgggtggtgagctggctcgggatgcccatctacgacgccgacttcgggtgggggcgcccggcgttcgtggcgccggcgcagatgttcggcagcggcacggcgtacgtgacgcaggcgccggacaaggacgacggcagcggcggcggcgtgtccgtgctgttcgcgctcgaaccggagtacatccagtgctttgagaaggccttctacggcacagagtgatatgatgcggcggcggcggcggtggccggagtttagagctggaggacatcgagcgacctgggatgcatgatgacgccgaggtggtgtcgacgtctgctgactctgtgtcatgctcaatacataacataatatgcgttatttgatttgcggtagaagtatttagtgtatgctggtactgtgcaacagtgcaagtgtaatgagctgctgccttgttggttgcagctctctctacacagacactttggtctgtcttaagttcgtatgtacaaaaaaaaaatcaaatggaaatgaaaatgactatggaagcaaagaaagttcgcaagcggttggttatttgtagaataagcgaaacggcatatctgtaaatgaaaaataatttgtgaacaaaactttatatacgtgttcttaacgatttaacttttataaaaaaaaaacaaaaaaaaaaaaaaaaaaaactcagactagtgctctctctcctcgtgccgaatt

SEQ ID NO: 33402 - DNA, 399 bp, Oryza sativa
  Clone ID: PAT_MRT4530_37517C.1
atgactttgtcggacgtgacgcttactgccccgcacttcgttcccgtggatttcgccacgtggccggagatcactcctttcatggacggggtgtgccaagttatcgcaccgtccgatggccttggcctcttcaccgagctgaacaaatttggcgaaagttgcacggccgtggagagcttgtttgtgcggggcctcgccgcgcacttgagtgcggaaaagtctgccttggagaggccggacgggtaccgtcttcgcctccgaaaaaccgaggaggatctttgccacaaggaagacgaaagacgtgttgtggcggagaccataaaaaaggcgaatgcggaaaacaaggctcttacaggagacaacaagtctctccgcgccgacctagaggcggcgaactag

SEQ ID NO: 33403 - DNA, 646 bp, Oryza sativa
  Clone ID: PAT_MRT4530_37518C.1
cctgtcgccaccctcgccttcgtctctcgtcgccggtagagctctagcgccgtgtagcctagcgccgccgtcgcgccgttcgtccagccgtgcgccgccgtcgctctggttgtcatcaccgctcggggaggtcatcgacgtggtcgccaagccgtcgccgatctcgtccgcctctccgtcgtcgccgaggatcgccggaagaccgccgtcgtcgtcaacccgaccgtcgccgccgcttcttcctcgacgccgtcgccgtccgttgatcttccgccgccgttttggtcaccggtgagttcgccgcgatgtccgcaacccgttggtgccctccgtttgcgccgccgtgccgtcgttcgccggcgagcttgcgcgcccgagccgccgccggtgatgacgttatcgctgacgtcattgttgccgttcgccgtagaccggtcgtggactgatagatctcggccgttcgttttggatagggtagatcttggccgttcgtttccgtgagccgccgccgtgcacccggtccaccgtgaacccgagcctgctgacgcaataattcccttttactttctgtatagtatggttctttgtagagcaccagactgtgaagtggcggagataagcccacgggggtcgctggggagtccat

SEQ ID NO: 33404 - DNA, 1263 bp, Oryza sativa
  Clone ID: PAT_MRT4530_37519C.1
atgcccgaagacttgccgaagcggaagaagacccggggagagattttcttcggtccaacaaaaagtaccacgaggtactggtaccttagggtactgaatcgttttcgatcattggatctagttgggcagcgtcatcataacttgaacaaagatggagtcgataaggcatcttcaagcaatgatgatattggacacctattgacaccagcccaccaagccgcagggttttcattgttcgacttatttcggatagtggatgctacagataacttctcgctggaaaacaagatcggcgagggtgggtttggtcgtgtttacaagggacaactgaatggacttccagttgctgtcaagagatgcttcgtggaatcgagcccagagcgtctgtctgactttgaaaacgagattaaattcattcctaggctccaacatagaaacatcgtgacgctcaagggatactgcatcgaaggaaaagaaaggatcttggtttacgagtatatgcaaaacaaaagcctcgataaattcatatttggcccaagaaccgattggtctctctactgggataggttgtttgcgataattgaaggtatagctcaagggattgtgtaccttcacttgcactcggggctaaagattatccacagggaccttaagctcagcaatattctattggattctgaaatgaatcctaagatttctgattttggtacggcaagatccggttttccgaacaagggtcgcaggacagacactgtttcaggaacatacggttacatggctccggaatattcaaccagaggaatattttcgggtaaatcggatgtgttcagctttggcagcctgcttcttgagatcgtaagtggaaagcggaacggaacttggtactcgattagagaaaggaagtccataagtcttcacgaatatgcatggaggctggtgttcgaggagaagaacccggagaggctgatccggtcgtccctgcgcatcagcgtgggcggcgacgcgccacacctgatgggccagattgtgggctgcgcgcacatcgcgctgctgtgcgtccaggaggacccagaggaccgcccgtccatgtgggacgtcgtgctgatgctccacggtggcgtggcagcgctctcggcgctgccgacgccgaagcagccggcgcgccgctacggcggcggcagggagcagcgccccaagttccgggaggtcctggcaaatggccacgactgggacaagaaaacagtcaccgtcctcatgaggtga

SEQ ID NO: 33405 - DNA, 509 bp, Oryza sativa
  Clone ID: PAT_MRT4530_3751C.1
cggagacagttataatacgaatatgtattttggcagatcaaaaaaaaaaaaaaaaaaaaaaaaaaaaaaaaaagagataaaaaaaaaaaaaaaaaaaaaaaaaaaaaaaaaaaaaaaaaaaaaaaaaaaaaaaataaaaaaaaaaaaaaaaaagggggcggccgttttaggggttccaagttttcttccccgtgcttgcaacttaatattttttttatagggtcacctaaatcaaattaattggccgcttttttacaacgtctggtcgggaaaaaccctggctttccccaatttaatccctttgaagaaaatccccttttccccagttggggtaatagcaaaaaggccccccccgatcccctttccaaacagttgctcaacctgattggcaaatggaaccccccttttaccgtcctcattaagcccgggggttttgttggttacccccagtgttaccttttcatttgccatggcctaaccgcccgttcttttcctttatttcccttttt

SEQ ID NO: 33406 - DNA, 1688 bp, Oryza sativa
  Clone ID: PAT_MRT4530_37520C.1
ctcgaccataaatggagctctcgtcgtcgcttgctgccgtgttgcactcacctctcttcctcctcgccgcgctcctgctccttcccgtgttcaccttgctgagcttctcgtcggcgaagaagccaggcgatggcggcggctggcggctgccgcttcctccgtcgccgcggggcgtcccgtttctggggcacctaccgcttcttggctccttgccgcaccggaagctccggtcgatggccgaggcgcacgggccggtgatgctgctctggttcggccgcgtgcccaccgtcgtggcgtcgtcggcggcctcggcgcaggaggccatgagggcccgcgacgcggcgttcgcgagccgcgccagggtgcgcatggcggagcggctcatctatgggcgtgacatggtgttcgcgccatacggcgagttctggcgccaggcgcgccgcgtcagcgtgctccacctcctcagcccgcgccgcatcgcctccttccgcggcgtcagggagcaggaggtcgccgcgctcctcgaccgcgtccggcgccgctgcggcgttcgcggtggcggcgagaccgtgaacctgagcgacctgctcatgtcctacgccaacggcgtcatctcgcgcgccgcgttcggcgacggcgcgtatggcctcgacggcgacgagggcggcgagaagctgagggagctgttcgccaacttcgaggcgcttctcgggacggcgacggtgggggagttcgtgccgtggctggcgtgggtggacaagctgatgggcctcgacgccaaggcggcgcgcatatcggcggagctcgacggcttgctggagcgtgtcatcgcggaccaccgcgagcgccgccgcctcagccagccggacggcggcgacggcgacggcgacggcgatgagaacgttgatcaccgggacttcgtggacgtgctgctggacgtgagcgaggtggaggagggcgccggcgccggagaagtgctgctgttcgacactgtcgccatcaaggccattatcctggacatgatagcggccgccacagacaccaccttcacgaccttggaatgggccatggcggagctcatcaaccaccctcccgtcatgcgcaagctgcagtgcgagatccgcgcggccgtcggcgtccccggcgcctccggcggcgccgaagtcaccgaggaccacctcggcgagctccggctcctcagggccgtggtcaaggagacgctccggctgcacgcgccggtgccgctgctcgtgccccgcgagacggtggaggacacggagctgctgggctaccgcgtcccggcgcggacgcgggtgatcatcaacgtgtgggctatcggccgcgacgcggcggcgtggggcgaccgcgcggaggagttcgtgccggagcggtggctcgacggcggcggcgaggaggtggagtacgcggcgcagctggggcaggacttcaggttcgtgccgttcggcgccgggaggagggggtgccccggcgccgggttcgccgcgccgagcatcgagctggcgctcaccaacctgctgtaccacttcgactgggagctaccgccacatgccgacggagcggcggcggcgacggcggcgaggctggacatgggtgagctgtttgggctgtccatgcgaatgaagacgacgctgaatctagtcgcaaagccatggtcttccgatgtttga

SEQ ID NO: 33407 - DNA, 963 bp, Oryza sativa
  Clone ID: PAT_MRT4530_37521C.1
atgagctcgtcgacgtccgcccgcgacgacgaggcgccggacctcgtctgccagatcgactgcgtccacggcatggtcgacgcgctctcctgcgtccgctggaagcgccaccagatctgccccgatctgaggccgcatttccccctcccccgtggcgtgcaggacgcggtgctggagctgtcggagcacggcatcgtgctcatcgtcgaggagagtggctgcctccaggccaaggtctacctcaagcgtgagctgttcatggaatatgagtacgcggcagaggggcggccgcggtttggcctcagcctggggctcctcgtcgattgcctcaacacgttctcggccccggggcactcctctcctgtcgagatccgctaccctgggcctgatatgcagcttcttctcaagtcagtgggctccccagattcatgtatgtatgcagaaattagaaccaggattccagatacaatctcctgggattaccattttgagcatgctgggaatacaccagtcacttttactgtcaagtctgctgtcctgaaagaatcgatcgaggaccttgagtggccaggttccagcattcagattcaaatgcaaccagaccccccttcggtactattcaaaggtgaaggtcatggtgacttgcagattgagttcccctactatgcaaatacagatcttctcattgcattccaatgtgaccatgaaacatcatacaggtataagtacaaatttcttcgtgcaacaacttcgaatttcccaaacagtattgtgaaggagaatcgtgggagcaaggtgacaattggtaggggtgggatgcttaaaatccagcacctggtttcagttgcaaggccaggtatgcagaacttccgtaatgttgctggaggggctcaacagccaagccgaattgcttatatagagttctttgtaaagccagaggaatatgagataaatgatgcgtag

SEQ ID NO: 33408 - DNA, 1215 bp, Oryza sativa
  Clone ID: PAT_MRT4530_37522C.1
atggtgggacttgaagaaattcaggaaacaccggaaaatgtttcaaggtccacacaaccacaacaagctgagcaagatgttgctcaacaggttgaacaagttgttgttgaaccagttgtggaagcattggcttcacaaaggttcgaaaggatacggcgtacacctgcgaggtatgcgttgttaactacaggacaacatgatatattgttgttagacaacgatgaacctactacgtatgaggaaacaatggtgggaccagactctgagaaatggcttggagccatgaaatccgaaatagaatccatgcatgtcaatcaagtttggaacttggttgatccacctgatggtttcagacaaattcaaggtgttgattatgatgaaactttctcgccagtcactatgctaaaatctattcggattgttttagcgattgctgcctatttcgattatgagatatggcaaatggatgtcaaaacagctttcctcaacggaaatctcgatgaggatgtgtacatgacacaacctaagggatttgttgatccacaatcagctaaaaagatatgcaaattgcagaaatccatttatgggttgaagcaagcatctcggagttggaatattcgttttgacgaagtagtcaaggcgttgggctttgtcaaaaacgaagaagagccttgtgtatacaagaagattaataggagcgcactggtgtttctaatcctatatgtagatgacatattattgattgggaatgatattcctatgcttaaatccgttaagacatcgttgaaaaatagtttttcaatgaaggacttaggggaagcaacatatattctgggcataaggatctatagagatagatcaaagaggctaattggattaagccagagtacatacattaacaagatgttgaagaggttcaacatgcaagattctaagaaaggtttcttatcgatgtcacatggcattaatcttggcaagaatcagtgtcctcaaacgattgatgagcaaaacaagaagagtgtgattccatatgcctcggcaatcggatccattatgtatgctatgctatgtacacgtccagatgtttcatatgcacttagtgcaacaagccgataccaattagatccagatccgttgacaaagccactccctcagcctaagcatgaggcacacactagggcaatgggtataagatacgttcatgattggctctag

SEQ ID NO: 33409 - DNA, 351 bp, Oryza sativa
  Clone ID: PAT_MRT4530_37523C.1
atggcgatcgacgacgtcatgcgcacgcccgcgggggccggcctgatgtctccctacccttcttcttcccctcctctttattttcctcatcttctctctccactccctccacacggccgccgctcccccctttctccatgccaatactgccacgatctcggcaacggcgaccgtgaccacgaccacagcaacggcaacctcgacgccgcctccagagattgcgtggaggcggcggaagtcgcgcggccagccggatctagtggaggcggcgacaaggcgaggccgggtggtggacagagtggcgaggctggcagcggcgaggagtactgtagccgtcgtgccgaccgttag

SEQ ID NO: 33410 - DNA, 986 bp, Oryza sativa
  Clone ID: PAT_MRT4530_37524C.1
atgtcccctgagcttcaaaggcaatatgaggcattggatgctcatacgataatcacgggactacgtaacatgtttgaggaccaagcaagggctgagaggtttaatacctcaaagtccttgtttgcgtgcaggcttgcagaaggtaatccagtgagcccacatgtgatcaaaataattggttacaccgagagtctggataagcttggctttccccttagccaagagttggctactgatttgattctccagtcgctccctcccagttttgagccattcataatgaatttcaacatgaacaacctgaacaggaccttggcagaattgcatgggatgctaaagactgccgaggaaagcattaagaaaaactccaaccatgtgatggttatgcataagcgcaagcccaacaacaggaagagtggtcaaaagagaaagctaaactctgatgagatcacgagtacaagcaactctaagaccaaggttcaaaagacagtgcccgctaaggatgcagagtgtttcttttgcaaggagacaggtcattggaagagaaactgtaagaaatacctagagcagctcaagcagaagcagcaggatggaaagagttccacctcaggggctgaaaagaaatatggttatgtctacttgatgaggcataagtctgagtcctttgaaaagttcaaggaatttcaaaatgagatacaaaatcatttgggcaagacaatcaagtatctacgatctgatcgtggtggagagtacttgagccttgaatttggcaatcatctaaaggagtgtggaattgttccacaactcactccgccaggaacgcctcagtggaatggggtgtctgaacggaggaatcgtacattgttggacatggaaacaccagaaaacgctccaacgtccacacaaccacaagctgagcaagatgttgttcaacaggttgaacaagctgttgttgaaccagttgtggaagcaccggcttcacgaag

SEQ ID NO: 33411 - DNA, 218 bp, Oryza sativa
  Clone ID: PAT_MRT4530_37525C.1
ccgaggatgaagcgagagttatgcgttgttctctaggcgacctaggatttaacaccaggggtccgaatgacatgctcatagttacaatagagctgtgctactctgtcattgcacctctgattattccatttggcgttgctcactttgctcttggatggactatagtgccaaatcaggttctacaggcttatgttcccccctactagagccaccgggaa

SEQ ID NO: 33412 - DNA, 4641 bp, Oryza sativa
  Clone ID: PAT_MRT4530_37526C.1
gaacatgctagacagggtcgacgtccactacctgaacatcatgagtatgatgcggaggatgagagtctaggcttgtgttctgatgaaggtgatcatcatcgtcgtcctcgacatcctcctcgccgaggtcctgcttttatggatagggttgttgatgatattcaccgtgacaatcggaatcgtcgtgctgctcgtgttccgttggatgaagggcttgatccggaggattatttgcagtgggagatgcgttgtgatcagatctttaatagtcacaactatttagaggataagaaggcacgtcttgcatctattgaattcactggttatgctttatcttggtggaatcaattgcaactcaaacaaggtgatcttagtgtggatgcttattataaggagatggaattgttaatgagccatacaggggtaacagagaatgatgaagctactatcgctagatttcttactggtctcaacgatgatgtgaaagaacgtgttgagatatcatattattatgatatacaaaatatggtgcacattgctcaaagggtggagcagcaactaacaagtcgccacactagccgttcatgttcttttcagcgagatggtgatggaagtgccgctagtaagtcgatgtctttcaagctgactactccttctagagatgggtctaaacctgctgctagttcggtgagtaaatccaaatctaaagttgaatctactgctacatctagttctaaatcacgaagtgtacagtgttatacttgtggagggagaggacattatatgagagattgtcctaatcagaagaaggtgttgatgactaaagaaggctatgtttctgagagtatattagaaaattcagaaggtgtacaacttgatcatactcttactacgggctatcgagatattgatgattcatctatggatgatggtgctgaaaagaataatggtttatctatgcttgcatatgcagttcagcgagatggctctaatgttgatgcaaaggggcagcgctgtaatatttttcagtcagagtgcaaaattcaagagaagttgttgttggggaggccatggcagtttgatcgtaatgctacccatgagggcagatccaactgttattcttgggctaatggacaagccgagtctagtaataagacattgttaaagttagtcaaaaagaagattgaggaagacccaaataagtggcatgaagtgctttctgaagcattgtgggcacataggatatctaaacatggtaccactaaagtcactccttctgagctagtgtatggtcaagaagccgttttaccggttgaggctttggaagagatagagaaagagaagaagagggtggccaaagcatacaacaaaagagtgaaagcaaagttgtttcaagtgggagacttggttcggaagacaattttgcctttgggtactcgatccagggagttcggtgttgcgatcgtgcttgtcgacttgtcaaaaaagttaccaacagtatgcattgctgcaaactgcccaacatcatttggtatggcttcttggatcaattccgcatggcttcttgatgttgtttgcaccaaaaactttgaaagtccacttgacaagcttgggtttaaggaggatgctgctttggtcaagagatcatggcagcctgcaccatccagttttaacttgcggtctattcttgagaaagagaagttgactggaacaaacttcatggattggaccaagcaagagctgagaggtttaatacctcaaagtccttgtttgcgtgcaagcttgcagaagtcgctccctcccagctttgagccgttcataatgaatttcaacatgaacaacctgaacaagaccttggcagaattgcatgaaatgcaaaagactgccgaggaaagcattaagaaaaactccaaccatgtgatggttatgcataagcgcaagcccaacaacaagaaaagtggtcaaaaaagaaagctaaactatgatgggatcacgagtactagcaactctaagaccaaggttcaaaagacagggcccgctaaggatgcagagtgcttcttttgcaagaagacaggtcattggaagagaaactgcaagaaatacctagagcagctcaagcagaagcagcaggatggaaagagttccacctcagctttgtgtaagaacgttatctctgcttcttgtctgcaagcagagggttatggttttagatctgtggacaatggttgttcagtctattataatgacattttctatttccatgcacccatgatgagtggcttatatattgtgaatcttgatggatgttcaatctataacattaatgcaaaaaggcaaggtcctaatgatttgaatcccacttttatatggcattgtcgcttgggtcatataaatgagaaacgcatggagaagcttcatagagatggacttctacactcgttagattttgaatcatttgagacatgtgaatcttgtttacttggcaaaatgacaaaggcacctttcacgggtcaaagtgaaaggacaagtgaactattggtactagtacatactgatgtatgtggaccaatgagctcaactgccagatgtggttttgggtactttattacctttaccgatgactttagtagatatggttatgtctacttaatgaggcataagtctgagtcctttgaaaagttcaaggaatttcagaatgagctttggggttacgctctagagacagctgcgttcacactaacaagggttccatcaaaatcagtggataagacaccatatgagatatggacagggaagcgtcccagcttgtctttcctaaagatttggggctgtgaggtctatgtaaaacgtttgcaatcggacaaactcacacctaaatcaaataaatgcttctttgtggggtatcctaaggaaacgaaaggatattatttatataatcgggaagaaggcaaagtgtttgtcgcccgacacggtgttttcttgaaaaaagagtttatttcaagaaaggatagtgggagcatagtgcgacttgaagaaattcaggaaacaccggaaaatgcttcaacgtccacacaaccacaacaagctgagcaagatgttgttcaacaggttgaacaagttgttgttgaaccagttgtggaagcaccggcttcacgaaggtccgaaaggatacggcgtacacctgcgaggtatgcgttgttaactataggacaacgtgatatattgttgttagacaacgatgaacctactacctacgaggaagcaatggtgggaccagactctgagaaatggcctggagccatgaaatccgaaatagaatccatgcatgtcaatcaagtttggaacttggttgatccacctgatggtgtaaaagccattgagtgcaaatgggtctttaagaaaaagacatatgtagatggaaatgttcacatctacaaggcacgattggtggcgaaaggtttcagacaaattcaaggtgttgattatgatgaaactttttcgccagtcgccatgctaaaatctattcagattgttttagcgattgctgcctatttcgactatgagatatggcaaatggatgtcaaaacagctttcctcaacggaaatctcgatgaggataaatccatttatgggttgaagcaagcatctcggagttggaatattcgttttgacgaagtagtcaaggcgttgggctttgtcaaaaatgaagaagagccttgtgtatacaagaagattagtgggagcgcactggtgtttctaatcctatatgtagatgacatattattgattgggaacgatattcctatgcttgaatccgttaagacatcgttgaaaaatagtttttcaatgaaggacttaggagaagcagcatatattatgggcataaggatctatagagatagatcaaagaggctaattggattaagccagagtacatacattgacaaggtgttgaagaggttcaacatgcaagattctaagaaaggcttcttaccgatgtcacatggcattaatcatggcaagaatcagtgtcctcaaacgactgatgagcgaaacaagatgagtgtgattccatatgcctgggcaatcggatccattatgtatgctatgctatgtacacgtatagatgtttcatatgcacttagtgcaacaagccgataccaatcagatccaggtgagagtcactggatagctgtaaagaatatccttaagtacttgagaagaactaaggatatgttcctagtctatggaggacaggaagagctcgtggtaaatggttacattgacgcaagctttcaaaccgacaaagatgattttagattgcagtctggatttgtgttctgcctgaatggacgcgctgtgagttggaaaagtgtgatgactagtgcttctagccctatgaacctctattgcgataatagtggtgccattgtgcaagccaaggagcatagatcgcatcaaaagtccaaacacattttacggcggtatcacctcattcacgagatagtgggtagaggagatgtgaagatatgcaaaatacatacggatttgaatgttgcagatctattgacaaagccactccctcagcctaaacatgaggcacacactagggcaatgggtataagatacgttcatgattga

SEQ ID NO: 33413 - DNA, 1188 bp, Oryza sativa
  Clone ID: PAT_MRT4530_37527C.1
atgacaaaggcacctttcacgggtcaaagtgaaagggcaagtgaactattgggactagtacatactgatgtatgtggaccaatgagctcaactgccagatgtggttttgggtactttattacctttaccgatgactttagtagatatggttatatctacttaatgaggcataagtctgagtcctttgaaaagttcaaggaatttcagaatgaggtacaaaatcatttgggcaagacaatcaagtatctacgatctgatcttagtggagagtacttgagccttgaattctgcaatcatctaaaggagtgtgaaattgttccacaactcactccaccaggaacgcctcagtggaatggggtgtctgaacggaggaatcgtacattgttggacatggtgcgatcaatgatgagccaaactgatctgccgctaagcttttgggattacgctctagggacagctgcgttcacactaaatagggttccatcaaaatcagtggataagacactatatgagatatggactgggaagcgtcccagtttgtctttcctaaagatttggggtttttggaacttggttgatccacttgatggtgtaaaagccattgagtgcaaatgggtctttaagaaaaagacagatgaagatggaaatgttcacatctacaaggaacgattggtggcggaaggtttcagacaaattcaaggtgttgattatgataaaactttctcgccagtcgccatgctagaatctattcggattgttttagcgattcctgcctatttcgattatgagatatttcaaatggatgtcaaaacagctttcctcaatggaaatctcgatgaggatgtgtacatggcacaacccaagggatttgttgatccacaatcagctaaaaatatatgcaaattgcagaaatccatttatgggttgaagcaagcatctcggagttggaatattcgttttgacgaagtagtcaagacgttgggctttgtcaaaaatgaagaagagccttgtgtatacaagaagattagtgggagtgcactggtgtttctaatcctatatgtagatgacatattattgattgggaatgatattcctatgcttgaatccgttaagacatcgttgaaaaatagtttttcaatgaaagacttaggggaagcagcatatattctgggcataaggatctattga

SEQ ID NO: 33414 - DNA, 813 bp, Oryza sativa
  Clone ID: PAT_MRT4530_37528C.1
atgtactgcctgtcttgtatgcactaccgctacaaagatgttgctgcaggaaatgaaatgaaggtgaggatagatgtcggacatctatatgcagagattattggtttacttgacaagatcatggcagctcctgcaccatccaattttaacttgcggtctattcttgagaaagagaagttgattggaacaaacttcatggattggtatcgcaacctgagaattgttcttaggcaagagcagaaagagtttgtgcttacagagccttttccagctaacttgcccaacaatgctcctgctgctcaacgtagggagcatgaaaagcgatgcaatgattatcttgatataagttgtctcatacttgctactatgtcccctgagcttcaaaggcaatatgaggcattggatgctcatacgataatcacgggactatgcttgcagaaggtaatccagaccttggcagaattgcatgggatgctaaagactgccgaggaaagcattaagaaaaactccaaccatgtgatggttatgcataagcacaagcccaacaacaagaagagtggtcaaaagagaaagctaaactctgatgagatcacgagtacaagcaactctaagaccaaggtctacttaatgaggcataagtctgagtcctttgaaaagttcaaggaatttcagaatgaggtacaaaatcatttgggcaagacaatcaagtatctacgatctgatcgtggtggagagtacttgagccatgaatttggtaatcatctaaaggagtgtggaattgttccgcaactcactccgccaggaacgccttag

SEQ ID NO: 33415 - DNA, 1923 bp, Oryza sativa
  Clone ID: PAT_MRT4530_37529C.1
atggagatccaatatgagcttacttcggatagggatctgaataggagtcctacgggccttggaggcccgagtgatggatcctatatattcgtgaagggtgtgaccggtggaggcattgcatcacccgcatgggttgatgagatcaatcggatagatgtcggacatctatatgcggagattattggtttacttgacaagatcatggcagctcctgcaccatccaattttaacttgcggtctattcttgagaaagagaagttgactggaacaaacttcatggactggtatcgcaatctgagaattgttctcaggcaagagcacaaagagtttgtgcttacagagccttttccagctaacttgcccaacaatgctcctgctgctcaacgtagggagcatgaaaagcgatgcaatgattatcttgatataagctgtctcatgcttgctactatgtcccctgagcttcaaaggcaatatgaggcattggatgctcatacgataatcacgggactacgtaacatgtttgaagaccaagcaagagctgagaggtttaatacctcaaagtccttgtttgcgtgcaggctagcagaaggtaatctagtgagcccacatgtgatcaaaatgattggttacaccgagagtctggataagcttggctttccccttagccgagagttggctactgatttgattctccagtcgctccctcccagctttgagccgttcataatgaatttcaacatgaacaacctaaacaggaccttggcagaattgcatgggatgctaaagactgccgaggaaagcattaagaaaaactccaaccatgtgatggttatgcataagcgaaagcccaacaacaagaaaagtggtcaaaagagaaagctaaactctgatgagattacgagtactagcaactctaagaccaaggttcaaaagacagggtccgctaaggatgcagagtgcttcttttgcaaggagacaggtcattggaagagaaactctttgtgtaacaacgttatctctacttcttgtttgcaagcagagggttatggttttagatctgtggacaatggttgttcagtctattataatgacattttctatttccatgcacccatgatgaatggcttatacattgtgaatcttgatggatgttcagtctataacattaatgcaaaaaggcaacgtcctaataatttgaatcccacttttatttggcattgttgcttgggtcatataaatgagaaacgcatagagaagcttcatagagatggacttctacactcgtttgattttgaatcatttaagacatgtgaatcttgtttacttggcaaaatgacaaaggcacctttcacgggtcaaagtgaaagggcaagtgaactattgggactagtacatactgatgtatgtggaccaatgagctcaactgccagaggtggttttgggtactttattacctttaccgatgaatttagtagatatggttatgtctacttaatgaggcataagtctgagtcctttgaaaagttccaggaatttcagaatgaggtacaaaatcatttgggcaagacaatcaagtatctacgatctgatcgtggtggagagtacttgagccttgaatatggcaatcatctaaaggagtgtggaattgttccacaactcactccaccaggaacgcctcagtggaatgcggtgtctgaacggaggaatcgtatattgttggacatggtgcgatcaatgatgagccaaactgatatgccgctaagcttttggggttacgctctagagacagctgcgttcacactaaacagggttccatcaaaatcagtggataagacaccatatgagatatggacagggaagcgtcccagtttgtctttcctaaagatttggtgctgtgaggtctatgtaaaacgtttacaatag

SEQ ID NO: 33416 - DNA, 1667 bp, Oryza sativa
  Clone ID: PAT_MRT4530_3752C.1
atggtgccgtcgttcccgcagccggccagtgcggcggcggcgacgcggccaataccggggagctacggcccgccgctgctcggcccgctccgcgaccgcctcgactacttctggttccagggccccgacgacttcttccgccgccgcgccgccgaccacaagagcaccgtgttccgcgccaacatcccgcccaccttccccttcttcctcggcgtcgacccgcgcgtcgtcgccgtcgttgatgccgccgccttcaccgcgctcttcgacccggccctcgtcgacaagcgcgacgtcctcatcggcccctacgtccccagcctcgccttcacccgcggcacccgcgtcggcgtctacctcgacacccaggaccccgaccacgcccgcaccaaggccttctccatcgacctcctccgccgcgccgcccgcaactgggccgccgagctccgcgccgccgtcgacgacatgctcgccgccgtcgaggaagacctcaacagggcccctgaccccgccgccgcctccgccagctacctcatcccgctccagaagtgcatcttccgcttcctctgcaaggcgctcgtcggcgccgacccggcggcggacggcctcgtcgaccgcttcggcgtgtacatcctcgacgtgtggctggcgttgcagctggtgccgacgcagaaggtgggcgtcatcccgcagccgctggaggagctcctgctccactccttcccgctgccgtcgttcgtcgtcaagcccgggtacgacctcctctaccgcttcgtggagaagcacggcgccgccgccgtgtccatcgctgagaaggagcacggcatcagcaaggaggaggccatcaacaacatcctcttcgtgctcggcttcaacgcgttcggcggcttctcggtgttcctgccgttcctggtcatggaggtcggcaagcccggccgggacgacctgcggcggcggctgcgggaggaggtgcgccgcgtgctgggcggcggcgacggcggcgaggccgggttcgcggcggtgagggagatggcgctggtgcggtcgacggtgtacgaggtgctccggatgcagccgccggtgccgctgcagttcgggcgggcgcggcgagacttcgtgctgcggtcgcacggcggcgcggcgtacgaggtgggcaagggcgagctgctgtgcgggtaccagccgctggccatgcgcgacccggcggtgttcgaccggccggaggagttcgtgccggagaggttcctcggcgacgacggcgaggcgctgctgcagtacgtgtactggtccaacgggccggagaccggcgagccgtcgccggggaacaaacagtgtgccgccaaggaggtggtcgtcgccaccgcgtgcatgctcgtcgccgagcttttccggcggtacgacgacttcgaatgcgacggcacctccttcaccaagctcgacaagcgggagctcactcccagctaagctttgctgccgccattctctcactcgatctccatgcacatatgcatgaagaaattaattaaattcaagttgctagctccattttttctctttgagctgctgataaaaaaaacatctctattcttctgtgcaataagccaataattaagcattaatcagagcgtaaaaaaaaaaaaaaaaaactcgagggggggcccggtacc

SEQ ID NO: 33417 - DNA, 1242 bp, Oryza sativa
  Clone ID: PAT_MRT4530_37530C.1
atgtgccggtgcgcggcggcgatcgcgagggcggtggtggagttcctcgacgccgtcctcgtcggcttcttcctctccttcttcggcccccacccccgcgaccgcgaccgcgacgacagccccggctccggccgccgcgattcgctcgcgcacaaggatcggctcggggagctgctctcggacgacgatgagctaggattgggagggaggggaggatctcatgaggatttggctgatgattgtggcagcgatgaggagcttcgatccgaggcaaatttcctcaagttatgtggcacactatttgaaacaccagctgaactccataacatatcctatcaaatcaatatggaaagttacattgagcatgataaaattcccacaaatgtactggcagtggaagcaactccagcatttgaatctaaatcatctggaggctttgaatatggggaggatcatatcttgacgcctcaacttaacactgaagatactgaacatcttccactagttaaatcagtttatcaatcagctatccgaggcaactcccccttccagaacatcaaaagcatcaacgatggttccagtgattcaccctttcatactcctctagtattgagagatgatatgcagacccccagaactgtttatacttcacataaaggatcgtctggaaagcgtgtgcggacccgcaaacaattcgcatatcccatctttagaccaacagagaacaagcttcagaagatgcaactttcagattctgccaagatgacacagcagatctcttcagattcagtggttaaaggagaatcactcaattcttcacatttccctcttgaggtgtctaagtatcagctcgaccgccaaaggctattggatgctggagagagatcaaagtccaattcagatgaaaatattgaggtgtgcagtctatcacgctggcttaaatcttcacccgcaggaaacacgaaccaaatgtacgatgagaacaatcttatcgaagagggacatgcctttatgacttctgaggataatgtggatgtggacaatcatactccgaggttgtccaaggctcgggattgccactgtattccaaacacaagtagaaaatatggagaggatcaacatgtcagctggcattccacaccctttgaggaaaggttgataaaggttttgtctgacgaggaggtgccccctacaaggaaacttgtccctggaaggcttctctatcttgaggaaagagtttga

SEQ ID NO: 33418 - DNA, 1413 bp, Oryza sativa
  Clone ID: PAT_MRT4530_37531C.1
ccacgcgtccggtagatggtaatgttcacatctacaacgcacgattggtggcaaaaggtttcagacaaattcaaggtattgattatgatgaaactttctcgccagtcgccatgctaaaatctattcggattgttttatcgattgctgcttatttcgattatgagatatggctaatggatgtcaaaacagttttcctcaatggaaatcttgatgaggatgtgtacatgacacaacccaagagatttgttgatccacaattagctaaaaagatatgcaaattgcacaaatctatttatgggttgaagcaagcatctcggagttggaatattcgttttaacgaagtattcaaggcgttgggctttgtcaaaaacgaagaagagccttgtgtatacaagaagattagtgggaacgcactggtatttctaatcctatatgtagatgatatattattgatcgggaatgatattcctatgcttgaatccgttaagacatctttgaaaaacagtttttcaatgtaggacttaggggaagcagcatatattctgggcataaggatctatagagatagatcaaagaggctaattggattaagctagagtacatacattgacaaggtgtttgaaaatgttcaacatggcagaatctaagaaaggtttcttaccgatgtcacatggcattaatcttggcaagaatcagtgtcctcaaacgactgatgagcgaaacaagatgagtgtgattccatatgcctcggcaattggatccatcatgtatgctatgctatgtacacgtccagatgtttcatatgcagttagtgcaacaagccgataccaatcagatccaggtgagagtcactggatagctgtaaagaatatcctgaagtacttgagaagaactaaggatatgttcctagtctatggaggacaggaagagctcattgtaaatggatacaccgacgcaagcttccaaaccgacaaagatgattttagatcgcagtctgtatttgtgttctgcctgaatggaggcactgtgagttagaagagttgcaagcaatatacagtggctgattctacaacagaagctgaatacattgccgcttctgaagcagcaaaggaggctgtttggataaagaaattcgtttctcaactaggtgtgatgactagtgcttctagccctatggaccactattgcgataatagtggtgccattgcgcaagccaaggagcctagattgcatcaaaagtccaaacacattttacggcggtatcacctcattcgcgagatagtggatagaggagatgtgaagatatgcaaaatacatacggatttaaatgttgcagattcgttgacaaagccactccctcagcctaagcatgaggcacacactagggtaatgggtataagatgcgttcatgat

SEQ ID NO: 33419 - DNA, 768 bp, Oryza sativa
  unsure (1)..(768): unsure at all n locations
  Clone ID: PAT_MRT4530_37532C.1
nnncgaggccggccggggaaaaaaaaaaaaaaaaaaagcttcgcttcccatttcaaactatatcccctctcctcgcctcctcccctccgcctctctcctcgtcggcgggaagggccgcgacgcgacgacgatgtgccggtgcgcggcggcgatcgcgagggcggtggtggagttcctcgacgccgtcctcgtcggcttcttcctctccttcttcggcccccacccccgcgaccgcgaccgcgacgacagccccggctccggccgccgcgtgagggaacccccctaaaccctagcctcccgtacacatatccctcccgcttcgttgcgggacctcgtgttggatcgtttggttttgggaggggatttggattgaggtggtgattgttctctggcgtttccgatgcaggattcgctcgcgcacaaggatcggctcggggagctgctctcggacgacgatgagctaggattgggagggaggggaggatctcatgaggatttggctgatgattgtggcagcgatgaggagcttcgatccgaggcaaatttcctcaagttatgtggcacactatttgaaacaccagctgaactccataacatatcctatcaaatcaatatggaaagttacattgagcatgataaaattcccacaaatgtactggcagtggaagcaactccagcatttgaatctaaatcatctggaggctttgaaatatggngaggatcatatcttgacgccctcacttaacactgaagatactgaacatcttc

SEQ ID NO: 33420 - DNA, 2191 bp, Oryza sativa
  Clone ID: PAT_MRT4530_37533C.1
ccagccttcctaagcagccagcgcaagaaggagtcgcacggactccatccgtgccacgggagcgaaggcatcgtcgtagttgatcccctcctgctgcacgaaatcgcgtgccaccaagagcacaaagagtttgtgcttacaaagccttttccagctaacttgaccaacaatgctcctgctgctcaacgtagggagcatgaaaagcgatgcaatgattatcttgatataagctgtctcatgcttgctactatgtcccctgagcttcaaaggcaatatgaggcattggatgctcatacgatattcacgggactacgtaacatgtttgaggaccaagcaagagctgagaggtttaatacctcaaagtccttatttgcgtgcgggcttgcagaaggtaatccaatgagcccacatgtggtcaaaatgattggttacaccgagagtctggataagcttggctttccccttagccgagagttggctactgatttgattctccagtcgctccctccctgctttgagccgttcataatgaatttcaacatgaacaacctgaacaggaccttggcagaattgcatgggatgctaaagactgccgaggaaagcattaagaaaaactccaaccatatgatggttatgcataagcgcaagcccaacaacaagaaaagtggtcaaaagagaaaggtaaactctgatgagatcacgagtactagcaactctaagaccaaggttcaaaagatagggcccgctaaggatgcagagtgcttcttttgcaaggagacaggtcattgaaaaagaaaatgtaagaaatacctagagtagctcaagcagaagcagcaggatggaaagagttccacctcaggtattaatgttatagaaattaatcttgctacttcctctactaattcttgggtatttgataccaggtcagttgctcacatatgcaaatcgttgtaggggctgaaaaaaagtaggagcttagcaagaggcgaagtggacattcgcatgggcaatggagcaagagttgctgctgttgcggtcggcactatgccattatctttaccatcaggattagttttggagttaaataattgttattgcattccagctttgtgtaagaacgttatctctgcttcttgtttgcaagcagagggttatggttttatatctgtagacaatggttgtttagtctattataatgacattttctatttccatgcacccatgatgaatggcttatacattgtgaatcttgatggatgttcagtctataacattaatgcaaaaaggcaacgtcctaatgatttgaattccacttttatttggcattgtcgcttgggtcatataaatgagaaacgcatggagaaacttcgtagagatggacttctacactcgtttgattttgaatcatttgagacatgcgaatcttgtttacttggcaaaatgacaaaggcacctttcatgggtcaaagtgaaagggcaagtgaactattgggactagtacatactgatgtatgtggaccaatgagctcaactgccagaggtggttttgggtactttattacctttactgatgactttagtagatatggttatgtctacttaatgaggcataagtctgagtcctttgaaaagttcaagaaattttagaatgaggtacaaaatcatttgggcaagacaatcaagtatctatgatctgatcgtggtggagagtacttgagccttgaatttggcaatcatctaaaggagtgtggaattgttccacaactcactccgccaggaacgcctcagtggaatggggtgtctgaacggaggaatcgtacattgttggacatggtgtgatcaatgatgagccaaactgatctgccgctaagcttttggggttacgctctagagacagctgcgttcacactgaacagggttccatcaaaatcagtggataagacaccatatgagatatggataggaaagcgtcccagtttgtctttcctaaagatttggggttgtgaggtctatgtaacacgtttgcaatcggacaaactcacacctaaatcagataaatgcttctttctggggtatcctaaggaaacgaaaggatattatttttataatcgggaagagggcaaagtgtttgtcgccccacacggtgttttctggaaaagaaagtttatacggagtcaaacagggggatata

SEQ ID NO: 33421 - DNA, 580 bp, Oryza sativa
  Clone ID: PAT_MRT4530_37534C.1
cggcacgagggagcttcgcacgcagcgatcgagagatagaacagcgagataatggtagttgcttgcttgctttggcttagctaagctcaagctagctcctactactcctacctgcttcagctttgcttcctgcgcatgagctagatgctccctcgcatccatctcctagctttccttccctttctctcgctgctgctgctgcatcctcctctcctgtgacctgtcacagcttggcctaggactagtagggagtagtgattcttgctcgctttgtctctctgaatccttgcagcttggcttggccttggccttggctgctttgaatagtacctgacggcctcgtggcgcgcaaaccttgtcccttttccccgcaaatccttgccgccttttggtcgctctctgctcctcgtccctcgcgccgtcaccacctgctctgtctcctctccttcttgcagctcgtcgtcgtcgtcgttgatctttggctatatattactccctcctgctgctgctgcacggacgcagtgaggaggaagagctcgtgacttgttttcatcaggagtacagttgtcagtcgctgatc

SEQ ID NO: 33422 - DNA, 1508 bp, Oryza sativa
  Clone ID: PAT_MRT4530_37535C.1
atggacagggaagcgtcccagcttgtctttcctaaagatttggggctttgtgaaagcaccggcttcacaaaggtccgaaaggatacggcgtacacctgcaagacaacgacgatcctactccctatgaggaagcaatggtgggaccagactctgagaaatggcttggagccatgaaatccgaaatagaatccatacatgtcaatcaagtttggaacttggttgatccacctgatggtgtaaaagccattgagtgcaaatgggtctttaagaaaaagacagatgtagatggaaatgttcacatctacaaggcacgattggtggcgaaaggttttagacaaattcaaggtgttgattatgatgaaactttctcgccagtcaccatgctacaatctattcggattgttttagcgattgctgcctatttcgattatgagatatggcaaatggatgtcaaaacagctttccttaatggaaatctcgatgaggatgtgtacatgacacaacccaagggatttgttgatccacaatcagctaaaaatgacatattattgattgggaatgatattcctatgcttgaatccgttaagacatcgttgaaaaatagtttttcaatgaaggacttaggggaagcagcatatattctgggcataaggatctatagagatagatcaaagaggctaattggattaagccagagtacatacattaacaaggtgttgaagaggttcaacatgcaagattctaagaaaggtttcttaccgatgtcacatggcattaatcttggcaagaatcagtgtcctcaaacgactaatgagcgaaacaagatgagtgtgattccatatgcctcggcaatcggatccattatgtatgctatgctatgtacacgtccagatgtttcatatgcacttagtgcaacaagccgataccaatcagatccaggtgagagtcactggatagctataaagaatatcctaaagtacttgagaagaactaaagatatgttcctagtctatggaggacaggaagagctcgttgtaaatggttacactgacgcaagcttccaaaccgacaaagatgattttagatcgcagtctggatttgtgttctgcctgaatggaggcgctgtgagttggaagagtcccaagcaagatacagtggctgattctacaacagaagccaaatacattgccgcttctgaagcagcaaaggagactgtttggataaagaaattcgtttctcaactaggtgtgatgactagtgcctctagccctatggacctctattgcgataatagtggtgccattgcgcaagccaaggagcctagatcgcatcaaaagtccaaacacattttacgacggtatcacctcattcgcgagaaagtgggtagaggagatgtgaagatatgcaaaatacatacggatttgaatgttgcagatccgttgacaaagccactccctcagcctaagcatgaggcacacactagggcagggtgtaagatacattcatga

SEQ ID NO: 33423 - DNA, 3963 bp, Oryza sativa
  Clone ID: PAT_MRT4530_37536C.1
atcatggcagctcctgcactatccagttttaacttgcggtctattcttgagaaagaggagttgactggaacaaacttcatggattggtattgcaacctgggaattgttctcagacaagagcacaaagagtttgtgcttacacagccttttccagctgacttgcccaacaatgctcctgttgcacaacgtagcgagcatgaaaagcgatgcaatgattatcttgatataagctgtctcatgcttgctactatgtcccctgagtttcaaaggcaatatgaggcattggatgctcatacgataatcacgggactacgtaacatgtttgaggaccaagcaagagctgaaaggtttaatactttaaagtccttgtttgcgtgtaggcttgcagaaggtaatccagtgagcctacatgtgatcaaaatgattggttacaccgagagtctggataagcttggttgtcctcttagccgagagttggctactgatttgattctccagtcgctccctcccagctttgagccgttcataatgaatttcaacatgaacaacttgaacagttccttggcagaattgcatgggatgctaaagactgccgaggaaagcatcaagaaaaactccaaccatgtgatggttatgcataagtgcaagcccaacaacaagaagagtggtcaaaagagaaagctaaactctgatgagatcatgagtactagcaactctaagaccaaggttgaaaagacagggcccgctaaggatacagagtgcttcttttacaaggagacagatcattggtagagaaactgtaagaaatacctagagcagctcaagcagaagcagtaggatggtaagagttccaccttaggtattaatgttatagaaattaatcttgctacttcctctactgattcttgggtatttgataccgggtcagttgctcacatatgcaaatcgttgcaggggctgaaaagaagtaggagcttagcaagaagcgaagtggacattcgcgtgggcaatagagcaagagttgctgctgttgcggtcaacactatgccattatctttaccttcatgattagttttggagttaaataattattattgcattatagttttgtgtaagaacgttatctctgcttcttgtttgcaagcagaggattatgattttagatctatggacaatggttgttcagtctactataatgacattttctatttccatgcacccatgatgaatgggttatacattgtgaatcttgaaagatgttcagtctataacattaatgcaaaaagtcaacgtcctaatgatttgaatcccacttttatttggcattgtcgcttgggtcatataaatgagaaacgcatggagaagcttcatagagatggacttctacactcttttgattttgaataatttgagacatgctaatcttgtttacttggcaaaatgataaaggcacatttcagggtcaaagtgaaagggcaagtgaactattgggactagtacatactgatgtatgtggaccaatgagctcaactgccagaggtgattttgggtactttattacctttaccgatgactttagtagatatggttatgtctacttaatgaggcataagtctgagtcctttgaaaagttcaaggaatttcagaatgaggtacaaaatcatttgggcaagacaatcaagtatctatgatctgatcgtggtgaagagtacttgagccttgaatttggcaatcatataaaggagtgtggaattgttccgcaactcactccgacaggaacgcctcagtggaatggggtgtctgaacggaggaatcgtacattattgtacatggtgcgatcaatgatgagccaaactgatatgccgctaagcttttggggttacgctctagagacagctgcgttcacactaaacagggttccatcaaaatcagtggataagacaccatatgagatatggacagggaagcgtcccagtttgtctttcctaaagatttggggttgtgaggtctatgtaaaacgtttgcaatcggacaaactcacacctaaatcagataaatgcttctttgtggggtatcataaggaaatgaaaggatattatttttataatcgggaatagggcaaagtgtttgtcgcccgacacggtgtttttttttttgaaaaaagagtttatttcaagaaaggatagtgggagcatggtacgacttgaagaaattcaggaaacaccggaaaacgcttcaacgtccacacaaccacaacaagctgagcaagatgttgttcaagaacaagttgttgttgaaccagttgtggaagcaccagcttcacgaaggtccgaaaggatacggcgtacacctgcgagatatgcgttgttaactacaggacaacgtgatatattgttgttagacaacgatgaacctactacctatgaggaagcaatggtgggaccagactctgagaaatggcttgaagccatgaaatccgaaatagaattcatgcatgtcaatcaagtttggaacttggttgatccacctgatggtgtaaaagccattgagtgcaaatgggtctttaagaaaaagacagatgtagatggaaatgttcacatccacaaggcacgattggtggtgaaaggtttcagacaaattctcgccagttgccatgctaaaatctattcagattgttttagcgattgctacctatttcaactataagatatggcaaatggatgtcaaaacagctttcctcaatggaaatcttgatgaggatgtgtacatgacacaacccaagggatttgttgatccacaatcagctaaaaggatatgcaaattgcagaaatccatttatgggttgaagcaagcatctcggagttggaaaatttgttttgatgaagtagtcaaggtcttgggctttgtcaaaaacgaagaagagccttgtgtatacaagaagattagtgggagcacactggtgtttctaatcctatatgtagatgacatattattgattgggaatgatattcctatgcttgaatctgttaagacatcattgaaaaatagtttttcaatgaaggacttaggggaagcagcatatattctgggcataaggatctatagagatagatcaaagaggttaattggattaagccagagtacatacattgacaaggtgttgaagaggtttaacatgcaagattctaagaaaggtttcttaccgatgtcacatggcattaatcttggcaagaatcagtgtcctcaaacgactgatgagcgaaacaagatgagtgtgattccatatgcctcggcaatcggatccatcgtatatggtatgctatgtacacgtccagatgtttcatatgcacttagtgcaacaagccgataccaaggatatgttcctagtccaggtgagagtcactggatagttgtaaagaatattctgaagtacttgagaagaactaaggatatgttcctagtctatggaggacaggaagagatcgttgtaaatggttacactgacgcgagcttccaaaccgacaaagatgattttagattgcagtttggatttgtgttctgcctgaatggaggcgctgtgagttggaagagttccaagcaagatacagtgggctgattctacaatagaagccgaatacattgccgcttctgaagcagcaaaggaggctgtttggataaagaaattgtttctcaactaggtgtgatgacttgtgcttctagcctatggacctctattgcgataatattggtgccattgcgcaagccaaggagcctagatcgcatcaaaagtccaaacacattttactgcggtatcacctcattcgcgagatagtgggtagaggagatgtgaagatatgcaaaataaatacggatttgaatgttgcagatccgttgagaaagccactccctcagcctaagcatgaggcacacactagggcaatgggtataagatacattcatgat

SEQ ID NO: 33424 - DNA, 249 bp, Oryza sativa
  Clone ID: PAT_MRT4530_37537C.1
atgtctttcgtgattagtctcacccttctcaccatagtaaataatgctataactggtaataatttggttagctcctggtttggaatggaatattcctggtttggagatagaactgtacagccgggatggttgttcagaatggttgggcctatgcaacagggtatgttgtatagcgttggcttaatattgcttaattaatacttaactattttaaattctcaaatgtttgctaaatgctgctttttgcaa

SEQ ID NO: 33425 - DNA, 1173 bp, Oryza sativa
  Clone ID: PAT_MRT4530_37538C.1
gatgtgaactttatgaccagataatttattcatcagttctgctgtctacacaatgccgacatgcgtgtgcgttgccacgtgtcctcaagcttgctagacttttgacgccgcgattatatgggattaattggtagcgatcgtcggcggccagggataaggatggggagggtgaagctgccgatcaagaggatcgagaacacgacgaacaggcaggtgacgttctcgaagcggcggaacgggctgatcaagaaggcgtacgagctgtccgtgctctgcgacatcgacgtcgccctcctcatgttctccccctccggccgcctcagccacttctccggccgccgcggggtggaggacgtgattctccggtacatgaacctctcggagcacgacaggggagaagccatccagaatcgggaggagattcagcaagagatatattcttcccagcaacagctgcaaatcaccgaggaccgccttaggatgttcgagccagatcctgcggcgttcggcacatccagcgaggtcgacggatgcgagaagtatctcatggaattgctgacccgagtcgtcgaaaggaagaacaacttgttgagcagtcacatggcgccgttcgatgcaacgacagctgcgatgcagggtgcagatgggacgcagatgtacgtgagccaggcggacgggttggccacgttcggtggtgacgctgccatgtggggcccagatggaggcgcggatcctggccatccgatgttcagtgcatctgatccgttgatctacctcagggaccacgacgtgtacgacgccaactcacaggtggccgggctgcacggcggcgacccgtgcgcggccggcggcgccgcggcggcggcggccgcggtggggtgcgtcgacgacgacgtcgccggaggccacgccgccgccgccgacgcgtggaggcaggcgtacacctgcaccgagttgctctccacgctcatccccaccacgccgttccccctcatgccgcattgcctggggccggaggaccagtacctgtcgatggagcatggcatggtggcggcggcgcaggagccggtggaggcgtcgacggcgagctgctcctacgttcccagcgacgagaactccggcacgccggtcatggcgtacgacagcaacccgccgccggcgaacatcgcctga

SEQ ID NO: 33426 - DNA, 2340 bp, Oryza sativa
  Clone ID: PAT_MRT4530_37539C.1
atgccgtgcagaagagcaagcacaccggccgctgcagctgcagctgatcctgctgtggctgcatggcctctcaccccactggtgctggcgctcgccgtcttctcggcgatgcctcacgtcacgctctcccggggacgggagaatcagtggccgcctctagagggaaactcgcagctgacgacgacgaagaacctgtcgtgcgacgaagtcccttatcccttcggcttaaaaggcaaatctgcccctggcttcagggtaacatgccggaaaaacgacagtgctgccatgctccgcattggccatcaaaaatttcgaatcgatcaggtgtcttcgcaggaaggtttcgtcgtcatatttgcaggccccatctaccggttgtgctacgatcgcaacggccggccggtcgtggggagcaccggaatcgggccgacgaatttgacggacacgccgttcttcttctccaagcgcaacacgctcgtcgccaccggctgttactccaactttactgctaccttcaccagctcgctacaccatcatggttggtctactaacggaagctgcacaaccaacggcagagtaaactctgacggattgtgccccgggacggcctgctgcgacgcctacggcatgccgttggacgacgcgcaggaggtcaccttcgagttcaacaagacatcggcgagcgtggccggcacctgcagcgcagccttcatcctctaccaaaaagagcagatcttcaaagtcagcggtaacagcaagccaatgcatctccaccaagaagagcacatcttcagagccggcggcggtgacagcaagccagtgcatctggaagacgttctggtgcctttgggtgagcgaaggatggtcttggactgggtgattgggcgcgccacctgtgagcaagcccggaacaacagcttcaagacacagtaccgctgcaacaacgagagctcatgcatggacaggttcatgggagagggctacgtgtgcagatgcaaagcagggtacgaccaacacaacgggaatccatacgaggcaggcggctgccaagcgtactctgtcataacactcccggaggatatacttgctcttgcccccaataataagcactgtgtgcatggctacagtgacagggcacagggtgcattgactcccatcggccacctggcgcccctacccacaaccaaccgcaagaaaagaaaggtggaaagaaacagagctgagttattcaggaagaatggaggattgctactgcagcaaagattttcgatgatgacatctcaaggtgaggattcatcagcgaagatatttagtgcggaagaactcaaggatgccactgacaactatagtgagagtcggatccttggtcgaggcggaagtgggatggtttacaagggtatccttccaaataataccacggttgccataaagaagtccatcttgtttgatgaaagccaggtggagcaatttgccaatgagattaccatcttatcgcagattgatcacccaaatgttgtcaagcttttgggttgctgtctagagacaaacgttccgttgttggtttacgagttcatacctaatggaacactcttccagcacatccacaacaggagttctttaagatgggaagattgcttaaggatagctgaagaaacagccgaagcacttgactatctgcactctacatcttctacaccaatcattcacagagacatcaaatcaagcaacatacttttggatgagaacttgatggctaaaatatcagactttggtgcatcaagatcagtcccatttgatcaaactcatgtaacaactctaattcaaggaacaattgggtatctcgatcctgaatatttccaaagcagcaagctcacagagaagagtgacgtttacagctttggagtagttcttgcagagctattgacaaggcagaaacctatttctgcaagcaggccggaggaatcctgtaacttagccatgtatattgtgaatttatttaatgaaaggcgtctactacaggagatagagccacacattttggcagaagcaggtgaagagcagatacatgctgttgcccagctctcagtcagatgcttaaatttgaagggagaagaacgaccagttatgagggaagtggcttcagttctacatgggctaagagagtcgtttgacgaggagcaaatcatcagaagaagcaatgaatcaatacagataactaatggacaagacagtgtacatagtgaggcaagaccaattcccagcttgcagtcttcaggggaaattaccactgagtacagcttgccagctgaaatactgccttcttcttacttggcaagatga

SEQ ID NO: 33427 - DNA, 543 bp, Oryza sativa
  Clone ID: PAT_MRT4530_3753C.1
atgcatagcaaaaaccgcggctcgccatcccctttccacccctggttgtgtgggcacgacgccgagcccgtggcgcacgcggtgccgccgcgcgttggcctcgcgatcgttcgcgcgcacccagccgttttggcgcgccctcagccgcgcaacatcccgcgaaccgacctcgccgcactaatctccacgacgccgaacccgggacgaccgccgctgcaccaaaccgtcgcccgccgctgtccacgcgcatctgttgctgccgccgagtccaacttcgcctctactccgggtgaatcgagccaagaccgccgtcggatccacgaaaaagatctgagccggagccttgcatcatcgttcgcctcgccgcgctcggccgagctccgccgtccctgctctgccctgtttttgccgccgagaagttttcccggccgcaactcgtcgtctcggctctactcggccctcggctatgtccgctcgctgccggacagggcgctcgaggacagctatcctccgagcttcgccaaaggtcggaaagccgactaa

SEQ ID NO: 33428 - DNA, 784 bp, Oryza sativa
  unsure (1)..(784): unsure at all n locations
  Clone ID: PAT_MRT4530_37540C.1
ggcccacacacatcagcatccatcgcagcgagcgaccgtcggcatcacaagccatctccctctctcttgtcttgtgatctagctcccgtcgcgatcattgtgatataggcatggccaggtcatcgtcgtcgctgctcgtcctcacggtcctggtggtggccgcggcggcgtgctccactacggcggcggcgcgcagcgtcccggcggaggagaagaagacggctgcgccggtggcggcggcggacgtgaagcagccggagacgttccacgaggggacggtgttgatccctgggctcgggcggttcgagctcggcagcacctacgtgccggacatcaccggagtcgaccacagcgtcccggcagccgagcacgggcagttcctccccggcgccgacgacacatgggtccccaaccccggcttcgaggtgcccaaccccttccagcccggctcgtcttctccctgaatcacccgccggctcgccgtcgtcgccgagctagctagctaggcggcggtttgccggagtaataatgtgtgtgatcccacgtgtccccgtcggtgcacggctgccgtagtggagtcgtttagtttttcaattgtgtgtggatgcgtaggatgcattcagatgtttggcttgatcgatcgcgtgcttttgttagctttgaactcgtaataatgtattaattggtgagtgattatgcaaaaaaaaaataaagtaattactgttcacgtactaaaaaaaaaaaaaaaaggangctaaaaaaaaaaaaaaaaaaaaaaaaaaaa

SEQ ID NO: 33429 - DNA, 1578 bp, Oryza sativa
  Clone ID: PAT_MRT4530_37541C.1
tcatgttaaagatattgcctcaatttcatgactggcttggttgtttgactcttcttttaggacatagtcacaggcagcttccaaaatcttgcaaacctctctcctgtactcatcagttgctccagactttattttggattgcaaaatgcaccatttcttcatgtttactccaatctttatatcaacttgacatgttgaactggaggttgttcttagatgccacctgcagtggatctcaaagtaagaaccaaatggaacatcatgtgcctgatgctttgtctcatagatcagatttgttttgttctttgagaaagaagcacgttgccattctgtcactgcagtatctgggggacataaaggactgtggcatagagacctgaacatcacttcgcggatcttgccgccatactcatctgaggggtaccacttgctaagactggttgcatctacaagaacatgttcattgatgaaaggttggaatgcttttgcttgttcaatgcttctttctgctgtctttaggtcatctattttgctacagatgacatcgctgcttcttctttgttgaagtgaatgcattctgacctgtttttcagcttctaaggttgccctgtaactctgcagagcattctccagggcccgaaatgtgcggtttctattccagaatgatgtgaatttgtacctgattcttccattttgactgcatgaagggggtgttccatgaccacctgaaccggtacgaagaaaaatagtaattgctgggttgataagggaatgctgacttctttttatgcccatggtgcaggaaagacctctccagagcacaagaataactttggtgaacaatctctcagaagtcagaaatactttagctgagctaaaacgcaggcagatctgaccagatttactgtccaggtcgaaccaagtagctcctgcttcgtcttcaccgagaacggctacagttacagatccaataactttgcacttgcacactgtgtcccagtcgtacattgttatggttacttttgaatcattgacaggagcagtgcaaaactcaactgggagctctctaaccaggaagttgaactcctccccccacaacgggtttcttgagctaggcaccatggaactgaagcgtctttgctcgccgcaggagatgacggcgtaaggatcggagctcccgttcaagttggcgccgatgaggtacttggcacagagcagctccagcttgatcacatagctggttctgccccgagagtgagggctaccatctggaagagcaaccttgctggtgcctccaagttcagcggccgctggcttccccttcgcccgccggcgccggcagccgcagccaccacaaccaccgtctcggcggcagctcgcggctgccgtagtggtaggagagggcggcggcgacgaggaggaagccggggacttggtgctggactggaccgcctggtcgaggaagaggaggagcagtgccgcgacgagcagcgcggccgcggagacggcgacctccgcctcccacagcgacggcaggagaaaaccccgcatccacgagctgagccccgcagcctccat

SEQ ID NO: 33430 - DNA, 330 bp, Oryza sativa
  Clone ID: PAT_MRT4530_37542C.1
actgcatcaatggccagttgaagttttttttgataagctcaggcgttcgcccgagagacgaaccggaggctatgaggtttctttggcgaggcgcggatcaccatgcacaagaccgcaacgaagtcgaagccaggggattactatgctagaccgtggtacggcgccgaccgggagctgtagctggagccgtctcctgtagccggcgacaatagctgaccgggcggatgccgcatggtactgatgagataccgtagggctgttagcagatcctgagaaagtcggtaataaccgggagcttgaggcaaaccacttctggtgtgtaacgctagc

SEQ ID NO: 33431 - DNA, 252 bp, Oryza sativa
  Clone ID: PAT_MRT4530_37543C.1
atcggtctaatagtggtgagaatttctgcgggctattttataagctgttccgtggtctccggcaagggggatcatatgtgctagatgcaggcctggaactgcagctcggagctgagaattggtcagatctagggatggtgtacatatatagctcgggggctgattatgccatcaaattctattgaatttatcagatcttttttttcaaataatcaagaaagaaaaagtcaataggctccaatgaatataatg

SEQ ID NO: 33432 - DNA, 543 bp, Oryza sativa
  Clone ID: PAT_MRT4530_37544C.1
attgtactgttgtgattatcacaaacaaacaaaaaagacatacttatagttacatggaaatatggcatgctaagtaaataaaaaaaaaaaaaaaaaaaaaaaaaaaaaaaaaaaaaaaaaaaaaaaaaaaaaaaaaattaaaaaaaaaaaaaaaaaaaaaaaaaaaaaaaaaaaaaaaaaaaaaagggggggccttttaaaggatcaaagttaacttacccgtccttgcaacgtaaaagtttttttatagggtaaccaaaataaaattaattgcccgggttttaaaaacataagaattggaaaaacccgggctttcccaaattaaatcactttgaaaaaaatccccttttcccaagttgggtaaaaaccaaaaaggcccgaaccaatggcctttccaaaaatttgccaaccctaaatggaaaatggaaccccccttttaccggcccataaagcccggggggtgtgggggttaccccaaaagtaacctttacatttgccagcgccttaacccccgttcttttatttttttttccctttcttttt

SEQ ID NO: 33433 - DNA, 576 bp, Oryza sativa
  Clone ID: PAT_MRT4530_37545C.1
atggctagcagcaatatagtaaatggcgaggagttgggtgaaccagaaagaagacctctcaacccttctgccaagggtttcattatttccttgggcaagcactctgccatttcccaaggcacgaaggatatagagaaaagcaatactgacacaatgaacaagttcattactcattgtagcgggaatggtgcagaagatgggaggacatcaagcgggaatgtcatttctggttacgaaggtgtttgtgggacaacctttggagtcatagacaacaaagctgatacaacaggagaaattgtggatgttactggttgtgaactgagcagtggagacaaaagagagcttggctgcaggggggcacagattgctggaaaaaagagtatcatattgctgaccgtaatgaaaggttctctcatccacatggctggccctaagcgagggatccaattgatcggcactaatctaatcgaatatgacatgaagatcaagactggtgaatatatatatgaaaatgaagatctacagctgatcgatggtgtatcaatcatagatgacatagacaacatggaattatag

SEQ ID NO: 33434 - DNA, 582 bp, Oryza sativa
  Clone ID: PAT_MRT4530_37546C.1
ctgacatgtgtttggaggaggaatattatcatctcttcgatccccaggtgtctgactcatagtcgacaacagggtagccttccttctcgaatccatgcccggttgcttccgtataggacatggtatgtggtatccataaccatgacagtagcccccgacttcaatgcaaatgaacaggttcatattctcaaccgtagaccttggagtaactgttatcgagctcatgtgaccgttctcactgttcctcaaccatctgaagtcatggtgcgagagattgctacgttttactagttcgagaaccagcgagcgagtagaattatctctcgaacaccaatggaagttgcggtgcgagagattgctacgtactggttcggggaccagcgagcgaatagaatcatctctcgaacaccaatggaggttgcagtgcaagagattactacgcactggttcgaggaccagcaaacgtgtagagttatctctcgaacaccaatggaagttgcggtgcgagagattgctacgtactggttcgaggaccagcgagcgagtagaattatctctcgaacaccaatggaagtgctagag

SEQ ID NO: 33435 - DNA, 297 bp, Oryza sativa
  Clone ID: PAT_MRT4530_37547C.1
atggcgaagcaatgtcgatgcgagcccggtgagtctgtgagcaacgcaaggaatgcagctagcagcaaccacattgaccaaggcaagcaagcaggcccgcatccaagtgactgtatggggcgagagttgactagagatcatggagatcgaagctcctcaccacacgacctcaccaactacaagcggttcacgaagcatgcgatggaggcagatatgctcctcacgggcactgatgagctcttcgccatcactgacgtcctcttcatctcacagtcactcctcccctcgggccactga

SEQ ID NO: 33436 - DNA, 982 bp, Oryza sativa
  Clone ID: PAT_MRT4530_37548C.1
cggacgcgtgggagccaagccgcactcctggagtccaccactccgccgcgcaccactccccacctcccgacgagatggccaccctccgcctcacctccgtcaccctccgccccgccgcctccccctcgtccgccgccgcgccgcggtccgccaacttcgcccgcgccgcggcgcgcgggttcccctcgctccgcctcgcgccgccgcgccgccgcggggacctcgccaggcgcagggccgccgccgacgccgcggcggaggggtacgcgacggcgctgtccgaggtggcctcggagaacggcacgctcgaggcgaccgtgtcggacctggagaagctggagaagatcttcgcggaggaggccatcgccgagttcttcgacaacccgacggtgccgcgcgacgagaaggcccagctcatcgacgagatcgccaagtcgtcggagctccaggcgcacgtcgtcaacttcctcaacgtcgtggtggacaacggccgcgcgggcctcatgacgcagatcgtgcgggagttcgagaacgccttcaactcgctcaccggcaccgaggtggccaccgtcacctccgtcgtgcagctcgagtcgcaggacctcgcgcagatcgcgcagcaggtgcagaatctcaccggcgcgaagaacgtccgggtcaagacccgcatcgacccggagctcatcgccggcttcaccatccagtacggccgcgacgggtccagcctcatcgacatgagcgtccggaagcagatcgaggagatcacctccgagttcgagatgcccgcagtaaccctcgacgtctgatcggcatccaccaccctcccggcggcgctgccttggcccttaggtcctctcctcctgttgtctcttactcttgtgcaagtgcaacatacattgctctcatgtgattgttgaatgtttggtaagcattactgctgaaataatacatagctggattcccaaaaaaaaaaaaaaaaaaa

SEQ ID NO: 33437 - DNA, 711 bp, Oryza sativa
  Clone ID: PAT_MRT4530_37549C.1
atggcgtgcaagcgcccagcgcccgacggcggcgacgccttcctcgccgcggcgtcgccgtgttgcaagaagccccggccgctgttcaccagtatcttcaactacgagtatctccacaagctcggggcgggcagctatggcgtcgtgtacaaggctcgcgatcgccgcaccggcgagacggtcgccgtcaagtggggcgatgcaccgcgccggcatggcgcaccgcgacatcaagccgggcaacatcctcgtcggcccgggcttcgcgcgatttgcgacttcgggatggccacgacggcgccgccgccgtacgagccgtacatggtcggcacgctccactacaactcgccggagcagctcaccgagagcgggctgaacggcaagtacgacgccaaggtcgtggacatgtgggcggcgggctgcgtgatggccgagctcctcaccggcggcagagcgttcacgtcggagacggcgaaggagcacctcctggagctggtggagctgagagactacgacatcgggtccaggaactcgctggcgttcggcggcctgcggtggctgtcgccggcggggcgcgaggtgctcgctgggctgctggccttcgacggcgacaagaggatgacggcagaggcggcgctggagcaccggtggttcacggaggaggccgactcccctgccgtcctcagctgtctcgccgccatagcttcatga

SEQ ID NO: 33438 - DNA, 1183 bp, Oryza sativa
  Clone ID: PAT_MRT4530_3754C.1
caatgtttcattgtttcaggggcacgccaactgaatgacttctctctcctgaggaggaggctaagttcgagtatgcagattgcttgttccatggagcatttataagtgtattggatgaaaacatattggacgtgtgcacgcacatgccttcaggtaaggatatgtgggatgcacttgaagccaagttcagagtttccgatgctgccaatgagttgtatgtcatggaacagttctatgactataagatggtcgatgaccgttcggtagtagagcaagctcatgagatttaggcactagcaaaggaacttgagaacaaagctgcaagttaccgggccagtttgtggtgggtggcattattttcaaattgccaccttcttggttagactttaccacttctctaaaacacaacatgaaagagttcaatgttactaatcttagtgactctttgggtgttgcagagaaggcgagggcaaaggtcaaccgtagcaaaaagattgagggaggttctagcaccaatctggtgtagaagaagaaccctcaagtctcccacaacaagaagaaggtcaaacctgatgtcaaacccaaggttactagaaatcaaggaaaaaaaaaggcaagggaaagacaaatgacaactactttgtgtgcagcgagcctagtcattgggccaaagaataccctaattacaaggataaaaagtctgcaaacatggttattagcgatggaggaggaacatcgaggtatggtaaatttttacctacaattctttttgtttttcattcacatgagtagtggttgatacatattctaatattcatgtgtgtgttgatatttccctgttttcttcttatcaggttagaagaggtttctccttgctgatagagaatgattcgcatgcagttgttcatagtgttggtacggtcgatctgaagtttatttcggaaaaaagactgtgcagctgaaaaacgagcagcatgtcccctcaataaaaaagaatcttgttagcggctctctattttgtatagatggttttaaacttgtgtttaagtccaataagtatgtcgtatccaaatatggaacatttgttggtaaaagttatgacaacggagcgcaagcaaggcagcaggcaccaaggtaaattaagttgacagatgatgatttgctagctatatatatcatttct

SEQ ID NO: 33439 - DNA, 1077 bp, Oryza sativa
  Clone ID: PAT_MRT4530_37550C.1
atggagtcaaatctggacatgccagtggacaagcatccgccgttgttggtgcgagacctccacatcatgatggacacgtctcggcacgtcgcctacgccagcctgctcgcccacatcgtcgccggtgtccgccaatcctctggtctaatcctcaacaccttcaacgccatcgagcgcaccgacgtcgagcagatccggcgcgacaccgccatcccagtgttccccgttggccccctccacatgctctcgccaccagcgacggtggcgacgcagaaaagcagcctgctcctcgaggaccgcagctgcctggaatggctgaacacgcagctcccaggctccgtgctgttcgtcagcttcggcaccctcgtctccattgacgccgacgagctcttggaggtggcttggggcctcgctgccagcaaccggccgttcctgtgggtggtccggccaaggctggtccgtgggcgcgactccgtcgagctccccagcgagctgctcgaggagacacgtggcagagggaggatcatcaggtgggcaccacaagaggaggtcctgagccaccccgctataggcgcgtttttgacacactgtgggtggaactcgacgctggagagcatatccaggaccgtgccgatgatatgcaagccatgtggcggtgaccagttagggacggcgaggtatgtatgtgacatgtggaaggtgggtgttagggttgaggtcgaggataagctgaccagagggggaatacaggcagcgattgagaggttgatggatgggatagagggtggagtagttagagataggatgagagagatgggtgatgtcgtgtcaaaatgcactacgaaaggtggttcttctgatttagccctacaggacttggttgactttatcaagtcgtcctagaaattatttctagcattaaaattttagtgaacatttttctgcgacaattattcttatgaatttatcgcatttggtaattggcacatgaaaatgtcttacacaccacttgtattaagctcagcccaggatttggaacctcatctagaaacatttcacatcaaaaaaaaaaaaaaa

SEQ ID NO: 33440 - DNA, 570 bp, Oryza sativa
  unsure (1)..(570): unsure at all n locations
  Clone ID: PAT_MRT4530_37551C.1
tcgattttgtgacatcgagtagtctatatgaaacagacgagttacttgtttttgtgttattcatgcgtagatgagattgtacactgttaacacacatacatcgtgtttccagcaatttttactaggagtaatatctacttttatttttactaggtatcagctagattacagaaggacaataggttctgatggaattgtcgaaatctgccaccaatgtgttttgatttttctggttgatacaggggagggagatgagatgcataaactgcatcttgtcactgtttactagtactggttcaccaaaatttatctgacacaccaatatttttcccagtttacatggcactggggatactagtgtagtataaacatatattttgcacacaacatatacaactctgaagcattgcacaagaggaagctgttaaaatgaagcgataattgtacattatataactntatgtatcgataaatatatattntctggttgataccatgggaggagtggcatctactgatttttttaactaaatttgaacatgttcactatatctgacatacagtaacatg

SEQ ID NO: 33441 - DNA, 398 bp, Oryza sativa
  Clone ID: PAT_MRT4530_37552C.1
ctcacatgaggctatcctcgccccactggcaattggatatgcggtgaacgtgcatcacctgggcaccatacgcatcaccggtactggcatcaacccaacccggagccttggcgctaccatcatctacaacaaggaccagtgcctggaatgaccattggaccttatgcgttggtccctacagaggcgctgccctggctgccatgtacgaccaggtgatcatcagggcgaccccattcaagatcatgtcttaagccctgtgccaactgtgcacatggcgctacatgcagcacagtcgagatgttctgtatcccgcgcgctactgctgcgcatatgtcgattccctgtatctatagtccacaagatgtttatgctatctgaaccctgaacaactcaatcga

SEQ ID NO: 33442 - DNA, 186 bp, Oryza sativa
  Clone ID: PAT_MRT4530_37553C.1
atgaagaatctaggaggaaaaaagcggcgcgagatagaagaggaagcggttggtgaagatgcaggcggagacgagcaagctgaggccgagcacatcggcgccagagcattcatcgaagatgcagcacaagagagatggggaagagaggggagaaggggagataggaggaagaagactggcctctga

SEQ ID NO: 33443 - DNA, 248 bp, Oryza sativa
  unsure (1)..(248): unsure at all n locations
  Clone ID: PAT_MRT4530_37554C.1
atgatcgaggtggtgctcaacgaccgcctgtggaagaagatgcgcgtcaagagcaacaaggacgacaccatcntcgacctcctagaagatgtttnntggcgcagacgagngacgcgcgccgccgaagaatcctccatccancaagtggtacaacatctntcaaaggccacatcaccctcgncgactattgagatcccncgacgggatgtggcctcgaggtcttttacgactagtcgacctctctgtct

SEQ ID NO: 33444 - DNA, 828 bp, Oryza sativa
  Clone ID: PAT_MRT4530_37555C.1
acgagtgtgtgcatacgcgttgggagagtaggcctccgaaaccagcgctgctgcgacgtttgcacggacgggcgggcgatcatgtttttggggagcacaaggcacgactactcactgttcgtcaacatctacttcaccttcaccaacatgtcgaacactggagacaacggcaacagtggagacaaagagaaggaggctcccgtcaacaccaacggaggcaatactgccccaaactccggcggaggaccattcttgggggagcgggcaatccgccgccgcccgccgcccgccgccgccgagtcctccggcgaaggacagaaccacaggcgccaacaggagcgaagaagaagcagtgaaacacaagtgctcgacgaaatgggggcgtcgggtcggagtgcgaagaggaggaggaggtcgggaccacctgagatcggagaagcggaggagcatccggcggcggcggaggaggacgaagaaggcgccgaccacatcagcaacctcccggacgccatccttggcgacatcgtcgcccgcctccccaccaaagaagccggcagcacgcagatcctcgcctgccggtggcgccacatctggcgctcctcttcgctcaacctcgactgcactactaccagcctaagcgccaagaacgacgccctcgccgctggcgtggtctccagcatcctctccacccatcctggcccctgccgccgtctgtgcgtcccagcgcaccacctcgtcgaccggccggacgccgtggacgcctggctccgatccgccacgctcgacaacctcaaggagcttagagttcatcagcgaacgctactgtag

SEQ ID NO: 33445 - DNA, 225 bp, Oryza sativa
  Clone ID: PAT_MRT4530_37556C.1
tttttgttttgttttttttttttttggttttttggtttgttaagcaaaggcaagagctgtgttattgataatgatggggaaaataaacgccaaaaggggtgacacgggagcaactgacttacgacacagaaaacagacgttagcacgccggaccccgtccggttgcttgtgtaaaacgaagcgagagcgtgaatggaatggacctaaaatgggcgaggcgcgcga

SEQ ID NO: 33446 - DNA, 654 bp, Oryza sativa
  Clone ID: PAT_MRT4530_37557C.1
atgctcgcggcgaggacacgattcgccggcggcggcggcgcggcggtcgtgctgctgctaatcgtcgcgtcgacggtggccaccagggcggccgtcgccgacgatttcttctcccctctcagcccgctcctcgcccctgtaatcgggtcgatgtgcaagacggtggcgtgcgggaaggggaactgcacggcggcgtcggggttcccggggtacaggtgcgagtgcgagcctgggtggaagcagatgcacgtcggcgaccaggccagcttcctgccctgcgtcatccccaactggggcaggatctggagcgacggcggcggtgagggtcggagcggcagcggcgatggcggcacggcgtcgaactcctcctgtacggcagcatcctcatcggccggtgctgctactcatccggggttcatgtatggccgcatccccatcgccctcgctcgccagatcagggagcggtacacccggcctggcgccattgccgagcaggccgggccaggagctgggagcgcgcaccgcggcaggtgtcagtggagcccgacgatctggaggagttcgacgccgtgcagccgcagccgctccggccctcgcccctccgccgccgctccgaccctcaccgccaacgccgctccagatcctgtcccttag

SEQ ID NO: 33447 - DNA, 990 bp, Oryza sativa
  Clone ID: PAT_MRT4530_37558C.1
atggcagctcctgcaccatccagttttaacttgcggtctattcttgagaaagagaagttgactggaacaaacttcatggattggcatcgcaacctgagaattgttctctggcaagagcacaaagagtttgtgcttacacagccttttccagctggcttgcccaacaatgctcatgctgctgaacgtagggagcatgaaaagcgatgcaatgattatcttgatataagctgtctcatgcttgctactatgtcccctgagcttcaaaggcaatatgaggcattggatgctcatacaataatcacgggactacgtaacatgtttgaggaccaagcaagagctgagaggtttaatacctcaaagtccttgtttgcgtgcaggcttacagaaggtaatccatcgctccctcccagctttgagctgatcataatgaattttaacatgaacaacctgaacaagaccttggcagaattgcatgggatgctaaagactgccgaggaaagcattaagaaaaactccaaccatgtgatggttatgcataagcgcaagcccaacaataagaagagtggtcaaaagagaaagctaaactctaatgagatcacgagtactagcaactctaagaccaaggttcaaaagacagggcccgctaaggatgcagagtgcttcttttgcaaggagacaagtcattggaagagaaaccgtaagaaatacctagagcagctcaagcataagcagcaggatggaaagagttccacctcaggtattaatgttatagaaattaatcttgctacttcctctgctgattcttgggtatttgatactgggtcagttgctcacatatgcaaatcgttgcaggggctgaaaagaagtatgagcttagcaataggcgaagtggacattcgtgtgggcaatggagcaagagttgctgcatgttgttgtggttggcactatgccattatctttaccgtcaggattagttttggagttaaataa

SEQ ID NO: 33448 - DNA, 995 bp, Oryza sativa
  Clone ID: PAT_MRT4530_37559C.1
atctgctgcgcccgggggcggacagagtccaagaaggaatccaagaatcgagagaaatcgagatgctcgcggcgaggacacgattcgccggcggcggcggcgcggcggtcgtgctgctgctaatcgtcgcgtcgacggtggccaccagggcggccgtcgccgacgatttcttctcccctctcagcccgctcctcgcccctgtaatcgggtcgatgtgcaagacggtggcgtgcgggaaggggaactgcacggcggcgtcggggttcccggggtacaggtgcgagtgcgagcctgggtggaagcagatgcacgtcggcgaccaggccagcttcctgccctgcgtcatccccaactggggcaggatctggagcgacggcggcggtgagggtcggagcggcagcggcgatggcggcacggcgtcgaactcctcctgtacggcagcatcctcatcggccggtgctgctactcatccggggttcatgtatggccgcatccccatcgccctcgctcgccagatcagggagcggtacacccggcctggcgccattgccgagcaggccgtgtcatcggtgcgcacgaatgcacgatgtactcgtttgtggcagagcggatcaccatggctcagttcttggcggagccgtgtcttgatgaccggagacaagccggcaagcacatggacgctcgtcgtcacgggtcgccacagcgagagatcccccatgtacacgctatcaatcgatcacaagaataagctagctaccggtggtgctgctcgtggtggtggtggtggtggtatctttgtcggcgccaccaccggcggccgtgtccagtgcgccgctcatgggccaggagctgggagcgcgcaccgcggcaggtgtcagtggagcccgacgatctggaggagttcgacgccgtgcagccgcagccgctccggccctcgcccctccgccgccgctccgaccctcaccgccaacgccgctccagatcctgtcccttag

SEQ ID NO: 33449 - DNA, 621 bp, Oryza sativa
  Clone ID: PAT_MRT4530_3755C.1
atggcggcggcagttactggcggtggcggcggcggcttcaggcggtggctgcgcgaggggtggagccagcggcggctcccctccttcctcccagatccggtggaggcggagccattcagaataagacatccaggcaaagtcaacggaaaaaggccgaagatcctagctcaatattcaaggaatagattcccttcattactcatgttaatgttgggaggggcaacccactatactcagctcgtggatcttcatgaatggagctgccagcatcataatgacaaccaaataggagtacaagataagatggcttcaataggggctgcgctatctgggttaaagaacagcagcttcaccacaatgggtgctgagaagttgcctgatcagatgcatgatctgaagataagggatgacaatgaagttcaagtgactaatattaacggcaagggagcagaaaccggccacataattgtcacaactactggtggcagaaatggtcagccgaaactgacaaaatgtaaaagtgcttgggaagacatgttgaatactgagcatgcagctgcgctgaactggtttgaagataccgtccgcatccgtgaccagaccgtccgccaccacagatga

SEQ ID NO: 33450 - DNA, 431 bp, Oryza sativa
  Clone ID: PAT_MRT4530_37560C.1
acctgacaggcatgcacagaacctcccaaatggtatactattggtgcctagaccgatctctgcacgctcttgtaaccacagatcaatctgtagcccgaggtattgtgccgccgactcctgcaaccataggatcgatggtgcaccattcaatctactattcaatatttaatatactaactaagtcacttgggcatagttttagatcttggacccatggtaaatttaaaatttttacgttaaattatagcggtgcaaagttttaaattttatctaaatcgggaattaaatgatttatctaaatgttatcaacgtaatcgtagatctagattcattgatttgtaaagctagaaatacccatctctaataaatcttaatttgatccaaaaatgtaccaaaaagatctaagtacattgtcagatttatacaaacgt

SEQ ID NO: 33451 - DNA, 3684 bp, Oryza sativa
  Clone ID: PAT_MRT4530_37561C.1
atgactgaaaaactaccaccatcaccgggaacaggagtcaaacctcctgtgaacaaaacagaagccaaaaatccatcagctgaagtggacccttccaacattgttccaattacattggataggctgacagctgagcaaagggatgagcttgaacagatgatgagcaacgtgaagaacaagttcatggattcttttcaggagacccgcagagaaaccatcccgatgaggtcggctcgagttcatctcaaggtgacaaaggtactgcaactggctcaggtgacaaaggtgacattcctcaagatgtgggctgatttggagaagcagttgcatagttatttttacagtggaattcatgagatgaaactgtccgatttaaccgcaattaaacaaaggcatgatgagtctgtgcaagattacattcaaaggttcagggagatgagaaacagatgttacagtttatctttgacagattctcagttagccgatttggcttttcaggtgttgatagcaccaatcaaagaaaagttttcggctcaagattttgagagtttatcacatcttgcacaaaaggtgactctacatgagcaaaggtttgctgaggcaaagaagaacttcaagaaaatcaatcatgtatatccttacatgtgtgattctgatgatgaggatgatgattccgaagttgcagcagccgaatgggtcaagagaaagaaagtcataccatgccaatgggtaaagagctctggaaaagaggaaaggtttgacttcgacatcaccaaggccgacaagatttttgacatattgcttcgagaaaagcagatacaacttcctgctggtcatataattccatcggctgaggaattaggaaaaaggagatactgcaaatggcataattctggttctcactcaaccaatgattgcaaggtttttaggcagcaaatccaggcagccattgaaggggggaagatcaaatttgatgattcaaagaagccaatgaaagttgatggcaaccctttccttgttaatatggtgcatacgtctgaaagggcagccgatggggggagtaatagaaaatttcaggtgaattcggctaggattataagcaaataccagaggaagtatgataggcagcaaggtgaatatcatgaagaagatggcggttttgatcctcattgggattgtgaattttttagattttgctggaatgagggtatgaggctgccatctatcgaggattgccctggatgcagtaatgcagggaattcgagccgatcctattctagagccgaatttgaagctaaacaagccgatgttgatgatgttgaagaggcttcggctaaggtagttttgtcaccagagcaagcaatttttgagaagccagaagggatagaaaatcggcatctcaagcctttgtatattaatgggtttgccaatgggaagccgatgtccaaaatgatggttgacggaggagctgctgtgaatttaatgccatatgctacattcaggaagttgggcagaaatccaaatgatctcattaagaccaatatggttctcaaagattttggtggtaatccatcagaaaccaaaggagttttaaatgtggagctgacagtcggcagtccgggagacagaccacggccgacatttattagtaagaatttatcttcagaatttagaaccaagttgatagagcttttaaaagagtacagagattgctttgcttgggagtattatgagatgccaggactcagccgatcggttgtcgaacatcggcttcctattaagcctgggattcggccatatcagcagccaccaaggaggtgcaaagccgatatgcttgaggttgtcaaggctgaggtgaagcacttgtatgatgctggttttattcatccatgccgatatgctgaatgggtttcaaatatagttccagttatcaagaagaatggcaaagttagggtttatattgatgatgaggttgttatatcaaaggaaatagaagaccacatagccgatttgaggaaagtttttgagagaactcggaagtatggcttgaagatgaacccgacaaaatgtgcttttggaaagttagaaccttttacacctttgttgagattgaaagccgatcaaaagttcacttggggggcagagcagcaaaaagctttggataatatcaagaaatatcttagttccccaccagttttgattcctccacaaaaagggatatcttttagattatacctatcggctggtgacaagtcgatcggctcagtgttgattcaggagcttgaaagaaaagaaagggctatattttatttaagtcgaaggctcttggatgcagagacaaggtattctccagtggaaaaattgtgcttgtgtttgtatttttcttgcaccaagttgaggcattatctattgtccaatgaatgtactgtgatatgtaaagccgatgtggttaagtatatgctatcggctccaattctaaaagggagggttggaaagtggatatttgctttgacagagtttgatcttcggtatgaatcaccaaagacgattaagggacaagctatagccgattttattatggatcatcgtgatgactcaatcggctcggttgatatcgtaccttggactttattcttcgatggatcagtatgcactcatggttgtggtattggcttggttataatttctcctcggggggcaagttttgagtttgcttacactattaagccttatgtaactaacaatcaggccgaatatgaagctgttctcaaagggttgcaattgcttaaggaagttgaagccgatgctatagagatcatgggtgattcattattggtaatcagtcaattggcaggagaatatgaatgcaagaatgatacattgatggtttacaatgaaaagtgccgagaattgatgagtggatttcggctcgtaactttgaaacatgtatcacgagaacagaatgttgaggctaatgatttggctcaaggggcatcaggatataagccaatgttgaaagatgttgagatagaagttgctacaattacagccgatgattggagatatgttgtatttcagtatttgcagaatccatctcaatcggcttcaaggaaattatgttataaggctttgaaatacaccttgttggatgatgagttatattatcggacgattcacggggtgttactcaagtatttgagtgctgatcaagccatggttgtgatgggcgagattcctccttacaagcttgtttatggacatgaagcagttttaccatgggaagttagaatcggctcaagaagaacatatttgcaggatgaattgaccaccgatgaatattacaatctcatggctgatgaaagagaagatttggtccagtcaaggttgcgagctcttgcaaaagttaccaaggataaggaaagagttgctcggcattataataagaaagtggtgcctaaatctttttctgaaggagagcttgtttggaagttgatcttgccgatcggaactcgtgataataaattcggtaagtggtcaccaaattgggaaggaccgtttcagatccacaaagttgtgtccaaaggagcttatatgttgaaaggacttgttggaaaggtttatggacgggcactcaatggaaaatatttgaagaaatattacccaaatgtgtgggttaatttatga

SEQ ID NO: 33452 - DNA, 3980 bp, Oryza sativa
  Clone ID: PAT_MRT4530_37562C.1
atcatggcagctcctgcaccatccaattttaacttgtggtctattcttgagaaagagaagttgactagaacaaacttcatggattggtatcgtaacctaagaattgttctcaggtaagagcacaaaaagtttgtgcttacacagccttttccagctgactttcccaacaatgctcctgccgctcaacgtagggagcatgaaaggcgatgcaatgaataccttgatataagctgtctgatgcttgctactatgtcccctgagcttcaaaggcaatatgaggcattggatgctcatacgataatcacgggactacgtaacatgtttgaggaccaagcaagggctgagaggtttaatacctcaaagtccttgtttgcgtgcaggcttgcagaaggtaatccagtgagcccacatgtgatcaaaataattggttacaccgagagtctggataagcttggctttccccttagccaagagttggctactgatttgattctccagtcgctccctcccagttttgagccattcataatgaatttcaacatgaacaacctgaacaggaccttggcagaattgcatgggatgctaaagactgccgaggaaagcattaagaaaaactccaaccatgtgatggttatgcataagcgcaagcccaacaacaggaagagtggtcaaaagagaaagctaaactctgatgagatcacgagtacaagcaactctaagaccaaggttcaaaagacagtgcccgctaaggatgcagagtgtttcttttgcaaggagacaggtcattggaagagaaactgtaagaaatacctagagcagctcaagcagaagcagcaggatggaaagagttccacctcaggtattaatgttatagaaattaatcttgctacttcctctactgattcttgggtatttgataccgggtcagttgctcatatatgcaaatcgttgtaggggctgaaaagaagtaggagcttagcaagaggcgaagtggacattcgcgtgggcaatggagcaagagttgctgctgttgcggtcgacactatgccattatctttaccgttaggattagttttggagttaaataattgttattgcattccagctttgtgtaagaacgttatctctgcttcttgtttgcaagcagagggttatggttttagatctatggacaatggttgttcagtctattataatgacattttctatttccatgcacccatgatgaatggcttatacattgtgaatcttgatggatgttcagtctataacattaatgcaaaatggcaacgtcctaatgatttgaatcccacttttatttggcattgtcgcttgggtcatataaatgagaaacgcatggagaagcttcatagagatggacttctacactcgtttgattttgaatcatttgagacatgtgaatcttgttaacttggcaaaattacaaaggcacctttcacgggtcaaagtgaaagggcaagtgaactattgggaccagtacatactgatgtatgtggaccaatgagctcaactgccagaggtggttttgggtactttattacctttaccgatgactttagtagatatggttatgtctacttgatgaggcataagtctgagtcctttgaaaagttcaaggaatttcaaaatgagatacaaaatcatttgggcaagacaatcaagtatctacgatctgatcgtggtggagagtacttgagccttgaatttggcaatcatctaaaggagtgtggaattgttccacaactcactccgccaggaacgcctcagtggaatggggtgtctgaacggaggaatcgtacattgttggacatggtgcgattaatgatgagccaaactgatctgccgctaagcttttggggttacgctctagagacagctgcgttcacactaaatagggttccatcaaaatcagtggataagacaacatatgagatatggacagggaagcgtcccattttgtctttcctaaagatttggggctgtgaggtctatgtaaaacgtttgcaatcagacaaactcacacctaaatcagataaatgcttctttgtggggtatcctaaggaaacgaaaggatattatttttatcatcgggaagagggcaaagtgtttgtcgcccgacacagtgttttcttggaaaaaaagtttatttcaagaaaggatagtgtgagcatggtgtgacttgaagaaattcaggaaacaccagaaaacgctccaacgtccacacaaccacaagctgagcaagatgttgttcaacaggttgaacaagctgttgttgaaccagttgtggaagcaccggcttcacgaaggtccgaaaagatacggcgtacacctgcgaggtatgcgttgttaactacagtacaatgtgatatattgttgttagacaacgatgaacctactacctatgagaaagcaatggtgggaccagactctgagaaatggcttggaaccatgaaatccgaaatagaatccatgcatgtcaatcaagtttgaaaattggttgatccacctgatgatgtaaaagccattgagtgcaaatgggtctttaagaaaaagacagatgtagatggaaatgttcacatctacaaggcacgattggtgacgaaaagtttcaaacaaattcaaggtgttgattatgatgaaactttctcgccagtcgccatgttaaaatctatttggattgttttagcgattgctggctatttcgattatgagatatggcaaatggatgtcaaaacagctttcctcaatggaaatctctatgaggatgtgtacatgacacaacccaagggatttgttgatccacaatcagctaaaaagatatgcaaattgcataaatccatttatgggttgaagcaagcatctcggagttggaatattcgttttgacgaagtagtcaaggcgttaggctttgtaaaaaatgaagaagagccttgtgtatacaagaaggttagtgggagcgcattggtgtttctaatcctatatgtagatgacatattattgattgggaatgatattcctatgcttgaatccgttaagacatcgttgaaaaatagtttttcaatgaaggacttaggggaagtagtatatattctgggcataaggatctatagagataaatcaaagaggctaattggattaagccagagtacatacattgacaaggtgttgaagaggttcaacatgcaagattctaagaaaggtttcttaccgatgtcacatggcattaatcttggcaagaatcagtgtcctcagacgactgatgagtgaaacaagatgagtgtgatcccatatgcctcggcaatcggatccattatgtatgctatgctatgtacacgtccaaatgtttcatatgcacttagtgcaacaagccgataccaatcagatccaggtgagagtcactagataactgtaaaaaatatcctgaagtatttgagaagaactaaggatatgttcctagtctatggaggataggaagagctcgttgtaaatggttacactgacgcaagcttccaaaccgacaaagatgattttagatcgcagtctggatttgtgttctgcctgaatagaggcgctgtgagttggaagagttccaagcaagatacagtggctgattctacaacagaagccgaatacattgccgcttctgaagcagcaaaggaggttgtttggataaagaaattcgtttctcaactaggtgtgatgactagtgcttctagccctatggacctctattgcgataatagtggtgccattgcgcaagccaagggcctagatcgcatcaaaagtccaaacacattttacggcggtatcacctcattcgcgagatagtgggtagaggagatgtgaagatacacaaaatacatacggatttgaatgttgcagatccgttgacaaagccactccctcagcctaagcatgaggcacaaactagggcaatgggtgtaatatacattcatgat

SEQ ID NO: 33453 - DNA, 312 bp, Oryza sativa
  Clone ID: PAT_MRT4530_37563C.1
ccggccggaacatctatccctctcatactaattcagactaaagattttctgctgacaaaaagccatggtttccaacaaggcaatgttctcggcgttgctcctcatcatcgtgtccgtgttcgccgcgactgtgaccatggcggaccaccacgaagaacaggtggtgtacagactcttagagagttgtcatccaagaatggactacccgatgtactccctgccacactgacggccgaaggtgaagcgactgagcacgtgccacagagcaaccgatgattgccgtgcacgagcaactcctgtaggactgctggc

SEQ ID NO: 33454 - DNA, 1840 bp, Oryza sativa
  Clone ID: PAT_MRT4530_37564C.1
gcgtgacagagaacaatttcaggaagtacgacaggagattaatcatcggctgaagaaaacaaagactaggcaagagtggcacgttaagagcacagttacaacagccgatgaagtcgaaaccgataaagcaagaaggttgctcaagggtaaggccgttgcatctgcatcggtgaacatggtttttacgctaccagccgaatttgaagctaagcaagctgaggttgatggtgttgaagaggctttggctaagttagttttgtcaccagagcaagcaatttttgagaagccaggagtgacagaaaatcggcatctcaagcctttgtatattaatgggtttgtcaatgggaagccgatgtccaaaatgatggttgatggaggagctgctgtgaatttaatgccatatgctacattcaggaagttgggcagaaatccagatgatctcattaagaccaatatggttctcaaagattttggtggcaatccatcagaaaccaaaagagttttaaatgtggagttgacagttggcagtaaaactgttcctacaacgtttcttgtcatcgatggaaagggttcttacagcctgttgcttggaagggattggattcatgctaatcgttgtattccttcaaccatgcatcagtgcttgattcaatggcaaggtgacaagattgaaattgtaccagccgacaggtcagttaatgttgctaatgctgatttagctctttgggagatggacggtattgattgcttgtctggaaaaggcattgtggagggttcaaacgtctacaacaaggacacggtagacgatctcgatgccaagcaaggacagggtttcatgtcggctgacgatttggaagaaattgacataggtccgggaggcagaccacggccgacatttattagtaagaatttatcttcagaatttagaaccaagttgatagagcttttaaaagaatacagagattgctttgcttgggggtattatgagatgccaggactcagccgatcgattgttgtacatcggcttcctattaagcctggaattcggccgtaccagtagccaccaaggaggtgcaaagccgatatgcttgaggctgtcaaggctgaagtgaagcgtttgtatgatgttggttttattcgtctatgccgatatgctgaatgggtttcaaatatagttccagttatcaagaagaatggcaaagttagggtgtgcattgattttcgagatcccaaggacgagtacccaaggccaatagccgatcagttggttgatgctgcttcaggacataagattttaagttttatggatggcaatgcaggttacaatcaaatttttatggccgaagaagacattcatcagatagcttttagatgtcctgttgcgatcggcttgtttgagtaggttgtaatgacttttggcttgaagagtgcggaggccacatatcaaagagccatgaattatatatatttcatgatctgatcagctggtttagttgaggtttatattgatgatgtggttgttaaatcaaaggaaatcgaaaaccacatagccgatttgaggaaagtttttgagagaactcgaaagtttggtttgaagatgaacccaacaaaatgtgcttttggtgtgtcggctagtcagtttttgggatttcttattcatgacagggggattgaggtgcctcaaaggagtattaatgcaattcagaacattcaacctctggaggacaagcacaaagttgcaggagttgatcagcaagataaattttgttagaaggtttatatctaacttatctggaagattagagccttttacatctttgctgagattgaaagccgatca

SEQ ID NO: 33455 - DNA, 3977 bp, Oryza sativa
  Clone ID: PAT_MRT4530_37565C.1
atcatggcagctcctgcaccatccagttttaacttgcggtctattcttgagaaagagaagttgactggaacaaacttcatggattggtatcgcaacctgagaattgttcagacaagagcacaaagagtttgtgcttacacagccttttccaactgacttgcccaataatgctcctgctgctcaacatagggagcatgaaaagcgatgcaatgattatcttgatataagctgtctcatgcttgctactatgactcctgagcttcaaaggcaatatgaggcattggatgctcatacgataatcacgggattacgtaacatgtttgaggagcatgcaagagctgagaggtttaatacctcaaagtccttgtttgcgtgcaggcttacagaaggtaatccagtgagcccatatgtgatcaaaatgattggttacaccgagagtctagataagcttggttttccccttagccgagagttggctactgatttgattctccagttgctccctcccagctttgagccattcataatgaatttcaacatgaacaacctgaacaggaccttggcagaattgcatgggatgctaaagactgctgaggaaagcattaagaaaaactccaaccatgtgatggttatacataacgcaagcccaacaacaagaaaagtggtcaaaagataaagctaaactctgatgagatcacgagtactagcaactctaagaccaaggttcaaaagacagggcccactaaggatgcagagtgcttcttttgcaaggagacaggtcattggaagagaaactgtaagaaatacctagagcagctcaagcagaagcagcaggatggaaagagttccatctcaggtattaatgttatagaaattaatcttgctactttctctactgattcttaggtatttgatacctggtcagttgctcacatatgcaaatcattgcaggggctaaaaagaagtaggaacttagcaagaggcgaagtggacattcgcgtgggcaatggagcaagagttgctgctgttgcggtcggctctatgctattatctttaccgtcaggattagttttggagttaaataattgttattgcattccagctttgtgcaagaacgttatctctgcttcttgtttgcaagcagagggttatggttttagatctgtggacaatggttgtttagtctattataatgacattttctattcccatgcacccattatgaatggcttatacattgtgaatcttgatggatgttcagtctataacattaatgcaaaaaggcaacgtcctaatgatttgaatcccacttttatttggcattgtcgcttgggtcatataaatgagaaacacatagagaagcttcatagagatggacttctacactggtttgattttgaatcatttgacatgcgaatcttgtttacttagcaaaatgacaaaggcacctttcacgggtcaaagtgaaagggcaagtgaactattaggactagtacatactgatgtatgtggaccaatgagctcaactgctagaggtggttttgggtactttattacctttaccgatgactttagtagatatggttatgtctacttaatgaggcataagtctgagtcctttgaaaagttcaaggaatttcagaatgaggtacaaaatcatttgggcaagacaatcaagtatatatgatctgatcgtggtggagagtacttgagccttgaatttggtaatcatgtaaaggagtgtggaattgttccacaactcactccgccaggaacgcctcagtggaatggggtgtctgaacggaggaatcgtacattgttggacatggtgcgatcaatgatgagccaaactgatctgccgctaagcttttggggttacgctctagagacagctgcgttcacactaaacagggttccatcaaaatcagtggataagacaccatatgagatatggacagacaagcgtcccagtttgtctttcctaaagatttggggctgtgaggtctatgtaaaacgtttgcaatcgaacaaactcacacctaaatcagataaatgcttctttgtggggtatcccaaggaaacggaaggatattatttttataattgggaagagggcaaagtgtttgtcgcctgacacggtgttttcttggaaaaagagtttatttcaagaaaggttagtgggagcatggtttgacttgaagaaattcaggaaacaccggaaaacgcttcaacgtccacacaaccacaacaagctgagcaagatgttgttcaacaggttgaacaagttgttgttgaaccagttgtggaagcaccggcttcacgaaggtccgaaaggatacgacgtacacctacgaggtatgcggtgttaactacaggacaacgtgatatactgttgttagacaacgatgaacctactacctatgaggaagcaatggtgggaccagactctgagaaatggcttggagccatgaaatccgaaatagaatccatgcatgtcaatcaagtttggaacttagttgatcaacctgatggtgtaaaagccattgagtgcaaatgggtctttaagaagaagacagatgtagatggaaatgttcacatctacaaggcacgattggtggcgaaatgtttcagacaaattcaaggtgttgattatgatgaaactttctcgccagtcgccatgctaaaatctattcggattgttttagcgattgctgcctatttcgatttgagatatggcaaatggatgtcaaaacagctttcctcaatggaaatctcgatgaggatgtgtacatgacacaacccaagagatttgttgatccacaatcagctaaaaggatatgcaaattgcagaaatccatttatgggttgaagcaagcatctcggagttggaatattcgttttgacgaagtagtcaaggtgttgggctttgtcaaaaacgaagaagagccttgtgtatacaagaagattagtggagcgcactggtgtttataatcctatatgtagatgacatattatagattgggaatgatattcctatgcatgaatctgttaagacatcgttgaaaaatagtttttcaatgaacgacttaggggaagcagcatatattctgggcataaggatctatagagatagatcaaagagactaattggattaagccagagtacatacattgacaaggtgttgaagaggttcaacatgcaatattctaagaaaggtttcttaccaatgttacatggcattaatcttggtaagaatcagtgtcctcaaacgactgatgagggaaacaagatgagtgcgattccatatgcctcagcaatcggatccattatatatgctatgctatgtacacgtccagatgtttcatatgcacttagtgcaacaaactgataccaatcagatccaggtgagagtcactggatagctttaaagaatatccttaagtacttgagaagaactaaggatattttcctagtctatggaggacaggaagagctcgttgtaaatggttacacttacgcaaccttccaaaccgacaaagatgattttagatcgcagtctggatttgtgttctgcctgaatggaggcgctgtaagttggaagagttccaagcaagatacagtggctgattctacaacagaagccgaatacattgccacttctgaagcagcaaaggaggctgtttggataatgaaattcgtttctcaactaggtgtgatgactagtgtttctagccctatggacctctattgcgataatagtggtgccattgcgcaagccaaggagcctagatcgcatcaaaaatctaaatacattttacggcggtatcacctcattcgcgagatagtgggtagaggagatgtgaagatatgcaaaatacatacggatttgaatgttgcagatccattgacaaagccactccctcagcctaagcatgaggcacacactagggcaatgggtataagatacgttcatgat

SEQ ID NO: 33456 - DNA, 1662 bp, Oryza sativa
  Clone ID: PAT_MRT4530_37566C.1
atggttgttcagaatggttgggcctatacaacaggaaattccgggcgtgacagagaacaatttcaggaagtacgacaggagattaatcatcggctgaagaaaacaaagactaggcaagagtggcacgttaagagcacagttacaacagccgatgaagtcgaaaccgataaagcaagaaggttgctcaagggtaaggccgttgcatctgcatcggtgaacatggtttttacgctaccagccgaatttgaagctaagcaagctgaggttgatggtgttgaagaggctttggctaagttagttttgtcaccagagcaagcaatttttgagaagccaggagtgacagaaaatcggcatctcaagcctttgtatattaatgggtttgtcaatgggaagccgatgtccaaaatgatggttgatggaggagctgctgtgaatttaatgccatatgctacattcaggaagttgggcagaaatccagatgatctcattaagaccaatatggttctcaaagattttggtggcaatccatcagaaaccaaaagagttttaaatgtggagttgacagttggcagtaaaactgttcctacaacgtttcttgtcatcgatggaaagggttcttacagcctgttgcttggaagggattggattcatgctaatcgttgtattccttcaaccatgcatcagtgcttgattcaatggcaaggtgacaagattgaaattgtaccagccgacaggtcagttaatgttgctaatgctgatttagctctttgggagatggacggtattgattgcttgtctggaaaagtttgggatggagattttctaaagatggagagcccaaattattactttgagggcattgtggagggttcaaacgtctacaacaaggacacggtagacgatctcgatgccaagcaaggacagggtttcatgtcggctgacgatttggaagaaattgacataggtccgggaggcagaccacggccgacatttattattccagttatcaagaagaatggcaaagttagggtgtgcattgattttcgagatcccaaggacgagtacccaaggccaatagccgatcagttggttgatgctgcttcaggacataagattttaagttttatggatggcaatgcagctggtttagttgaggtttatattgatgatgtggttgttaaatcaaaggaaatcgaaaaccacatagccgatttgaggaaagtttttgagagaactcgaaagtttggtttgaagatgaacccaacaaaatgtgcttttggtgtgtcggctagtcagtttttgggatttcttattcatgagagggggattgaggtgcctcaaaggagtattaatgcaattcagaagattcaacctctggaggacaagacaaagttgcaggagttgatcagcaagataaattttgttagaaggtttatatctaacttatctggaagattagagccttttacatctttgctgagattgaaagccgatcaaaagttcatttggggggaagaacagcagaaaactttggataatatcaagaaatatcttagttccccaccagttttaattttgtcacgcccggaatttctatccaaaattccaaacgcttacttgtgtgtgaaccctcgtccaggaatcagccgaggcacgcaataa

SEQ ID NO: 33457 - DNA, 3691 bp, Oryza sativa
  Clone ID: PAT_MRT4530_37567C.1
atggagatccaatatgagcatacttcgtatagggatccaaataggagtcttacgggccttggaggcccgagtgatggatcctatatattcgtgaggggtgtgaccggtggaggcattgcatcaccgcgtcgagtggtaacgatatatgatctaatacttgcttggttcctggtttatgcgatagaaatgtttgatttatgctatcgtagcttacgcttatcccaacagtggatagatgtcggacatctatgtgcggagattattggtttacttgacaagatcatggcagctcctgcatcatccaattttaacttgcggtctattcttgagaaagagaagttgactggaataaacttcatggattggtatcgcaacctgagaactgttctcaggcaagagcacaaagagtttgtgcttacagagccttttccagctaacttgcccaacaatgctcctgctgctcaacgtagggagcatgaaaagcgatgcaatgattatcttgatacaagctatctcatgcttgctactatgtcccctgagcttcaaaggaaatatgatgcattggatgctcatacgataatcacgagactacgtaacatgtttgaggaccaagcaagagctgagaggtttaatacctcaaagtccttggttgcgtgcaggctagcagaaggtaatccaatgagcccacatgtgatcaaaatgattggttacgccgagagtctggataagcttggttttccccttagccgagagttggttactgatttgattctccagtcgctacctcccagctttgagccgttcataatgaatttcaatatgaacaacctgaacaggaccttggcagaattgcatgggatgctaaagactgctgaggaaagcattaagaaaaactccaaccatgtgatagttgtgcataagcgcaagcccaacaacaagaaaagttgtcaaaagagaaagctaaactctgatgagatcacgagtactagcaactctaagaccaaggttcaaaagacagggcccgctaaggatgcagagtgcttcttttgcaaggagacaggtcattggaagagaaactgtaagaaatacctagagcagttcaagcagaagcagcaggatggaaagagttccacctcagtctataacattaatgcaaaaaggcaacgtcctaatgatttgaatcccacttttatttggcattgtcgcttgggtcatataaatgagaaacgcatggagaagcttcatagagatggacttctacactcttttgattttaaatcatttgagacatgcgaatcttgtttacttggcaaaatgacaaaggcacctttcacgggtcaaagtgaaagggcaagtgaactattgggactagtacatactgatgtatgtggaccaatgagctcaactgccaaaggtggttttgggtactttattacctttaccgctgactttagtagatatggttatgtctacttaatgaggcataagtctgagtactttgaaaagttcaaggaatttcagaatgaggtacaaaatcatttgggcaagacaatcaagtatctacgatttgatcgtggtggaaagtacttgagcctagaatttggcaatcatctaaaggaatgtgcaattgttccacaactcactccgccaggaacgcctcagtggaatggggtgtctgaacggaggaatcgtacattgttggacatggtacgatcaatgatgagccaaactgatctgccgctaagcttttggggttacgctctagagacagttgcgttcacactaaacagggttccatcaaaatcagtggataagacaccatatgagatatggactgggaagcgtcccagtttgtctttcctaaagatttggggctgtgtggtctatgtaaaacgtttgcaatcagacaaactcacacctaaatcagataaatgcttctttgtgggatatcctaaggaaacgaaaggatattatttttataatcgggaagagggcaaagtgtttgtcgcccgacacggtgttttcttggaaaaagagtttatttcaagacaggatagtgggagcatggtgcaacttgaagaaattcaagaaacaccggaaaacgcttcaacgtccacacaaccacaagctgagcaagatgttgttcaacaggttgaacaagttgttgttgaaccagttgtggaagcaccggcttcacgaagatccgataggatacgacgtacacctgcgagtttggaactattggttgatccacctaatggtgtaaaagccattgagtgcaaatgggtctttaagaaaaagacagatgtagatggaaattttaacatctacaaggcacgattggtggcgaaaggtttcagacaaattcaaggtgttgattatgatgaaactttctcaccagtcgccatgctaaaatctattcggattgttttagcgattgctgcctatttcgattatgagatatggcaaatggatatcaaaatagctatccacaatggaaatctcgatgaggatgtgtacatgacacaacccaagggatttgttgatccacaatcagctaaaaagatatgcaaattgcagaaatccatttatgggttgaagcaagcatctcggagttggaatattcgtcttgacaaagtagtcaaggcgttgggctttgtcaaaaacgaagaagaggcttgtgtatacaagaagattagtgggagcgcactggtgtttctaatcctatatgtagatgacatattattgattgggaacgatattcttatgcttgaatccgttaagacatcgttgaaaaatagtttttcaatgaaggacttaggggaagcaacatatattctgggcataaggatctatagagatagatcaaagaggctaattggattaagccagagtacatacattgaaagattcatcatgtatgctatgctatgtacacgtccagatgtttcatattcacttagtgcaacaagccgataccaatcagatccatgtgagagtcactggatagctgtaaagaatatcctgaagtacttgagaagaactaaggatatgttcctagtcaatggaggacaggaagagctcgttgtaaatggttacaccgacgcaagcttccaaactgacaaagatgattttagatcacagtctggatttgtgttctgcctgaatggaggcgctgtgagttggaagagttccaagcaagatacagtgtctaattatacaacagaagccgaatacattgcctcttctgaagcagcaaaggaggctgtttggataaagaaattcatttctcgactaggtgtggtgactagtgcttctagcccaatggacctctattgcgataatagtggtgccattgcgcaagccaaggagcctagatcgcatcaaaagtccaaacacattttacggcggtatcacctcattcgcgagggagtatcaaatagagcgcttgccgtcgtggcaagattccagagtcgatgattttgccggcgatggattgatccacctgctatcgccacgactcggaggtcctgtgccgttgggtcacgcataccaacaacctgagatccaacaatctgagataatggtatggggaatgaccaaaacgccctcaaccgtcattgggaatgcatcagcaacgtatacgtggaaggccaggatcagaggagacggtgatggttcggccgaaccc

SEQ ID NO: 33458 - DNA, 1284 bp, Oryza sativa
  Clone ID: PAT_MRT4530_37568C.1
atggccaaaaaaccaccaccatcactgggaacaggagtcaaacctcccgtaaataaaacggggggcaaaaatccatcagctgaagtggacccaaccaatattgttccaatcacattggataggttgatagctgagcaaagggatgaacttgaacagatgatgagcaacgtgaagaacaagttcatggattcttttcaggagacccgcagaggaaccatcgtacaaaaatacaagctgaaggtggtcgcagccgatgaggtcggcccaagttcatctcagggtgacaaaggtactgcaattggttcaggtgacaagagtgatattcctcaagatgacactggaaatttatatcgagatccttatcctgagtggtttgagagggttccattgcctagccgatacaaagtacccgatttctcaaagttctcggggcaagataatatttcgacttatgaacatgtcagccgatttttagctcaatgtggtgaagcatcggctattgatgctttgagggttaagttgtttcctttatctttgtcaggatcagcattcacatggttttcttccttgccatacaattctgtcaatagttgggttgatttggagaagcagtttcatagctatttttatagtggaattcatgagatgaaactgtccgacttaacaacaattaaacaaaggcatgatgagtctgtgcaagattatattcaaagattcagggagatgagaaacagatgttacagtttatctttgacagattctcagttagccgatttggcttttcaggggttgatagcgccaatcaaagaaaagttttcggctcaagattttgagagtttatcacatcttgcacaaaaggtgattctacatgagcaaaggtttgctgaggcaaggaagaatttcaagaaaatcaatcatgtatatccttacatgtatgattctgatgacgaggatgatgattttgaagtggcagcagccgaatgggtcaagagcaagaaagtcataccatgccaatgggtgaagaactctggaaaagaggaaaggtttgattttgacatcaccaaggctgacaagatttttaacctattgcttcgagaaaagcagatacaactttccgctggtcatataattccatcagctgaggaattagggaaaaggagatactgcaagtggcataattctggttctcattctactataatgattgcaaagtctttaggcagcaagtccaggcagccattgagggaggaaagatcaaatttgatgattcaaagaagccgatga

SEQ ID NO: 33459 - DNA, 2340 bp, Oryza sativa
  unsure (1)..(2340): unsure at all n locations
  Clone ID: PAT_MRT4530_37569C.1
cccgggcaggagccccgccgggagaatccggggcgacgccaccacgtttcttggctcttactctttcctcctctcctctctgtctctcaccgacggcagcggcgggctcggcaccggcggcggcggcctcgaccgccgatcgccgacgccccgcgccgcctcctcgctcatcaggatgggctcggcggtgtgtgccggtgccggcgtgctcggtgcgccagacccgcgacgtcgccttcgaggccgaggacgcgctcgacgacttcctccggcggcagtccactttggtcgcggtcgcggcgacgtccccaacctccatgacgtcgtcgcctcggctactccggagcccactgcccctggccggatttggaagccagctacacaacgacgggcgccggcctgccgttcttcgccctcggcctccaccggcttcccttccgacgtcgccgccttgagctcctcctcacgccctccccgccggcccttcccgatctgctctacccaagccaccacgacgaccagatccaggaagtctctccatcgctctggtcctgacagtggctggaggaccccggccggttgcagcacttcatccccgcaaaaatatcaaagttgacatcgtcagcctcctcatttggataagaatttgtgaatcaggatgttccatctaatttggttttgctcgggttgtcaaatgctcgatggatatgtacctgcgcatgtgcatcaggttggtgtgcttcggcatgtggtgggttgatttccttcagccaaggttgtgctcatctctagtatcctcaaacactaagatactgatgttcttttcctcttctcgccattcccttgcatgccatttttttcaggtaaccaggttcaatgaagaatgggagaattatgtttactgataatgtgcatttttatttactgtgccttattagttcatttggcatggacgcccttacttttgcatcagctcaggcttagcaagaaagattctcatcctgttttaattgctgacccatgaatgattaatcttgaccccccaccctcaagcaactctgttgcttttcgcttgcgagaacgcagttctgtaatctagcttaactcagaccgattccttattttattgataatctcatctatttgtcatgtgagtaatttaagtggcgcttaaacaacaatgaaacaattgtccagatgtggttggaacaaaaccatatccacttgccgtcaaaaaaaaagaaaagaaaaataagtgcaaatttgntatttcttgttcctcgcatggttaaagatggtcttcctcgtatggttgaagatggtcttgcttctcactatgaattattcttgtgcttgcagatggatgatactctgacaactggaagcatcaggagtacagagggggaaaagagacgtttagcagaggcttcacttgcctacaactgtgagaggatagatgtcggacatctatatgcggagattattggtttacttgacaagatcatggcagctcctgcaccatacaattttatcttgcagtctattcttgagaaagagaagttgactggaacaaacttcatggattggtattgcaacctgagaattgttctcaggcaagagcacaaagagtttatgcttacacaaccttttccagctgacttgcccaacaatgctcctgttgctcaacgtagggagcatgaaaggcgatgcaatgaataccttgatataagctgtctcatgcttgctactatgtcccctgagcttcaaaggcaatatgaggcattggatgctcatatgataatcacgggactacgtaacatgtttgaggaccaagcaagagctgagtggtttaatacctcaaagtccttgtttgcgtgcaggcttgtagaagaattgcatgggatgctaaagactgtcgaggaaagcattaagaaaaactccaaccatgtgatggttatgcataagcgcaagcccaacaacaagaagagtggtcaaaagagaaagctaaactctgatgagatcacgagtacaagcagctctaagaccaaggttcaaaagacagggcccgctaaggatgcagagtgcttcttttgcaaggagacaggtcattggaagagaaactgtaagaaatacctacagcagctcaagcagaagcagcaggatggaaagagttccacctcaggtattaatgttatagaaattaatcttgctacttcctttactgattcttgggtatttgataccgggtcagttgctcacatatgcaaatcgttgcaagggctgaaaagaagtaggagcttagtgtcacaccctgaagttcctttcccaagcctaaattga

SEQ ID NO: 33460 - DNA, 432 bp, Oryza sativa
  Clone ID: PAT_MRT4530_3756C.1
caagagagatgtcctcgagatctgataagtcaagccccagaagacctttcaagaaatcatctaagaaaaaagcttaggtcaacatctttcatgtgacttgtttttggaggtgaccatagttttgaatgctcaaggagacctgttgcatcttcctatgtttgaatctatgggagaattactgttgttcctttataactggttaagagttatgacataggcctgaatgatgatataacaagatcacaaatctctgttatgccctgctatgtgcgtattatattttcaaattttgttcgatgtggtttgcaagtcatctgtattgattcctgaaacccattccaaaggatgtcctgacaaactggtttgtgtgattggttatccagtgacatctgatgcttggttctcaagtgccaaaaaaaaaaaaaaaaaaaa

SEQ ID NO: 33461 - DNA, 1638 bp, Oryza sativa
  Clone ID: PAT_MRT4530_37570C.1
aattgatgatagaattgagaatttgagtagtgagaaattacgcctctacaagatcagattgatttattcacttagatgtttaaagtttcttttgcatcaagggttggcatttcgtggacatgatgaaagtgaacagtttagcaataaagcaaaaaacttcattgaacttttgaaatggcttgcatcaaatagtaaagaggtggataagttagttctgaagaatgtagaatgccccaggtaattgcaccttgacatgtccagaaacacaaaagcaaatattcattgttgtgccatagaaactagaaaaaaatattgaagaatttggttatgagcactatgcaattctagctgatgagtctagtgatgtatctcataaagaacatctagcattttgcttgtgttgtattgataatttgggaaggctatgtgatcactttctaggagttgtccatgtagtaagtagcacttcatcacttaaggaagcaatttaggaattactagttagtcaccatttgactctaagtcaaattagtcaccatgagtgcttcgaaatgctagacttcaagatattgtcaatggatttgaatgtggtgtactggaaactagtagtggactaaatcaagagatggggttatctaagctcggtgagactcgatgggggtcttactatagaaccattgtcaatattattgctatgtatcctgcaatccatgatgtacttataaaccttggagaagatacttcacaaaggactgaatggccaaaaatacatgctatagttggagtttttgagtcatttgattttatttttagtacacactttatgtttgtcattcttggatacacaaatgatttgtctgagtgtttgcaaaaaagagagcaagatattcttaatgcaatgatactttcgtttggcaaatagtagaatgcatgagttgaggtctgatggttgggttgcattcctgaaagggtcactttgttttgtaataaacatggtgttgaagttcctaaagcagatggtgtttatgtgccttttagaatatcaccaaggtttgctcgaaatcaaacaaatgatgaccactttagaagagaagtttattgagatcattgatcaaattagccaagagagtgacaatcggtttgatgaggttaatatagagttgctttcctgtatgacaaccttaattccagctgactcatttacatcttttgatgcatagaaggtatgtcggcttgccgaattttaccctattgatgtttcaagttctaaattattaagacttgaaatgcaacttgagaattatattgatgacatgagaaaagacaatgttttcaaaggcataaacaatcttcgtgatctctcagtcaagcttcgtcaaacaaaaaagcatacgcatcgcttatgatttgatatgcatgcttcttaaattggtattgactcaacctgttgtgacaagtgttgaaagaacattttctgctatgaatttcatcaagcataagttgagaaataagatgggtgatggccttttggatgattgtctagtcatattcattgagcggctttcataactattagaaggcgtaaacccgataagaagaaaaaatagtatggtaatctttttcaaacttttatagcca

SEQ ID NO: 33462 - DNA, 1107 bp, Oryza sativa
  Clone ID: PAT_MRT4530_37571C.1
atggtgcgacttgaagaaattcatgaaacaccagaaaacggttcaacgtccacacaaccacaacaagatgagcaagatgttgttcaacaggttgaacaagttgttgttgaaccagttgtggaagcacgggcttcacgaaggtccgaaaggatacggcgtacacctgcgaggtatgcattgttaactacaggacaacgtgatatattgttgttagacaacgatgaacctactacctatgaggaagcaatgaaatccattcatgggttgaagcaagcatctcggagttggaatattcgttttgatgaagtagtcaaggtgttaggctttttcaaaaacgaacaagagccttgtgtatacaagaagattagtggaagcgcactggtgtttctaatcctatatgtagatgacatattattgattgggaatgatattcctattcttgaatccgttaagacattgttgaaaaatagtttttcaatgaaagacttaggggaagcagcatatattctgggcataaggatctatagagatagatcaaagaggctaattggattaagccagagtacatacattgacaaggtgttgaagaggttcaacatgcaagattctaagaaaggtttcttaccgatgtcacatgacattaatcttggcaagaatcagtgtcctcaaacgactgatgagcgaaacaagatgagtgtgattccatatgcctcggcaatcggatccatcatgtatgctatgctatgtacatgtccagatgtttcatatgcacttagtgcaacaaaccgataccaatcagatccaggtgagagtcactggatagctgtaaagaatatcttgaagtacttgagaagaactgaggatatgttcctagtctatggaggacaggaagagctcgttgtaaatggttacactgatgcaagcttccaaaccgacaaagatgattttagatcgcggtctggatttgtgttctgcctcaatggaggcgttgtgagttggaagagttccaagcaagatacagtggctgattctacaacagaagccgaatatattgccgcctctgaagcagcaaaggatgctgtttggataaagaaatttgtttcttaa

SEQ ID NO: 33463 - DNA, 2609 bp, Oryza sativa
  Clone ID: PAT_MRT4530_37572C.1
atgtcccctgagcttcaaaggcaatatgaggcattggatgctcatacgataatcacgggactacgtaacatgtttgaggaccaagcaagagctgagaggtttaatacctcaaagtccttatttgcgtgcgggcttgcagaaggtaatccaatgagcccacatgtggtcaaaatgattggttacaccgagagtctggataagcttggctttccccttagccgagagttggctactgatttgattctccagtcgctccctccctgctttgagccgttcataatgaatttcaacatgaacaacctgaacaggaccttggcagaattgcatgggatgctaaagactgccgaggaaagcattaagaaaaactccaaccatatgatggttatgcataagcgcaagcccaacaacaagaaaagtggtcaaaagagaaaggtaaactctgatgagatcacgagtactagcaactctaagaccaaggttcaaaagatagggcccgctaaggatgcagagtgcttcttttgcaaggagacagtctataacattaatgcaaaaaggcaacgtcctaatgatttgaattccacttttatttggcattgtcgcttgggtcatataaatgagaaacgcatggagaaacttcgtagagatggacttctacactcgtttgattttgaatcatttgagacatgcgaatcttgtttacttggcaaaatgacaaaggcacctttcatgggtcaaagtgaaagggcaagtgaactattgggactagtacatactgattttatttcaagaaaggatagtgggagcatggtgcgacttgaagaaattcaggaaacaccggaaaatgcttcagcgtccacacaaccacaagctgagcaagatgttgttcaacaggttgaacaagttgttgttgaactagttgtggaagcatcggcttcacgaaggtccgaaaggatacggcgtacacctgcgaggtatgcgttgttaacttcaggacaacatgatatattgttgttagacaacaatgaacctactacctatgaggaagcaatggtgggaccagactctgagaaatggcttggagccatgaaattcgaaatagaatccatgcatgtcaatcaagttcggaacttggttgatccacctgatggtgtaaaagccattgagtgcaaatgggtctttaagaaaaagacagatgtagatggaaatgttcacatctacaaggcacgattggtggcaaaaggtttcagacaaattcaaggtattgattatgatgaaactttctcgccagtcgccatgctaaaatctattcggattgttttagcgattgctgcttatttcgattatgagatatggcaaatggatgtcaaaacagttttcctcaatggaaatcttgatgaggatgtgtacatgacacaacccaagagatttgttgatccacaattagctaaaaagatatgcaaattgcagaaatctatttatgggttgaagcaagcatctcggagttggaatattcgttttaacgaagtagtcaaggcgttgggctttgtcaaaaacgaagaagagccttgtgtatacaagaagattagtgggaacgcactggtgttgaaaatgttcaacatgcaagattctaagaaaggtttcttaccgatgtcacatggcattaatcttggcaagaatcagtgtcctcaaacgactgatgagcgaaacaagatgagtgtgattccatatgcctcggcaatcggatccatcatgtatgctatgctatgtacacatccagatgtttcatatgcacttagtgcaacaagccgataccaatcagatctaggtgagagtcactggatagctgtaaagaatatcctgaactacttgagaagaactaaggatatgttcctagtctatggaggacaggaagagctcattgtaaatggttacactgacgcaagcttccaaaccgacaaagatgattttagatcgcagtctggatttgtgttctgcctgaatggaggcgctgtgagttggaagagttccaagcaagatacagtggctgattctacaacagaagttgaatacattgccgcttctgaagcagcaaaggaggctgtttggataaagaaattcgtttctcagctaggtgtgatgactagtgcttctagccctatggacctctattgcgataatagtggtgccattgcgcaagccaaggaacctagatcgcatcaaaagttcaaacacatcttacggcggtattacctcattcgcgagatagtgggtagaggagatgtgaagatatgcaaaatacatacggatttgaatgttgcagatccgttgacaaagccactccctcagcctaagcatgaggcacacactagggcaatgggtataagatacgttcatgattgactctagtgcaagtgggagactgttagtgatatgccctagagtcaatcatagagatgattgtatcccatactatgtttacatatttatccgactttgttccttgaaatagataaactcgttattggttaatgaatatgtgattctttcatgagactctttatgttatgtgttgctatttttaaaggatctctgatcaaatatcatatggg

SEQ ID NO: 33464 - DNA, 408 bp, Oryza sativa
  Clone ID: PAT_MRT4530_37573C.1
atggcggtggcggcgcggagggcactctggtacagcggcgtgtcaccgaaagcgcggcacatgaacagcgggcgagggcgaggcctcgacatctctgagcctaatggacctctcgatagctacatccggaagttgatggatgcaggaaacctggaggaaataaacagaatagggaagattttgtcaaaaagggatatggtgaaacaaagctccgagagcctgatctttaagcgcaagaagaagatgggcacacacaacatgcaagatatgtggaaggttgctggcatcactagttccgcgttcttgttcgggacagcattcatttccctttttgcagggagcctgcatggagaggaggaagaggatggaattctacaagacaagaagaggcttggacttgaagagtag

SEQ ID NO: 33465 - DNA, 564 bp, Oryza sativa
  Clone ID: PAT_MRT4530_37574C.1
atcacattccggcatgcgtcatcatgaagaacatcttactaaagatggtcaaccagatcatcgttaccaaggaaaatcgttccgataataattccacgatgatcaacaatcaaatgatcgacatcgaatggtcgtcaatcaaataatcaacaatcaaatgatcgtcaatcaaagaatcacaagatggcaagatgattcaacagacttagccgatattccaatcaaggctgatggaacagctgatatgcgttataaagaaagcagagaagctgttgcatctggtctcattgaaaaggatgaagttatcgaagaagctatgaatggtgaacatcatggtcaacaacatcaaagtgatcatcttaaaaaagatggtaccgaagatcgacgatacacaagaaaatcgtgatgatgaagatgaacaataaaaaaatgttgttctagatagaaatttatctagttatttatttttctattatttatgtgttgtaacctagcttgtgccaaaatttcattaataaatattatttttttcttcacataaattaaaaaaaaaaaaaaaaaaaa

SEQ ID NO: 33466 - DNA, 474 bp, Oryza sativa
  Clone ID: PAT_MRT4530_37575C.1
atgggggttcggccgaaccccctggttcggccgaaccatgggctggcccaatccagcccattttcggctgaggccaaatcggtcgacgaggccgtccgccgccaggtcgatgctgatgagtgccttgcagaggaagcggaagatgcactactggagcgggataaggtagctggtggaggccggctgggtcagtcgccttgtcttcctcgacggcggcgcggagctcggtggcccagttgtgtgcggcacgatgaggaggttggtgctgaaggccttggtgcgcgtgtggtcaggctcctaggtatcgtggtagacaccgatgtgggtgccttgggtgaaggcgacgttgggaacgcatgggctgatgaggacgtcgcacttgtcgatgagcgtcgggtcaaagagcatgtgaaggcagcggtgccgaaggcggtgggtcaacgccgagaaagaaaaggaaggtgctcgggatag

SEQ ID NO: 33467 - DNA, 1259 bp, Oryza sativa
  unsure (1)..(1259): unsure at all n locations
  Clone ID: PAT_MRT4530_37576C.1
tttttttttttttttaacaagaacaagaacatggttatgtcataataattgaatttttgttctatcaagtgaccaacaaaattacacatgggagacaaaatacacatattctcatgataaggggaaaaaagagaaaaatactgctgcacgtaacatcccaactcgccaaacaccacaactagacaaatacacatattcatcgtgatccaagaaaaacaccaccaccacgctggtgccagctatcctcccattttagaatcaaggataaatcaccccacaaagtgctcccctcctggatctctttcctgggaaactcaacaagcccaagtgaaagcatttaaccccaagaaatccgggaaaaaaaacaaatttaaatgcaataacaccagtacggtctcgccccgagattctagatcagaaaaacgcaagcattagacacattgttgcagcaatccagaactgagacaaaaggacatgagaatctccagatcttctcctcagcagaagcaggttacccacgaccacgaagaacaatagccaggatcaaccacctgcatcttcctggatgaggatagtgacgccctatacctgggaggagggcggccggaagggccccatcccctcgacgacagcagtgagaggagacaagcggcaggtgcgccagagagggagggcagatccaggccggcaggtggattatgcggcgacgacgaacccgggcgacacatctcgaatggcgacgaccagacggcaagagagaagacggggatgaggttggccgatggtgatggattgccacgaatggaggacggccggcttgtcaccgtcgccgttcaccttctgcaccgagcttccaaatctgtcgctgctcctagccgacagccgtcgctcaaccgctccaccgagccaccgcccggcgcacctcaaatagcgccgaccagacggcgggagaaaggatgaggatgaggtcggccggcggtggaggatcaccgcgcctggaggacggccgggcttgtaactgccgccgttcagctttcgcaccgagccgccagatctgccgccgttcctagccaggggcgtcggtgctcaacagctccactagccaccacctctctctcttagatccgaaaaaataggatctatatatgttagcgttgggtaacataaagtaaacaaattactcgaattatggcgtgggtgggggaagggagcgcagggatagggtgccgggggnttggttgtgaggggncntgttttac

SEQ ID NO: 33468 - DNA, 994 bp, Oryza sativa
  Clone ID: PAT_MRT4530_37577C.1
agtggatcccgggctgcaggaatcggcacgagggagagagagaggagtacctcacctgcacctgagctagagagagagagagagagaagaggaggagggtggtggaggaggaggccgggagggggagatggagaggccggcgccggtgaggaagtcccacacgtcgacggccgacctgctgacgtggccggagggcgcggcccaggagctcgccgccggggccacgccgccgcccaaccgccggccgcaccagccgtcggaggcgatcagtaaggtggtgttcggcgggcaggtgaccgaggaggagttcgagagcctcaacaagaggaaaccatgctcagctcccaaatggaaggagatgacaggaagcggcatatttgcagcggaaggcgaggttgaggaagacgagtcagccaatgcttctgcaacgcccgtccgaacggtttctaagaattatcaggccattagcactataagtcatatctcattcgcggaggaagaaagtgtttctccaaaaaagccgacttcgatagctgaggtggcgaagcagcgcgagctaagtggcacgcttcagagcgaggatgagagtaagatgaagaggcagatatccaatgcgaaatcgaaggagctcagcggccatgacatctttgctcctccagaagatcccaggccacgcaactccgcgaacggctcgacctcacaaaccccgggcaaaaatgcacaagtgagcaccatcacgttcggagaggctgacaccgacagcgtggtgaaaacggcgaagaagatcccggagaagaagctgacggacctgacgggcaacgatatcttcaaaggcgatgctgccccggggacggcggagaagcacctgagcacggcgaagctgaaggagatgaccggcagcgacatcttcgcggacggcaaagcgccgtcgcgggactaccttggtgggatccgcaagccccccggcggcgagagcagcatcgcgctggtctaa

SEQ ID NO: 33469 - DNA, 1461 bp, Oryza sativa
  Clone ID: PAT_MRT4530_37578C.1
atggtgggaccagactctaagaaatggcttggagccatgaaatccgaaatagaatccatgcatgtcaatcaagtttggaacttggttgatccacctgatgaaaaagacaatgtagatggaaatgttcacatctacaaggcacgattggtggcgaaaggtttcagacaaattcaaggtgttgattatgatgaaactttctcgccagtcgccatgctaaaatctattcagattgttttagcgattgctgcctattttgattatgagatatggcaaatggatgtcaaaacagctttcctcaatggaaatcttgatgaggatgtgtacatgacacaacccaagggatttgttgatccacaattagctaaaaagatatgcaaattgcagaaatccatttatgggttgaagcaagcatctcggagttggaatattcgttttgacgaagtagtcaaggcgttgggctttgtcaaaaatgaagaagagccttgtgtatacaagaagattagcgggagcgcactggtgtttctaatcctatatgtagatgacatattattgattgggaatgatattcctatgcttgaatctgttaagacatcgttgaaaaatagtttttcaatgaaggacttaggagaagcagcatatattctgggcataaggatctatagagatagatcaaagaggttaattggattaagccagagtacatacattgacaaggtgttgaagaggttcaacatgcaagattctaagaaaggtttcttaccgatgtcacatggcattaatcttggcaagaatcagtgtcctcaaacgactgatgagcgaaataagatgagtgtgattccatatgcctcagcaatcggatccatcatgtatgctatgctatgtacacgtccagatgtttcatatgcacatagtgcaacaagccgataccaatcagatccagctgagaatcactggatagctgtaaagaatatcctgaagtacttgagaagaactaaggatatgttcctagtctatagaggacaggaagagctcgttgtaaatggttacactgacgcaagcttccaaatcgacaaagatgattttagatcgcggtctagatttgtgttatgcctaaatggaggcgctgtgagttggaagagttccaagcaagatacagtggctgattctacaatagaagccaaatacattgccacttctgaagcagcaaaggaggctgtttggataaagaaatttgtttctcaactaggtgtgatgactagtacttctagccctatggacctctattgcgataatagtggtgccattgcgcaagccaaggagcctagatcgcatcaaaattccaaacacattttacggcggtatcacctcattcgcgagatagtgggtagaggagatgtgaagatatgcaaaatacatacggatttgaatgttgcagatccgttgacaaagccacttccctag

SEQ ID NO: 33470 - DNA, 357 bp, Oryza sativa
  Clone ID: PAT_MRT4530_37579C.1
aacgagttcgatcgcgaggactaatgacaaggctgaaatccacttgatagcaaagtgtagggtcaccaagagaatatggaagaaattcaaaggtggatcaacacagatctataaatggataagtgagacgactgtcactcaatagagcattggtggaatctagtgttggaatcccaaacaccctccgccgtaatcctaggttcttaggaaatttggtgcgagcgaaatgctagaatttttcgctagaaagcatcaataccaagcacaatattagccaagatcacagaggaagctagtgtatgggtgaaggtaagagctcttagactccaagagttcggaattttgggagacatcacc

SEQ ID NO: 33471 - DNA, 594 bp, Oryza sativa
  Clone ID: PAT_MRT4530_3757C.1
aggaatcggcacgaggtggagccgctgggcgggggcgggggcgggccggcgggcgcgccggagatcttcgcgggcggcacagtgggcccgcggctccgtgcggcgcgccgtcgtcatcgggaacggctgcgcgggcgccgagaaccagtgcctcggcctcctccgcgccctcggcctcgccgaccgcctcacgctttacgtaaaccctgcctcccctgatcatttttcctgccaacttttggtgacagggtcataaaatcgttggtcactggagctgcggatttgattgtttgtgtttagtccgcaactgcattagtggatcctgtgttactgatgtcaggtggcagtttgcgtaggacttaatgattaactagtgattgtcctttatatttctgatgcaacattggatttgctttttacccagtaagtaaagtaagagatgtgcctctaggatttggggctgtttgttaattgttagtaccacttaccatgatctgtgcctaattaccatgggtcaagtctacaactctgcatttgatagtggcagagaatgggaaatcaatcctataatttctgttggcatgtattcgccta

SEQ ID NO: 33472 - DNA, 3258 bp, Oryza sativa
  Clone ID: PAT_MRT4530_37580C.1
atgagcaggccaaacacacgaaataagagcaagaggccgcgggctgatgactgcgagagcccgtctgctgttttcaagtatgtctgcattgccttgtcgccgcggcaaggatggagcaaaaaattcagtatctgcagatgtttatcgtgatcggaaggcatcattaagaaggatggcagaagcagcgcttgctggaaataatccagatggtcctttgtactttgtttccaggccatggttgacccaatggttgcgcagaaaaaatgtggatatcccttcagatgctgacagtggaccaacaattgctctaacgtgcacccatggaaatcttcttccggaacatgcttcaggcgcaaagcgggtcactgtgccagaggacctatggttatttctctatgaaaccagtggaatgaagattgatgatattgtgacttttccgtcagatagtcaaccatgcggaatttgtagcctagcaattatcagttgttgcttatgcaccctgtgctggatcagcttgctcggttattcgctcagctacactccagcaaaatggctttcattgattcggcaccttttataaaaaccttggaattagataatggtgtccagcaggacagccatgaattcctcacattatttttgtctttgctcgagggttcactaagtcattccaaggttccaggggctagaaccattgtgcagcatttgttccgtggaagtgtgtcccatgttactcggtgctcatcatgtggaagggattccgaagcatcttcaaagatggaagacttttacgaactggagcttaacattaaaggtttaaataatctagaacaaagtttggatgactatttgagtactgaggcactggatggagagaaccagtacttctgtgagtcatgtcagaaaagggtagatgccactcgttgcataaaacttcgctcacttcctcctgttgttaattttcagctgaaacgctatgtattcctcccaaagacaacaacaaagaaaaagatttcttcggcattcagtttcccaggacagctagatatggggaagcggttatccaatccttcatctagttatacgtatggcctgtctgctattttgatccacaagggtagtgctgccaatagtgggcactatgtagcacatgtaaaggacgaaagcaatggtcaatggtgggagtttgatgatgagcatgtatccaagcttggtcttcatccctttggtgaaaaaccaggcaaatcatccgataaaactgatcagaaaccccagggtagttctacagcggattctgttacgaatgatgacaacaatagctgtcatgaggctgcattcacttctactatggaagagatgttttcttctacagatgcttatatgctgatgtacaaacgcattgctaaggatgagaatggtatcgaaagcaataatataagcagtaacaattcgctcccacaccattttgtggatgaaattgatgaacgtaatacatcatatgtaaaggaatgtgaagaatacgaaagcaagaaagacgtccatttggcatatataacagagaggcgccaagaagtaaaatctgttctgacagaagcgcctgcaactccagaggaggattcttatttttggatttcaacagattggcttcgccaatgggcggacaacgttaatcctccctcacctattataactggagttcgtgtccacagctctattgacaacagtccgattcaatgtgaacatggaaaagttccagcgtcaaaagttacatccatgaaacgactatcagctggagcttggcataagctattttctaaatgccttaaggatggagcaaaaaattcagtatctgcagatgtttatcgtgatcggaaggcatcattaagaagtattgcagaagcagcgcttgctggaaataatccagatggtcctttgtactttgtttccaggccatggttgacccaatggttgcgcagaaaaaatgtggatatcccttcagatgctgacagtggaccaacaattgctctaacgtgcacccatggaaatcttcttccggaacatgcttcaggcgcaaagcgggtcactgtgccagaggacctatggttatttctctatgaaaccagtggaatgaagattgatgatattgtgacttttccgtcagatagtcaaccatgcggaatttgtagccagcaattatcagttgttgcttctgttgaggataatcttagagcagtgaaactcaagcaacgacaaagccatgaaaagttaacttctgggaaaagtcttgcacttcatcctgggcaaaaatattatttagttccttcctcatggttgtcagagtggagagcttacattacagcgactgggaaaaatatttcttcgttaccagaacctcaatctcttgaagttaccatcaattcactaatctgtgaaaagcattcaagattgttgcaaaggcccttggatctagtttgcaagcgtgggactatcactcagaaagcatcaaatactgatggattaacaatgatatcagaatctgattggattttattctctgaagagtggaatgtagcacatggaaaaggtttatgtgctgaaattgtttttagcaagagctctcaagataacctgcagtcatctgaagcagtgccaattttggttgaagatctggaccagtcaacaaatgatttaagcaatgacttggggggcagagaaccctatgtcagaactgatcctgaggtttgtgaagaatgtattggagaaaaagagagctgtgcattggttgagaagctcaattatcagaatgaagatatccaggtttatcttgtccgtggtaaagaagcgccaaagtcaattagagaggcatcggcagctgttcctgtaccagatcgtaggacttcaaagcgttcccggagaacaacctcaggaaattcgatcagtttgaaagtctctggttctacaaccgtatatcagttgaaactcatgatatgggaatctttagggattgttaaggagaaccaggagcttcacaaaggctctgttgagattgaagatgattttgctactcttgctgacaagtgtatttttcctggagatgttctatgggttaaagattccgaaatctacgagaaccgtgacatagcagatgaaatttcggagcagaaggttgtagtacagactgaggaaggctttcgtgggactctgttgacatctagtgcttcagctcagctttgccaggatatatcatttagcgattga

SEQ ID NO: 33473 - DNA, 257 bp, Oryza sativa
  Clone ID: PAT_MRT4530_37581C.1
gcaggaattcggcacgaggaaaataaattttatttaacaagcatggtggagtattaatgtggtctgtttatttatgtgtaaaagtgaaatatcttggaatatttgttgattacttaggatcatgttgaaggatatctgaaatcggttgcaaagacaaaatccatttttgtgacagccttgtccaactagggtgcagagtactactacattagagtggatgtcgatgcatatgtaaatatgtactgcccagtaatcta

SEQ ID NO: 33474 - DNA, 2781 bp, Oryza sativa
  Clone ID: PAT_MRT4530_37582C.1
atgtcgacttccgtcagcccatccgccgcgccatcggcaaagtatgcagaggtgagcacccatcggctagatctctattttgtgcagtagatcgggtttcctctatctcatcttattttcttcttctttattctcttttgcatctgtagcatctctctaatctgattgcaattcccagtttgtctcacgagcatcagtactttcttggcccaatcggcaattctaaccccactgagttcattagcgccgaaactaataggataccctttagattggccagcccaaatctaggtcattggaagaatactttcaagtcttggccttcccttgagaaaagttctcctgagagaagttggctcgtatggtgcaagcgtgtatcggctagcaagcaggttcactgggatgaactaggaatcggccaagcccttgctcttactttagcaaattcggctaaggacgaacccctaatggcttctgcaacgtatttgtggtccaacaccctcaatgcgttcctgttcaatcaaggggccgatgactcctaccctgctagacatcaccatgatcactggcctagatatcaccgcatcggccaaccccatgaatttgaattccaagaaccagtttgagttcaaaactaaaaccataggtggctggtctggctacattgctgcatatatgggcaaaggatctgtcacccctcgagaacatactgcctttctgctcatgtggcttgagaaattcctcttctgcggatcaagttgtggccctactatcaattggcagttcctagccgaagcccttgaaaccaaaaagcaaatcgctttgggcaaaatccttctcgactacctatatcagacgttgatcaatgcatcggccaggatagccacaggctcaacagtagctgcaggtggaccctggtggttcctacaaacatggctcaacttagtcgccatgaaagctgtgaatcggccggctctatcagaatctcagtttccaagactagagccgattacagatgaagatggggaagaaaagacccatcggagatgcatgtctttttatgatggcttccggaaagatgctcgagtctggtttgtatacggagattcaatggactttgagctaccatcggactttagatttgaagagatcaactctgaaaaatatgacaagtctagagaggtcttctcggctgctatcagtccatgcattcttcctgttggcatccatcaaggaagaaacatacaagtgtcttacgagttctatcacccaatgagctcggccaggcaatttgggatgggacagctgccaatcggcttgtattttgccgataaaattcagtgtagaggagagatctcatcgaccttgatgatggatcggctgctcaacatcccaagacctcccttgggcagtattgagaacatagagctggcaaggttcaggagcagggcctttgataggtggtggggtgaatggaagctacacttgttccatcgatcggcttccatgtatatgacagatctattcctggatgtcatccctcagacaacagaatcctctcctcctcgcaaagacataaaatatgctccaggccttttaccaaacggaggtggtctagctcccccagtcatcggctatcatgcccccaggacctcaagtctgctccaagggcaaataggagaactagccgatgctggcaggaagaggaagactaaggcatcggctgttgatccatcggttctggctctgaagaagaaggccgaaaagaagaaatccaagccaaccgacgacttgcctgccttagatccatccatcgaacaagccttcgatgaagaggaaattgaggaagatgacgaccaagcggcagccgaacttagtgacttaggagaaaaaacaccatcggcttcgcccaaacagactcctccaactcctgctgccccagctcatttttcaaggaaaaagaaaactatcgtgaagaagaaatcggcaccgacaccatctaagccagctccaccgcctcctcctcatccttcacctcctgtgcagccgacaccaagtgattgtactccatcggccgcaggcagccataacatcgaagaagaagaacaaccagcagctcctgtcattccagattactttgacgaagaggcagaagaagaaacaaccaataaagctttagcccctctgaccgatgatgtgaaaagaactcttgaagacatttctcatcggctagagacatcattagacaacttggtggttgactgcggttcaatccggacaagatttgcagagattcaagccctaatcccggatgatctagcgaaaaccatttctccagctgtataccttgagcaacatcaattcaagctggaaaaggccaagcaaaggatagccgatcggcgagagcgaagagatattgaagccactattaaaaccaaccggcaaaccgttcatgaagagaaggctaagttagatcaactctcgattgggccgattcagtccaacatagatcggcttgaagctcggaagattgatctcatagctcaattggaggaatgcaacgccgaattggctcttgagcagaaaaagttagccgatctcccaaaggctgtcgaagaacagaagtccagactgagatcggccatcaggaatgtggctgatatgaccaagtctctcaaggtcatctctggaatcgacgcccaagatatccaagctatcgaagaagtagaccaaatcagacaatgggctgtatcggctatccagcgttacttgtctggatga

SEQ ID NO: 33475 - DNA, 444 bp, Oryza sativa
  Clone ID: PAT_MRT4530_37583C.1
atgccgtcgcctgcgccaaccttgggagtcgagccgcgtggacagccaagagccgacgccgccgtcctcaagaaaaagcaacctcggcgcatcgtggcaccgcgccgatgtgcaagaatgtcggtcgcgacatcagtacggttagctgctgaggtcatagactccgaggaacgccaacagcaacccaccccattgtggcctgcgggcgccacacgccgccgacgtcttcaagaaacaatagccgcaaactcggcgcgctgtggcaccgcaccggtgtgtaagaacatcgacctcccccgccgaggctttcaactccgaggaacgctgagcgccgccacagccgctgacaggccggcgtgcgccagttaccaccccgctgaggacgctgaactaccattgaatcaaaaaaggacgtttgagattcattcacatcaccatgagtag

SEQ ID NO: 33476 - DNA, 1169 bp, Oryza sativa
  unsure (1)..(1169): unsure at all n locations
  Clone ID: PAT_MRT4530_37584C.1
aggcttcttctcttctcctctctctcgttccccttcgtttcgattcgtctcgcccaaatcttcaaatccaaatccgcagcggaggcggccggggcgcggcggccagatcctggaagagaatccattccgggaggggaatccgcgcatgccaatgtcggatcccacggcggcggtcatccccaagccggggggcatcggcgtcggcggcggaggcggcgacgacgaggagccggtggagatccgggaggtgtgggcggacaacctcgaggaggagttcgcgctgatccgcgacgtcgtcgacgagttccccttcgtcgccatggacacggagttccctggcatcgtgtgccgccccgtcggcgccttccgctccccggccgactacaactacgccacgctcaaggccaacgtcgacatgctccacctcatccagctcggcctcaccttctccagcccgcgcggcgagctccccgcgctcggcccaggccgccgccgatgcgtatggcagtttaatttccgcgagttcgacgacgcccgcgacatcttcgcctctgactccattgagctcctgcgccgtagcggcatcgacttccgccgcaactccgagcgcggcgttgacgctcgccggttcgcggagctgctcatgtcctctggcgtcgtgcttaacgattctgtatattgggtcaccttccacgcgggctacgacttcgggtacctgcttaagatcctcacatgcagcagcctaccggacacgcaagccggcttctttaagctcatgaagatatatttccccaccgtgtatgacatcaagcacctcatgaagttctgcaatagcctgcacggtgggctgaacaagctcgccgagctccttgacgtggagcgcgtcggagagtcccaccaggccggttcagatagcttggtcacttcatgcgcgttctggaagctcaaggattcgttcttcgctggctctaccgagaaatatgctggagtgctgtatgggctcaatgcggagaatgttgtcagtgcgcattgatggatggtactcctctttgaattttagctttgtgaatggattgatttaggacagaaaatgtgacacaatgatcaaggtgatgttatgtaggtcaagtttgtctcactccatttgggtttaatgngatcctagtgtt

SEQ ID NO: 33477 - DNA, 796 bp, Oryza sativa
  Clone ID: PAT_MRT4530_37585C.1
acggtcgggattcgattttcgaatcccgcctctctctctcctctcccactcccccacattggccggcggaatctcgcccctaccggccactcgccgctaggctcgccgccgcaccgcgccgttgccgccgtcgggttcgcaaggatgaactccaccccgtccgcctttcctccgtcaggattcgtcgccggaattcgcatcccctcgcgctacgggcaccccgaagcccgtccgctggttgtcgtcgtcctcccgtggcttgccgtcgccgttcgccatcgtcttcctccgcgccggccaccctcgcgccgccgccttcacgtcgcctttgcgccgccgcctccgccgccggttgccgtcgccggcaacgcgtgcgcgcgcgccgtcgccatcgtcgtggccggtcggccggccttgagccgagccaagccgggtcgccgccgcccgtccgatcaaccccgggggtgatctgggccgttggtcccgtggaccggcggtggaccacccgcgtggtcccggtccacggtggaccgcccccccttgagccgctgccgtgtggggcctgtgtgccggcgccccttttccctctctcccgagccgctgactagagtaggcttcgtccgtgctgtcgagggtgcctgtggagtggtgttcccgctgcagttcaagtccaggcttagccccagttatcttttgtttttccgctgcatttggaattctattcgggaatttttgggcgtgacgccaagacccccaagaccttgagcaaggcaagtcatcactattccttgaacat

SEQ ID NO: 33478 - DNA, 1105 bp, Oryza sativa
  Clone ID: PAT_MRT4530_37586C.1
atgcgtcagctagaggaaagctacactacaagcccagccgttgcccacgctggcttgtgggctgacgtcaccaaagggggcgcgggaaaaggggcgccggcaagcgggccccacttggcagcggctcaaagggggggtagtccaccgtggaccggggccaagcgggtggtccaccgccggtccacgggaccgacggcccagatcgcccccggggttgatcggacgggcggcggtgacccggctcggctcggctcaaggccggccgaccggccatggcgatggcgacggcgcgcgcgcgaacgcgttgccggcgacggcaaccggcggcggaggcgacggcgcaaaggcgacgcgaaggcggcggcgctaagcggcggctaggaaggagagggaggggaatagaggggagaggaagcctcaccgagggtggccggcgcggaggaagacgacggcgaacggcgacggcaagccacgggaggacgacggcaaccggcggacgggcttcggggtgccctaaggaaggaggagagagagattagagagagggagatgaaccacggcggccggcatccatggccaaaggcggcggtagaggtagaactcaccggagcgcgaggggatgcgaattccggcgacgaatcccggcggaggaagggcagagagggggccggacgtggccgagggaggcgggaatcgccggccaacgtgggggagtgggggaggagagagaggcgggattcgaaaatcgaatcccggccatctcgggcgcgggcgcgggcgggagagagaggggagtgggcgcgggaggtgcggcgcatgcgcgggtgtggccgacgtggcccggaggaggcggaggcgtgcgcgcggtgactgttgcgggcgcggcggcgcgggcgcgaggtaggagacgggcccgacaggtgggacccacctgtcggcgacccaggtgagaggaggcgggcggccggcccgcgcggcctagctgggccttggccttcagccggcccagcgggaggagaggaggaaggagaatgggccggcggcccactcgaaaagaaaagggggaaaaaaaaagaaaaaggaagaaaaggattttccctggaat

SEQ ID NO: 33479 - DNA, 1248 bp, Oryza sativa
  Clone ID: PAT_MRT4530_37587C.1
gccaatatgatcttgatgtatgcccggtgggtcaatacgttctgctaggggccgctgttgacgcgtggaccgaaaaggagttttcgggttacagccgagtgtacatgaacttcggatagggatccgaataggagtcctacgggccttggaggcccgagtaatggatcctaaatatccatgaggggtgtgaccggcggaggaattgcatcacgtgagaaaccctagccgtcacttccctccccgagcaaaaccgcccgcgggtgctagcacatctgcgcgtggcgttctgtccctgtacgtgtggataccggtagaggcgccgctggtttgcggtgctgaccggctgttgacgaaaaacacgaggcttaggagatctgcttaactccagtgcaggtccaaagctcgccttcgggtatgttagcgtgccagttgatttgatcttgaactgcagcgggaacaccactccacaggcatcctcgatggcacggacgaagcctactccttggagaaacctccatctgacacacactcgtactctggggttgggaaaaaaagagcaagactgagtactacccactgtactcagcaagtcataccggaataggggggctgacgtcatcaaggggggcgcggcgccgacatgcggggcccaccggtcagcggctcgggagagagggaaaaggggcgccggcaaacgggccccactcggcagcggctcaaagggggggtggtccaccgtggaccgggaccacgcgggtggtccaccgccggtccacaggatcgatggcccggatcgacccggggccgatcggacgggcggtggcgacccggctcggctcggctcaaggccagccgaccggccacggcgatggcgacggcgcgcgcgcgcgaacgcgttgccagcgacggcaaccggtggcggaggcgacggcgcaaaggcgacgcgaaggcggcggcgctaagcggcggctaggaaggagagggaggggaatagaggggagaggaagcctcaccgagggtggccggcgcggaggaagatgacagcgaacggcgatggcaagccacgggaggacgacggcaaccggcggacgggcttcggtgagacacctcctccccttcctctccctctcccgcgccgcctagccgcttagccgccgctgtcgccgtccgcgtcgccgcgacgccgccaccctctgccgtcggtcggtcgccgccttgcaccgccggtgccgcgccgccgtgcgccat

SEQ ID NO: 33480 - DNA, 632 bp, Oryza sativa
  Clone ID: PAT_MRT4530_37588C.1
taaggagactacgtgttcaattcggctctgataccaacttgtcacgcccagaaattcacaaaccagaatttctaagcttgacggcagcgacaaaaccaacttcttcaagatggctccaactgggaagaacttcaactctggtgtggagaagagagagtaagactgagtactaccaactgtactcagcaagtcataccggaagaggaggtataatgcaagatataaccaaaggaggctacaggtttatttgcataaagcaggcatttaaaagtagtagtcaaaagcagtaaaacagttgtagtaattaatcaatattaaccaatcactatccaacgctacaccacgttgcaataggcccaactaaccacctgaacacgacataccggaaagaggccgtgacaggacccttcgcataatcccctctaaccgatcgcaccacacctcagggttcgccccgtccccagcaggcaatgggtagcccccctctcgtgccatggtgaatccgaaagccgatcaaccgaacaccccgaccgacccaactccatcatgcctatcctaacctgagtacgtcggacttgtggtaagtacgataaattcttccagggcatcccgcgaaccggtccttaattgct

SEQ ID NO: 33481 - DNA, 4527 bp, Oryza sativa
  Clone ID: PAT_MRT4530_37589C.1
atgatatcactcccattactgctcttcgtcctcttcttctctgcgctgctgctcttcccttcgagcagtgacgacgacggtggtggtgatgctgccggcgacgaactcgcgctgctctctttcaagtcatccctgctataccaggggggccagtcgctggcatcttggaacacgtccggccatggccagcactgcacatgggtgggtgtcgtgtgcggccgccggcacccacacagggtggtgaagctgcggctgcgctcctccaacctggccgggatcatctcgccgtcgctgggcaacctatccttcctcaggacgctgcaactcagcgacaaccacctgtccggcaagataccccaggagctcagccgtctcatcaggctccagcaactggtactgaatttcaacagcctatcgggtctcactgatcttgcactggctgaaaatacgctgtctggttccatcccatcatctttcggccaattgcgcagattatctttccttagcttagcctttaacaatttaagtggagcgatcccagatcctatttggaacatctcctctctcaccatattcgaagtcatatccaacaagctaagtggtacactgcctacaaatgcattcagtaatcttcctagtctgcaggaggtatacatgtattacaaccagtttcatggtcgtatcccggcatcgataggtaatgcttccaacatctcaatatttaccattggtttaaactcttttagcggtgttgttccaccggagattggaaggatgagaaatcttcagagactagagcttccagaaactcttttggaagctaaagaaacaaatgattggaaattcatgacggcattgacaaattgctccaatcttcaagaagtggaactgggaggttgtaaatttggtggagtcctccctgattctgtttccaatctttcctcttcgcttgtatctctctccattagagataacaaaatttcagggagcttacctagagatatcggtaatctcgttaatttacaatatctttctctcgctaacaactccttgacaggatcccttccctcttccttcagcaagcttaaaaatttacgtcgtctcactgtagataacaacaagttaattggttctctcccattcaccatcggtaatcttacacaactaactaatatggaggtccaatttaatgccttcggtggtacaataccaagcacacttggaaacctgaccaagctgtttcaaataaatcttggccacaataactttatagggcaaattcccattgaaatatttagcattcccgcactctctgaaattttggatgtgtcccatcataacttggagggatcaataccaaaagaaatagggaaacttaaaaatattgtcgaattccatgctgattcgaacaaattatcgggtgagatccctagcaccattggtgaatgccaacttctgcagcatcttttcctgcaaaacaatttcttaaatggtagcatcccaatagctctgactcagttgaaaggtctggacacacttgatctctcaggtaacaatttgtcaggtcagatacctatgtccttaggggacatgcctctgctccactcgctgaacctttcgttcaacagcttccacggtgaagtgccaaccaatggtgtttttgcaaatgcttctgaaatttacatccaaggcaatgcccatatttgcggtggcatacctgaactacatcttccgacgtgttccttaaaatcaagaaagaaaaagaaacatcaaattctgctgttagtggttgttatctgtctcgtttcgacacttgccgtcttttcgttactctacatgcttctaacctgtcataagagaagaaagaaagaagtccctgcaacgacatccatgcaaggccacccaatgatcacttacaagcagctggtaaaagcaacggatggtttttcgtccagccatttgttgggttctggatcttttggctctgtttacaaaggagaatttgatagtcaagatggtgaaatcacaagtcttgttgccgtgaaggtactaaagctggaaactccaaaggcactcaagagtttcacgtccgaatgcgaaacactgcgaaatactcgacaccggaatcttgtcaagatagttacgatttgctcgagcatcgataacagagggaatgatttcaaagcaattgtgtatgacttcatgcccaatggcagtctggaagattggctacaccctgaaacaaatgatcaagcagagcaaaggcacttgactctgcatcagagagtgaccatactacttgatgttgcatgtgcattggaccatcttcacttccatggccctgaacctattgtacactgtgatattaaatcaagcaatgtgttgttagatgctgatatggtagcccatgttggagactttggacttgcaagaatacttattgagggaagctcattgatgcaacagtcaacaagttcgatgggaatcagggggacaattggttacgcagcaccagagtatggtgtcgggaacactgcctcgacacatggagatatttacagttatggaattctagtgttggaaacagtaaccgggatgcggccggcagatagtacattcagaactggattgagcctccgtcagtacgttgaaccgggtctacatggggacatcctcctggtcttcaactccatctatgacctcagatgtacgcacctgaacctaatcaactcagcaaacatcgtcctaatccccaaaaaggatggggccgacggcgtctcagactacaggccaattagcttaattcacagtattgccaagatcttctccaagctgcttgctttacgactgaggtcccatatgcacgccttgatcccggtcaaccaaagtgctttcattaaaggaagaagcattcatgacaacttccttttcgtcagaaacatgaccagacgttttcaccgactgagacgagcaatgttgcttttcaaattggacataacaaaggctttcgattcggtgcgatgggattatcttatggccttactgcagcacaggggcttcccaaccaggtggataggctggctggcggccctactctccacttccacctctcaagtcctcctcaatggctcaccagggcggcggatcaaacatggaagaggacttcggcaaggggaccccctctcgccgctcctcttcatcttggcaatcgactctctgcagcgcatcctctccaaggcaacagagctgggcgcaatttcaaagttgcgaggaagaacgactcggttgcggacctcgatgtatgcggacgatgctgtcatcttcattaatcccacccgagacgatgtcacggcctttgcggacatcctacaccgtttcggtactgctactgggctcgttaccaacctccagaaatcccaagttgcggcaatcagatgtgataactgtcacgcccagaaattcccgaatagaattataaatgcagcggaaaaacgaaagataacaggagctaagccttgacttgatctgcagcgggaacaccactccacaggcatcctcgacggcacgaacgaagcctacaccggtcagccgctcgggagagagggaaaaggggcgccggcacgtgggtgccactcggcagcggctcaaggaggggcggtccaccgtggaccgggaccacgtgggtggtccaccgccggtccacgggaccgacggcccagatcgcccccggggctgatcggacgggcggcggcgacccggctcggctcggctcaaggccggccgaccggccacggcgatggcgacggcgcgcgcgcacgcgttgccgacgacggcaaccggcggaggaggcggcggcgcaaaggcgacgtgaaggcggcggcgcgagggtggccggcgtggaggaagacgacggcgaacggcgacggcaagccatgggaggatgacggcaaccggcggacgggctttggggtgcccggagcgcaaggggatgcgaattccggcgacgaatcccgacggaggaagggcggacggggtggagttcgtccttgcgaacccgacggcggcgacggcgcggtgcggcggcgagcctagcggcgggtggccggtaggggcgagattccgccggccaacgtgggggagtgggagaggagagagagaggcgggattcgaaaatcgaatcccagccatctcgggcgcgggcgcgggcgggagagagaggggagtgggcgcgggaggtgcggcgcatgcgcgggcgtgaccgacgtggcccggaggaggcggaggcgtgggcgtggcgacggttgcgggcgcggcggcgcgggcgcgaggtaggagacgggcccgacaggtggggcccacctgtcggcgtcctgggtgggaggagggaggcggccggcctagctgggccttggccttcggctggcccagcggaggggagaggaggaaggggaatgggccggcggcccactcgaaaagaaaagggggaaaaagaaaaagaaaaaggaagaaaaggattttccctggaat

SEQ ID NO: 33482 - DNA, 354 bp, Oryza sativa
  Clone ID: PAT_MRT4530_3758C.1
gagaaggccagagcaagcgacgagcggggtgggcgatgggcggagcagaggggcagcggcgagcgagctcctcgtcccctccaccttctactccataccgcgcatcctcgtcgtaggagtcaaaggtgggggagggttctcgaaagaggcggggtggagaggccggcaaggagatgggtggcgcgcaggagaggagcggaggcacgccgaatgagggagaaggagccggaggccttgaatgtcacgcggcacggcaccgagttggagtgtgtcgtgcagctaagggcgaaggcggtggcgtggcaggcgaaggcgcttgccgaccagtccaccgtggtggcgctccacgcatag

SEQ ID NO: 33483 - DNA, 656 bp, Oryza sativa
  Clone ID: PAT_MRT4530_37590C.1
atggcgattaaggaccagttcgcgggatgccctggaagaacttatcatacttaccacaagcccgacgtacccacgcaagggtgggcgtgatggaattgggtcggccggggagtccgattgatcggctgccggattcatcgtggcacgagaggggactgcccgctgccttgtgaggagtgggggtgaaacctgaggtgtggtgcgattggttagagggggttatgcgaagggtcctgtcacggcctctttccagtatgtcgtgttcaagtggttggttgggcctgttgcaacgtagtgtagcgtttgacagtgattggttaatattgattaattactacaactgttttactgctttcaactactgcttttaaatgctagctttatgcaaaagaacctttagcctcccttggatatatcctgcatcataacttctcttccagtatgacttgctgagtacactgggtagtactcagtcttgctctcttttcccccacactagagttgaagtttttctcagttggagatgtttcgaagaagttggtttcgccgctgccgtcaagcttagaaattctggttcgtgaatttctgggcgtgacattataggcctaggtatgacccaaaagtcggcctggaccgtgcttgggacgggccaaaac

SEQ ID NO: 33484 - DNA, 410 bp, Oryza sativa
  Clone ID: PAT_MRT4530_37591C.1
tcgatctttactaatttttagtcaatttctgcctcgatacttctaacctttttttagtcaaatgtattggtatagcctcactccccttgatattctcctactccgggatgccaaacccttcacccctggcgatcgggcctgggctggcagtatttttacccccaatggtcataccttagcgggagcagtccggagtttgttgccccaaaatcaaaccatcagcctaatagggccattgtcatatcacaaggaaaccctttattttcctcggccgatgggctttgtcggtaaaacccccctgatacctttgcctcggcacgatgccaccagtcccttacgaagttcaaatgtcgtgggataaaacccaacctgactccttagcacccctggaaactttttcccaaacggat

SEQ ID NO: 33485 - DNA, 2307 bp, Oryza sativa
  Clone ID: PAT_MRT4530_37592C.1
ccgggctgcaggaattcggcacgaggatcatttctgcagcacattgctgaaccccaccacgaacagctcaagtacacagccacgagaactcgtggaaaaaccgggctaaatccaacgcctctcctgagtagaaaaccgctaccgctcggcatcttccttcttgtttgattcgtgagcagttgggttcagccttccgggctcagttcagtctgatgtgaatggaagtttcatcactattccaaggttgctattttgattaactatagcttgtggcagtatttggccatcttgcctgataaataaccagtcatggcgacaacggcttcaaagataattcctcaaaccctcccagaaatcccaaccaccccagaaccacagcagtatactaagactgctccagacatccccaaatcaaacaattctcgttcttcagtacctaaattgctacaagaatcagaccgcggcaagttgaatcataaattggagccaaaggaacaaaagccaaaccaccacctgaaagagtctgttgatgtttcatcggccaagtgtccgacagaagtgagcgaagaaatggtttcagaaggtattgcaagtcaagaaaagaaggttgtggagtatgagagtgtgaatgggagctccacctcatttcacacatgcgaagggagtggtccaggaaaagcaagtggaagtgctaggatgacggatcgatccgagaccggtgaaaggggtagtagtagcagatgcaggccaagcacaagcagtgatatcagtgatgagagttcgtgtagcagcatgagcagcaccacgaagcctcataagtcaaatgattcacggtgggaggcgatccagacgatcagggtgagagatgggatcattgggttgagccatttcaggctgttgaagaagctaggctgtggtgatattggcagtgtatatctctctgaattgagcggggcgaaaagctatttcgcgatgaagattatggataaggcttcattagcaagccgcaagaagttgcttcgagctcaaactgagaaagaaattctgcaatgcctggatcacccctttcttcctacattgtacactcacttcgagactgacaagttctcatgcctggtgatggagttctgcccaggaggagacctgcatacccttaggcagaggcagccgggcaaatattttccagagcaagctgtcaaattctatgtagcagaaatcctcttggcattagagtacctgcacatgctcggcatcatataccgtgatctcaagccagaaaacgtcctcgttcgggaggatgggcacatcatgctatctgactttgacctctcactccgttgcgcggtgagtccaacactaataaaatcatccaacccggacgctgaagcactcaggaagaacagccaaggttactgtgtccagccagcatgcgtcgagccatcctgcgtgattcagccatcatgtgcagcccctacaacctgctttggccctcgattcttctccaaatccaagaaagatcgcaaaccgaagcctgaaattgcgacccagatcagcccttggccggagctcatagcggagcccagcgatgctcgttcaatgtcatttgttggaacacatgagtacttggccccagagatcatcaaaggcgagggccatggtagcgctgtcgattggtggaccttcgggatattcttgtatgaacttctgtttggaaagacaccattcaagggctctggcaacagggcaacactgttcaatgtcattggtcagccattgcgcttcccggagtacccaattgtcagcttctcagcaagagatttgataagaggtctacttgtgaaggagccccagcatcggttagcttacaaacgcggcgccacagagataaagcagcatccgttcttcgaaggcgtaaactgggcgttgatccgatgtgcaagcccaccggaggtaccaaagcctgtcgagattgagaggccaccaaagttgcccccatccacatctggaactactgatgtgtccagtggtgcgcctcagaagggttctgatggctacttagagtttgattttttctgatgaacatatggatttcgatatatatcgattgtgcgatgagatgtagttttctttaggtgtagtgtttctggcagatgataagtgttgtagactgtccactgcaacctgtttctgttatttcctgcataatctatattcttttacagcttgtgtttccacaagttctgattctgttaaaaaaaaaaaaaaaaaaaaaaaaaaaaaaaaattcgagggggggcccggtaccca

SEQ ID NO: 33486 - DNA, 3642 bp, Oryza sativa
  Clone ID: PAT_MRT4530_37593C.1
atggagaggtgccagcgcgtcctgttcaggaggttgggcatcctccatgacgaagaagatgcctccgtggagcgcattctcagccagtatatggccatgtttgatgggcccctgccgccgcacgccatcgccgccttgacggcgatcttcggcctcgacgacgatgatgagtgcgccatggatgccgctctgctccctcttgtggacgaagggatcactgatgtggccgataaactggtgtgtcgccggtggcctgcgtgccgcctccccagcatttctatggaacctcagctcttggagcacatgtcgatgtcgcacagcctagatttcattagttggaatgtgagggtgctcaattcgccagcacgctgcaacacggtccacgagatgatgttggatacgaaatgcaacctagcatgcctccaagagacgaaacttcagaacatcgacgacggcctcacccgcttcctgggtggctacaaattggatagctttgccttcaaaccggccacgggcacgagagggggaattatcatcctttggaacaatgctgccctcatcctacaagatattcgaatcggccgctttttgatctcagcacaagtgatggtcccactcacaggggctaccttccttatgaccggggtgtacgggcccacgagacaccggcttaaggatgccttccttaggcacataaggcggctaaagcccaatgctggcgaagggtggctcctattcggggatttcaacatgatctaccgagcaagggacaaaaacaatggcaaccttaatctagctcgcatgaggcgctttcgagcaacaatcgatcgatgtgaactccgcgagatccccttgcaaaacaagagattcacctggagtaatgagcgtcaaaggcccactctagtgaagcttgatcattgtttctgcaatgagaactgggatctcgccttccatcaccatgtcctgcatgccctcccaacagggccatcagaccactgccctctcgttctttcaaatcccgctgccccgtgcaagccgcgcccctttagatttgagaacttttggacacgcatttcgggtttcaaggacatggtcaaggctagttggacccaaccatccccgcacacagagccaatgcgccacataaatcacaagctacagcgcacagcttcttgcattaaaacctgggctaaaagtctattcacagaggtgaaaattcagtttcacatggcactcgatgtcattcagcggcttgatgtggcccaggaacacagagatctctctggcccggaattgcggctgagagctgccctaaagcgcaaaactctgactctcgccacgatagagagggcaaggaaaagacaggcttccaggttgactcatatccgtgaaggggaggcaaacacaatgttttttcacctcagggtgaatgcgcgtaggaggaagaatagcattcaaagactctgcaaggaaaatggctgggtagtcactcacgatgagaaagaaatgaccatccttgaccacttcgcccatttaatggggcggccggggccgaggccgaatgagctcaactgggaagctctagacatccagcctttcgacctctctaccttggaagagtctttctcggagcaggagatccaccgggctatcaaagagatgccagttgacaaagcgccagggccggatggttacactggtatcttctttaaaagctgttgggatatcgtcaaggaggatgtttcccttgtcttcaattccatcttcaacctccgctgcgccagcttgggcctcctgaactcagcgaatattgtgttgatcccgaagaaggaaggggcggagagtgtttcggactacaggccgattagtctaatccatatcatagccaaaatcttctccaagctgctggcgttgcggctgaggccccacatgcgctccttggtctccatcaaccaaagcgccttcatcaagggaagaagcattcatgacaacttcctctttgtgaggaacatggccagaagatttcaccgtacgaatcggccgatgctcctcttcaagctcgacatcacgaaagcatttgattctattcgttgggactacttgatggcccttttgcaacgcctaggcttccctgtaaaatggagagactggctaggtgccctcctctacacatctacctcgcaagttcttctcaacggcatccctggtcaaagaatcacgcatgggagaggacttcggcagggagacccgttgtctccgctcctttttgtcctagcaatcgaccctctccaacgtctccttacaaaggcaacagacctaggttcgctctctaagcttcgaggcagaatgcctcgcctgagaacatctatgtatgcagatgacgctgccattttcgtcaatcccacaagaggggatgtccaagcgctcacggaaatcctgcaacgtttcggcacggccactggactcgttaccaacttccaaaaatctcaagtcgcggccatcaaatgcaataacattgatttggacgacgtcctagagggagtcccagcagtgagagcatgcttcccgatcaaatacctgggactccccctgatcctcgggcggatgcgaaaggcggacatgcagcacatctttgataagatcacagggcgtataacgggatggagaggcaaaaacatgggacttgccgggaggtccacacttgtaaaatcagtgctaacggcgcagccaatctacttactgaccgctctgaaaacttcaaaggaagccttggagtgcctagacaagcagcggcgacgttttctctgggctggcacgggggacatcacgggtggaaaatgcaaagtcaattggacaaagacgtgtctgccaactaggcaaggaggcctcggggtcctgaacctagaaaaattcatgagagccctgcgtctacgctggctgtggcatgaatggaaggacccaaacaagccatgggttggtctcgagatcccctgcgacgaagtagacaagagcttgtttgccgcatccactaagataaccattggtgatgggaatatagcgcgattctgggactctgcgtggattgatgggagaagaccaaaggacctcatgcccctagtatacgcaatttctaagaagaggaaaaagaccctgcgccaaggaaaggagaatgatgcctgggtaggtgatttggcactggagacaaacccagtaattacagtggcccttgtggagcagctggttgccctatggactgcagtccacaacgtgcagttagaagaagaagagtcagaccaaatcgcctggaagttcactcctcatgggcactactcggcttcatcggcctacaaagcgcagtgtgttggcgcgcctgacacaacttttgactccttgatctggaaggtctgggcgcccggaaaatgcaaactccacgcttaacttatcatacagaatagggtttggacctctgaccggcttgcgaccaggggttggcaaaataatggcaggtgccctctctgtagaagagaagatgaaatggctttgcatcttgtcgctgagtgcaggtatacgagacggatttggaacctcgttgcgacatgggtagggttccaccagctaaaaccccgacgctggggggtggcg

SEQ ID NO: 33487 - DNA, 487 bp, Oryza sativa
  Clone ID: PAT_MRT4530_37594C.1
cgcacgcgttcggtatgatataccatttttggctcagttatagttgcagcggaccagcttaacttgagataaagaccctcgcactatccctccacatcaagccttaaaatcgtcgattcttccatcaatcctagactgaaacccctaggtcgcacagccagcaaaacacactacctggccagaagctacccaatagaagggatccatcgatccatcggaacccgacatgctcaacaatacgaacttgcaccctagcctagcctgcagataccggcctcaggtacactctggacagccctcagtccgacgaggtgcgagtcaccctcccggtgacagccggcgacccatccctcgacctcgactgccaccacaccacccacgcccgggacggccacctgccgtccacggagccaaccggtgaccacgcccactagatgaacgggaccacctccaggggcggcaatcacaacgacagcgcggtggttac

SEQ ID NO: 33488 - DNA, 336 bp, Oryza sativa
  Clone ID: PAT_MRT4530_37595C.1
atggacaacgtatgccagcggctgcacaccaaggaggaaggtaatagaaagggaaggagaggaaaagggaagcgcacgctccggatgtcgtgggaagaagagcaacagcgggaggcggcgcttgcacatgcgagcgacggggccattgtgacgcacagaggcggcgacgccgtaatcgatctcatcggcgttccgcagatgctgaagcatgagggtgatcgacctggagatgctgccacccattggtgtcactggaggagaggcgggtcggcggagggcacaagagaagagaaccagtttatcgaaattgtcaaagatatatcccagaaattttga

SEQ ID NO: 33489 - DNA, 144 bp, Oryza sativa
  Clone ID: PAT_MRT4530_37596C.1
ctacggttatcacttgaacacaaacagcaaccagaaaggcatgaaccaaagatttgcattaagactcctttacctattaaattgtctcttcaattataatgaatacatcatgaagatggcaattgcctacaaattgaacacagg

SEQ ID NO: 33490 - DNA, 2077 bp, Oryza sativa
  Clone ID: PAT_MRT4530_37597C.1
cccacgcgtccgaacgtcaggacctttcgccgagctcgcggagagaagaagggattccagtggagcacgcgatttcccatctgctcgatcccctcctcctcctagggtttcctgctcctccgcccgcctcgccttgctgctgccgttgttggttggtgcgatggctctcacttcggctcaacggattgctctcactgtctctttctttggccttctctccttcttacttggtgtcatcgcagaaaacaagaagcctccttatggaactcctatcaaaggaaaggatgttgtcatctgcaggttcccaagtgacccaactattgcaatgggaagcctctccgtggtgtcacttgtgttaaccaccatcgtagggcatgccgctatcttctatccatacaagagcaagtctgttcctcgcggagcattatttcgaagcgccagcttatctgcgttcttcgttattgctgagcttgtctcagctctggcgtttgcaatgttgctctgggcaacggtcaccgagggtcttcaccgaagcaacaacatccaccatgacctggatacccagtgccctactgcgaagactggcctctttggaggagccgctttcctggcccttgatgctgctctcttctggcttgtttgccagatgctagctctcaatgcaaggtctgactatctggatgaggatgacaagggcgattatggccaggtttttgcttctgatgttgatggcacaaagccctactcacctctcgcaagtcggacacccctccactccatggacgccggcgatgatgccgagcccagttggcgcaggagcccttctcccccaaatccacgggcgcggcggccgatgttggaccaagaaatccgacgcccacaccgcttcccaagaacagaggtctcgagcatgatacgcattctccggcggcgcgaagccgaggagctccatccaccgagcagaacccggaagagcgcttctccggttctggagccactgattcaattgcgaccttctgatgatgaggaggatcggaggaggccgcggcgcttagacaaccagagtcgagtggaacaaatgtctgactctggtgctgataccacaccatcccaaccacctgcagaaatctgccagtcaaaggaggaagattcaaccatggtcaaggctgatactgtcggctttcatgaacaagacaagttacctcatcagatgtctcaattgttcagagcccaatcatctgcaggaacccatcagtcctcacagcagaattattcaatcatgtaccagatggcaaagaaagctgagctggaggagcaaggacgcagtgtagcacgatacattcgtaaattatatatccagcgatgcaagaagttgaatattgagtttgaggaggacgaggagcctgagggagtgctacatccaagtgacgccggtccttttcaacacactgataaagaatatgccactccaaaccctaatgatgttggccacttgtcagaaataccatcacaacaagaacaggctgaaatgccacgtcttccttgcttaaacaaaccagtggaatattgcatgtctgatgagtacatcgatctgctagacaagaaagcaaaggccttttttagtagggtgagcccggtgaagcaacgttctcggaaagaaacaattgcgaatggacttcaatatttgaccgaggaagcattcttagcgttcagaaactatattgcagaaaaggatgcttttgaggaagttgattacaagtttggtgaaatattgcaccactgctttagtgttatggaatataggaaggtttattgccactataatttcactgttgagatgaagaataaggatgaggaatgctggacctctaggctttattttgctgaaacaaagctgatgcatggcgtcaagtattatttttgcactccacttgaggcaactgatgatggttgttgcaatgcatgcaaaaaccaaggtgttaatgagctcaagcacccatctgaaggaggctacgagaaaggtcaaagtagcactcggtgccagtactttgatggagattctgatgaggaatgctga

SEQ ID NO: 33491 - DNA, 943 bp, Oryza sativa
  Clone ID: PAT_MRT4530_37598C.1
ttgtttactgtcgaggaagaaagtgcaccaaagcacacacctcgaaccatgtgccaaccgcccaaacacacgatacagagagggaagccgagcaccgaaccggccgtcgctatgcgagaccgatcgccatcgggccaacaacaccacctcggcgcaaagactctaaaacgacgccctcgcgagggttgcaacgcgagacgccatcatcatccgtcccaaaaagggacaaggttttcacccagagctccttgcggagggaggaggggtacctcaactgctcaacaattcccttaggagggttaccacgcctgaaaatgtagtcactgttggcccaaagattgggctaagctttcgctcagaatccctatcgctatggttcgtcgcccaattcgaaaccagcaactaaacatcggcgacacatggcttctgccacactcgatcgacgcccctccgtcagccggcttccagtcctgccaacgacaagacttccacaacacccatcaccttcgtcggcctctacgtcgaatccgacctatgggaccggaccaggaacaacctcgccttagcaacctgagtcttcccaaagctccccacaaagaaggggaggagctccccaaacacagtgaacgcgtggccaaccacaaggaagatgaccttgtcgtcagcgtcctctaccccgccgccaagcccaatagcggcctcaccgaagccactactccgccgccacctcaccgcccaccaacggccacccgggccgcccagcgtcgacgccgacgccgtgcagcctcagctgcagccgacgcaccgcagccgcgccaccttcagccgcagtcgccgccggcccggcagcccgcgcctccagccgccgtcggggagtcgcgccaccgtctgaccggccgcgcggccctcgctccgaagttgccgccgccgttgcgctgccctc

SEQ ID NO: 33492 - DNA, 438 bp, Oryza sativa
  Clone ID: PAT_MRT4530_37599C.1
atggcttccttcctggctccacagccatcgactcaggggatccaactcaacagggattcccactcgcttgttttccacgatttgcagccactgcaggatgcaaatcggcagatccagatccagtccaccatcttcaaagaggttagtcgtcaagttcagttgcgtgaggctgccattgacatgctccgacctcgacggctttctccatatggctccatctctattgactcgacggattcaagtcgacagggattatctcgcacttgttttctgcgatttgcggccactgcaggatgcaaggtcaccacatgctgggctccagcgactgtgccgccgaatgctttcgctcgccgcggtttgccgcttggtggcactggcttggcagtcagcacctacacgactacatcctctgacatgagaagtcctgatgcctcctag

SEQ ID NO: 33493 - DNA, 168 bp, Oryza sativa
  Clone ID: PAT_MRT4530_3759C.1
atggtggccggaatagttgtcggcggcgacgcgagcggcagtgactctcggcatgccgagctccggctcgtttccatcagcggcagagaacggcaggtcgacagcgtcggctccttctggccttcgggctgtcaaagggaggaaggaaacgattcaaagaccatatga

SEQ ID NO: 33494 - DNA, 519 bp, Oryza sativa
  Clone ID: PAT_MRT4530_375C.1
atggcgcttgctatacgcttccggcccctcgctctgctcacgcgctccggccgtgaatggcgccgggcgccgcgagagcgtgtactcgatggcaaaacggcgtcgctctcgggccacctaccgcgagcgctgctccgccctgctgtgctcgctccggcccgtgctcccaggcctcctcgtcgcgctccctcgcagtctctcgcggcggccctcggaatcggcgatgaaggacgtcaccgatgggacactgctgccgctctaccgaccgccgtcccgcctagcatctaccccctctgccgccccgttgccgcgcttgtccaggaggctcaccaaagttattggaagggatcgtcgaggcttggacagcagcggcttcggttggaatggctcgacggcgaggaaaaactccgtgttgacgacaacggctcgatctactcgaagagctgccataaagtagagggcgatcgtggctcatcggcgctgacggcggtcgtcgtcttcaccgaggggcatgagtaa

SEQ ID NO: 33495 - DNA, 945 bp, Oryza sativa
  Clone ID: PAT_MRT4530_37600C.1
atggatcttagagcaagagcagccaaagagattctcaatttgactccttacagtgcatcaacacatgtggtgctctcaaatatttatgccactgttggcaaatgggaggaggctgcacaaatccggaaactattgagaaatcggggaatcagaaagaagcctggctgcagctggatagatcttggcagaatagtacatattttcgttgccaatgatatctcacatcctaggatcaaagacgtgtacaaattcttggaggtgatgtcagagaagatgaagcttgcagggtatgttccagataagatatgggccttggcaaaggatcatgctgccggaggggagacaaggctaaggcacaatagcaagaagcttgcactagcatttgacagattactgttagagatgcacatcggttccattgtttcagcgatggaagctgttcctgtggagattattgaaggtaatccagtgagcccacatgtgatcaaaatgattggttacaccgagagtctggataagcttggctttccccttagccgagagttgactactgatttgattctccagtcgctccctcccagttttgagccattcataatgaatttcaacatgaacaacctgaacaggaccttggcagaattgcatgggatgctaaagactgccgaggaaagcattaagaaaaactccaaccatgtgatggttatgcataagtgcaagcccaacaacaagaaaagtggtcaaaagagaaagctaaactctgatgagatcacaagtactagcaactctaagaccaaggttcaaaagacagggcccgctaaggatgcagagtgcttcttttgcaaggagacatgtcattggaagagaaactgtatgaaatacctagagcagctcaagcagaagcagcaggatggaaagagttccacctcaggggctgaaaagaagtag

SEQ ID NO: 33496 - DNA, 217 bp, Oryza sativa
  unsure (1)..(217): unsure at all n locations
  Clone ID: PAT_MRT4530_37601C.1
ggcacganctcgtncaantntggcagggngattggtcatggtggtggtgatggtggagatgatnatggcgatgatgatgattactttnatgattttaatgatggcgacgaagaagaaggtggcctttttcggagacgaattgtcattcaggagcttttcaatagagacnnnnnaggatgctgtaatgcaagattngtgtaaaacgatatagtaattt

SEQ ID NO: 33497 - DNA, 1389 bp, Oryza sativa
  Clone ID: PAT_MRT4530_37602C.1
atggacatctctaggacaaatgaaggctacatgagctgcggcccggtagtcgagatgtcatggcacagggccggtgtcctgctgctaggggctcaaccttggttgcccgtctcgggaatcccggccgtagccagggttagatgtgccttttgtatcatgtttgagtggtgtacctcggcttttcctgggacggggattaatacactagcgtttgggaaaagctcctggtttggaatgtatttattaaatgccatttatgcaaatgagactatattatgccattctttgttattccctgcacttgcatatttgctgcgtgacttgttgagtatgtcatatactcaccttgcaatcattcatcagacgaagagttctacagtgatgctgaagaaatccatttatgggttgaagcaagcatctcggagttggaatatttgttttaatgaagtagccaaggtgttgggctttgtcaaaaatgaagaagagccttgtgtatacaagaagattagtgggagcgcacaggtgtttctaatcctatatgtagatgacatattgttgattgggaatgatattcctatgcttggatccgttaagacatcgttggaaaatagtttttcaatgaaggactttggagaagtagcatatattctgggcataaggatctatagagatagatcaaggaggctaattggattaagccagagtacatacattgacaatgtgttgaagaggttcaacatgcaagattctaagaaagatgtttcatatgcaattagtgcaacaagccgataccaatcagatccaggtaagagtcactggattgctataaagaatatcctaaagtacttgagaagaactaaggatatgttcctagtctatggaggacaggaactgctcgttgtaaatggttacaccaacacaagcatccaaatcgataaagatgattttagaccgcagtctgaatttgtgttctgcctaaatggaggcgctgtgagctggaagagttccaagcaagatatagtcgctgactctacaacagaagttgaatacattaccgcttctgaagcagcaaaggaggctatttggataaagaaatttgtttctcaattgggtgtgatggccagtgctcccagccctgtgaacctctattgcaataatagtgatgccattgcgcaagcaaaggagcctagatcgcatcaaaattccaaatacattttacggcggtatcacctcattcgcgagatagtggatccattgacaaagccactctctcagcctaagcatgaggcacacactagggcaatgggaatagagacatgcgtgattgactctagtgcaagtgggagactgttggtgatatgccctagaggcaatcatagagatgattga

SEQ ID NO: 33498 - DNA, 4164 bp, Oryza sativa
  Clone ID: PAT_MRT4530_37603C.1
atggagatccaatatgagcttacttcggatagggatccgaataggagtcctatgggccttggaggcccgagtgatggatcctatatattcgtgaggggtgtgaccggcggaggcattgcatcactactcactaaggctgagcgcgattgtgttcatcggatagtcagatgtccactggaaccgcacgccaatgagaaaaacgagccaatgagattgactcggtttcggcttaattcaattacgccgttaaggatagatgtcggacatctatatgcggagattattggtttacttgacaagatcatggcagctcctgcaccatccaaatttatcttgcggtctattcttgagaaagagaagttgactggaacaaacttcatggattggtatcgcaacctgagaattgttcttaggcaagagcacaaagagtttgtgcatacacagccttttccagctgacttgccaaacaatgctcctgctgctcaacgtagggagcatgaaaggcgatgcaatgaataccttgatataagctgtctcatgcttcctactatgtcccctgagcttcaaaggaaatatgaggcattggatgctcatatgataatcacgggactacgtaacatgtttgaggaccaagcaagagctgagaggtttaatacctcaaagtccttgtttgcgtgcaggcttgcagaaggtaatccagtgagcccacatgtgatcaaaatgattggttacaccgagagtctgcataagcttggctttccccttagccgagagttggctactgatttgattctccagtcgcttcctcccagctttgagccgttcataatgaattccaacatgaataacctgaacaggaccttgccagaattgcatgggatgctaaagactgccgagaaaagcattaagaaaaactccaaccatgtgatggttatgcataagcgcaagcccaacaacaagaaaagtggtcaaaagagaaagctaaactctgatgagatcacgagtactagcaactctaagaccaaggttcaaaagacagggcccgctaaggatgcagagtgcttcttttgcaaggagacgggtcattggaagagaaactgtaagaaatacctagagcagctcaagcagaagcagcaagatggaaagagttccacctcaggtattaatgttatagaaattaatcttgctacttcctctactgattcttgggtatttgataccgggtcagttgctcacatatgcaaatcgttgcaggggctgaaaagaagtaggagcttagcaagaggcaaagtggacattcgcgtgggcaatggagcaagagttgctgctgttgcggtcggcactatgccattatctttaccgtcaggattagttttggagttaaataattgttattgcattccagctttgtgtaagaacgttatctctgcttcttgttggcaagcagagggttatgattttagatctgtggacaatggttgttcagtctattataatgacattttctattgccatgcacccatgatgaatggcttatacattgtgaatcttgatggttgtttagtctataacattaatgcaaaaaggcaacgtcctaatgatttgaatcccacttttatttggcattgtcgcttgggtcatataaatgagaaacgcatggagaagcttcatagagatggacttctacactcgtttgattttgaatcatttgagacatgtgaatcttgtttacttagcaaaatgacgaaggcacctttcacgggtcaaagtgaaagggcaagtgaactattgggactagtacatactgatgtatgtggaccaatgagctcaactgccagaggtggttttgggtactttattacctttaccgatgactttagtagatatggttatgtctacttaatgaggcataagtctgagtcctttgaaaagttcaaggaatttcaaaatgaggtacaaaatcatttggacaagacaatcaagtatgtacgatctgatcgtggtggagagtacttgagccttgaatttggcaatcatctaaaggagtgtggaattgttctacaactcactccgccaggaacgcctcggtggaatggggtgtctgaacggaggaatcgtacattgttggacatggtgcgatcaatgatgagccaaactgacctgccgctaagcttttgggattacgctctagagacagctgcgttcacactaaacagggttccatcaaaatcagtggataagacaccatatgagatatggactgggaagcgtcccagtttttctttcctaaagatttggggctgtgagttctatgtaaaacgtttgcaatcggacaaactcacacctaaatcagataaatgcttctttgtggggtatcctaaggaaatgaaaggatattatttttataaccgggatgagagcaaagtgtttgtcgcccgacacagtgttttcttggaaaaagagtttatttcaagaaaggatagtgggaccatggtgcaacttgaagaaattcaggaaacaacggaaaacgcttcaacgtccacacaaccacaagctaagcaagatgttgttcaacaggttgaacaagttgttgttgaactagttgtggaagcaccggcttcacgaaggtccgaaaggatatggtgtacaactgcgaggtatgcgttgttaactacaggacaacgtgatatattgttgttagacaacgatgaacctactacctatgagaaagcaatggtgggaccagactctgagaaatggcttggagccatgaaatccgaaatagaatacatgcatgtcaatcaagtttggaacttggttgatccacctgatggtgtaaaagccattgagtgcaaatgggtctttaagaaaaagacagatgtagatggaaatgttcacatctacaaggcacgattggtggcgaaaggtttcagacaaattcaaggtgttgattatgatgaaactttctcgccagtcgccatgctaaaatctattcgaattgttttagcaattgctgcctatttcgattataagatatggcaaatggatgtcaaaacagctttcctcaatggaaatctcgatgaggatgtgtacatgacacaacccaagggttttgttgatccacaatcagctaaaaagatatgcaaattgcagaaatccatttatgggttgaagcaagcatctcggagttggaatattcgttttgacgaagtagtcaaggcgttgggctttgtcaaaaacaaagaagagccttgtgtatacaagaagattagtgggagcgcactggtgtttctaatcctatatgtagatgacatattattgattgggaacgatattcctatgcttgaatccgttaagacatcgttgaaaaatagtttttcaatgaaggacttaggggaaacagcatatattctgggcataaggatctatagagatacatcaaagaggctaattggattaagccagagtacatacattgacaagaatcagtgtcctcaaacgactgatgagcgaaacaagatgagtgtgattccatatgcctcggcaatcggatccatcattgcaacaagccgataccaatcagatccaggtgagagtcgctggatagctgtaaagaatatcctggagtacttgagaagaagtaaggatatgttcctagtctatggaggacaggaagagcgcgttgtaaatggttacaccgacgcaagcttccaaaccgacaaagatgattttagatcgcagtctggatttgtgttctgcctgaatggaggcgctgtgagttggaagagttccaagcaagatatagtggttgattctacaacagaagccgaatacattgccgcttctgaagcagcaaagaaggctgtttggataaagaaattcgtttctcaactaggtgtgatgactagtgcttctagccctatggacctctattgcgataatagtagtgccattgcgcaagccaaggagcctagatcgcatcaaaagtccaaacacattttacggcggtatcacctcattcgcgagatagtggatagaggagatgtgaagatatgcaaaatacatacggatttgaatgttgcagatccgttgacaaaaccactccctcagcctaagcatgaggcacacactagggcaatgggtataagatacgttcatgattga

SEQ ID NO: 33499 - DNA, 1530 bp, Oryza sativa
  Clone ID: PAT_MRT4530_37604C.1
atgaaatccgaaatagaatccatgcatgtcaatcaagtttggaacttgcttgatccacctgatggtgtaaaagccattgagtgcaaatgggtctttaagaaaaagacagatgtagatggaaatattcaaatctacaagacacgattggtggcgaaaggtttcagacaaattcaaggtgttgactatgatgaaactttctcaccagtcaccatgctaaaatctattcagattgttttagcgattgctgcctatttcaattatgagatatggctagtgaatgtcaaaatagctttcctcaatggagatctcaatgaggatgtgtacatgacacaacctaagggatttggtgatcctcaatcagctaaaaagatatgcaagttgcataaatccatttatgggttgaagcaagcatcttggagttgggatattcgttttgacgaagtagtcaaggcgttgggttttgtcaaaaacgaagaagagcctcgtgtatacaagaagattagtgggaacgcactggtgtttctaatcctatatgtagatgacatattgttgattgggaatgatattcctatgcttgaatccgttaagacatcgttgaaaaatagtttttctgtgaaggacttaggggaagcagcatatattctgggcataaggatctatagagatagatcaaagaggctaattggattaagccagagtacatacattgacaaggtgttgaagaggttcaacatgcaagattctaagaaaggtttcttatcgatgtcacatggcattaatcttggcaagaatcggtgtcctcaaatgactgatgagcgaagcaagatgagtgtgattccatatgctttggcaattggatccatcatgtatgctatgctatgtacacgtccagatgtttcatatgcacttagtgcaacaagccgataccaatcagatccaggtgagactcactggatagctgtaaagaatatccttaagtacttgataagaactaaggatatgttcctagtctatggaggacaggaagagctcgttgtaaatgattacaccgacgcaagctttcaaaccgacaaagatgattttagatcgcagtctggatttgtgttctgcctgaatggaggcgctgtgagttggaagagttccaagcaagatacattggctaattctacaacaaaaaccgaatacattgccgcttctgaagcagcaaaggaggctgtttggataaaaaaattcgtttctcaactaggtgtgatgactagtacttctagccctatggacctctattgcgataatagtggtgccattgcacaagccaaggagcctagatcgcatcaaaagtccacacattttatggcggtatcacctcattcacgagataatccgttgacaaaggcactccctcagcctaagcatgaggcacacactagggcaataggggccgctgttgatgcgtggaccgaaaaggagttttcgggttacagccgagtatatatgaacctacagggtcgcacgcttaatgggcctgaataa

SEQ ID NO: 33500 - DNA, 1170 bp, Oryza sativa
  Clone ID: PAT_MRT4530_37605C.1
gtcgtcgccgtcgccgttgccggtaagttaatccatctctgctctgctctccgatgagatgaagcgcctcctccacaaggctcttcatcagggagagggaggaactcatgtagatgtggcacagatggacgcgcagatcgcccttcactacggcatcccgtacaccgcatcgctcctcgcctttgaccccgtccagcgcctcctcgccctcgccacactggacggtaggattaaaatctttggaggcgataacatcgagggcctccttatatcacccaacagtctcccatacaagtttttgcagtttatacagaaccaggggtttctgattgccatctctaatgagaatgaaatccaggtatggaatcttgagttcagacaactattttattcttcgaagtgggacatcaatataactgcttttgcagttgtagaggggacatttctgatgtaccttggagatgagaatggcctgctttcggtactgaagtatgacgttgatgatgggaaacttcaaaagatgccctacaatgttccgatacattccttagctgaagcagcttgcgtttccttagaggatcctcaatctattgttggaatactgccgcagcctgatacctttgggaccagggtgctgattgcatatgagaaaggactattagttctttgggatgtatcagaggatcgtgctatttcggttagaggctatggtgatttgcacatgaagaatcaaatcacaggtgcacagagggatgctggtgaagatgaagacaataatatcagcgcagaagaagagagagaaatttgctccctttgttgggcatcgcaaggaggttcaactgttgctgttggttatataactggagacattcttctgtgggatatgactgcaagatcctctaaacaagacaatagaagtgatgaaccatctaatgttgttaaacttcagctggcttctggtagtcgtaggcttcctgttattgtattacactggtcttctcgttctgctgattctaacaaaggagggcatctctttgtatatggtggtgatgatatgggttccgaggaaagtctgacggttctaagcctggaatcaactactggattagagtcaacaagatgtatgtcacgaatggatctcaaacttgatgggtccttttgctgatatga

SEQ ID NO: 33501 - DNA, 1331 bp, Oryza sativa
  Clone ID: PAT_MRT4530_37606C.1
atggcgtctcctgatggtggcgttggagacggcggcgcggagccacatgaagttatggacgacctgctcgagatgcgcgagcaagcggcgatgctccacagcatgctacatgggacatcgccgtcgagctgtgcggcggcggcgagcaccaggcagctgaatcagctgatagacggggtgatgagcaggctgcagtccagctcgctgtcggtgatgtcgcctggaggaggaggaggaagaagaggatcgggcgggaggaagaagaaaggcgccaaggccgtggccgggccgcacaggcggagcagctccggtagaagaagatcgaaaagtccttttgtcaggatggtcacgaccaaggagctggaggacggcaggcaatggcgaaagtacgggcagaaacatatacaggactccccaaataatccaaggagctactacaggtgcacgcataggccagaccaaggttgtatggccacaaagcaagtacagacctccgagtctaactcgtcggagttcgtcatcagctactacggtgagcacacctgcagcgacccttccaccatcccgttcgtcgtcgaggccgaagctcccgctgcagactacgcgaacctcatcagcttcggatccagcggcggcgcgagcacaagcagagtcgaccctcttcgtcagagccgccatcgtttgatggcagaagccgttgatccgacgccgtcctgcagcttcgccaactgccactctccggtactgtcctcggagtgcgccagcgaggcggcggcgctcagcagcagcctgccgctctccgccgtggtgggatcggcggtgacaacgccgtcgacgtcgatcgtgggttcagcgcctgcggattacgactggccgtcagggctcgccggaggtgacatggccggcagcttcccgtcctctcccagcagcctcgggttcatgactggctcctttgggaatcttcctggggatgacgacgacatgtttggcttcgatccttaacaagggctgtgcatgcatacattcttgccatgctaattattgctactactaatattcaagaaaaacaagtccgctatttgcatgcagaagtgtatgcatgcatgcataatactattgctgtgaggctatagcaaattagcaatacttgtagtacatgtgtgtactgctattggaggaaatccaatatatatacggtacgtagtaaatatgtgtattagttgatcgctgtactagtgagttgtgtgtatgtgattttgtaagtattgaaacataatttgaaattaatatatagtagtgaaagtaatatataagaggaaaaaaaaaaaaaa

SEQ ID NO: 33502 - DNA, 2433 bp, Oryza sativa
  Clone ID: PAT_MRT4530_37607C.1
atgactgctatggggttcccttctcaatggaatgagtggatgactaaaatcttttcttcggcttctactcctatactattgaatggagtactaagaaagtttttcaaatgcaagagagatgtaagacagggtgaccccttatcccctcttttatttgccctgggagcagatctacttcagtctttgattaataaagcgcatattaggggaatcctgaagtttcctatacctgtaattggtgatgagaacattccaataattcagtatgctgatgacactcttatcttcttggaagcttctgctccccaactttttgccctaaaggccatgcttaattcgtctgcactctcctcagggcttaaggatgatctatggaatggtatggtaagatctgtcaaattcccaaggctgttctcgtttgcaagacacaaggaagactctgtttctcagcacttggcgagagaacctcaagatcaattcttcttgccattgtctcaacaggctttggatgagtacaatgttctcttggctgatgtccaaactactgcccttttagatgtaaatgatggctggacatatatttgggggtctgcaatgtatacttcgcaacacctctataagattggcttttggtcactgacacccccactgacactccaatggatctggcaatgtaaagttaatatgaagattaaggtctttggatggcttctgctcttggatcggatcatggcagctcctgcaccatccagttttaacttgcggtctattcttgagaaagagaagttgactggaacaaacttcatagattggtatcgcaacctgagaattgttctcaggcaagagcacaaagagtttgtgcttacacagccttttcgagctgacttgcccaacaatgctcctgctgctcaacatagggagcatgaaaagcgatgcaatgattatcttgatataagctgtctcatgcttgctactatgtcccttgagcttcaaaggcaatatgaggcattggatgttcatacgataattacgggactatgtaacatgcttgaggaccaagcaagagctgagaggcttgcagaaggtaatccagtgagcccacatgtgatcaaactgattggttacaccgagagtctggataagcttggttttccccttagccgagagttggctactgatttgattctccagtcgctccctcccagctttgagctgttcacaatgaatttcaacatgaacaacctgaacaggaccttggcagaattgcatgggatgctaaagactgccgaggaaagcattaagaaaaactccaaccatgtgatggttatgcataagcgcaagcccaactacaagaagagtgtagtcaaggcgttgggctttgtcaaaaacgaagaagagtcttgtgtatacaagaagattagtgggagcgcactggtgtttctaatcctatatgtagatgacatattattgattgggaatgatattcctatgcttgaatccgtcaagacatcgttgaaaaatggtttttcaatgatggagttaggggaagcagcatatattctaggcataaggatctatagagatagatcaaacaggctaattggattaagccagagtacatacattgacaaggtgttgaagaggttcaacatgcaagattctaagaatggtttcttaccgatgtcacatggcattaatcttggcaagaatcagcgtcctcaaacgactgatgagcaaaacaagatgagtgtgattccatatgcctcggcaatcggatccattatgtatgctatgctatatacacgtccagatgtttcatatgcacttagtgcaacaagccgataccaatcagatccaggtgagagtcactggatagctgtaaagaatatcctgaagtacttgagaagaactaaggatatgttcgtagtctatggaggacaggaagagctcgttgtaaatggttacactgacgcaagcttccaaaccgataaagatgattttagatcgcagactggatttgtgttctgcctgaatggaggcgctgtgagttggaagagttccaagcaagatacagtggctgattctacaacagaagctgaatacattgccgcttctgaagtagcaaaggaggctgtttggataaagaaatttgtttctcaactaggtgtgatgactagtgcttctagccctatggatctctattgcgataatagtggtgccattgcacaagccaaggggcctagatcgcatcaaaagtccaaacacattttacggcggtatcacctcatttacgagatagtgtgtagaggagatgtgaagatatgcaaaatacatatggatttgaatgttgcagatccgttgacaaagccactccctcagcctaagcatgaggcacatagtagggcaatgggtataagatacgttcatgattga

SEQ ID NO: 33503 - DNA, 1159 bp, Oryza sativa
  Clone ID: PAT_MRT4530_37608C.1
atggaggcgcggcggatctcggcgagcccgcggccgtgcagcgggaggagggtggtggcgaggaagaggccgaggcacgaggcggcggtgaacagcgtgcggaagctgcagcggcgggagatcagctcctgccgcgaccgggccttctccatgagcgccgcgcaggagcgcttccgcaacatacagctccaggaggagtttgacacccatgatcctaaggaaaacagcttgctactaccttacttgaggaaaaggtcaaaaattattgagatagttgcagcacgcgacatagtttttgctttatcacagtccggagtgtgcgctgcttttagtagagagacaaataggagaatatgctttctgaatggaagtccagatgaagttatccgcagtttattctacaacaagaataatgagtcactcattacagtatcagtgtatggttctgaaaatttcagtgccttgcgatgcaggacaactcggatagagtatatacgccgagcaaaaccagatgctggtttccctctttttgagagtgagtccttgaaatggcctggattcgtggaatttgatgatgtcaatgggaaggttttaacttattctgctcaagacagtacttacaaggtgtttgacttgaaaaactacactctgctgtattctatatcagataagaatgttcaagaaataaagataagtcctggtataatgctattgatttacacaagaacaagcagctctgttcctctgaagattctttccattgaggatggtaccgttttgaagtccttcaaccacctcctccatcggaataagaaggttgatttcattgaacagttcaatgaaaagctcctggtcaagcaggaaggagagaatcttcaaatacttgatgtacggaacttccaattaacagaagtgagcaggaccgagttcatgactccatcggcctttatctttctctatgagttgcaactgttcctgactttccggaatcgatctgtagcagtttggaatttccgaggtgaactagttacatcatttgaggaccacctgttgtggcacccagactgcaataccaataacatatacataacaagtgaccaagatctaattatttcttactgcaaagctgattccaacgattcatcttcagaagaaaatg

SEQ ID NO: 33504 - DNA, 3567 bp, Oryza sativa
  unsure (1)..(3567): unsure at all n locations
  Clone ID: PAT_MRT4530_37609C.1
atgccaaaggtgattgaggagtcaatcacaagttactatcaacagatcatggcagctcctgcaccatccaattttaacttgcggtctattcttgagaaagagaagttcactggaacaaacttcatggattggtatcgcaacctgagaattgttctcaggcaagagcacaaagagtttgtgcttacagagtcttttccagctaacttgcccaacaatgctcctgctgctcaacgtagggagcatgaaaagcgatgcaatgattatcttgatataagccgtctcattcttgctactatgtcccctgagcttcaaaggcaatatgaggcattggatgctcatacgataatcacgggactacgtaacatgtttgagggccaagcaagagctgagaggtttaatatctcaaagtccttgtttgcgtgcaggctagtagaaggtaatccagtgagcccacatgtgatcaaaatgattggttacaccgagagtctggataagcttggctttccccttagccgagagttggctactgatttgattctccaatcgctccctcctagctttgagccgttcataatgaatttcaacatgaacaacctgaatagggccttggtagaattgcctgggatgctaaagactgccgaggaaagcattaagaaaaactccaaccatgtgatggttatgcataagcgcaagcccaacaacaagaaaagtggtcaaaagagaaagctaaactctgatgagatcacgagtactagcaattctaagaccaaggttcaaaagacagggcccgctaaggatgcagagtgcttcttttgcaaggagacaggtcattggaagagaaactgtaagaaatacgtagagcagctcaagcagaagcagcaagatggaaagaattccacctcagagggttatggttttagatctgtggacaatggttgtccagtctattataatgacattttctacttccatgcacccatgatgaatggcttatacattgtgaatcttgatggatattcagtctatgacattaatgcaaaaaggcaacgtcctaatgatttgaatcccacttttatttggcattgttgcttgggtcatataaatgagaaacgcatggagaagcttcatagagatggacttctacactcttttgattttgaatcatttgagacatgcgaatcttgtttacttggcaaaatgacaaaggcacctttcacgggtcaaagtgaaagggcaagtgaactattgggactaatacatactgatgtatgtggaccaatgagctcaactgacagaggtggttttgggtactttattacctttatcgatgactttagtagatatggttatgtctacttaatgaggcataagtctgagtcttttgaaaagttcaaggaatttcagaatgaggtacaaaatcatttgggcaagacaatcaagtatctacgatctgatcgtggtggagagtacttgagcctagaatttggcaatcatctaaaggaatgtggaattgttccacaactcactccgccaggaatgcctcagtggaatggggtgtctgaacggaggaatcgtacattgttggacatggtgcgatcaatgatgagccaaactgatctgccgctaagcttttggggttacgctctagagacagctgcattcacactaagcagggttccatcaaaatcagtggataagacaccatatgagatatggactgggaagcgtcccagtttgtctttcctaaagatttggggctgtgaggtctatgtaaaacgtttgcaatcggacaaactcacacctaaatcagataaatgcttctttgtggggtatcctaaggaaacgaaaggatattatttttataatcaggaagagggcaaagtgtttgtcgcccgacacggtgttttcttggaaaaagagtttatttcaagaaaggatagtgggagcatgttgtggaagcaccggcttcatgaaggtccgataggatacggcgtacacctgcgagacaatgatgaacctactacctttgaggaagcaatggtgggaccagactctgagaaatggtttggagccatgaaatccgaaatagaatccatgcatgtcaatcaagtttggaacttggttgatccacctgatggtgtaaaagccattgagtgcaaatgggtctttaagaaaaagacagatgtagatggaaatgttcacatctacaaggcacggttggtggcgaaaggtttcatctacaaggcacggttggtggcgaaaggtttcagacaaattcaaggtgttgattatgatgaaactttctcgccagtcgccatgctaaaatctattcggattgttttagcgattgctgcctatttcgattatgagatatggcaaatggatgtcaaaacagctttccttaatggaaatcccgatgaggatgtgtacatgacacaacccaagggttttgttgatccacaatcagctaaaaagatatgcaaattgcagaaatccatttatgggttgaagcaagcatctcggagttggaatattcgttttgacgaagtactcaaggcgttgggctttgtcaaaaacgaagaagagccttgtgtatacaagaagattagtgggagcgcactggtatttctaatcctatatgtagatgacatattattgattgggaacgatattcctatgcttgaatccgttaagacatcattgaaaaacagtttttcaatgaaggacttaggggaagcagcatatattctgggcataaggatctatagagatagatcaaagaggctaattggattaagccagagtacatacattgacaaggtgttgaagaggttcaacatgcaagattctaagaaaggtttcttaccgatgtcacatggcattaatcttggcaagaatcagtgtcctcaaacgactgatgagcgaaacaagatgagtgtgattccatatgcctcggcaatcggatccatcatgtatgctatgctatgtacacgtccagatgtttcatatgcacttagtgcaacaagccaataccaattagatccaggtgagagtcactggatagttgtaaagaatatcctgaagtacttgagaagaactaaggatatgttcctagtctatggaggactggaagagctcgttgtaaatggttacactgacgcacgcttccaaaccgacaaagatgattttagatcgcagtctggatttatgttctgcctgaatggaggcgctgtgagttggaagagttccaaacaagatacagtggctgattctacaacagaagccgaatacattgccgcttctgaagcagcaaaggaggctgtttggataaagaaattcgtttctcaactaggtgtgatgactagtgcctctagccctatggacctctattgcgataatagtggtgccattgcgcaagccaaggagcctagatcgcatcaaaagtccaaacatattttacggcggtatcacctcattcgcgagatggtgggtagaggagatgtgaagatatgcaaaatacatacagatttgaatgttgcanatccgttgacaaagccactcccttag

SEQ ID NO: 33505 - DNA, 342 bp, Oryza sativa
  unsure (1)..(342): unsure at all n locations
  Clone ID: PAT_MRT4530_3760C.1
ccatttgctcgcggcagattgagtgtgcccgtgtgagatagaatctttttgcccttcaaaaagagcaaagtggcagtgcttttccctccggttcctcgttttggtagtattccattgttcctattaccacttcccaacgaactaaccgaagccccggatacaacaaaagagaagacgcaaaggaatcatcagaagcagcagcagcacgngaccatgggcgangcgcctccaaccaacctgttcttgcggcgagcgatcttggccaatcgaacttggacgcnggcgncgcgcgtgagaagtcggcggcgncgggttcatcgcctcgacgtcagggccttttct

SEQ ID NO: 33506 - DNA, 1327 bp, Oryza sativa
  Clone ID: PAT_MRT4530_37610C.1
cgccttcctctacccacgtcaccaccgccgaaaccctagaccctcgtcgcatccgtcctcggcggctagatcggcgcacgcattcatctccggcccggctgacgcttcttccttggctcgattcgcgacccaggtgggccgattaggatcagcagcggcccggccctcttcttagcccaattccaacagacccccactcgccgccagcctcgtgggacgacagcggcggagctcatctcactccggatactctaacgagctttcttggtgaatacaatcttgctactagtcatggcgaagcaggcctacgcgacgagcagcctcgtgataggatatgcactctgctcgagcttgctcgcgatcatcaacaagtatgccatcaccaagttcagctaccctggcctcctcactgccctgcagtacttgacatcagtggctggtgtctggaccctcggaaagctcggactcctctaccatgatcccttcaacctccagaccgcaaagaagtttgcgccggctgcacttgtgttctaccttgccatcttcaccaacacccatctcctgaagcatgccaatgtggataccttcatagtgttcagatcgttgaccccgcttttggtcgccatcgctgatactgccttcaggattcaggaagcagccatgtccttccaagctcacatttgtgtcccttgtcactattttgggaggcgctgttggttacgtgatgacagattcggggttcagcctcacagcctactcatgggcagtcgcttatctggtgactataacaactgagatggtgtacatcaagcacatggttacaaagttgggcctgaatacatggggtttcgtgctctacaacaatcttctcgtgctgataattgctcctgtattttggtttttgactggagagcacttgtcagtcttcagagccattgaatcaaggggccagagttggtttgaacttgatgcctttgtggcagtttccttgtcctgtgtgtttgggctgctcattagcttctttggtttcgcagcaaggaaagcaatctccgccacggcttttacagtaacaggtgttgtcaacaagtttctcacagttgcaatcaatgttatgatctgggataagcatgcgagttcatttggtctggtttgcttgctcttcactctggctggcggggtactctatcagcaatcagttacattaaaagggaattcttcagtgcagcgtgaggctgtagctaagcaagggaaggctgataatgatacagctgagttagatgaggagaagcaaagcttggtatcatctccaaaggactctaatgtctga

SEQ ID NO: 33507 - DNA, 2039 bp, Oryza sativa
  Clone ID: PAT_MRT4530_37611C.1
atggcgtacggcacgacgagctcggcgaaccggcggagctcccttaaagcatccatggagaaccaagaaattgcagagattgtagcagttgttgcgtgcgagcagggtgtgtttcgatcgatgcgtattgcgtcgtacgagcaagctgaagctggtgacgttggcgagcgaggcgccggcagagctggaccgagttccgccggaggaagctggtccggcgagacgcagcagcctcttcgcctccaccgccgccgccgtggctccgtcctctccgtctccgccgcgtcggacggcgagcagtggcttcctcccacgtccacggtttgcctcctccatgtcgatcttgggttgatgtttgcggcccaatcccaatggattagcccgacttggattgaaaacccagcccacattcggttaagcctggaatgggttgaatccaggcctaccacggcctttcaccctcaccccggcccaggaaaaagaataacatctacgctgttgcggcgactgcggagacggcggcgacggaacgctctctcctccggctgtccgtccccctccctcgtggggtcgcgcctccctccagaggcacggcccgacgacagaagcgggatggcgtatgcgaaggaccaagcaagagctgagaggtttaatacctcaaagtctttgtttgcgtgcaggcttggagaaggtaatccagtgagcccacatgtgatcaaaatgattggttacaccgagagtctggataagcttggttttccccttagccgagagttggctactgatttaattctccagtcgctccctcccagctttgagctgttcataatgaatttcaacatgaacaacctgaacaggaccttggcagaattgcatgggatgctaaagactgccgaggaaagcattaagaaaaactccaaccatgtgatggttatgcataagcgcaagcccaacaacaagaagagtggtcaaaagagaaagctaaactttgatgagatcacgagtactagcaactctaagaccaaggttcaaaagacagggcgcgctaaggatgcagagtgcttcttttgcaaggagacaggtcattggaagagaaactgtaagaaatatctagagcagctcaagcagaagcagcaggatggaaagagttccaccttaggtattaatgttatagaaattaatcttgctacatcctctactgattcttgggtatttgataccagaggtggttttgggtattttattacctttaccgatgactttagtagatatggttatgtctacttaatgaggcataagtctgagtcctttgaaaagttcaaggaatttcagagtgaggtacaaaatcatttgggcaagacaatcaagtatatacgatctgatcgtggtggagagtacttgagccttgaatttggcaatcatataaaggagtgtggaattgttccacaactcactccgccaggaacgcctcagtggaatggggtgtctgaacggaggaatcgtacattgttggacatggtgcgatcaatgatgagccaaactgatctaccgttaagcttttggggttacgctctagagacagctgcattcacactaaacagagttccatcaaaatcagtggataagtcaccatatgagatatggatagggaagtgtcccagtttgtctttcctaaagatttggggttgtgaggtgtatgtaaaacgtttgcaatcggacaaactcacacctaaatcagataaatgcttctttgtggggtatcctaaggaaacgaaaggatattatttttataatcgggaagagggcaaagtgtttgtcgcccgacacggtgttttcttggaaaaagagtttatttcaagaaaggatagtgggagcatggtgcgacttgaagaaattcaggaaacaccggaaaacgcttcaacatgcacacaaccacaacaagctgagcaagatgttgttcaagaacaagttgttgttgaaccagttgtggaagcaccagcttcacgaaggtttgaaaggatacggcgtacacctgcgag

SEQ ID NO: 33508 - DNA, 855 bp, Oryza sativa
  Clone ID: PAT_MRT4530_37612C.1
atgccttgtttgggtttttgggtcgagaagtgcaagttccgccaagggcttgagatcggcccaattaagcagagcacgccaaatccggtggcgagcaacgccggtggaggcctccgccgtggtccaggctctcgcgagccccacacgacggaggcgcggagcagcagccgcccgctgcttgcgtgcggagcgggagacgacggcgagatacgtgtccgctttgtttcttctgtaacgtgccgcgcgccgccgaccccgcgccaccgcccgcgcgcagccgccgccgccaccccgcgcctccgcccgcgcgcctgccgcccgtggccctcgccgccgcgccacccgtccgccgctgccgacgccaacgacgccgccgccgggctaccgaggaagacggaggaggagagagaactggaggagatgtgccgcctcccacacccgctctcctcgtcgtcattcgccgccaccgtcgttgccgttgtccgcatcgctgctttcggccgctaccggctcccgagcccaccgccgctcctagccgcgtcgccacaccggggatggggccgacaccgtcagtgccgtcagatccaccgtgggagggaggcgagaggggtcggacggagccgccgccgccagatccgtcctcggccgccaccaccgcggccggatccacccgcggtcgccgtcgccggacccatcgcacgagaggcgagagagaggatgaggggaaggacggtcagaggaagagagagggggagcggcgccgctggtgggtggagggggagcgacgccgctagggagggggagaggcggcgcgctgagagagagggagggaggtgggtcgcactccgccggggc

SEQ ID NO: 33509 - DNA, 2922 bp, Oryza sativa
  Clone ID: PAT_MRT4530_37613C.1
atggtggagcagctcttcgtgtgggccaaaatgggtgggcggatgggttcctcggcatccgcaaattacagcccgatggctcatcgaggctgccatggaaggaagcgatgccgcggcagcggggcagatttggcgaggatagatgtcggacatctatatgcggagattattagtttacttgacaagatcatggcagctcctgcaccatccaattttaacttgcggtctattcttgagaaagagaagttgactggaataaacttcatggattggtatcgcaacctgagaattgttctcaggcaagagcacaaagagtttgtgcttacacaaccttttctagctgacttgcccaacaatgctcgtgctgctcaacgtagggagcatgaaatgcgatgcaatgaatactttgatataagctgtctcatgcttgctactatgtcccctgagcttcaaaggcaatatgaggcattggatgctcatacgataatcacgggactatgtaacatgtttgaggaccaagcaagagctgagaggcttgcagaaggtaatccagtgagcccacatatgatcaaaatgattggttataccgagagtctggataagcttggctttccccttagccaagagttggctactgatttgattctccagtcgctccctcccagctttgagccgttcataatgaatttcaacatgaacaacctgaataagaccttggcagaattgcatgggatgctaaagactgcgaaggaaagcattaagaaaaactccaaccatgtgatggttatgcataagagcaagcccaacaacaagaagagtggtcaaaagagaaagctaaactctgatgagatcacgagtactagcaactctaagaccaagacaatcaagtatctacgatctgatcgtggtggagagtacttgagccttgaatttggcaatcatctaaaggagtgtggaattgttccacaactcactccaccaggaacgcctcagtggaatggggtgtctgaacggaggaatcgtacattgttagacatagtgcgatcaatgatgagccaaactgatctgccgctaagcttttgggcttacgctctagagaaagctgcgttcacactaaacaaggttccatcaaaatcagtgaataagacaccatatgagatatggacagggaagcgtcccagtttgtctttcctaaagatttggggctgtgaggaaacactggaaaacgcttcaacgtccacacaaccacaagctgagcaagatgttgttcaacaggttgaacaagttgttgttgaaccagttgtggaagcaccagcttcacgaaggtccgaaaggatacggtgtacacctgcgaggtatgcgttattaactacaggacaacgtgatatattgttgttagaaaacgatgaaccaactacctatgaggaagcaatggtgggacttggagccatgaaatccgaaatagaatccatgcatgtcaatcaagtttggaacttggttgatccacctgatggtgtaaaagccattgagtggaaatgggtctttaagaaaaagacagatgtagatggaaatgttcacatctacaaggcacgattggtggcgaaaggtttcagacaaattcaaggtgttgattatgatgaaactttctcgctagtcgccatgctaaaatctattcagattgttttagcgataactgcctatttcgattatgagatatggcaaatggatgtcaaaacagctttcgtcaatggaaatatcgatgaggatgtgtacatgacacaactcaagggatttgttgatccacaatcagctaaaaagatatgcaaattgcaaaaatccatttatgggttaaagcaagcatctcggagttggaatattcgttttgacgaagtagtcaaggcgtgggctttgtcaaaaacgaagaaaagccttgtcctatatgtagatgacatattattgattgggaatgatattcctatgcttgaatccgttaagacatcgttgaaaaatagtttttcaatgaaggacttaggggaagcagcatatattctgggcataaggatctatagagatagatcaaagaggctaattggattaagccagagtacatatattgacaaggtgttgaagaggttcaatatgcaagattctaagaaaggtttcttaccgatgtcacatggcattaatcttggcaagaatcagtgtcctcaaacgactgatgagcgaaacaagatgagtgtgattccatatgcctcggcaatcggatccattatgtatgctatgctatgtacacatccagatgtttcatatgcacttagtgcaacaagccgataccaatcagatccaggtgagagtcactggatagctgtaaagaatatcctgaagtacttgagaagaactaaggatatgttcctagtctatggaggacaggaagagctcgttgtaaaaggttacactgacgcaagcttccaaaccgacaaagatgattttagatcgcagtctggatttgtgttctgcctgaatggaggcgctgtgagttggaagagttccaagcaagatacagtggttgattctataacagaagccgaatacattgccgcttctgaagcagcaaaggaggctgtttggataaagaaattcgtttttcaactaggtgtgatgactagtgcttctagccctatggacctttattgcgataatagtggtgctattgcgcaagccaaggagcctagatcgcatcaaaagtccaaacacattttacggcggtatcacctcattcgcgagatagtgggtagaggagatgtgaagatatgcaaaatacatacggatttgaatgttgcagatccgttgacaaagccactccctcagcctaagcatgaggcacacactagggcaatgggcgtaagatacattcatgattga

SEQ ID NO: 33510 - DNA, 1830 bp, Oryza sativa
  Clone ID: PAT_MRT4530_37614C.1
atgacaaaggcacctttcacgggtcaaagtgaaagggcaagtgaactattggcactagtacatactgatgtatgtggaccaatgagctcaactgccagaggtggttttgggtacttttttacctttaccgatgactttagtagatatggttatgtctacttaatgaggcataagtctgagtcctttgaaaagttcaaggaatttcataatgaggtacaaaatcatttgggaaagacaatcaagtatctacgatctgatcgtggtggagagtacttgagccttgaatttggcaatcatctaaaggagtgtggaattgttccacaactcactccgccaggaacgcctcaatggaatggggtgtccgaatggaggaatcgtacattgttggacatgttgtggaagcaccggtttcgcgaagatccgaagaaaaagacagatgtagatggcaatgttcacatctacaaggcacgattggtggcgaaaggtttcagacaaattcaaggtgttgactatgatgaaactttctcaccagtcgccatgctaaaatttatttggattgttttagcgattgctgcctatttcgattatgagatatggcaaatgtatgtcaaaactgctttccttaatggaaatctggatgaggatgtatacatgacacaacctaagggatttgacgatccacaatcagctaaaaagatatgcaagttgcatcaatccatttatgggttgaagcaagcatctcggagttggaatattcgttttgacgaagttgtcaaggcgttgggctttgtcagaaacgaagaagaaccttgtgtatacaagaagattagtgggagcgcactagtgtttctaatcttatatgtagatgacatattgttgattgggaatgatatttctatgcttgaatccgttaagacatcgttgaaaaatagtttttcaatgaaggacttaggggaagcagcatatattctgggcataaggatctatagagatagatcaaagaggctaattggattaagccagagtacatacattgacaaggtgttgaagaggttcaacatgcaagattctaagaaaggtttcttaccgatgtcacatggcattaatcttggcaagaatcagtgtcctcaaacgactgatgagcgaaataagatgagtgtgattccatatgcttcggcaattggatccatcatgtatgctatgctatgtacacgtccagatgtttcatatgcacttagtgcaacaagccgataccaatcagatccaggtgagagtcactggatagctgtaaagaatatcctgaagtacttgagaagaactaaggatatgttccttgcctatggaggacaggaagagctcgttgtaaatggttacactgacgcaagcttccaaatcgacaaagatgattttagatcgcagtctggatttgtgttctgcctgaatggaggcgctgtgagttggaagagttccaagcaagatatagtcgttgattctaccacagaagccgaatacattgccgcttctgaggctgtttggataaagaaatttgtttctcaactgggtgtgatgacgagtgcttctagctctatggacctctattgcgataatagtggtgccattgcgcaagccaaggagcctaggtcgcatcaaaagtccaaacacattttacggcagtatcacctcattcgcgagatagtgggtagaggagatgtgaagatatgcaaaatacatacggatttgaatgttgcagatccgttgacaaagccactccctcagcctaagcatgaggcacacactagggcaatgggtataagatacattcatgattga

SEQ ID NO: 33511 - DNA, 3968 bp, Oryza sativa
  Clone ID: PAT_MRT4530_37615C.1
atcatggcagctcctgtaccatccaattttaacttgcggtctattcttgagaaagagaagttgaatggaacaaactttatggattggtatcgcaacctaagaattgttctcaggcaagagcacaaatagtttgtgcttgcacagccttttccagctgacttgcccaacaatgctcctgctgctcagcgtagggagcatgaaaagcgatgcaatgattattttgatataagctgtctcatgcttgctactatatcccctgagcttcgaaggcaatatgagacattggatgctcatacgataatcacgggactacataacatgtttgaggaccaagcaagagctgagaggtttaatacctcaaattccatgtttgtgtgcaggcttgcagaaggtaatccagtgagcccacatgtgatcaaaaatgattggttacaccgagagtctggaaaaacttggttttccccttagccgagagttggctactggtttgattctccagtcgcttcctcctagctttgagccattcatcttgaatttcaacatggacaacctgaataggaccttggccgaattgcatgggatgctaaagactgcagatgaaagcattaagaaaaactcaaccatgtgatggttatgcataagcgcaaacccaataacaagaagagtggtcaaaagagaaagctaaactctgatgagatcacgagtactagcaactctaaggtcaaggttcaaaagatagggcccgctgaggatgcagagtgtttcttttgcaaggaaacaggtcattggaagagaaattgtaagaaataccttgagcagctagcagatctcgcattccaaggtttatcaacacctatcaacaactactctcggcgcctcgctaccctctttcctgaggtttttacttatcatccggcggaatttggcacctgacgcggggctgcatcggtttagttcgatctccggcgaaggggtaagtcctacgttccgccggccctggtgaatctattggctacgttggtgttgttcaagccttcaaggctgcatcgcttcgatctcttggatcgctctggtttggttggtatatttgcctacctgatatctcaattctatctctaattgcattgtgtttagagacgcatcggtttagttggaactatctcggttaggtccgatcttctgtcttagctgatatatctctacaatcacaatgttgttcttaatagcttatacattgtgaatcttgatggatgttcagtctataacattaatgcgaaaagacaacgtcctaatgatttgaatcccacttttatttggcattgtcacttgagtcatataaaagagaaacgcatggagaagcttcataaagatgaagatggatttctatactcttttgattttgaatcatttgagacatgtgaatcgtgtttacttgacaaaacgacaaaggcacctttcacggatcaaagtgaaagggcaagtgaactattggcactagtacatactgatgtatgtggaccaatgagtcaactaccagaggtggttttgggtactttattacctttaccgattactttagtagatatggttatgtctacttaatgaggcataagtctgagtcctttgaaaagttcaaggaatttcataatgaggtacaaaatcatttggtcaagacaatcaagtatctacgatctgatcgtggtggagagtacttgagccttgaatttggcaatcatctaaaggagtgtggaattgttccacaactcactccgctaggaacgcctcaatggaatgggttgtctgaacggaggaatcgtatgttgttggacatggtgcgatcaatgatgagccaaactgatctcccgctaagcttttggggttacgctttagagacagctgcgttcacactaaacaggattccatcaaaatcagtggataagacaccatattagatatggacagggaagcgtcctagtttgtctttcctaaagatttggggctgtgaggcctatgtaaaacgtttgcaatcggacaaactcacacctaaatcagataaatgcctctttgtggggtatcctaaggaaacgaaaggatattatttttataatcgggaagaaggcaaagtgtttgtcgcccgacacggtgttttcttggaaaaagagtttatttcaagaaaggatagtgggagcatggtgcgacttgaagaaattcaggaaacaccggaaaacgcttcaacgtccacacaaccacaacaaggtgagcaagatgttggtcaacaggttgaacaagtggttgttcaaccagctgtggaagcaccggcttcacgaagatccgaaaggaaacggcgtacacctgcaacgtatgcgttgttaactacaagacaacgtgatatattgttgttagacaacgatgaacctactacctatgaggaagcaatggtgggaccagactctgagaaatggcttggagccatgaaatccgaaatagaatccatgcatgtcaatcaagtttgcaaattggttgatccacctgatggtgtaaaagccattgagtgtaaatgggtctttaagaaaaagacagatgtagatagaaatgttcacatctataaggcacgattggtggtgaaaggtttcagacaaattcaaggtgttgattatgatgaaactttctcgccagtcaccatgctaaaatctgttcggattgttttagcgattgatgcctatttcgattatgagatatggcaaatggatgtcaaaacagctttcctcaatggaaatctctatgaggatgtgtacatgacacaacccaagggatttgttgatccacaatcagctaaaaagatatgcgagttgcagaaatccatttatgggttgaagcaagtatctcggagctggaatattcgttttgacgaagtagtcaaggcattgggctttgtcaaaaacgaagaagagccttgtgtatacaagaagattagtgggagcgcactggtgtttctaatattatatgtagatgacatattgctgattgggaatgatattcctatgcttgaatccgtcaagacatcgttgaaaaatagtttttcaatgaaggacttaggggaagcagcatatattctgggcataaggatctatagagatacatcaaagaggctaattggattaagccagagtacgtacattgacaaggtgttgaagaggttcaacatgcaagattctaagaaaggtttcttaccgatgtcacatggcattaatcttggcaagaatcagtgtcctcaaacaagatgagtgtgattccatacgcttcggcaattggatccatcatatatgccatgttatgtacacgtccagatgtttcatatgcacttagtgcaacaagccgataccaatcagctctaggtgagagtcactggatagctataaagaatatcctgaagtacttgagaagaactaaggatatgttcctagtctatggaggacaggaagagctcgttgtaaatggttacactgatgcaagcttccaaaccgaccaaagatgattttagatcgtaatctggatttgtgttatgcctgaatggtggcgttgtgagttggaagagttccaagcaagatacagtcgctgattctacaacataagccgaatacattgcctcttctgaagtagcaaaggaggctgtttggataaagaaatttgtttctcaattgggtgtgatgactagtgcttccagccctatggacctctattgcgataatagtggtgccattgcgcaagccaaggagcctagatcgcatcaaaagtccaaacacattttacggcggtatcacctcatacgcgagatagtgggtagaggatttgtgaagatatgcaaaatacatacagatttgaatgttgcagatccgttgacaaagccactccctcagcctaagcatgaggcacacaatagggcaatgggtataagatacgtgcatgat

SEQ ID NO: 33512 - DNA, 287 bp, Oryza sativa
  unsure (1)..(287): unsure at all n locations
  Clone ID: PAT_MRT4530_37616C.1
ctcctctcctcactccgccttatccccaaaaccctatcgatcccatcccctttcctcctcacccatggcggccacgatnttatccaccgcnctatccccgcanctnctncncctccgctccacctcctccaacctcgtctcatcctncntctccttcctctccaagccgatgctcnncgacctcgccgtcgagggatngccgaggaggaggancagncccttcntgnnggtggccgtgnncgtgtcggaggaggtcgagacggaggaggacgaggaggaggaggagg

SEQ ID NO: 33513 - DNA, 725 bp, Oryza sativa
  Clone ID: PAT_MRT4530_37617C.1
gggctggggctgcgcataacgcggacgtgggcgcacaacgggcgggtcgtggggacactgcgccgggcgcacatcggaaaccagaactcccccccaaaaaaagaaaagacaattctccccccgccggcggattttttgggcccggagcgcggtccctcccggtcggggccgggggcggcaaaacaagggcccccgcccccggcctgccgcagggaacacccccggcccccccgggacacaggacgggaaagggagggcgccacgggcggcggcgccgggaatgcgccggcgcgggcgcgcgtctcctgtcgctcggcgtgcaggcggcggtgatggccgccgcgctcgcgctgttcctccttttcgccgcggcggccgccatcctgctgctccacctcgtcgtcgcggcccgggcgttccggaaccagcgccacggcggggccgggaggagccggtaccgcgtcccggagacctcgtacacgccctcccgcgccggcctctcccccgcggacctccgcttccttccctgcttcgccgcgtccgcctccgcctccgcctcgccggagctatgcgctgtttgccttgaggccgcgtgcgcgggcgagcggtggcgcgcgctgcccgcctgcggccacgcgttccacgccgcctgcgtcgaccggtggctcgccagggcggccgcctgccccgtctgccgcgcctccgtctccgcctccgcgagctga

SEQ ID NO: 33514 - DNA, 277 bp, Oryza sativa
  Clone ID: PAT_MRT4530_37618C.1
atgaatacctactttacattatgttcttgttatactgaatatacagctagcttatctcggagatgctttggtgagggtataatgtttgcttatgcaattagtctatgtcatgatgatgatattagagtagtatctggtagtttaggcgtggtgtctagattatgggatatcattatttagggttatatgctgcggatgagagatgggcagctgatggtgacagctcagtatgggtattcttccgcgcctgtatataatcctaagttagtttcctggt

SEQ ID NO: 33515 - DNA, 702 bp, Oryza sativa
  Clone ID: PAT_MRT4530_37619C.1
cccccgggctgcacctgaaccagctgagagctagccaagaattcgatcgggcgagatgagcgtggagattttggatgggaggacggtggagagcttcgtggaggacgagggggccttcaactcgacggtggacgaccggttcgcggcgctggacggcgaccgggacggcaggctgtcctacgccgacatggccggtgagctgatgagcctccgcgtgctggagacccacttcggcgtcgacggcgccgccgccacggacgccgagctcgtcgacctgtaccgcggcctgttcgcccggttcgaccgcgacggcgacggcgccgtcgaccgtgaggagttccgcgccgagatgaaggaggtgatgctcgccgtcgccagcggcctcggcttcctccccgttcagatggtcgtcgaggaaggcagcttcctcaagagggccgtcgagagggagctcgccaaagctgcctgatcatcgccatcgccatcgccaggcgtcagagattctgcctacagatttgcaggtgtatcgagagatttttgtagtatttacagagtgtatactaatcaagtgcgtactgtcctcttgctgaaatggcatttcagcctttcagctatgtaatccgggatggaaaattttgtttgatctgaattatttggtgtcagcaataaaatcaacgtttcgatgaaaaaaaaaaaaaaaaa

SEQ ID NO: 33516 - DNA, 1536 bp, Oryza sativa
  Clone ID: PAT_MRT4530_3761C.1
atggagctatgttccaatattcctgggattggaaagatgaagtatttacagtggctggaagagtaccatgttaagaaagaggacattggatttgaactgagtgagttggggaatttgacagagcttggaggagagctaaagatatttaaccttgaaaatgtggcaacaagagaagaagcaaatgatgctaaattgatatcgaaaaggaatctgaaagcattgacactagtttggagtgcaaagcaactctccataggatctggcgttcttgatggtctgcaaccacatcctaatcttagagcacttgacatacgaaaccatggtggttccactggacctacttggttgtgtggtgatgtttgtgtcaaaggcttgaaatctctccatctagaaggcttatcttggggaactttcccacctttcgggcaactaatgcatctggaggaacttactttgatcaatattgctggcatacgtaagtttggacctgattttggtggtgttacccaaaagagttttttacacttgaagaaaattaaatttgttggcatgccagaacttgtggagtgggttgggggagctcattggcatttgttttcaaagcttgcaagcatcagatgtgaagattgtcccaatttctcggtgctactgttgccattctctaagtgctctgtcatttgcacacaagacataaacacagtatggttcccaaacctgtgttctcttgagattcgaaattgctccaagttgtcattgccacccatgcctcacaataccatgctaacacgtgttactgtgaaagaagataatcaagcaaagctgcattttgaagaagagacactgagaatagatggttatgggggtgctttggctttccataacctggacaaagtaaaagatatgacaattgaaaacatgttccacatttcattgactgatctccaaaagctgaattcattaacaagccttgatgtcacaggatgcaaaagcatgttatccagtgaagtagacaatggttttatcttttgttcagttcagcaactcaatctcagagattgtcatcttaccgaaaaatcattgggtggctccttccaacagctggtacgacttgatgtggacagtatctcagcagtgtttgttgaaaccatttgtagcctcctcgctgcgaccctcatcgagttgagattcacgtctgacttgattacagaaagcttcacagaaaagcaggagcagaaaggtgagagcaagatgtctcaggggcagaggcacattgacccagtatggtccactgggcacaatgcttgcagcaaccggatggcgagcaaggttacagagacggcgccgggggccctctccaatgggctgtggcttgcctgggccgaatgcgctcaaacaaatcagcccatgtgtgtgtttggggtggcccaggggccagccagactcttgggcttctcctctctctactccaccacgcattgcaagcagagaggcgcgaggtctcttcttcctccacgcatgacgcctccggatgagtag

SEQ ID NO: 33517 - DNA, 1514 bp, Oryza sativa
  Clone ID: PAT_MRT4530_37620C.1
cctttcccgccacctccccattccgacgaccgttcacttcttcccgcgcttcctggtcggcttgtcgtccttggccctcttggaacggggcggcgtctgcggcgcggccgcccgcttcggtggccgaccgatcctcctccctggtggcgtcgaggcgcggcgcccttcttggagcctgagccgccggcctccttccggccgtcgcccttcccggatgacgacgactacgactgtctcttgctgttccgtcgccgccgcggagagcttcagcgtctccagcaacgacaccctctccgtcgacggcgagccgttctggttcatccggttcaggaaatccacggcgtttcgcttcttggcaacctcgcccgccgccgcccctgccgaagagctgccgcctccgccgccgcccttcttgtcggacttcttggtcccctcgccggtctccgagagcttcgccgtcttctgattcctcgcgggtccccggctcttgttcgtcctcatgccccgagccttcttgtccttggcagtggccgccgccgtcgccgtcgtcgctgccgccgcagccttcttcttctcctcgctgccgtccttctccttcttgtccgtctctgccttctccgccttctcccccttggcagccgccgccgcggccttcgcgatggagctccgcttccggcagacgatgatcggcgccttctcgagcagcggcccagcgatgtcggcgtcggccttggccggcttcttcttctcctcctcctccgccgccgccgcgggggccttcgccccggccgccgacgcgtagcacgccgccgccgccgccgccgccgttgcacccaccagcctcgacctgaccgtctccaggtccacatggcgcctgatcccagcccgggcccaccgccacggaaccaaacaacgccgcgcctctcccaacgccactcgtttttcaccctcagtttttattattatctccgcatcctccaccgacggcgacgccgcctccgcctcttcgccgccgcctccgcccttccgtcgccggcggcgggacgggctggcggagctctgcacgtcgctgctctccttctcgacgtccgcctccttcgacccagccaccgactcgcccgacgcctcctccttcacggcgatgtcgccggccgcgggcgccgccgccgcctcctcctcctcctccgcctcccggtcgtcgtcgtcggcgaccgcggggtcgttctccggccgcttcagatctgacgagttcgactccttgcatgaccggccggattcgtggccggagaccctgtcctccacggcgccggcctcctccggtgatcccttccgtacatcctcctcctcctccttcaccgccgccgccgccggcggcggcttcgtctcgccggagatgctcttttccctctcctccttgagccgtttcacttttgattgcaacgacctaaccatttaaaaataaaaaaaatcgcaataagcagtttattccaaaaaaattgtggccgaccgatcag

SEQ ID NO: 33518 - DNA, 724 bp, Oryza sativa
  unsure (1)..(724): unsure at all n locations
  Clone ID: PAT_MRT4530_37621C.1
gggcggtccggcggcggtccagcgccgccgcacgggtggggaggtcgcgagccgtgagccagcgaggacgcacggtgggcaggcagcggcgcagcacttcagtggccggcaacgacgcagcgtgtatcagcaacccggtgattggaattgaaattgaaatcggtttttgggttccaccagctggtctttcttaggatgtgtgaaccaagtggcagtgatgatgcaatggtgcatgccagtgagatggttgatggtgatgagatgatccacggcaatgagatggtagttcatgacagtgtgatgatcgatggtaacgagatggttcaagagaacgtcatggtccatgggagtggtgagatggttcaaggaagtgagatggtccataataatgaaatcattcaagttaatgacatgatacaagccaacgagatggtcaatggtgataagatggcccatggtcatgagctggctcggtgttgagttgaccacgccaaccgcatcaagacgccggagaaaaaagtcagctgtctgggagcacttcacgattgaagaaatgcctggggggagttttacgagcatcctgcaatctatgcaagcaaaccttcggatacagttgcggctcagatatntcaggtactagccatcttaagaggcatataaccctggctttatgtcccatgctgaaaaatgaggatatgaaactatcattgcctttatcgacagt

SEQ ID NO: 33519 - DNA, 1855 bp, Oryza sativa
  Clone ID: PAT_MRT4530_37622C.1
cggcggcggcggcggcggcgcgtgccgcattgggggcggccctggccgagaagacaacggcggaggggtggcgcacaggggcggcaccggcggaggagcgacacagaggagtggcgccggcggaaagatgcgccggcgtgctggatctgggggagcggaggagaggatcagtgggagtaggaggtgaactacaaggcgttctcgttcgcggcggcggggaagagcggcggcggggtcggcgcgctgctgtccgggatgcggctcaccacgaggagcgtgctcccgctgtggggaagggcgagcctgcggttcaactgggggctgcgcgcgccgccggagctgcaggcggcggcggcggcgaggggttctcgctggtgaggcggcagctggaggcgctgaacgcggagagcgggatgctgcgccgcgccgtggaggacctgcgcgccgaggtcgggagccgcagggcggcggtggcggcggcggcgcggcggggtcccgggggcggggagatctgggggacgtcggaggacctgctcctggcgtgcgccgtgagccgccatgggacggcgagctgggacgcggtggcgaaggcgccgccggcggcggcggcggtgaaggaggaggaggaggatgtacggaagggatcaccggaggaggccggcgccgtggaggacagggtggaggcggaggaggaggaggaggcggcggcggcgcccgcggccggcgacatcgccgtgaaggaggaggcgtcgggcgagtcggtggctgggtcgaaggaggcggacgtcgagaaggagggaagggcggaggcggcggcgaagaggcggaggcggcgtcgccgtcggtgacacaggggcaggagcaggcggcaggtggacctggagacggtcaggtcgaggctggtgggtgcaacggcggcggcggcggcggcggcgtgctacgcgtcggcgccccagttcatctccggcggagccggacccggccagtggcaagacatggccgcagccgagaacgccacgaagccttcgtcggatgagcttggcgacgagttgaagagggcattggaggcgcggctgaggtgagagccggggcgaaggcccccgcggcggcggcggaggaggaggagaagaagaagccggccaaggccgacgccgacatcgctgggccgctgctcgagaaggcgccgatcatcgtctgccggaagcggagctccatcgcgaaggccgcggcggcggctgccaagggggagaaggcggagaaggcagagacggacaagaaggagaaggacggcagcgaggagaagaagaaggctgcggcggcagcgacgacggcgacggcggcggccactgccaaggacaagaaggctcggggcatgaggacgaacaagagccggggacccgcgaggaatcagaagacggcgaagctctcggagaccggcgaggggaccaagaagtccgacaagaagggcggcggcggaggcggcagctcttcggcaggggcggcggcgggcggggttgccaagaagcgaaacgccgtggatttcctgaaccggatgaaccagaacggctcgccgtcgacggagagggtgtcgttgctggagacgctgaagctctccgcggcggcgacggagcagcagaagaagtcgtcgtcgtcgtcatccgggaagggcgacggccggaaggaggccggcggctcaggctccaagaagggcgccgccgcctcgacgccaccagggaggaggatcggtcggccaccgaagcggggtcgtcggaatggggaggtggcgggaaaggctgcgggtgtaaatgtttgtaggggttggcggtagaaacattgcaacaatacaagatatgga

SEQ ID NO: 33520 - DNA, 1817 bp, Oryza sativa
  Clone ID: PAT_MRT4530_37623C.1
atgcagtcgaggtgcccttccgccgccgtgttcacccccaccacctgccgcctccggttccgcgtcctccaccgccggttctccggcggcgtcaccgccgagaacgaggacgccgacggcggcgaggaggaggaagaggccgacgccgccgccgtcgccggctgggtggaggaactccgcgagctgcgcgtcgccgagctccgccgcgaggtcgagaaatacgatctctcgatcgggtcgttgcaatcaaaagtgaaacggctcaaggaggagagggaaaagagcatctccggcgagacgaagccgccgccggcggcggcggcggtgaaggaggaggaggaggatgtacggaagggatcaccggaggaggccggcgccgtggaggacagggtctccggccacgaatccggccggtcatgcaaggagtcgaactcgtcagatctgaagcggccggagaacgaccccgcggtcgccgacgacgacgaccgggaggcggaggaggaggaggaggcggcggcggcgcccgcggccggcgacatcgccgtgaaggaggaggcgtcgggcgagtcggtggctgggtcgaaggaggcggacgtcgagaaggagagcagcgacgtgcagagctccgccagcccgtcccgccgccggcgacggaagggcggaggcggcggcgaagaggcggaggcggcgtcgccgtcggtgtccgtgcccctccccgccgccgaggccgagccgctcgtcgccttcctcgagtcggtccggaccagcaaggccggcgccgtgttcgagcggcggctcgatagccaggatggggagaggtacagtggcacgatcaggcgccatgtggacctggagacggtcaggtcgaggctggtgggtgcaacggcggcggcggcggcggcggcgtgctacgcgtcggcgtccgagttctaccgcgacatgatgctgctctgcgccaacgcgctcgtcttcttcccgcgcggctcgccggagcacgccgccgcgctccagctgcgcgcgctcgtctccaagcaggtctccaaggaccggcagcctcacgccggggcgaaggcccccgcggcggcggcggaggaggaggagaagaagaagccggccaaggccgacgccgacatcgctgggccgctgctcgagaaggcgccgatcatcgtctgccggaagcggagctccatcgcgaaggccgcggcggcggctgccaagggggagaaggcggagaaggcagagacggacaagaaggagaaggacggcagcgaggagaagaagaaggctgcggcggcagcgacgacggcgacggcggcggccactgccaaggacaagaaggctcggggcatgaggacgaacaagagccggggacccgcgaggaatcagaagacggcgaagctctcggagaccggcgaggggaccaagaagtccgacaagaagggcggcggcggaggcggcagctcttcggcaggggcggcggcgggcggggttgccaagaagcgaaacgccgtggatttcctgaaccggatgaaccagaacggctcgccgtcgacggagagggtgtcgttgctggagacgctgaagctctccgcggcggcgacggagcagcaggagacagtcgtcgtcgtcgtcatccgggaagggcgacggccggaaggaggccggcggctcaggctccaagaagggcgccgccgcctcgacgccaccagggaggaggatcggtcggccaccgaagcgggcggccgcgccgccgacgccgccgccgttccaagagggccaaggacgacaagccgaccaggaagcgcgggaagaagtga

SEQ ID NO: 33521 - DNA, 1146 bp, Oryza sativa
  Clone ID: PAT_MRT4530_37624C.1
tcatcccgcatgaaggcgtcgatcaagttccgcgacgacgaccggccgctgctgcgtgccagggtgccgatcagggtgctcgggctgccgctccactccggcctctccgccggcggcgacccgcgcgagctccgcctcgacctctccaccgccttctccttcggcccggcgatccgcctctcgtaccgccccaatgaccccgccctccccttctccgtctccgtccgcgccggcgtcgggcccctcggctcccccgcccgcgcgcccttctccctcgccgccgagttcaacctcctctccggcaaccccggatcccccgccttcttcctcctcctcaagccgcgcctcggcgacttctcgctctcccacaccctccgctcctcgccgcatcccggtaataaggtcggggaggtctccgatggcgatggccatgggcgcgaggtgaactacaaggcgttctcgttcgcggcggcggggaagagcggcggcggggtcggcgcgctgctgtccgggatgcggctcaccacgaggagcgtgctcccgctgtggggaagggcgagcctgcggttcaactgggggctgcgcgcgccgccggagctgcaggcggcgctcgccgccgacgacgccatggtcggtgccagccgcagccgcaagggcggcgcgcgggttccggtcagcaagatgcccctgctggtcattgacaagatctccatcgaacagtcacctcgcgccgccgacaaaacgcgcggcaacgcggattcctcgccaccagcgccggcgattgctgccgccgccgacgccgatgcagcggacggcacgggacgcggcggcgaggggttctcgctggtgaggcggcagctggaggcgctgaacgcggagagcgggatgctgcgccgcgccgtggaggacctgcgcgccgaggtcgggagccgcagggcggcggtgtccaccgccggcgcacccgacacctggaggacgccgccggcgccgccacaaccagcacagccataccactactcatctccggtgaagccggatcgccggggcagtggcaaggacatggccgcagccgagaacgccacgaagccttcgtcggatgagcttggcgacgagttgaagagggcattggaggcgcggctgaggtga

SEQ ID NO: 33522 - DNA, 192 bp, Oryza sativa
  Clone ID: PAT_MRT4530_37625C.1
atggggaagaagagaatacgagaggagaggataaggagtttgctagtgcctgccaggctgccaggctgccagcgtcaagaattatgggacaaatggttaggagcagaaccgatgaaggttacagccaagcctgccagggatacaggcgacgagtgcgacgatggacgaggctggtcgccgcggcggacgtag

SEQ ID NO: 33523 - DNA, 1949 bp, Oryza sativa
  Clone ID: PAT_MRT4530_37626C.1
ttctccgtcgccgtcgccgtcgactcctcgtcgccggcgtccccaaaccaagcaaaatgccatctccgtctctcctcctccaccaccaccaccaccgcctctcccctcgcttcgccccctcccgctccccctccccccgaaccctatcgctgcatcctgctcctcgcctccgcctccgcctccggcttcgcgccagcgcccgcggcggcgggggcagcacacgggaccacgatgacggcgcgcggtccatcccgatagcgcggtgctacgaggcagccctcgcgcgcctcgacctctcgggaaccgcgcggcgggagcaggcggtcgcggcggcggcggcggccgatggaggcgcggctgccgaggctcacctcgccgctgtcgccgacgccatggtcatggaggccttcctccctggacccgacggcgcccggcgcagcgccatgtccacacggctgattttgcaagcaaatgaagttacagagaaggccagtaagctaaagaaagaccttggcactgaatttttctctgaaaacgaacctgatgcagagagtgttttggcaatggcctttaagcaagttgtaatggatcagctcacaaactttcggcttgaagtgttctccccaggttcagagatagatctccaagatttgagcaaaccccgaaaggtgcctgcggattttagtatcagatcatcagatgaaaaacttctagctgctcttgcggaagccattttctcctgtgtcattgaggatgccagaaataattacctagggggcactggtggtttgtttcataagtggaagtcaaactgctcattggattcctctgtttgcatagacataatttctgagtcagaagtagtgaacagtgctaggaggcgcttagatagttttgatcttgtacagtcttctcatgtagcgggtaaagcaaagaatggatggtggccagctccaaagtctgaaaggttagtgaagattggtggccctgattttatgctttgggccagtgagtttgtgtacacatataaactacaaattgatgccaaagcattcaagaatacaaagcttgggggtcatcatgtgttagcaaataataagggggaagttctcttatcccacgcccaaatggtggagttagcaaatattctggacatgtattttgaagatcagttcacattacctggaaaaaccttctattccaactggaattcagaaccatcaaagattaaaaagaacaatggttatttgaacaacctttttgctttgttggctggtagctctattgtttttcttgtcggcgccattgctcagttatgctggcctcagtctcttaaagataaaagattggccactgttagttcatgtgtctcatcatcacagagctattgttctgatatccactctctagatagtagtgagttgcaggcttactgtgtatctgttgttgagaaaattaaagactcatttggttgtactggtgatctaatggttgatgcaaatattggtgcttgggttggagaactgcctgaattcttcaagggcatcaactgtgacagtcatgatgattatgtcgatattcagagtactggtgctattagccaaggagagcaaccctcattggtgtcaagtcctattaagatgtcttctcatctggaacaaaatgatgacactcaagaaactctgcagaatattgctagttttcaggtggtcatgtcagaaagaggtaaagtagttggatttcagccaacaaaccgcctagctgtgaatcattgggcaacaaatccattaacgaagctcctgtacgaggggcgaaagatctctccagcctttctggagcctaggcttagaatttctcgcccagctaaggttgtcccagttgagttgctgatgtcggtgaatccagaatccttttttgctttggtgaggcctgttcaagatccatgctaa

SEQ ID NO: 33524 - DNA, 204 bp, Oryza sativa
  Clone ID: PAT_MRT4530_37627C.1
attgttttttgtagttctgaacatggaaacacaaagggggggcatttctgacggcccataacttttacagatacttcgtgatcccacactaactggatgagcaccgactaacattgctagccgtgatcctgcgagtacacactggacaggtacgcgtaaagttcctcaggtgaaagccagtgacactgatggtggatccactac

SEQ ID NO: 33525 - DNA, 174 bp, Oryza sativa
  Clone ID: PAT_MRT4530_37628C.1
cagcttgtctgttctgctaaattctttgagcgcatttattacatccttgtcaaccttttcctccttcgcaacacggacctcacaatttcttcaaacaaaatcaacaaaatctttgcaatcaagcttatagatgatagatgtggacacgtaccatgtgatgtccggccatgcacg

SEQ ID NO: 33526 - DNA, 1449 bp, Oryza sativa
  Clone ID: PAT_MRT4530_37629C.1
atggcggccgcgcacgtgctcgtcttcccgtggccggtgcagggccacatcaactgcatgctccacttcgccaccggcctcctccgagcaggcctccacgtcaccttcctccacagcgaccacaccctccccgccgccggcgacgacgacgacgacgcgctggccgccgcctcgccgcggctccgttacgcgtccatccccgacggcctccccgacggccacccacgccacgcgggcgcagccgtgcggctcatggagtccgtgcagacacagtccagcgcgtaccgctccctgctcgcggagctggctcgtggtgatggcgatggcggcggcttccctccggtgacctgcgtcgtcgccgatggcctcttgccgttcgcggttgatgtcgccgaggagctcggcgtcccggcgctcagcttccgcacggcgagcgcgtgcagcttcctcgcctacctgtccgtgcccaggctgttcgagctcggcgagctccccttcccggccggtggcgacctcgacgagccggtgcgcggcgtcccgggcatggagagcttcctgcgccggcgggatcttccaggccagtgccgcaactgcaccgagcttcagaacgacccgctgctggagatggtgatcgatttcacggcgcgcagccggcacgcgcgggcgctcgtgctgaacacggcggcgtccatggagcgcgccgcgctcgaccacatcgcgcgcaacatgcgcgacgtcttcgccgtcggaccgctccacgtcatgtccccggcgccggccgccgccttggccagccagtggagggaggacgacggctgcatggcgtggctggacggccaggcggaccggtccgtcgtgtacgtcagcctggggagcctcaccgtcatctcgccggagcagttcacggagttcctgtccgggctcgtcgccgccggccacccgttcctctgggtgctccggccggacatggtcacggcgaggctgcagcacgccgacctccaagaagccgtcgtggcggcggcggcgggagacagcaaggcgcgcgtcgtgcggtgggcgccgcagcgggacgtgctgcggcaccgcgccgtggggtgcttcctgacgcacgccggctggaactcgacgctggaggctgccgtcgagggcgtgccgacggtgtgctggccgttcttcgtcgaccagcagatcaacagcaggctcgtcggcgccgtgtggaggacggggctggacatgaaggacgtgtgcgacgccgccgtcttggcgaggatggtgagggaggcgatggagtccggcgagatcagggcgtcggcacaagctctgtcgcagcagttgggacgggacgtcgccgacggcggctcgtcggcgacggagttcaagaggctcatcgcgttcatcgagcagctgagcacgacggcccagaacggcggctgcagcgatggaggatga

SEQ ID NO: 33527 - DNA, 347 bp, Oryza sativa
  Clone ID: PAT_MRT4530_3762C.1
aacataatattagcaaaagatgcaataataagtgtaactaaggcactatagtagctgggctgtatcaattcaacagcaacattcacaactagggttgagagagatcatttacatactcaccctgtcataacctacttttgactatcctaaacgctgctatcaattttatcactcgatgaatcctctggcccattttacggccctgcactatcaatcagctgcttgcaacattcattacggcatcacttcatgaagctgccttaacattgtcaaccacaatacctagcctttcagacgcggggggcgacctatctattgctgacccttacctgcaaaccttccagctt

SEQ ID NO: 33528 - DNA, 660 bp, Oryza sativa
  Clone ID: PAT_MRT4530_37630C.1
atggatctacacgatgccagttcagtagcggcggcattagcagcggacttcgagagaagaagaacttccagcggtgaactacggccgctccggcgacgcaaggaggctcggagaaggggagggatcaatgagccaaacggtggaagcccaaacgagacgcaggcgtcggccgccgctcgtcccgctccgcttcgccagcctactatggccgccgccgctccgcatcaccactccgcgccctctgccgcccacgtgtcgaaaaggggaagggagagaggagtggagtggtcgctgtcgctcctcccgccccgcttcgctggcctacactgcccactgcctcggaggtggagtgcggtggtggcgcgtgaggtcgtcgagggcgccgcctcgctgaggtcgctgcccgcatgctcgcttgcgggggcctcaaataaacttattcctaaatttgacgtgaatgaggcccacaactacacgggactccagcatcgcgcccagcaagagcagcccagcccaactacgccggctaaagggcgcacctcgccatcgagaggatctgaggccgtacgtctggatcttcgatctgcccttgtcgacaccaacatgatcgatctccacctgttctcctcgatctctagtcaccaccctccccttggatag

SEQ ID NO: 33529 - DNA, 204 bp, Oryza sativa
  Clone ID: PAT_MRT4530_37631C.1
atggggaatgacatggggatggaaaggacgtgttcaggggacgccagctacatacgagtgcaccatgacggcgatgacctctacgacctctccttcctcgatggtggtgcggtcagcgtcgtcttaattctcaacggcagcacggagtggcgctggacggcgatggctaaacctgtggcgacggcgcagcagcgattggggtga

SEQ ID NO: 33530 - DNA, 595 bp, Oryza sativa
  unsure (1)..(595): unsure at all n locations
  Clone ID: PAT_MRT4530_37632C.1
gaggcttccccttccacagctcccttctccttggctctcctcctcctctgtcgccgagtgcgccgccgcctcgctctctcgccgccgccgcgtcctaccggcctcccaccgcgccgactgcgccgcctccacggagatcacccgcctccctctcacacctcctcctgctcctgcgccgttggtacccgcccgtccgtgtcctcctcctctctcggataaagtttctttctttggcttcataaccactagatgggagaggcaaagcgtgcatcgatttttatcaggcttgtttcagcagctggaactggatttttctatgtcaagcgcaagaacccccggaggatcacagagaagcttgaatttaggaagtatgatccacgtgtaaacaagcatgttctgtttacagaagcaaagatgaaatgagatatggtaggcttatttatcccttctccacaattcgcgaagctgaataactagcanatttctggtgtcagaaacctctgtactgttaagaatgctactattaccctgttttagattccagcgtttcatgtagacgattctnatgagtatgactttgatcttgattagcagg

SEQ ID NO: 33531 - DNA, 778 bp, Oryza sativa
  Clone ID: PAT_MRT4530_37633C.1
cttaaagagagagttatcggagattccccgttgaagattcttaattaatgtcacgcccagaaattcccgaatagaattccaagcagaatgtgcataaaaacccccatccaggaccggccggggtacacaaacaacaaagttaacatacagatccatgtcggatagaggccgtgacaggacacttcacataaccccctctaaccaagcacaccacacctcaggtttcacccccactcctcgcaaggcagcgggcagtcccctctcgtgcctaggtgaatccggaagcgacaaaggctgtcgcaaggcctgccccgctccatgacgcccacccttacaataggacatttgcaatataggatcaacatgttcaagtgacaagcatgacttgccttgctctgctgctggaggaacctcagcgactgtttcaaagtacaccggagcgtcgggagagccggaatctaagcgacatacaaagcaaacaatacaaacatgccataagactacttaattgatttattgtgaaataattaaaaccctggagagagagggggcggcgctgacatgcgggccctacacgacagtgactcgaggtggcggtccgtggtggaccgggtccacggaccgggaagaaggcggcgcaccacgtggcgccgacacggcagccacgccgacggcaaacggtggcgaccgacggcgagtggcggtgcacggcgaccgacggcggcgcgaccccgagcggcaaggggcggcggcgctaggagggaaggggaaggatgat

SEQ ID NO: 33532 - DNA, 926 bp, Oryza sativa
  Clone ID: PAT_MRT4530_37634C.1
ttttttttttttttttttttttgaagagggaactaagatggaacatgtattgcatcaaagggaacttatatggaacatgtattgcatcaagcaaatagtatgattttgctactagctttcttgtcttacatcgagaaagcatttcacaccaaaggtaattaaaccaaaagtacagcaagcaccttactcgcaagcactttgaacttatcatcgacgacaacgtatacatacggatcgttggattgactgactgtctgtgtgtgtgtgtgtgtgttcatcgcatcactacgggctggcttcgattgccttcgcctcgacagcgggtgcgacgacggcggggacgggtgcggccggcggcgatggcgggctgcttgtcagtgaccaccttgggcacggtgacggtgagcatgccgccgtccatggacgccctgacgaggtcgacgacggccgtcgtcgggggaggtggaacctgccgaagaaggtggcgcagctgcgctcgatgtggtgcgaccgctggcccttctcctcccgccggacgctgcgctcgccggtgatcaccagcacgttcccctcgtccacctccacccgcacctcctccttcttcacccccgccggcaggtccgcccggaacacgtacgcctccgccgtctcccggctctcgatgtacgtgttggcgaacgccgacgtgtcgctcgccagccacgcgtccgccgccaccgtcgtcccaaagatgctgaacgggttccaggcgtcgaacgccaacgtatcaaacagcttcaccagagacatcttcttcacactctgatcgatatcactaattcacttctactacttcttcctcaccaaaatcaaaatgaactctccttatatatagattaagcttcagtttagaagctttgatgcttggggcgcgaacgcgtgggcgc

SEQ ID NO: 33533 - DNA, 2247 bp, Oryza sativa
  Clone ID: PAT_MRT4530_37635C.1
atgcttcttccgttgatggccgtgctgatcgcctcggcatggccggcggcagcatcgacgacgacggctgctgcacagccagccgccgcgtgccagcgccggtgcggcgacgtggacatcccctacccgttcggcatcggccgcggctgctacctctacaccggcgagggcgacgtcaccttcgggctcacctgcaaccgcaccgccgacggcagctaccgccccttctgctgggagtacgaggtcctggacgtctccctccgccgcgggcaggcgcgcgtccgcaacgacatcaaccggtggtgctacaacgccacgacccggtcgatggacgcggagagcacgtggtggtgggacgtctccgactcgtggttccatgtctccgacgagggcaaccgcctcgtcgtcgtcgggtgcaactcgctcgcgtacgtgacgtcggtgaacgagacggagtacatgaccgggtgcatggccacctgccccagcgtggggcggctggagaacgggtcgtgctccggcatgggctgctgcgaggcggccatcccgagggggatcaactcctacgtcgtggggttcgaggagaagttcaacaccacctccggcgccgtcggccggtgcagctacgccgtggtggtcgaggccgcctccttcgagttcaggacgacgtacgtcaccaccggcgacttcgtggagtccaccggcggcaaggtgcccctggtgctcgactgggtggtcggcaagaagacgtgccgggaggcgaggcggaacgccacgggctacatgtgcgtcagccgcgacagcgagtgcgtcgattcgaggaacggcccgggctacctctgcaactgctccgccggctttgaaggaaacccttacctcctcgacggatgccaagacattaacgagtgtgaggacagcagattcaagtacccgtgctctgttcctggtacctgcattaacactccaggtggattcagatgttcttgtcctgataaaacaacgggcaacgcttattttggcacatgcgaggccaagaaatctcagctcggagttcacatcgcaattggtgttagcattggcatagctctactagtaatcatcatgtcttctgcttacatgatccagcaaaagaggaggcttgccactgtaaaaaggaggtactttaaccagcatggtggtctgttgctattcgaagaaatgaagtcaaatcagggactatccttcacagtgtttaccaaggacgagctagaagaagcaacaaacaaatttgatgagcgaaatgtgctcgggaagggaggcaatggcactgtctacaggggtactctgaaagacggtagagtggttgcgatcaagaggtgcaagctaatcaacgagaggcagaagaaggagttcggcaaggaaatgctcattctgtcccagatcaaccacaggaacatcgtcaagctccatggatgctgcctagaggtggaggtccccatgcttgtctacgagttcatcccgaatggcaccttgtaccaacttatccatggcgggcgacacgggtcgcgcatttccttcgcggcgcgtctgaagatcgcgcacgaggcagccgaagcgcttgcttacctgcactcgtgggcttcacccccaatcatccatggagacgtgaaatcgcccaacatgctcatcgacgagaactacacagtgaaggtttcagactttggtgcttccacgctggctccgacagatgaagctcagttcgtcacacttgttcaggggacctgcggttacctcgatccagagtacatgcagacatgcaaactgacggataagagtgatgtgtacagcttcggcgtcgttctactagagctgctcacgtgtcgaaaggcactgaaccttcaggccctcgaggaggagaagaatctctcgtcacatttccttctagctctaagtgagaacaggctcgaggggatactggactcacagatacaaagcgaacagagcattgaactgattgaacaaatggcagatctagcgaagcagtgcctggatatgtccagtgagaagagaccctcgatgcgtcaggttgcagaggagcttgacaggctaaggaagctagcagagcatccttggggacggcatgaaagtgaggagctggagaaattgcttgttagaggatcgccaagcacgttctctgaaatagaacttagcaatgggtatgtcagcttgactgactcagcgtatttaggaatccaatctccacggtga

SEQ ID NO: 33534 - DNA, 1494 bp, Oryza sativa
  Clone ID: PAT_MRT4530_37636C.1
atggagatccaatatgagcttaattcgcatagggatccgaatagaagtcctatgggccttggaggcccgagtgatggatcctatatattcgtgaggggtgtgaccagcggaggcattgcatcactagaggcaccgctggtttacggtgctgatcggcgtgggagtacggcgagaagaacgcacgaggaggagaaggtcgagccgatcatggcagctcctgcaccatccagttttaacttgcggtctattcttgagaaagagaagttgactggaacaaacttcatggattgggagcatgaaaagcgatgcaatgattatcttgatataagctgtctcatgcttgctactatgactcctgagcttcaaaggcaatatgaggcattggatgctcatacgataatcacgggattacgtaacatgtttgaggagcatgcaagagctgagaggcttgcagaaggtaatccagtgagcccacatgagatcaaaatgattggttacaccgagagtctggataagcttggctttccccttagccgagagttggctactgatttgattctccagtcgctccctcctagctttgagccgttcataatgaatttcaacatgaacaacctgaacagaaccttggctgaagtgcatgggatgctaaagactgccgaggaaagcattaagaaaaactccaaccatgtgatggttatgcataagcgcaaacccaacaacaagaagagtggtcaaaagagaaagctaaactctgatgagatcacgagtactggcaactctaagaccaaggttcaaaagacagggcccgctaaggatacagagtgcttcttttgcaaggagacaggtcactggaagaggaactgtaggaaatacctagagcacctcaagcagatgcagcaggatggaaagagttccaccttaggtattaatgttatagaaattaatcttgctacttcctctactgattcttgggtatttgatagcagtttttcaatgaaggacttaggggaagcagtatatattctgggcataaggatctatagagatagatcaaataggctaattggattaagccagagtacatacattgacaaggtgttgaagaggctcaacatgcaagattctaagaaaggtgagagttactggatagctgtaaagaatatcctgaagtacttgagaagaactaaggatatgttcatattctatggaggacaggaagagctcgttgtaaatggttacaccgacgcaagcttccaaacagacaaagatgattttagatcgcagtctggatttgtgttctggctaaatggaggtgctaaaattgagcgctcgccggtgatatcacaactacgcaaccgtggcacagagcaggcaaagtcatggatcggaggcacggtggatgctcctctcaccctccgccacaactccaacggtgcgcgcggcgtgatggcaatgccggcgaaagaggggatggcgacggcggcgaaatag

SEQ ID NO: 33535 - DNA, 1664 bp, Oryza sativa
  Clone ID: PAT_MRT4530_37637C.1
atggagcggtaccatccctccgaggtgtatgagctcttcgtgcggcacatgaacaccccgagggtggtggtggacagcggggtgtgcgcgacggcgacgctggtgcaggtgcacagcgcgcggaagcacgggatgctgctggaggcggtggcggcgctgtcggagcacggggtgtgcgtccgcaaggggtacatctcgtccgacgacgggcggtggttcatggacgtgttccacgtcacggacgccgcggggaggaaggtggccgacgcggacgcgctactggcgcgcctcgagtcgtcgctgtccgcggaagcattgccgcgggcggcggcgggcggccccgccgcggaggggctcaccctgctcgagctcgtcggcgccgaccgcccgggcctcctttcggaggtgttcgccgtgctgcacgacctccggtgtaacaccgtcgaggccagggcgtggacgcacggcggccgcgtcgcagcgctggtgttcgtccgcgacgaggagacgggcgcgccgatcgacgacgcggcccgggtcaggcgcatcgagtcccgcctcaggcacgtcctccgcggcggcgcgcgctgcgcgaggacggtcctggctgatccgtcggcggccggaaacctggaccggaggctccaccagctgctgaaagaggacggggaggccgacagccgcggcgccgcgccgatgacggcggtggcggtgcaggattggggggagagagggtactcggtggtgaccgtgagctgccgcgacaggccgaagctgctcttcgacgtggtctgcaccttgacggacttggattacgtggtgtaccacggcacgttcgacaccgacggcgatcacgcgcagcaggagttctacatacggcgttcggacgggcggccaatcagctcggaggccgagaggcagcatgtgatccgatgcttgcaagcggcaatcgagaggcgcgcatccgagggcgtgcggctcgagctccgcatctccgaccgccgcgggctgctcgcctacgtgacgcgcgtgttccgggagaacggcctctcggtgacgcacgccgagatcacgacaagggacgacatggccatgaacgtcttccacgtcaccgacgtggccggccgccccgccgatcccaagacgatcgacgaggtgatacagaggatcggcacggagagcctccgggtggacgaggagcggtggccgcgcctttgctcggcggaaggcgacgccgccggccgcggcggcggcggcgggctgttctcgctggggagcctcgtcaagaagaacctcttcagccttggcctcataagatcctgctcgtgagtacagatgacgtgtccgatccgatggcatgcttgtgtaaatatgggggcggtccatgggttagtttgtaaattgagtagatttttttatgctcttgttttaggatttaattaggttgttcaccgtggtatataagtagaaatgagaaaaggctggcttggtccggtaattaaacagcttggaggtttaaagggacgcgttggtgggtcatgcatcttttacatggaaatagacagatagaagatgaatgtaaatagggtttgtatataagtgctacttaatgatgtttaactaaaaggaactatcatgtttgacctgccaaaaaaaaaaaaaaa

SEQ ID NO: 33536 - DNA, 1359 bp, Oryza sativa
  Clone ID: PAT_MRT4530_37638C.1
atggcgaggagaacgtacgaggaggagaaggtcgagccgatcatggcagctcttgcaccatccagttttaacttgcggtctattcttgagaaagagaagttgactggaacaaacttcatggactggtatcgcaacctgagaattgttctcaagcaagagcacaaagagtttgtgcttacagagccttttccagctaacttgcccaacaatgctcctgctgctcaacgtagggagcatgaaaagcgatgcaatgattatcttgatataagctgtctcatgcttgctactatgtcccctgagcttcaaaggcttgcagaaggtaatccagtgagcccacatgtgatcaaaatgattggttacaccgagagtctggataagcttggctttccccttagccgagagctagctactgatttgattctccagtcgctccctcccagctttgagccgttcataatgaatttcaacatgaacaatctgaacaggaccttggcagaattgcatcggatgctaaagactgctgaggaaagcattaagaaaaactccaaccatgtgatggttatgcataagcgcaagcccaacaacaagaagagtggacacatcggtgacgtcaccgacagcggcggcggctcggcggagcgaacggctcgggcggcgcacgctcgccggcgaacggcggcactaggacgcaaacggagggcaccaacgggtagcggacggcacggcgaactcaccggcgaccaaagcgacggcggaagaccaacggacggcgacgacgacgaagaagaagcggcggcgctcttcggcttgacgacggcgacgacgctccggcgatcttcggcgacggcgaaggggcggacgaggacggcgacgacttggcgaccacgacggcggtcttcccgagcgacggcgacgaccgagacggcggcggcgcacggctggagcgacggcggcgacggcggcgctaggttgcacggcgctagagctcttccggcgacgagaggcgaaggcgagagtggcggcggtgagcctgcacccggattcagcgagcccgccgccgccaagctcgccacgccgtcggcgagcttgtccgcgccgtcgtggggggaggaggatgacggtgtcgagccatccgccgccaccgctgctcaacgttgctaccagatccaccaccactgctactcaacgccaccgccagatccgccgccgctccctgccgccaccagagctcgagcaccgccgatggggaactcgcggcggagagggaaggggagaagccgtctcgcggcagagaggggaggggagaagccgtctcgcaccggagaggggaggggagaagctggcgagctccgccgttga

SEQ ID NO: 33537 - DNA, 3891 bp, Oryza sativa
  Clone ID: PAT_MRT4530_37639C.1
atggagagcaggagcgcgagagagcatggccatggccaccttcatcagcagcatcagcggccatggagctgcagcttcggcttctcatggccgccgctgcagaggtcgccgccgccgtcgtcgtcgtcgtcgtcgtacacctgcggctactgcaggagggagttcaggtcggcgcaggcgctgggaggccacatgaacgtgcacaggagggagagggccaggctcaggcaattccccaaccctagacctcatccccttcccaacctcaacctctcgccgccgccgccaccgccgccgccgccgccgccgccgcagcagcagcagcagtgctactgccccggcgatcgtccggccatcgtctacagcttcttctccacggcggcggcggcgatggcggcgacgaagggtttggaggtggatttggagcttggagtcggtggtgaccctctcgacggctgcgcgcatgacgctgacgagctgtggcatgaagcattcagccagggcgcccgggccgcagccaacgtgcagctccgtggcggtccaatcccgtcgggctcccaggcccaggactcacgcacttgcatggccggtcgatctcgcctccagcggcgccggcgccgacctccgtggcagtggcgagctcagctcccgtcgccgctccagcccgtgctccccgcggccgcgtgggagtacggcgaggagaacgtacgaggaggagaaggtcgagccgatgcgatcgactacgttctctacatcgacgcgcgctacttcccgagagttccttcgacttctcagcgtcttcttccgctgcgcggcgcgtcgagtgctcctacaccatccaattttaacttgcggtctattcttgagaaagagaagttgactggaacaaacttcatggattggtatcgcaacctgagaattgttctcaggcaagagcacaaagagtttgtgcttacacagccttttccagttgacttgcccaacaatgctattgctgctcaatgtagggagcatgaaaggcgatgcaatgaataccatgatataagttgtctcatgcttgctactatgtcccctaagattcaaaggcaatatgaggcattggatgctcatacgataatcacgggactacgtaacatgtttgaggaccaagcaagagctgagaggtttaatacctcaaagtccttgtttgcgtgcaggcttgcagaagaattgcatgggatgctaaagactgccgaggaaagcattaagaaaaactccaaccatgtgatggttatgcataagcgcaagcccaacaacaagaagagtggtcaaaagagaaagctaaactctgatgagatcatgagtactagcaactctaagaccaaggttcaaaagacaggacccgctaagaatgcagagtgcttcttctgcaaggagacaggtcattggaagagaaactgtaagaaatacctagagcagctcaagcagaagcaacaggatggaaagagttccacctcaggtcatataaatgagaaacgcatggagaagcttcaaagagatggacttctacacttatttgattttgaatcatttgagacatgcgaatcttgtttacttggcaaaatgacaaaggcacctttcacgggtcaaagtgaaagggcaagtgaacaattggcactagtacatactgatgtatgtggaccaatgagctcaattgccagaggtggttttgggtactttattacctttaccgatgactttagtagatatggttatgtctatttaatgagacataagtctgagtcctttgaaaagttcaaggaatttcagaatgaggtacaaaatcatttgggcaagacaatcaagtatctacgatctgatcgtggtggagagttcttgagccttgaatttggtaatcatctaaaggagtgtggaattgttccgcaactcactccgctaggaacgcctcagtggaatggggtgtctgaacggaggaatcgtacattgttggacatggtgcgatcaatgatgagccaaactaatctgccgctaagcttttggggttacgctctaaagacagctgcgttcacactaaacagggttccatcaaaatcagtggataagacaccatatgagatatggacaaggaagcgtcccagtttgtctttcctaaagatttggggctgtgaggtctatgtaaaacgtttgcaatccgacaaactcacaactaaattagataaatgcttctttgtgaggtatcctaaggaaacaaaaggatattatttttataatcgggaagagagcaaagtgtttgtcgctcgacacggtgttttcttggaaaaagagtttatttcaagaaaggataatgggagcatgttgtggaagcaccggcttcacgaaggtccaaaaggatacggcgtacacctgcgagacaacgatgaacgtactacctataaggaagcaatgctgggaccagactctgagaaatggcttggagccataaaatccgaaatagaatccatgcatgtgaatcaagtttggaacttggttgatccacctaatggtgtaaaagccattgagtgcaaatgggtctttaagaaaaagacagacgtagatggaaatgttcacatctacaaggcacgattggtgacgaaaggtttcagacaaattcaaggtgttgattatgatgaaactttctcgctagtcgtcatgctaaaatctattcggattgttttagcgatttctgcctatttcgattatgagatatggaaaatggatgtcaaaacagctttcctcaatggaaatcacgatgaggatgtgtacatgatacaacccaagggattcgttgatccacaatcagctaaaaagatatgcaaattgcagaaatccatttatgggttgaagcaagcatctcggagttggaatattcgttttgacgaagtagtcaaggcgttgggctttgtcaaaaacgaagaagagccttgtgtatacaagaagattagggggagcgcactggacttaggggaagcagcatatattctgggcataaggatctatagagatagatcaaagaggctaattggattaagccagagtacatacattgacaaggtgttgaagaggttcaacatgcaagattctaagaaaggtttcttaccgatatcacatggcattaatcttggcaagaatcagtgtcctcaaatgactgatgagcgaaacaagatgagtgtgatttcatatgcctcggcaatcggatccattatgtatgctatgctatatacacgtccagatgtttcatatgcacttagtgcaacaagccgataccaatcagatccaggtaagagtcactggagagctgtaaagaatatcctgaagtacttgagaagaactaaggatatgttcctagtctatggaggacaggaagagctcgttgtaaatggttacactgacgcatgcttccaaaccgataaagatgattttagatcgcagtctggatttgtgttttgcctgaatggaaccgctgtgagttggaagagttccaagcaagatacagtggctgattctacaacagaagccgaatacattgccgcttctgaagcagcaaaggaggctatttggataaagaaatttgtttctcaactaggtgtgatgactagtgcttctagccctatggacctctattgcgataatagtggtgccattgcgcaagccaaggagcctagatcgcatcaaaagtccaaacgcattttacggcggtatcacctcattcgcgagatagtgggtagaggagatgtgaagatatgcaaaatatatacggatttgagtgttgcagattcgttgacaaagccactccctcagcctaagcatgaggcacacactagggcaatgggtacaagatacgttcatgattga

SEQ ID NO: 33538 - DNA, 431 bp, Oryza sativa
  unsure (1)..(431): unsure at all n locations
  Clone ID: PAT_MRT4530_3763C.1
aacaaaaataacacaaagaaaaaaaaaaaaaatcatacatataaaaaaaacaaaaccaacatacacgggacagggtagacttatctacttcacttcctaccccttcagataagctcacctggcaccatgccatcatcactaaattgtttaacaaaacggggggctccccctacgggttctcctattcatttcctacaaccttccaagatttctcattttttnnaagtaaccttaacacatagcccttccacccctttatccctactgattgtcgaaaacatcttgtccatcaatgaatctcctatctcggaccattttgttttttcccgcatcgatatcggtccaatctgcatcacccttacgcttttctccaacatttgcaccccatagtgtctagttacaccccccttctaaccccatttaattcttgg

SEQ ID NO: 33539 - DNA, 489 bp, Oryza sativa
  unsure (1)..(489): unsure at all n locations
  Clone ID: PAT_MRT4530_37640C.1
ngacgccaaaagccgacgtttctcgtgccgtggtccacgtcacatcattcttcctcaaaaaaaattcctccccccccccaacaaaacaaactagcaaacatgcatgacaagacctgccccaagtgcggagctgcttccgatggcagctccaagacgtgcggctcgtgcggagctagctgtcccgtctaagatctgttcgagcatctacgatcatcaccaccttcggtttaatccaattttctcgtgacactctgttttcacaagtaaacggagggtaacgtcagaatacggatctcagactttcggtgtggcaatttggggggcttttcttttggggggcgtttgggatggtgccaattctttctttgggaatcggggcagtacatgagatgagagactacatgactgcgatagggcttttgtagttgtaacgaaagggacgaagtgaagacgacaagaaaataccatgagaaaaaaaaaaaaaaaaaa

SEQ ID NO: 33540 - DNA, 3418 bp, Oryza sativa
  Clone ID: PAT_MRT4530_37641C.1
atgcactgtcccaggctcccagctggcatgaaaagcgtcgtcactttttggagtactttgcaatttcacattaaaaaacggtttcttgaaaatgaacggtttcttgaaaatgaaagtgaactgccacttttcccatgcatgcaccatgttcagtataagggcatttccaacccaataactaggatggtgtccatagcattaaataagttgccacctaggataaaaaatgatatgatcatggcagctcctgcaccatccagttttaacttgcggtctattcttgagaaagagaagttgactggaacaaacttcatggactggtatcgcaacctgagaattgttctcaggcaagagcacaaagagtttgtgcttacacagccttttccagctgacttgcccaacaatgctcctgctgctcaacgtagggagcatgaaaggcgatgcaatgattatcttgatataagctgtctcatgcttgctactatgtcccctgagcttcaaaggcaatatgaggcattggatgctcatacgataatcacgggactacgtaacatgtttgaggaccaagcaagagctgagaggtttaatacctcaaagtccttgtttgcgtgcaggcttgcagaaggtaatccagtgagcccacatgtgatcaaaatgattggttacaccgagagtctggataagcttggttttccccttagccgagagttggctactgatttgattctccagtcgctccctcccagctttgagccgttcataatgaatttcaacatgaacaacctgaacaggaccttggcagaattgcatgggatgctaaagactgccgaggaaagcattaagaaaaactccaaccatgtgatggttatgcataagcgcaagcccaacaacaagaagagtggtcaaaagagaaagctaaactctgatgagatcacgagtactagcaactctaagaccaaggttcaaaagacagggcccgctaaggatgcagagtgcttcttttgcaaggagacaggtcattggaagagaaactgtaagaaatacctagagcagctcaagcagaagcagcaggatggaaagagttccacctcaggtattaatgttatagaaattaatcttgctacttcctctactgattcttgggtatttgataccgggtcagttgctcacatatgcaaatcgttgcaggggctgaaaagaagtaggagcttagcaagaggcgaagtggacattcgcgtgggcaatggagcaagagttgctgctgttgcggtcggcactatgccattatctttaccgtcaggattagttttggagttaaataattgttattgcattccagctttgtgtaagaacgttatctctgcttcttgtttgcaagcagagggttatggttttagatctgtggacaatggttgttcagtctattataatgacattttctatttgccatgcacccatgatgaatggcttatacattgtgaatcttgatggatgttcagtctataacattaatgcaaaaaggcaacgtcctaatgatttgaatcccacttttatttggcattgtcgcttgggtcatataaatgagaaacgtatggagaagcttcatagagatggacttctacactcgtttgattttgaatcatttgagacatgcaaatcttgtttacttggcaaaatgacaaaggcacctttcacgggtcaaagtgaaagggcaagtgaaccattgggactagtacatattgatgtatgtggaccaatgagctcaactgccagaggtggttttaggtactttattacctttaccgatgactttagtagatatggttatgtctacttaatgaggcataagtctgagtcctttggaaagttcaaggaatttcagaatgaggtacaaaatcatttgggcaagacaatcaagtatctacgatctgatcgtggtggagagtacttgagcctagaatttggcaatcatctaaaggaatgtggaattgttccacaagtcactccgctaggaacgcctcagtggaatggggtgtctgaacggaggaatcgtacattgttggacatggtgcgatcaatgatgagccaaactgatctgccgctaagtttttggggttacgctctagagacagctgcgttcacactaaacagggttccatcaaaatcagtggataagacaccatatgagatatggactgggaagcgtcccattttgtctttcctaaagatttggggctgtgagttgtggaagcaccggttttacgaatgtccgaaaggatacggcgtacacctgcgagtttggaacttggttgatccacctgatggtgtaaaagccattgagtgcaaatgggtctttaagaaaaagacggatgtagatggaaatgttcacatctacaaggcacgattgatggcgaaaggtttcatacaaattcaaggtgttgattatgatgaaactttctcgccagtcgccatgctaaattctattcggattgttttagcgattgctgcctatttcgattatgagatatggcaaatggatgtcaaaacagctttcctcaatggaaatctcgatgaggatgtgtacatgacacaacccaagggatttgttgatccacaatcaactaaaaagatatgcaaattgcagaaatccatttatgggttgaagcaagcatctcggagttggaatattcgttttgacgaagtagtcaaggcgttgggctttgtcaaacacgaagaagagccttgtgtatacaagaagattagtgggagcgcattggtgtttctaatcctatatgtagatgacatattattgattgggaacgatattcctatgcttgaatccgttaagacatcgttgaaaaatagtttttcaatgaaagacttaggggaagcagcatatattctgggcataaggatttatagagatagatcaaaaaggctaattggattaagccagagtacatacattgacaaggtgttgaagaggttcaacatgcaagattctaagaaaagtttcttaccgatgtcacatggcattaatcttggcaagaatcagtgtcctcaaacgactgatgagcgaaacaagatgaatgtttcatatgcacttagtgtaacaagccgataccaatcagatccaggtgagagtcactggatagctgtaaagaatattctaaagtacttgagaagaactaaggatatgttcctagtctatggaggacaggaagagctcgttgtaaatggttacactgacgcaagcttccaaaccgacaaagatgattttagatcgcagtctggatttgtgttctgcctgaatggaggcgctgtgagttggaagagttccaagcaagatacagtggttgattctacaacagaagccgaatacattgccgcttctaaagcagcaaaggaggctgtttag

SEQ ID NO: 33541 - DNA, 186 bp, Oryza sativa
  Clone ID: PAT_MRT4530_37642C.1
atggcgttggatctggccaccagcctctcccctcccaccctcttctcgcagtcgacggccggcgaactcgccagatccgacgacctcggcaattgtgacctctacaggtacgacaagggttcatggaactatggtccccactgccacgggtgctcggctctgatgtggaggcttgagagcacatga

SEQ ID NO: 33542 - DNA, 237 bp, Oryza sativa
  Clone ID: PAT_MRT4530_37643C.1
ccctgcattatggacggagcagcaagacagaagggtcaaggaaggaggaacagcacgcttggcagaagtgattccctgcattacgtcaactgccgcagcagctctacccgtggcagagcagctggcaaccatagcgagcgaggccagagcagcaaacgccatggtcggtcgctcgccggtctgttctcgtgccgcaacgcgtcctcgtctactgtgttctatggcgccgagcagaca

SEQ ID NO: 33543 - DNA, 288 bp, Oryza sativa
  Clone ID: PAT_MRT4530_37644C.1
atggcgttggatctggccaccagcctctcccctcccaccctcttctcgcagtcgacggccgggcgaactcgccagatccgacgacctcggtgggggagtggcgatgcgagcacgatgacggcagtggatttatccacgagtttgccggatctggtgagtggcgacgcgaccacaacggcggtggtgagcggcaacgacgaccacggcaagtacgacaagggttcatggaactatggtccccactgccacgggtgctcggctctgatgtggaggcttgagagcacatga

SEQ ID NO: 33544 - DNA, 210 bp, Oryza sativa
  Clone ID: PAT_MRT4530_37645C.1
atggcgccgcggcgggtctaccccggcctacgtgtacccgcccccacgccacgcgcgggccccatcccatgctgcccggacagcgacatctcggcttccctcctcccacgcggcgacgtggcgtcccctgcaccacagctcgccggcgccggatggagctttccggccggcgactttgccgcggacgaagacgtgaagagaaaacagtag

SEQ ID NO: 33545 - DNA, 177 bp, Oryza sativa
  Clone ID: PAT_MRT4530_37646C.1
atggcggttctggtggtgcgaaaccatcggaggtggctttatgtcgccggagttgtagaagaagaacaacaaagaggagagagaggatgcctattggacgaggctcactggcgtcattggcgacttctggttatgaactaccagaacttacatataccatattctagacaaggatga

SEQ ID NO: 33546 - DNA, 1341 bp, Oryza sativa
  Clone ID: PAT_MRT4530_37647C.1
atggggcacggcctgagctgcagccgcgacaccgacgagtacgacctgttccgcgcggcgcagctgggcgacatccacgccctctccgccctcctcgccgccgaccccgcgctcgcccgccgcgccacagtctacgaccgcttcaccgctcttcacatcgccgccgccaacggccgcctccaggtactgtccatgttgctggatcgcgacggcgacgtggacgtcctgagccgcaagaagcagacgccgctgatggtggcggccatgcgtggcaacaccgagtgcgtggtcaggctcctccgcggcggcgccaacgtcctgaccttcgactcgccgcgcgccaggacgtgcctccaccacgccgcctactacggccacgccgagtgcctgcaggccatcctcggcgccgcggcgcaggcgcagggccccgtggccgcctcctggggtttcgcgcgcttcgtcaacgtgagggacgagcggggcgccacgccgctgcacctggctgcgaggcacgcccgcgcgtcctgcgtgcgcctgctgctcgacaagggcgccatcgtgtcggcgccaaccgccgtctacggattccccgggagcacggctctgcacctggcggcacgcgccggcagcatggagtgcatcagggagctgctggcctggggggcggaccggctccagagggactcggcggggcggatcgcgtacgcggtggcgatgaggcgggggcacagggcgtgcgcggcgctgctgaacccggcggcggcggagcccatagtgtggccgtccccgctcaagttcatcggcgagctggaggcggacgccaaggcacttctggaggcggcgctgatggaggccaacagggagagggagaagaggatcctgcacggcagcgacatcaacatcaagggcggcgacgaggaggaggagagcgaggatgaggaggaggcgtgcaacatctgcttcgagcaggcgtgcagcatggaggtgaaggagtgcgggcaccagatgtgcgcggcgtgcacgctggccatctgctgccacagcaagcccaaccccaagaccctcctcctccacccgcccgcctgccccttctgccgcaccaccatctcccgcctcgtcgtcgccaccaccaactccaacaagaccaacagccgccgccggtcgaggagcagaagcagcagcttcaagggggggctctcgtcggccatggggtcgttttccaggataggccgcggctccgggagattggtggtggacggcagcagcgtaggagagctcgccgacaagcctgaccacgacttctcttctgtcgccgccgctgctgctatttgtgacacatga

SEQ ID NO: 33547 - DNA, 460 bp, Oryza sativa
  Clone ID: PAT_MRT4530_37648C.1
gccacggagaccggccgccgcgctaccacgagatcgactttcccaagttcgacggccaaggcaaacgcttcatttcctcgaccgttgcgagtaattcttccaaggacagcatacaccggaggaggagaaggtctggctcgggtcgtatcacctgctcgacggggcacgatagtggtacatgcgcgtcgaacgcgacttgggcaccccgacatggtgtcgtttctctgacatgctcaatctacactttgggccgcccctgcgccaggcgcccttgggcgagctcgacgcctaccggcgcacgacgacggtggccgcttacatcgaccgcttcctcgacttgctctctcgcgatggacctctcatggaggatcagcagttggacctcttcaccacgggactccaagaacccctcagcatcgacgtgctgctgcagtaccctcaccaccatagagttcgccat

SEQ ID NO: 33548 - DNA, 811 bp, Oryza sativa
  Clone ID: PAT_MRT4530_37649C.1
aaggggatcaaagatgaaccagcaccacagaatctttgggatctcctctaccttttctcctttggaaacatcggctaattcgttttggaagttcgtggaatcgagttcgattcggatcggcctctttccttctaaccccgaagtttccttctcgtcgccggccgccgtgggccttcaccgtcgcctcttagcccctttaaaaggaccccggagctcttctctacccgtcgccaccttcgccttcgcctctcgtcgtccgtagtgccctagcgccgtgtgccctcgagccgccgtcgccgccgtcgctccagccgtgcgccgccgctgttccagctgtcgccatcgctcggaaagaccgccgtcgtggtcgccgtcgcgttgccgtcctcgtccgccctttcgccgtcgccgaagaccgccgaagcaccgtcgccgccatcgacccgatcttctccgccgtttcctcctcgccgccgtcgtcgtccgttggtcttccgccgctcctttggtcaccggtgagttcgccgcgtcgcgctctacgtcctggtgccctctgttctcgtcgtcgcgccgtcgttcgccggcgagcttgcgccgcccgagccgccgccggtggtgacgtcaccgctgacgtcatcgtggccgtttgccgtgagccggtcgtggaccgttcgatctcggccgtccattttggatggatcgatctcggccgtccgttccagtgaaccgcttttgtatagcatggttcattgcggagcaccagactgagaagtggcggagataagcccacaggggtcgctggggagtccat

SEQ ID NO: 33549 - DNA, 1857 bp, Oryza sativa
  Clone ID: PAT_MRT4530_3764C.1
atgaacatcgccacaggggcaatgaacaccctcctccccaagcttggggagctgctggttggcgaatacaagctgcaaaagggtgtcaagggagagatcgaagaacttgagaaagagttgaaaggtatgaacgcagcactccacaaggtggctgagacacctgtggatcaacttgaccagcaggtcaagatctgggccagcgaggtgagagagctatcttacgacatcgaggatgccatcgacaccttcatgttaaagtgcaaggggcatgaacctgccacgagcttcaagaaggtcaccaatttgttcaacaagttcaaaactaaccatcagatccacggtgtcatcaaagacatcatggaccaggtcaagaaggtcagcgagcgtcgtgataggtacatagtcgatgacaatgctgccaggccaactgttgtggatgttgattctcgcctagaagctatgtaccgaaaggcaacaaaactcattggcattagcaagccaaaaaatgagctaactaagcgactcttggaatatgacggctcatccagccaacaatcaaatataatttctattgttggattcggaggcttaggaaagacaactcttgccaattcattatttcaggagcttaaggcaaaatttgacagctattgttttgtttcggtgtccttgaatcctgatataaacaagattctcaagaacattcttctccaacttgatgagaaaatgtattcccacatagatgaaacatgggaaacgaagcagctcatcgacaaaattagagacttcctcaacaatagaaggttcttgtgcgtgattgatgatgtatggaaaaaatcagcgtgggatactatcaaacttgctgtgcaagatgctaaacttggtagcaaaataattgtaaccacgcgaaacaaggtcattgcagaacatgcaggcggtggtgtttatgaaatgaaacccttatctgatgatgattccagacaattgttctgcaaacgaatatttgactctaacgatgactgtcctgctgatttgtgtggtgtcactgagaaaattttgaagaaatgtggtggtgtaccgctagcaatcatcactacagcatgcctacttgctagcaaaccaaggaattcagaggaatgggacaaggtcaataagtctatcagtttggggcttgagaacaaccttgatgtggacaacatgcggaagatattaagcctcagttacagcgatctaccttttcatttgaagacttgcttgttgtctctaagcaaatatactgaggatgagctaattagaaaagatgttttgatatggggttgggtagcagagggttttattacagatgaaacacgacctgcagggacaagcttgcaggagattggcgagagctacttcaacgagctcatcaatcgaagcttgatccagccaatgagtgagaacactctttgggatgaagatggtaaggtgcatgcatgcaaagtacatgacatggtgcttgagctaataaatcagctgtcagtagaagaagattttgttacaacgtatttatctgatggtcaacaaacaggtaaacatacatgtacagcacaaaagaagaagattcgccgattatctctccataacagcaataagtcctatgcctcgccagaagcaagagaacaattgtccaaacttgaggactgcagtggaatggacaagaaccatcttaatcatctcgataagctactcctcctaagatttctgcgtctagggcactatggtgccactgagctccctgaaagcattgggaaactggaatctctcgaaaccttggacataagaggtgcacgtaaaccaagttcttttaaatctcataag

SEQ ID NO: 33550 - DNA, 487 bp, Oryza sativa
  Clone ID: PAT_MRT4530_37650C.1
tcgatctatcggcgatggtcgccgccgaggagaacccggagtccttcttcgcggcggcgccgccgctgcgggacgccgacgccgtggccgcgaggctgggggaattcatcgcccgcaactcctccgcagcgggcgcgggcggcggcggcaggcggatcgtgtgcgtgacgtcgggcgggacgacggtgccgctggagcagcgctgcgtgcggtacatcgacaacttcagctccggccaccgcggcgccgcctccaccgagtattttttgaaggctggctatgcagttatcttcctccatcgacgaggaagctgccaagcttattgtaggttcctccccgatgattcattcctcaaattctttgatgtcgatgcagaatcgaaggttcaagtggcggagtgccacgcgccagtggtcaagaaagcattggagattatgcaaggcattgagggggtatctgttgaaactccattcactaccatattgat

SEQ ID NO: 33551 - DNA, 642 bp, Oryza sativa
  Clone ID: PAT_MRT4530_37651C.1
atgggcatagcactgagatttgaaggcgtcatcacggtagccatcaaggagcagttgaggcatctatgccgttttcctgattttgcgcgcacgaaggctagggtcacgaagagggagcagatcggccgagcgaggaaccgttgtggaggtaggggaattgggcggggcaggggaggggaaggtggggaggcgtggagagggagcgcgatgcaggaggaggagaggatgcggcgcagcgagcacaatgcggtgagggccgcggagcgcgatgcaggaggaggagaaagatgcggcgcgggagaagaactggaggctgcagcctgcagggtcatcgtcgaagccgtaatcgatgaagtgctacgattcgttggtggcggccaccaggaattggaagacgggtaccgtcgcagatggcgtccggacgcgccgcgggatcgatccagccgctggtgctgctgctcggctgcagcgaccgcctggaacaggaacggaaagaccatcgccgatgaattcatctggggccaagccacgcgatcctttcgaatttcgatccttaggaagtccacatggcattcatatggggcggggctgcagagtaaaatgcaccagcggtccttaaacttgtcaggaggtttcacttag

SEQ ID NO: 33552 - DNA, 252 bp, Oryza sativa
  Clone ID: PAT_MRT4530_37652C.1
tatatagtaaagcccctgcacctgccggtaccgaatcccaagtgtcgacccacacccaccctttcgcttgtacctagccgcctgcctcacacgggcggccacgccgaggcagatggcggccgagtcgtcaacaacgccgtcataagggagtaccacttcgtgatgcacgtcctcaagaaccggtccaactccggtgtgcccgcggctgtagtatagcagtcgatctgggctcagactcatcaaggcatcttt

SEQ ID NO: 33553 - DNA, 2317 bp, Oryza sativa
  Clone ID: PAT_MRT4530_37653C.1
gtaaaaactatcaacttgaaatttttgtttctgtgctagtccaactttagctatacagcaaacgttttttcaattcggcatatgaaatactttgccatgtcttagaactaggctaagtagcacacatttcgacacatcaaaaaaatgttaaattcacatcaaattcagattcctctttgaattacaagtcaaatcgagagctaagcaaatcgcggcatggagccgttggtcgacggcgagctctggtcgctgacccacacgtcctgcaccgacaccggcgacccgaccttcttcaccgcggcgtcgacgccgtcgaagccgacgccgacgtcgatcaccatgggcgggcggctgccggctccggtccgggctcccggcacggacgccggcgcggcgtccctgatccgggcgagctcggcggcgacctcgctcatggccggcctgacgtccttctggaacgccaggcaccggaacgcgagctcgctgacatggcggacggagcgcatcacccactcgtcggcgcggtcgacgagcgccgggtcgacaatgtcgtcgacgcgccccttcccgatgcggtcgagagcgagcgacgcgaggttgacctccgccgcggggcgggcgaagtcgacgaccttcatggcggtgatgagctcgaggaggacgacgccgaagctgtagacgtcgctcttgtcggagaggtggaagttctggtggtactccgggtcgaggtaccccggcgtgccctgcggcgccgtcgagacgtgcgacagcgacgcctggtcgaggcggccgacggcgcgggagaggccgaagtcggcgagcctggggcggaggtcgccgtcgaggaggatgttgctggacttgacgtcgcggtggaggatgggcggccgcttggcgtgcaggtaggcgatcgccgccgccgtctccgccgcgacgccgagccgcgcgcgccatgggagccccccaccggcgaggtggtgggcgagcgtgccgttggggacgaactcgtagacgaggatctgctcgccgcggtctaggcagcagccgagcaggcggacgaggcccgggtggctcagcgacgagatgagcttcacctcgttgaggagcaccgccacggcggcgtcgtcgtcgccgtcgtcgtgccgccgccgcatccgcttgatcgccaccagcgacggcgagctcgccggcagcttgccgacgtagaccgtgccgtaggcgcccgtgccgaggcggtgcgtgtgggagaaggagttggtggcgcgcgccacctcgtggtacgagtacaccggcacgccgctcgacgacgccgcctccgacagcagccgcttcgccgccagcctgtcgaagccggaccggccgccgccgccgccgtctagcaaatctgaaaaatgcaatccacttttccaatgaaattccaaacagaccaaagcaaagcagagcccctagattgtctcgcccgtgattgaccgcaccgatgactttcatgaatggagctgacgtggagcgccgggaagtgggccccacccacccgtcgccgtccatcccctccagacacctgcactggtgtccccacgccccgctcggggtccgcacgtcgtggcacgtcgcgttcgccgcgcacacgccgtgggtgcagttcccgttgacccaccaccccatctccgccaccgagaactccagagagaacaccccctcccgtgtgtcaccgtacacggacgtcagcaggttgtcgcagctaggttcctcgagcttcttccactccgcgaacaggcctactatccccgaccccgacgacgaagtcagcgccgacgcggttgtgttgccttcggcgccgcagctcgccgtggggaccatcctggacatggtttcggcggggatgctgcagttggtggcgttcgaggcgctgctgtttctatggcagtcgccgcggaggaacaggccggtgcgcgacgacacgccgtagttggcgccagagagccaccgcctcgcctcggagacggtgcggctgcaggacggcgggagggcgacgacgaacgtcgacctgctggcgttgaagttgctggcggtatacgagtacgacgaggtcgtcgcgttgcaggccagcttgatggggcagctgccggagaagccgaatgggtaggggacggcatccaacccgccgcactgccgcctgcaccgctcgccgccggcggcagcagggctggcggagagagctccatcatcgggaatagtcaagaggaggaggaggaggaggaggccgccggcgaggcgcatctctagctgctagcctaatcgacaagacttgaggtagctt

SEQ ID NO: 33554 - DNA, 441 bp, Oryza sativa
  Clone ID: PAT_MRT4530_37654C.1
aattggaggacaaatcacaacatcaaaaccgaccgataatcccagaaaatcagtttcccattcgctggtacaagatcgacactacaaagaaatacacaaacaaatcccaaatccctaaaaactaaagcagaagcaccttcttccgcttcatctgtcaacgagcgtccgctctgaacattccacaaccaatcccaaatcatcacaaatctaacccaaaaactaaatcccaatccaatcggaatcattacaaaatcatcccaaaataaatcaagcacaggagacaatccaataatcacatcacaaaataaatcacacataagatgagagaagaggtggaaatcacaaaataaatcacatcacatatgatatgagaggagagagaagggtgagagggaggccgtcgtcgttctttgccgccatggagatcctgagccgttgccg

SEQ ID NO: 33555 - DNA, 3724 bp, Oryza sativa
  Clone ID: PAT_MRT4530_37655C.1
ggcaggatgaggcggcggcagcggcggcgttgcgggctagggatttcgtggggaggtctgcggcgttggggccacggggaggtccggcggcggcggccagcgacgcgggagaagggcagtgggcagggcatcggcggcgggagcgctgggtcttcgctcacgacgtcggcgcggaccctgcgcgggggctcgtggaggagatcggggccgcggcggcggcggcgagggccacggacagcggcggcagcaggcacgcgagcggtggcgcggggtcgacgacgcacgtgcggtggcggcagcggcgccgacaagcaaaccgccggcggcagggcgggcggcgggctggcgcccgggctcgacggcggcaccgccgacgtcctccacggcgaccgcggcgtgggtgtcgacggcgacgggcagctcggcgggggcggcgagctcctcggcggaacgcgccggagctcttggcgcggtggtcgtggggcgggtcaccgccgtggccgtggccgtcttctgtgcggcggcggcggcggcgtccgaggatttcgcctccttgatcccgtcatcccgctgccgatcaggcggcgcagcttgtggaggaggaggatgatgatggtgaggttgctgccgagccgacggagaggtcaccggcggcggcgccggtggccgtggatcgcggcgcgatggagctggagggggatccgaggctggtcggcgttgcgttgggggagtacttgacggatggggaggaggtgatggtggtgggaggggcgggggaggtggccgtggcggcccgtgtggtgaaggtggatggggggaaggttgtggtggccatggatgaggatgccgctgcaggaggtggcgtcggagtcggagtggtgagcgatttgctgtacgcgacgggatcggcggcagtgggtgaaggatacgggggtgagtgtactgacaacatgcaggagctgctggatggaggtggtgcagaggagaggatgttgggagtggaactcggtggctttcgtggtgaggcaggcggtgggggtggggggagaacggcggcggcgttgttgcgatgagctcgacccacgtggctgtcgaggccccggatccggggggagacgggggcctcggcgaggcgaggctggtggatgctgatgctgctgctgcaccggcggcgggggatgcggaggggagattgggtggtggtggtggtggcagctcggcccccgccgctgcgggggacgctgatgtgacgatgacggaggccgtggaggaggaggtggaggtggaggttgcgggtgatgccgaggcggaggctgcggtggtggcgggggatgcggcgggtgatccgttgtatgggacggagtcggctggtatggttgtggatgagcccgttgacgccgccgagggaggggtagatgggggagatggtggcgaggaggggttggaagcggaggctagggttttgcagggtgaggctgcgacggagcccgttccggcaggaggagatgttgccattgcttctgaagtggcggcggaagcacatgattctgctactcctgagcatgccgaggccgaatccaatgatctcgaagaaaaccatgttgatagaggaaaagataatggcgtggcggtggcgcactgtgacgacgaaatgcagaataatgtggaggggagctccgagatccaagaagatgatggagctcccacacttgagcagcaggatgatgagtctgaaatgcccctgccttctagtgtgtcgaattttgaattatgcgctagatacagccttcctcctcttgataaaggagaatttcgagtttctgaccttgtctggggtaaagtaaaaagccatccttggtggcctggtgagatttttgacccttcagatgcgtctgagttggcattgaagcaccagaagaagggcagccatttgatagcatatttcggtgacaatacttttgcatggtgcgatgaatcccaattgaagccttttgtatcaaattattcacaaatggagaaacagagcagttcagatgcctttgttagttcagttaactatgcccttgaagaactctcaaggcggatattgtcagggatgagctgttcttgtttaccggaagagctatctgacaatgggatgtcctatatggtcgagaatgctgggctcaaggatggagttacttgctctgcagttaaccggtctgagattttgtcatgttgcagcccagaaaatcttcttaattatgttaagtctttggctctgttccctggccaaggtggtgacttgctggaattagtgatagcttgctctcaacttacatctttttatcgatctaagggatgccctgaacttgcatcattccaaacaggcagtgcatgggttgagaatggtgtggacccttcttccatcaaggatgatgtggttgatgaagttgtcactaatgaagagcctcctgctaatgataagcccaaaagaggcagggggcgacctcgtaagcagaaacctcaggatggtctagagctgacagagaaaaagtcaacatccaatctttctactgataatgcctatgatcatcctgcggaaaggcagatggatatggagtttgatgaatttgacggtttacagagcaagaagaaaagaagccttgactcgtttgaagatcctgagaccaaggcggcagctccatcttttggtagttctttcaagatcggggaatgtattcggcgagctgcaagccagctgacaggatcttcatctattgtcaagtcccagaatgaacaggtgcctcataagaacatcgctgaaacagaaaatggagattttgatgtctctagtgatgatgctatcaatgagcttagtgtggagaagcgtgcaaaaaggagacggatgcataggcaccacagtgcagaccccaaggaattgttatcacagctgtgctcagtggctgtggagccaacgcacggatatagtttctctgcaatggtaattaattacttcagtgattataggaactatgttgtttctactactactgaagcaaatatcgttgagaaaactactgcaaaaaaggggagaaagcggaaggttatgccttctcctgaggtggagacaactgatcacatgcaggattcctactggtctggcttgagtttgcataatcacccaattcatgatctcagaagagcgagtactagcacaaggccaaggcgcagaaggagatcattgcgggaaacatatttccatgcacaacaaaatctacagcatggactattgagtcctaagaaacagatacaagtgatagagagatcaattatccatgttgatgaaaagatggttgatgaggtcaagcccactgcacttgttttgagctttggtaggtcaagtgctcttccttctgaaactgatctggttaagatgtttggtcgctatggtccactgaaagaatctgagattgaagttcatgccagctcgaatactgttaaagtagtcttcaagaaacgtgctgatgctgaaagggctttcagttttgctggcaagtttagtacatttggtccttcgctccgcagttaccgtcttgtgaatatgccattttttctcagctcacaaaccaataatacagaggcacactctgagtaccatggtctggagattccaggtccaagtgagtccaaagttccactagatgctgcagaagctgaccaagttgacaaaacagatgagaaa

SEQ ID NO: 33556 - DNA, 332 bp, Oryza sativa
  Clone ID: PAT_MRT4530_37656C.1
cggacgcgtgggccggagctcagcatctacctgctcagagtctgaccatggatcatactatcatggagcaaaatcgaaaagaaaaaatgagagaagaaatcatcttgatgtttgcaattaattgtacgtaatccatccatccatgcatgcatagtttggcttgtgttaattactttcttgggtttcatgtaatttgaagggtgtcaaggtgtgtacagtattactgatcacttggggggggcttaatatatcaatctggtaaacatttgtgtgatgcactgatgctgctgtactatctgttgtgagacattttacgttgtgtgcttaggact

SEQ ID NO: 33557 - DNA, 443 bp, Oryza sativa
  Clone ID: PAT_MRT4530_37657C.1
tttgttttttttttttttttgttttttttttttttttttttttttttttttttttttttttttttttttttttttttggaaggggggcaacaaccaacaggattccattcgcctaagaaaaggaccaatttacaaggggggaagggattttacatggatattcaaaaagatgtcaggggggggccccagcgttacacaaatttatcagggccataggggggggggccaattcttaaagagaaacatagcccaaaaacctaccggttttaaaactccggactttttggtgacattttcccatcctccggggggggaccaatagtaggggcccaaaaaaagcatccacaggggactgccgggttaaaattcgccaccaggccaagggtttaaccttgttaaaaatcaaagaaaaggcccaggaaatttttaggcacatttatccc

SEQ ID NO: 33558 - DNA, 361 bp, Oryza sativa
  Clone ID: PAT_MRT4530_37658C.1
cctcaaaatatgattactgaacggactatgatatttgtcagtgccattacagctatagctaatattgcagcaaagagattagactcaaacaaaaagaatacactttgtactgatacaaaagttcacctatgatttctatataacccaaactctaaatactcaagcttttattttagcgacttccatacttattttataatacatggcacagtgaataaaacatgccttcacataaatggtcaatacaattatcgtttcatactgaacaccatataatgacaaattcaactgacaaatcctttctagaaaagtccattatttgatctactaattgcatattactaaatatcccacccccccc

SEQ ID NO: 33559 - DNA, 195 bp, Oryza sativa
  Clone ID: PAT_MRT4530_37659C.1
attatattctctttgtgtttgtgtgttatttttgtttctcattatcgagcggccgattaatgcgcggagtttcgaatttttctacgtgctcgttggtgcgcgagacgaggcgatataccgcacctagcatctggttccaggataattcgaccgatcgatcggcgcgaggcagtgtgagaatcatccgcctttttt

SEQ ID NO: 33560 - DNA, 720 bp, Oryza sativa
  Clone ID: PAT_MRT4530_3765C.1
gccgaacccgccggcgcaaggtggggagagggagggcggccggcggtggccgacgctggtgcggcgacgacggcggcggcggcggccgatgctggggcggtggcgactggcggtggccgacacgggagaagccgagacgatggcttctcctaccgcgggcgcgaggcgggtgggagggcggccgatggtggtcgacgttgggggcggcggcggccggcgatggccgacgcaggagaaggggacacgacggctcctcctaccgcgggcgtgaggcgggagaaagagggagggcggccggcggcggtggccgatgctagggcggcgatggcgccccaccgtttcccaccattgccctcgttggctctgggtcctcatcccaccttcggccacggcgacctcctccgcctcgccctcccagctgcgagcgggatggccagcgactcggcgagggagtggggagtccggcggcgagcgcgcacaaggaggaaagaggcggggaggcctctttatccgcacggccgccgcccgtcggccctatccctgccgcccccgctcctccgccgtcgcctacagcctctgcgccgccggcctcctccccaaccggcctgctcccgcgtcgtcgccgccgccgccgcgtcgcctgtcgccagccgtcgggccttctctcctctcccttcttgccccggcgacctcctcacgacccactggccggcctggtag

SEQ ID NO: 33561 - DNA, 267 bp, Oryza sativa
  Clone ID: PAT_MRT4530_37660C.1
atgtgtggtggagagaagagggggaacacacgtgtgtgctcgctcgccacgcctggcagggcagggcagggcaagcggcgcgcgtgcacgacgtacacgtcgaatggtctctggaacctctgtcttcgacgtcctgcaccgagagaaggcggcaataaggtttttgggaagcgcttcgcgcgactgctccctgttcgtccgcgacggctcgccttcctctccgcttgtgtgctgcgcgccttcgtcgatgcccgcaaccgcgagtag

SEQ ID NO: 33562 - DNA, 2081 bp, Oryza sativa
  Clone ID: PAT_MRT4530_37661C.1
ctagcagcgtgcactcatcatatatccgcccccttctgtagctttcttttgcgttaggttgtgttcctcttttgcctcttcctcgattgtgtccattggaggtgttgcggattccatcttggccttcttcagtgtttgcactaaacctgccaggcattcgtccgcgtctctcttcctcttgcaccgtagcatgaagttattggccacgtctgccggcggtgacccatccatctcgtcgtcgagcagcagtcgactgatttcaccgttcctcttgctccttacttttttttttttttttttgcgttgggttttttctctttttttttttacattgtatactttgttttttttgcatgttttttaattattccacaatgaaaataattttcttaaaaaaacttagtctattactgtgatcataagctacgtggactagaaaaaacgagaagctagcaaccactccagcaaggcgccaatggcggctagctacttatccttcccgaccacttctacatcgtcatcttcttcgtcttcgtcttcgtctttgtcttcgccatgagcattttttccttttgatttattctccttggccttctcgagctccttcactaatgctgcgaggcacgtgtcggcattgtcgtccaagctcttgggcgtcaggttctcggcgacgtccgccggcgtcatgtccacctccgacaggagctcgtcgacggcggcgaacaggcggtgggagtcgacgtcgaggtatgtcttggccaagaacttgaaggcctcgaagcagcagtaggacatctcgatgtgcttgtccatccggcctcgccggatcagcgccgggtccagcttcttgacgtggttggtggtgaacacgatgagccgctcgccgccgcacgccgaccagaggccgtcgatgaagttgaggaggccggagagggtgactttgctgcttgcgtccttcttcatgtccggcttgggcggcgcgccgccgtccttgctgccgccgtcgtcgtcgtcggccgcctccttcttcttcttgcgcgcgccggtgaggtcgagcgagcagtcgatgtcctcgatgacgatgatggacttgctcgtcgtctcgatgaagagcttgcggaggtcggtgttggagtggacggaggtgagctcgatgtcgtagatgtcgtagtcgaggtagttggccatggcggcgatcatggcggatttgccggtgcccggcgggccgtgcaggaggtagccgcgcttccacgccttcccgacgcgggcgtagtagtccttgccgttcttgaacatgtcgaggtcgtccatgatctccttcttcttggccgggtccatggcgagcgtgtcgaacgtcttggggtgctcgaacacgacgtggctccacgccgaccggacgaggccgtcgacgtcgctccagttgtgcgtggagatgttggtgaagagcttccgctgccggttctgcaccatgacggcgcggccctggcggcggatgctcgggaggtaggtgttgatgacgagctcgcggtggcggtcgaggaagaagaggcggtagtaccggcgattctcctgcgcgcggccgccgccgccccagccgtagtacccgcctccatcggtgcgcggcggcggcgtggacgtcggagacctcctcgccgtcgaccatgctgaggacgagcttgtcggcgtccttggcgccctcggcgcggaggtggcgcacgtcgcgcgccgacgacgcgctgaggtaggccttgacctcctcgtacgccgcgctccgcttcatcctgccgccctcgtactcgtggatggtgacccgacaggtacgggtcgacgagcgccgccagccgccgcgcgtgccggttcatgtgccgccccaccagcgtctgcagctgcagccgctgcagattctgccacaccaccgtccacagcaccgcgatcaggctcagcaccacgccggagttcagcccgttcaacaacgacgacgacgacgacgtcgcctccatttgtctcaaaaccaaattaatttcccaattcacgaacacgcagaaggattgatcagagatgtgatatgggtggcctcgtgc

SEQ ID NO: 33563 - DNA, 963 bp, Oryza sativa
  Clone ID: PAT_MRT4530_37662C.1
ccacgcgtccggccgcctgcgccgatccccatccattccgcgagcgagcgagtgcttccgccgcatccatcctgatctctgaggattattccaacttctgaggcaagatgtcgtacatgcgaggcgacctgctcactaggacacggaagctggtgaagggcatggccaaacctgcccctgcatggctcaaggccatggagcaggcacctccacccacattccctcgtactgatgggaagattaagaagatcgagttgccagaagatgtttatgtcaagaggttcttcaaaaagcatccagattcactctaccatgacgcaatcaagataagcgggtttgatccaccgccagcacgagtttttgcttggcgtgtcttagaattgaaaaaggacggagtcaatgaagatgatgcaatggctgtagcagatatggagtatgcagcagagaagaaagccaagaagaaagcatacaaggagctgaaagaaatcgcgcgcatcgaaggaaaaaggccacccccgaatccatacccaagcgccatcaaagaaatacaggcagaggaaaagaagtatgtgagagagcgtttccataaccccaagatacttgagattgttaagaagatgaaagaggataaggagttattttttaaagatagagaagcatccagggctgggcagtagctggtatattgccatactgttggtcaactaggtattgttgcttatgatattaacaagctgctgtttgaatctgactattgtttaactttctcatgaagaaataatagttgcacaaatcgcgtttggtaggtagcaaacagaaaaatcataccagttttgatatatgtttgctatgtggatgcaaaggcgacttcattactttatgggactttggcatgatttcagtttcatctcccatttcattagtgataatctgtatgctttatatggaagattttgcaccatt

SEQ ID NO: 33564 - DNA, 315 bp, Oryza sativa
  Clone ID: PAT_MRT4530_37663C.1
gtcagggactatgaactcaacaagggctggtacgtattgaaagaatgttacatacacgtcagctatcttaagcctgggctacatgacagtattctgtgttatcaaaactgcggaaatgcgaaagaatgatgtgctgacagtgtctcacaggttctatctaaaaccaagttataattaaccttttctctataggcttaatttctcattcatcccgcgctcagccaggagcatgtcatcaggagtcatctcattgatgtttacataacagcccactgtgacataaaccgcctgtttagggtgctcacctacttacac

SEQ ID NO: 33565 - DNA, 756 bp, Oryza sativa
  Clone ID: PAT_MRT4530_37664C.1
gctgcgccgatccccatcccatccgtcccgcgagcgagcgagcaggggcgcctcgtcctgctgcttccgccgccaccgccgcctgcgccgatccccatccattccgcgagcgagcgagtgcttccgccgcatccatcctgatctctgaggattattccaacttctgaggcaagatgtcgtacatgcgaggcgacctgctcactaggacacggaagctggtgaagggcatggccaaacctgcccctgcatggctcaaggccatggagcaggcacctccacccacattccctcgtactgatgggaagattaagaagatcgagttgccagaagatgtttatgtcaagaggttcttcaaaaagcatccagattcactctaccatgacgcaatcaagtaatttccgactctgttattttccttgctctaggttgtctataccttttcctactacagcttggtttaccttttgtttctctctccttttttttctttgattgtttgttggactttagtttttcttttctgaatttatctcatctcaagtacaaaatttattatctgcccaattattacaggataagcgggtttgatccaccgccagcacgagtttttgcttggcgtgtcttagaattgaaaaaggacggagtcaatgaagatgatgcaatggctgtagcagatatggagtatgcagcagagaagaaagccaagaagaaagcatacaaggagctgaaagaaatcgcgcgcatcgaagggaaaag

SEQ ID NO: 33566 - DNA, 2154 bp, Oryza sativa
  Clone ID: PAT_MRT4530_37665C.1
atggaaaggtactttaaacctataaaaaaaacttctgggaccaaaggggatgtagcagaagatgagaatcctaaagcagaggtagcaaagaaacctcgtgtaggtattgttcttaatctggatgatgttgttgctgatccaggcctccgtaggcctattgaggaatatgatgtgggaatcagagatcagaagcctggggttggtaaatctgggagtgatgtcttctcgaaatctggtttccaaaactggaagaaagcatcagaatcctttgccgggcatgttggtggagttaacagtattcacaataatgcaaggcggcgttgtgaggatttcaaaacatcaagacgaatcgcaactcctgagagaccttgcatgaatgctattttggatgttgcaagacttcatctgaagttgggtattgccttttgtggacctgaagccattcttggaaataaaggaaattttctggagatgcttgactggttaagaagtttttctgagtctgttgaccatgcatttaaggaacatgctgttgttttcaatgaaatgacttctccagagatgcaagctattttcgtaaaatcatgtgtagaaatgaccacacaggtcattgttgatgagattggagatggttatttctcggtacttattgatacgcctcacgatacactgatggtggatagaatgtctgttattgtgaggtttgttaaccgccaagggcaggttattgaaagattaattggagtggagtatactactggtgatacaggacctttgatgaagttagctttggatggtttgtttgctcgtcttggtctatctatttctaaactaagagggcaaggatacaatgtagcctcaaatatgcgagaagaatttgatgagctgaagtcaataattctgaaggaaaatccacacgcttattatatccactgttttgccaaccggttccagttggcggttgtatccattgcacggagcaataaagttgttggtgatttcctctattatgtcgataagattgttagggcagtgggtgattcttgcagaaccaaggatgcaatgcttcaagagctatatggaaagattagggaaaaaatagtcagaggtgatgctctacctaaaattggaatgcacccagagaatgacctttcaggtcctgctcatacacgttggggctcgtacagtacaactttactcaatctacttacaatgtgggatgtagtgttggatacactagtgactatgtgcgacaagggtatttatcctgaaccaggaagtataccatcagatatgatagaacaaatggagagctttgaatttgtgtttgtcttgcatctaatgatacgtgtattgatctggactgatgatttgtcatgtctgctggaacgtaaaggtaaatacattgtgaacccattggagttgatcacttctgtgaaaaatattttgcaagacttaaaggagaatcagtgggttgaccttttagaagaagtaaagagattttgtattctgaagtctattccggtgccaagtatggatgatagcataccagttaggggacgctcgaggcatagggggctagttgttacttgtcatcagcagtattacgttgagactttcattgctttgattgacttggtaacttctgatatgaacaataggttcagtaagacttttatggatctattgagatgttttgcttgctttgatccagatgactctttctcccaatttgatgtggacatgcttctcagtcttgctgatatttactctgctgatttctcaatgactgatcgtgaaattctcagagaacaacttcacatgttcattatccatgtcagaaatactgctgatttttcaagctgcaatgatcttgcaactctggccctgaagatggtccaaactgaaatgcatgtagcattcccactggtttatcgactcattgaattgttattggttttgccagtagcaacaccaacaactaaaagagccttctcagcaaggaacatctttgaggaagacttttgtgataacagaagtggtgactggttgagtgacacgatgttatgttgtgttgagacagagattttggcagggattaaaaatgaaaatattttacagcattttgaaagaacgaggagcaaaagaaattaa

SEQ ID NO: 33567 - DNA, 467 bp, Oryza sativa
  unsure (1)..(467): unsure at all n locations
  Clone ID: PAT_MRT4530_37666C.1
cggacttttggngaaaaaaaaaaaaaaattttaaagaaaaaaaaaaaaaaaaaaaaaaaaaaaaaaaaaaaaaaaaaaaaaaaaaaaaaaaaaaaaaaaaaaaaaaaaaaaaaaaaaaaaatgcctccccctctaaaaaaatccaaccttacaaccccaaccaaacattctttttaactaaaattttgttttccccaaaannaatttaacngctcttaaaaaaaccacctnncnttactnaaaaaaccctntttttcccaaactaaatcccctttcaccaaatccccctttcccaaattnncataataacaaaaaacccccccccaatctcccttccaaacanttncccaccttaatttccaaataaccccccctttttaacnncccataaacccctnccnnttttttttttccccccacnttaccctttccacttnccanccccttaacccccnttcctttaaatt

SEQ ID NO: 33568 - DNA, 156 bp, Oryza sativa
  Clone ID: PAT_MRT4530_37667C.1
ataataattcacggggcttactgattatgttaacacaatacattgttatgcactaagtttaaaggcacatcggacataaatcaaactgaaattcatccaaggagaagcagggctcacacagtggggaccgatccgagataataacggtaccaatac

SEQ ID NO: 33569 - DNA, 612 bp, Oryza sativa
  Clone ID: PAT_MRT4530_37668C.1
ttcgaccctgcgtccggagaagacttgacggccacaaggtgttggacggggtgctcgccggagcagcagacgccggcgaggaggaggagactagtagcttggagtctgaaggttccagccatggagctggaggttggggaggagacggaggaggtgggggtggaggtggcgtgcgagtgctgcgggctcacggaggagtgcacggcgccgtacatcgccggcgtgcgggcgcggtacgagggccgctggatctgcgggctgtgcggggacgccgtcggggaggagctggggcgggcctcgccgccgatctcgccggcggaggcgctcgaccgccacgccttcgtctgcggcgccgggcgccgctccaccgcgccgccgtcgcccgccgagagcgcggacgacctcatctccgcgctgcgccacctcctccgccgcaggctgggctccccgccgctgccgccgccgaggaaggttcgctccacgccaagcagcccgaggcgcgatgtgccgacctccgccaccgccatcgtctccgtcgataccggcggcggcggcggcgcaggcggcgcgctcgcgcggacggagagctgcttcgcggcgctcgtcgagtaa

SEQ ID NO: 33570 - DNA, 476 bp, Oryza sativa
  Clone ID: PAT_MRT4530_37669C.1
atgaagctgcgcctgtttatggtgagtccatcgatcctcaatctgtgtttgtttgtacctttagagcaatctgtgtttggtatggattcggatgagttttcagtcaaggttcaccatggggttttttcgttggtcatggtaatttgcggtcttacgtggatggcaaagtcagttggtttgatcatattaagatagacacttggtctccactgtggttggatcaattagttgaggatttagggtacctaaggactcccagcttgaagtattactggttattatcaagcaagggtatttctgatggtctcagagtgattacatgtaacactgatacaaatgtgatggcctcagtggttgaaaagtgcatgaatttggttgtctatttcaatcatgagggaaaagttggaggtattaactgggatgatattatgaacaatctagtccggcgatcaccgtcttgtgtagcctgcctcgcc

SEQ ID NO: 33571 - DNA, 339 bp, Oryza sativa
  Clone ID: PAT_MRT4530_3766C.1
atgagggagcaggaggagggtggcctgcaggcggcggggcgccggggtggggttgtcagggcgctgctcggcctcggcgcgatcgcggagggcgccgccgccgccgaggggggattgccgaggaaggcgggggcgggggacggcggcggcgaggagaggaaggcggtggtgagggtggtggcggccgacatgccgcccgcgctgcagcggcgcgcgttccgctgcgcccgcgacgagctcgccgggatgccgcgctccccgcggcggctcgagcccaagcgcctcgccctcgccctcaagaagttgtccagctacgccaagaccttgtgcattgcatga

SEQ ID NO: 33572 - DNA, 360 bp, Oryza sativa
  Clone ID: PAT_MRT4530_37670C.1
atgccacctttgtccgtctcccagccatacagtcaacgccgatggagcgagtggttgaggagcaacgtcggcggcgaggtggaggggaaacgttggtggcgaggtggacgatccaaggctgcaggaggatctggcgttggacgcggcaacttcttggagattgggccgttggacgtcgacctgaagccgcgcaacacgtcatggctgaagaaggctgatctcatattcgtggatcatcctgtgggcgtcggctacagctacgcggacgacccgagcgcgctggcgacgacggacttgcaggcggccagggacgccgccgagctcacatcaaggctctacccgacgagatacccgccctga

SEQ ID NO: 33573 - DNA, 726 bp, Oryza sativa
  Clone ID: PAT_MRT4530_37671C.1
atcaaattcccatcttaatctcatcatcaactccctcgtgtaaactcccaatccccttcgagttatcaaacaagcagctactctcttcagtccaaggagacagtcctcctggaggaggaccgcgtgccgcgggagtggacggcgcaggtggagcccggcgtgcagatcaccttcgtctccatccccggcggcgccggcaacgatctgaagcgcatccgtttcagccgggagatgtttaacaagtgggaggcgcagcggtggtggggggagaactacgaccgcgtggtggagctctacaacgtgcagacgttcagccggcagcagggcttctcgacgccgacgtcctccgtcgacgaagccatgagagattcgttctactcccgcgtcggctcgacgagggagagcccggcgatgatgatgccgccgccgccgccgctgccgtcgtcgggtgctggcagggagcacccgatcagcccgccgtacgacccgtcgcgcggcacgacgtcgtcccgggacgaggcgtccgtgtccatcagcaacgcgagcgacctggaggccacggagtgggtggagcaggacgagcctggggtgtccatcaccatccgcgagttcggcgacggcacccgcgagctccgccgcgtccggttcagccgcgagagatttggcgaggagcgggccaaggtgtggtgggagcagaaccgggaccggatacacgcgcagtatctg

SEQ ID NO: 33574 - DNA, 1342 bp, Oryza sativa
  Clone ID: PAT_MRT4530_37672C.1
tcacacacacgcgaagcagcagaatcgcagacagatcgaccgcgcgcctagcttctctgttccgagaaagccggccatggcgtcgccgccggcgccggcgaaccgagaagagctgacccgcgcggctctcgccttcctgaggaaggtgagaagccgcttctggttgaagccgtgcgtctacaaggggctcgagaccatcctcaccgagtacggcaagtacgcgaacgcgtccacctccctggtggtggacggcgcggcggtgctcctcggcgaccaccccgacctcatcgcggagttcaacaccttcgtccgtccggagtacaagatcgagctccccgccgatcaccttcccgctgcggcaacggcaaagccccaaggcaagggagacgtgtcgccgctcgaggccaagcgattcttggagcgggtgaaggcggaggacgagaagctttacgacagggtcgtcgtcaagctttccgacttgcacaagaagagatggatggacgctcatcaggtgtacgcacagctcgagaaagtgtttggtccggcacgccgagacctgctccgctgctccgccgagttcctcccgaagggcccgccgccggagtttgcggaggacccgggtgcaggtcccggcccgtcgtcgtggaagcgcaaacgcgccgccgccgccgccgctaacacgttcgcagccgacgccgtcaagccgatcaggaccgtaaagccacgcgccgccgacctcctccagatcagccagcccgcccacgacgtcgacaaggacaagggcgtcaagccgagtaggcccaagaggccccgcaacgcaggcatccagatcggccaagccgccgtcgccgccgccgccgccgccgccgacgacgacgacgacggcgaggcggggggcgacccgtgctggctcgtcacggagcggaacccccacgccgccgccgtcacgttcaggaagatcttggagttccacgccaggtactcgaatctggtcgccacgatcaagcgcgcggaggagctcgcgagaacgcggcaccctcgcggcgccctcgaggacctcttccctggccgcgagtgccacgagatcctcggcgagctgtacggcggcggctggaggacgatgcgggcggcggtggtcgaggacggcgacggccacgtcgacgtcacgttggccgcgatcctgctgcgtctgagggcggaggaggacgtagccgtgcagttggcaagaagccggcgtgatagaacccgctacggtgccaggcagggtgagaggtcgccggccggcgaccgcgccgcgaaccgtagtacgcgcggcgtccgtgcaaaatggcgtgaagcttga

SEQ ID NO: 33575 - DNA, 543 bp, Oryza sativa
  Clone ID: PAT_MRT4530_37673C.1
ctcttcttccccccctttcccttctttctttttttttttttttttttttttttttttttttttttttttttttttttttttttttttttttttttgggaaaggaaaaccccccctttttttttttattgggatcaaattaaacaggcagaaccgggggtttttttgaatttttgtttcaaaaaataaattttttttggccaaaacggaaaattgggggaaacaattatttcctggacaaggggttgtttttacaaaaagaaaacaaggggggggtgtttttccttgctgagggctgggggtggtttccttggccaaaaccaaaccttttttaaaggcccttttgggggaacaaccctttttaaccattaatgcaaatgcgggtggatttgcatcaccattagctgttaccccttttgattgaaaaaggggaacagttgcaatatttcctttttttatgaccccaaaagcaattttttgttttccttaaacaaaagttgccccaaaggggttttttatgggcccttgcgtttgggattggtgtt

SEQ ID NO: 33576 - DNA, 551 bp, Oryza sativa
  Clone ID: PAT_MRT4530_37674C.1
ctaatggccacggaacgaatgctgatctgcttccactgttgggacagatttcgaccagcctcgagactcgtcgtccttcgccacgccgtcagagaacaccagcctgcagcagcaagaagcggcgccgcctcctgacataccacgcccgccggcggcgaggaagacgaggcggaagcggaggtccacgagcgactgcccggtgccttcttcttcttcttcggcgagacccagctgcgattccaccatggcgcctgcttccgacgccaatgcgtcgcaagatcaaaactgcaactctgcaacgtgaagtgcagcactgatcgaatttccgggtgtgctactgctacttgcgcagagagtgctgtacatcgttgtctgttcagtgctctctgctttgcgccaactgtacatgtaaatgggtttggagtttggagtgcaaattaatcggcgatcgtacggagaaattggaatgtgatcgccgtttgtgtgtttgattgtgactaaccaaagaagttaattttatgttcaaggatagggatttcgatgagtaggcc

SEQ ID NO: 33577 - DNA, 1152 bp, Oryza sativa
  Clone ID: PAT_MRT4530_37675C.1
atgtggccgtcctgggtgaggacgcgctcctccaagtccaagcccgccgccgccgccgccgacaccacctccaccgcgctcgtcgccgcctccaagcgcttaaccttctcgtctccctccctcaaggacctccagtccctgctcgtcccgccgcacgccgcgctgtcctcctcctccccgtcgccgccgcgcgtcttccaccgcatccgcgtcgccgcgtgcgcgctgcgcgtcctccgcaacctccagtccgcggggcagcagcagcagccgcacgcggcggccgccatctggagcgagccgggcggcggcgagggggcacgggtggtgctctactacacctcgctccgcgtcgtccgcggcacctacgaggactgccgcgccgtgcgcgccatcctgcgggggctccgcgccgcagtcgacgagcgggacctctccatggacccggccttcctcccggagctcgccgcgctcctcccccaccgccgccacgtggccctcccccaggtgttcgtcaacggccgccacctcggcggcgccgaggaggtccgccgcctccacgagtccggcgagctccgccgcatcgtcgcggccgcgaaccccaccccggcctcctgcgggcgctgcgccggcgagcgctacgtgctgtgcggcagctgcgacgggagccacaagcggtacagccacaaggtcggcggcggattccgcgcctgcgccatgtgcaacgagaacggcctcgtccggtgcccggactgctgcctcccgcccgcctgatccagatccaagatccgtgtggccatggctcccctccaaacaactcatcaactcatttcaacttcaaactttcttctcatcaaccatgggagagggagatcatccattcgtccgtgtgtccgtgttctgtcaattactctagcattagtcatttactcattagtgattagtgagtagtagagtaacctgttactccttagtcagttacagatgaggctgtggagtggagttcaatttagctgtcctccagccttggaattacaacttgattttagaagagattaatctttcagtttctgctcttggttaatcatcaaaaaaaaaaaaaaaaaaactcgagactaaataatacatgagtaggtaacacttgccctaaat

SEQ ID NO: 33578 - DNA, 423 bp, Oryza sativa
  Clone ID: PAT_MRT4530_37676C.1
gcaaatcacttaaaccacagatttggatgttacacccacaccctacacccattcataataatacatcatatatacttacgtacaatacatacccctctcgatcacacgcaccatcgatcgtacaaagttgcgtacatacatacgtacacacatatactcatacgcacgtacatacatacataattaaaaactcctaattaattaaatacgtaatttatggcatctctaatggaacttgaagctgcttatgatgtttttttagactggatcagccaggtgatcaaacaagttcttcacggagccaacccccgttaaaaaccccttgactgaaaaacccatgaaagcgagcattgcaaaccttccattctttatctcctttaacttgagctccttcatctccgctcgcttctagccccaaaccca

SEQ ID NO: 33579 - DNA, 3658 bp, Oryza sativa
  Clone ID: PAT_MRT4530_37677C.1
atggcggcggagggagggaggtgtcagaagagctacttcgacgtgctggggatttgctgcccgtcggaggttcccctcgtcgagaagcttctgcagccgctggagggcgtccagaaggtcaccgtgatcgttccctccaggacggtcatcgtcgtccacgacgtcgacgccatctcccaatcccaaatcgtcaaggcgctgaatcaggcaaggttggaggcgtcggttcgggcttatgggaacggcagtgagaagatcaccaacaaatggccgagcccgtatgttctcctctgcggacttcttctggtcgtgtcgctgttcgagcatttctggcacccgctcaagtggttcgcgctggtggctgcggccgccggcttgccgccgatcgtgctgaggagcattgcggccatccggagactcaccctggatgtcaacatactcatgctgattgctgttgctggagcaatagctctcaaggactattctgaggctgggttcatcgtcttcctcttcactacagctgaatggcttgagactagggccagccacaaggccaccgctgggatgtcagctctaatgagcatggcaccacaaaaggctattctggcagagaccggggaggtggttgcagcccgggatgtgaaggtcaatacagtaattgctgtcaaggcaggggaagtcattccaatcgacggtgttgttgttgatggacgtagtgaggtcgacgagagcaccctcacgggggagtccttcccagtgtccaagcagccagactcccaggtctgggctggcacactcaacattgacggttacattgctgtgaggacgactgctatggctgacaactccgcggtggccaaaatggcaaggttggttgaagaagcacaaaacagcagatccagtacacagaggctgatcgacacgtgtgctaagtattacacacctgcggtcgttgtcatggcaggatcagtagcagcaattcctgcaatagcgaaagcacataaccttaagcactggttccaattggctctagttcttctagtgagtgcttgtccatgtgcactggtactgtccacacccattgccaccttctgcgcgctactaagggccgcaaggacagggctgctcatcaaaggaggagatgtcctggaatccttggctagcatcaaagttgcagcttttgacaaaactggtacaattactagaggagagttcagtgttgaggagttccagccagttggtgaacgtgtttcattgcaacaacttctttactgggtctcgagcgttgagagcagatcaagtcaccccatggcatctgtcctggttgattatgctcaatcaaagtctgtggaaccaaaatcagagaatgttagtgaattccaaatatatcctggtgaggggatttatggtgaaatcgacggagcaggcatatatattgggaacaaaagaattttgtcaagagcttcatgcgaaacagttccggacatgaaagatatgaaaggagttaccattggatatgtggcatgtaacaatgaattgattggagtattcactctatcggatgcctgccgaactggatcagctgaggccatcaaggaactgagatcactgggcattaagtcagtgatgcttacaggtgatagtagcgctgctgccacatatgcacagaatcagctgggaaatatccttgctgaggttcatgctgaacttcttccagaggacaaagtgagaattgttggtgaactcaaggaaaaagatggccctacgctgatggttggtgatggcatgaatgatgccccggcattggctaaagctgatgttggagtctctatgggtgtatctggttcagctgttgcaatggagacaagccacgttgctctgatgtcaaatgacatccgcaggattccaaaggctgtccggctggcaaggaggacgcatcggacaatcatcgtgaacatcatattctcggtgattacgaagcttgcaatcgttgggcttgcatttgccggacatccacttatctgggcagccgtccttgcagatgttggcacatgcttgctggtgatcatgtacagcatgctgttgctgagagagaaggacagtcgaaaggcgaagaaatgtgctgcttctcatcacggatctccaaagaagtgctgttcttcttctcatcatggatctcatgcaaagaaaaatcatggcgtttcccaccattgttcggatggtccgtgcaaatcaatggtcagttgcaaagaatcatcagttgcaaagaatgcttgtcatgatcaccaccatgagcataaccatcacgaagagccagcccacaagcattcttcgaaccagcatggttgccatgatcacagccatggccatagcaactgcaaagagccaagcaaccagctgattacaaacaagcatgcttgccatgatggtcataaccactgcgcagatacgagcaatctgcacgacaccaagaagcatgactgccatggccatgagcatagcacctgcaaagaagaactcaacgctttgcctcccaccaatgaccatgcttgccatggccatgaacatagccactgtgaagaacccgttgctctgcactctaccggcgaacatgcttgccatgagcatgagcatgagcatatccactgtgacgagccaatcggctcgcattgcgctgataagcatgcttgccatgaccatgaacaggttcatgagcatcattgctgtgatgaacagcaaactccgcacaccgcagatttgcacccctgccatgaccatgaccatgacaacctggaggtcgaggaagtaaaggactgccatgctgaaccacctcaccaccacaaccattgctgccatgaacctcatgatcaggtcaagaatgatactcatccagtccaggagcactcgatctcgatcgaagaatcatcagaccaccatgagcatcaccacaacgaagaacacaaagccgaagattgcggacatcatccgaagccgaaagattgtgctccacctccaactgactgcatcagcagaaactgttgcagcaataccagcaaaggtaaagacatttgctcgagcttgcacagggatcatcataccagccaggccagccggtgctgcaggagctatgtgaaatgctccaggcccagcaggagttgctgcagccacagcatagtgaagctgcctgagatcgtagtggagtagtaggaaattcagcaatgtctgcacatatcatcagaaaatatagcaacctcgtcatcggcgaaatgtagaaaaagccgatgctgctatgcgtttgatcttttttttttagtcgtgctgcttttgcttcagctaaagaaaaaaatgttgtttgtagaggtgtctggttttgagacgaagcaggtgtttgaatcatgaaatgtataagcctgctttgtggttttctttcccggttgtgatcgaggcatcatctcctgtaagaatctgagaaggtgcatgaaatctgccatttctgggagcgggaggactagctggtgctgggattaacttgcttccaaaaactctttagattttgaaacatttgaccaacaattagtctgctataaactaaattctattcgatgaaaaaaaaaaaaaaaaaaaaactcgagactagttctctccctcgtgccgaaat

SEQ ID NO: 33580 - DNA, 2309 bp, Oryza sativa
  Clone ID: PAT_MRT4530_37678C.1
gaatgatgaaagaatttgattgtaataataatgttgtataataacagccggagacactaatagtgactgtgagagatgctgcccctgctaatctatctactgcttctttgctttctttcttctacatgcagctacattttgcaggggactctctctcaacagccaaaagaatatttataaagaattacaatctaaaaattgaattgaatttgatttaattgaatctttccacctatcaatctataaaacaaaaaactacacctttctttcttctttcttttctctgaatgtataaaagaattgtcatactgtatgaactaatcatcattaacaaaagaagcactgtaaaaaaaggctttgttctttctttctcttcacctaatcaccattcatcgtcagcttagctttgctgagaatgtgatgctgttgtggacgccgacacggtgctgcctcccgcgccgtcgcccgccggcgtccacgccgtcacggtgtacagcggctggtccagccaccggagcgtgagcgcctcgccgccgccgctgccgccgccgccgtgcgcctgcacggtgtacttgtccggcccgaacatcctcgcgatcatgcgcccctgcatcgcctcgcgctcgccgatgccggcgttcttgaacccgccgccgtcctccatgcgccgccgccacccggcgaagctctcgtggcgctcgaaccgctcggggccctcgaacgccaccgcgttgcggatctcccgcgcgaacatctcctccgccttggccctcgcggggctcgcctccggcagccccgccgcgtccaccgcgtcgaacgccgcggcgtagtaccgcagcgcgcgcgcgaaccgcgcctcccacctccccgagttgaggccgccgccctcgtgctcgccgaggaggaggatggtggcgcccgtgctgcgcgctagccccaggaagtcggtcagcgcggcgtcgtcgcggagcaggcggtgcatggcgaggacgcagttcacggccacgcactcgccgcgcttgacgtggagcatccacaggcggacgtcctcgagccggtcgaccacggcgtggaactcgaacgccaggccgagcgcggcggcgacgcgcgccagccgcgctcccgtctcctgcagctcctgcctcgactcgccgactccggtgatccgcacgtgcgccggaggcaccgcccgcgcggccaggctctggagcaagcccggccattggagcccctgcttgatgtcgaagtcgatgacgtggacgcgctcgtgcccctcgaactcgcggaggaggcgctcgttgagcgtgaagtgcaggaacctcgggatgggcgtgatggcgttgagtatccgcagcgccatggcgtcgtcgtcgccgccgccgaaggcgtcgtcggtgagctcccgcggcgggccgatgtcgaacatgtgcggccacatgcgcacgacgcggagcgcgagcgcctcggtgaagtaggcggccacgcggtgcatcggcgtgggccccgccggcgaggccatctcgccgagccgggccaggtagtagttggcggcctcgtggttgccggcggagagggagtcggcgcacgcggtgagcgcgcgcaccagctccagcgcctcccgctccgcctgccccggcgccggcacgccgttcctcgcgtcgaactcgggcggctgcggcggcggcatcatcgccgacgagccgccgtccgtgcccgacgaggacgacgagtcggacggcgacttgctgtactcctccttcttggccgcggccagcgatggccccgcggcggccatgccgtgcgggaacgccgccgcgctcggcaccaagaagaccttctcctcctccgcctcctctccttctcccgccgccgtcgcttgcatcgtccctgcaatggattgatggaaccatacctcatcgccgtcgccgcccatccgcgtccgcttggcgcgaacaatggggccatactcctcgaccgcgtcctcgtcatgcgcccgcttaacggcgcggtgggcgccattgccattgccgccgggctccggcttggcgccccaggacacggactgggtgaccggcggcgcggggtgcgtccggaaggagcaggtggtggcgccgctcctggcgtcgccggcgacccgcggggcggcgccgtcgccgcggctgccgcgcttggagaagccgcaggggaggatgtcgaaacgctgcgcggtgctcatctgatgcctcgacgacgagaacgagcaacccgccaacatcccggagacacgtcactcgccggaacgcgacgtgcacctcagcccggggatccac

SEQ ID NO: 33581 - DNA, 456 bp, Oryza sativa
  unsure (1)..(456): unsure at all n locations
  Clone ID: PAT_MRT4530_37679C.1
taggcagcangatncggcacgagcngacncgcccgcctnnncgtccggatgcntngcanancccgccgcgntncnnatctngcctnagntaccaancagggcgnacagcgaccccnncnttccactngncantgccacanncnccggacancagcnggcncngctccttcnnnatnntgctnntcggggacncngccgtccgcaagngngntctgctnntccncttcgacnccgcctcccacctnnnccncgannnngctcncnccntacgggttgnctntcacatccactnnctcnctgtccatgggnngaaactgnngctccnntatnggncnctgctggcntcnaaagtttangggnatcncncttnttactacccaggtgcccntggcgncntacnntgtttgntgtccccgggngnnncggtttncccngntnggctgntgtttgggcccg

SEQ ID NO: 33582 - DNA, 2464 bp, Oryza sativa
  Clone ID: PAT_MRT4530_3767C.1
acggcatcgatcgatcgcgggcgacgtggctgagtggcggcggacccgattcgcggcgcagcaagggcggggcggagcggagcggagccagcgacggcgcgaccgcatccactgtcccgatcgacctccgattccggcattcaacatcagataggccaagatgaacatcgccacaggggcaatgaacaccctcctccccaagcttggggagctgctggttggcgaatacaagctgcaaaagggtgtcaagggagagatcgaagaacttgagaaagagttgaaaggtatgaacgcagcactccacaaggtggctgagactcctgtggatcaacttgaccagcaggtcaagatctgggccagcgaggtgagagagctatcttacgacatcgagcatgccatcgacaccttcatgttaaagtgcaaggggcatgaacctgccacgagcttcaagaaggtcaccaatttgttcaacaagttcaaaactaaccatcagatccacggtgtcatcaaagacatcatggaccaggtcaagaaggtcagcgagcgtcgtgacaggtgcatagtcgatgacatcgctgccaggccaactgttgtggatgttgattctcgcctagaagctatgtaccgaaaggcaacaaaactcattggcattagcaagccaaaaaatgagctaactaagcaactcttggaatatgacggctcatccagccaacaatcaaatataatttctattgttggattcggaggcttaggaaagacaactcttgccaattcattatttcaggagcttaaggcaaaatttgacagctattgttttgtttcggtgtccttgaatcctgatataaacaagattctcaagaacattcttctccaacttgatgagaaaatgtattcccacatagatgaaacatgggaaacgaagcagctcatcgacaaaattagagacttcctcaacaatagaaggttcttgtgcgtgattgatgatgtatggaaaaaatcagcgtgggatactatcaaacttgctgtgcaagatgctaaacttggtagcaaaataattgtaaccacgcgaaacaaggtcgttgcagaacatgcaggcggtggtgtttatgaaatgaaacccttatctgatgatgattccagacaattgttctgcaaacgaatatttgactctaacgatgactgtcctgctgatttgtgtggtgtcactgagaaaattttgaagaaatgtggtggtgtaccgctagcaatcatcactacagcatgcctacttgctagcaaaccaaggaattcagaggaatgggacaaggtcaataagtctatcagtttggggcttgagaacaaccttgatgtggacaacatgcggaagatattaagcctcagttacaacgatctaccttttcatttgaagacttgcttgttgtctctaagcaaatatcctgaggatgagctaattagaaaagatgttttgatatggggttggttagcagagggttttattacagatgaaacacgacttgcagggacaagcttgcaggagattggagagagctacttcagcgagctcatcaatcgaagcttgatccagccgatggatacttactttcaatacgaagatggtaaggtacatgagtgcagagtacatgacatggtgcttgagctaataaatcagctgtcagcggaagaagattttgttacaacgtatttatcagatggtcaacaagcaggtaaatgtacatgtacaacacagaagaagaagaagattcaccgactctctctccataacagcaacaaatcttatgcctcaccagaagcaagagaacaattgtccaaagtaaggtcactcactatcttcggcaaggtcgactcgataccacccttgtcgagctttcatgtcctgcgtgtgttgcagattgaggactgcagtggtatgggcaagaaccattttagtgatcttggcaagctacgcctcctaagatttatgcgtctagggaaactattgcggctatttgctggcgaagtgaagctggcgcaaggtctgatgctgggggatatgaaatctttacaggagcttgtaatagaagctacccgaaagtctgaccaccttgatcgcctcgctgagcttccatctcttcgctttctcaggctacagttagcatttgtttcggaacaactgcaggaaaagctcactatccacagaggtgcatgtgcatttcggagtttaaaagattttcacttttatagctgcatgatgccgtcgtttcaaccaggagctatgccccaccttgaaaggctttgtcttcgtattgggaccagactaaggaggggtgacttaaatgatttaggtttggagaacctccactcccttcggcatgtaaccattgattacatgggtgagaacacggctgttattgaagaggcacttaaggactatccaaatcaagcagcgctcgaattactattgtga

SEQ ID NO: 33583 - DNA, 375 bp, Oryza sativa
  Clone ID: PAT_MRT4530_37680C.1
atgccggacaacggcggcgccggtgccaacgccgacgctgacgcgcgcgcgcccctcgtcttcttcgccgactgccgccgtcggctggacccgcccgtcgacgcggcctacttcggcaactgcgtcgccaaggcggcggccgcgcgcgaccgacctggcccggccgacccccggcgcggcgtcctgcatgcgcgcgcgccacgcgatccagagggccgtcggcgttcgtggcgtttgctccggcagccgaggttcgtggcggcgtccgcctcgccgcggtttcgggcgtacgacgcggcggattttgggctggggcgcgccaaatcccagccaggtacgagctctggcaacaacgaagcactaccaaagccgtag

SEQ ID NO: 33584 - DNA, 1047 bp, Oryza sativa
  Clone ID: PAT_MRT4530_37681C.1
atggcgatcgcagcggatgctgaaccggccgacgttgtcaccatgctcaatggacagattttggatgggcgtcccttgcgagtaaaatttgcagacaaggaccaaaggggatcatctgctcaccatgctactgtgaaacgccttcatcttcgtgctgagctctttcttcacagtcttcttctttcttcgagaatcggcatgttcttttctactttcttgctgctgttctggaccatttattcttggactgtacgcctgaatagagatgagatcggcaacctgaggatcaacaactcctgggattcgcagagatatgataccttggatcagttactcagaagtgtattgttgagttatctttgcatgattcatccatgcaggttaaggaagctcttgaaaagtgttgcctcacgtcatggtttaatcagcgggtggaaattttcagggaaacattgtttcaacgggagaagcctgcatcacatttcagaggactccctcaacccgtacgagcaagcgattagtatcatcggcaagaccttatcgacgttcgacgaagacaacaggatcccatgttttggatttggggacacatcgacgcacgaccaaaatgtcttcagcttctactcgggcaggcgacagtattgcaatggtgtttctgaagttctaaggggatacagagaaattgcgccacgtgtccggctgtcagctccaataatagaaactgcaatgagaataactcaggactccggctaccagtatcacatcctactgataatagctgatgggcaggttccaagatgttgtggtgctaactctgcgaacaatcgggatgagaactacctggaagaaaggactctacaggctcttgttcaggcgagagaaatgcctgaaaccgagaaggaggaacaatttgctttagaagcgctgaagaagataccgagccagtacgcagccataatcagcaagaggatcagtgatctggctgcagatgcgccttcaaggatgcctcttcctccccctcctccaaggcctgttatttctacctaa

SEQ ID NO: 33585 - DNA, 1092 bp, Oryza sativa
  Clone ID: PAT_MRT4530_37682C.1
gggctgcaggaatcggcacgaggccaaaatctcaccggcacagcaaaggcagccatggatccagccaccaccgagctgcggttcgacacgccgctcctccgcatctacaacgacggccgcgtggagcgcctcttcggcacggaaaccacaccggcgggcttcgacggcgccaccggggtcacctccaaggacgtcgtcatcgacgacgccaccggcgtctctgcccgcctctacatccccgacctccccgcctccggccccggtcatcaccgcaagaagctacccatcgtcgtctacttccacggcggcggcatggtcctcgactcggccgcctccccgacgtaccacaggtacctcaactccctcgtctccaaggccggcgccctcgccgtgtccgtcaactaccggcttgccccggagcacccgcttccggcggcgtacgacgacgcctgggccgcactcagctggaccgcgtcagctgccgacccatggctgtcggagcacggtgacgtcggccgtgtcttcttggccggtgacagcggcggcgccaacgtcgtccacaacgtagcaatcatggccggccagcttgagggcggcgtggccatcaccggcatcctcctcctcgacccctacttctggggcaagaaccccgtgggcgcggagaccacggacccggcgaggcggcgccagtacgaggcgacgtggtcgttcatctgcgacggcaagagcgggtgcgacgacccgtggatcaacccgatggcggatggcgcacccagtctggccgtgctgggatgccgtcgtgctctgatttgcattggagggaaggatgcaatgagggatagaggaaggctgtattgtgagaaattgagggaatgtgggtggcgaggggaggtggagatctgggaggcagatgggcagggccatggcttccatctcttgtggccgacatgtactcaggcggaggcacaattacgggtcatcgccgagttcctgagccatggatgagatctctggactatgttgttccactactgcacacgatatgtccattgttcaaatagagttggatatcaaagtacattatcagttctg

SEQ ID NO: 33586 - DNA, 3607 bp, Oryza sativa
  Clone ID: PAT_MRT4530_37683C.1
atgggcgaggccgggcaggacgcgccgccgccgccggagaagggcgtcgaggtggaggtgttcccggcgtgggcgcggggcgtggaggagtgcgaggcgcggctgggggtctcggcgtcgcggggcttgtcgtcgcgggaggcggcggcacggctgcgggcgcatggccccaacgagctcgccgagcacccgggacccacgctgctgcagctcgtcgcgcagcagttcgacgacacgctcgtccgcatcctcctcgccgccgccgccgtctccttcgcgctcgcgctctcctcctccgccggcgccgtcacgctctccgccttcgtcgagccgctcgtcatcttcctcatcctcgtcgtcaacgccgccgtgggtgtctggcaggagaccaacgccgagaaggcgctcgaggcgctccgcgagatccagtccgaccacgccgccgtcctccgcgacggcgactggctacccagcctccccgcgcgggacctcgtcccgggcgacatcgtccagctccgcgtcggtgacaaggtccccgccgacatgcgcgtcctccgcctcgtcacctccacgctccgcgtcgagcagggctccctcaccggcgagaccgcctccgtcaacaagaccgcgcaccaagtgccccacgacgacgccgacatccaggccaaggagtgtatggtcttcgccggcaccaccgtcgtcaatggcagcgcaatctgcctcgtcgtgcacactgggatggccactgagatcggcaaaatccacgcgcagatccacgaggccgcgcaggaggacgacgacaccccgctcaagaagaagctcaacgaattcggcgaggcgctcaccaagatcatcggcctcatttgcgctttggtgtggctcatcaatgtcaagtacttcttgacgtttgagctcgatgggtggatgccgaggaacatccgcttctctttcgagaagtgcacatactacttcgagatcgctgtggcgctcgctgtcgctgccataccggaaggacttcctgccgtgatcaccacgtgccttgcacttggtacaaggaagatggccgccaagaatgctcttgtcaggaagcttccaagtgtggagaccttgggatgcaccaccgtgatttgctctgacaagaccgggacgctgacaacgaaccagatgtccgtggcgaaacttgtggcgatcggagatgctgaagggaaggtcaggagcttcaaggtcgatgggacgacatatgatccccgggatggtagaattcacgattggcctgcagggaggatggatgcaaaccttcagacgatcgcaaagatttctgctgtgtgcaatgatgccagtgtggcacattcttcacatcagtatactgcaactggaatgccgacagaggcagctttaaaggtcttggttgagaaaatgggaatacctgaaggaatgaacggattgtccttggatccatctgaaacattaggctgctgccaatggtggagcaatgttgccaagaggattgctactcttgagtttgaccgtacaaggaaatcaatgggagtaattgttaagtccaaatcaggaaggaatgctctacttgtgaagggagctgttgaaaacttgctggagaggagtagccacattcaactgcaggatggttcagttgtgccgttagatgaaaaatcaaggaaagctattttggaaaacctccatgaaatgtcaattaaagctctgcgctgccttggttttgcatacaaagaggatctagcagaatttgcaagttacgatggtgaaaaccaccccgctcacaagcttttgctggatccagtcaattatgcagcaattgagaccaatttgatattcactggtcttgctggcctaagggatcctccaagggaagaggtttttgatgctattgaagattgcagagctgcaggcatccgtgttatggtgataacaggagacaacaaagaaactgctgaagcaatatgccgtgaaattggtgtgttttcacatgacgaggacattaccttaaagagtcttacaggaaaggagttcatggcacttgaggacaagaagacactgctgcgaaggaaaggtggcctactgttctctagggcagagcctaggcacaaacaagagattgtgagactgctcaaagaagatggtgaagttgttgctatgactggagatggagttaatgacgcccctgcgctaaagctggctgacattggagtagcaatgggtattacaggcactgaggttgcaaaagaggcctctgacatggttcttgctgatgacaattttagtaccattgttgcggcagttggtgaaggaaggtctatttacaacaacatgaaagctttcatcagatacatgatttcctcaaacattggtgaagttgcgtcaattttcctaacttctgctctgggtattcctgaggggttgataccggttcaacttctatgggtaaaccttgtcaccgacggtcctcctgcaactgcattaggtttcaatccacctgataaagacatcatgaagaaaccgcctagaaagagtgatgactcactgattactccctggattttgttccgttacctggtcattggcctttatgtggggattgccacggtcggcatctttgtcatatggtacacacatggatctttcatgggcattgacctcaccggagatggtcacacccttgtcagctactctcagctctcaaactggggccagtgctctacctggaacaacttcacagttacgcctttcactgctggagctaggactttcaccttcgatgacaatccatgcgagtacttccatggtggcaaagtgaaggcgacaacgctctcgctgtctgtcctggtggcgattgagatgttcaactcactcaacgccctctccgaagacactagcctcctgaggatgcctccttgggtaaacccatggctgctcctcgccatgtcagtgtcgttcgggctccatttcttgatcctctacgtgccgttcctcgcgcaagtgtttggcatcgtgccgctcagcttgaacgagtggctgctggtgttgcttgttgcactcccggtggtgctcatcgacgaggttctcaagtttgtcggaaggtgtacaagctcatcaggccccaagaggcgaaccaggaagcagaagggcgagtaaaatgctaacagtgattcttcagactcatcagtaacaaaagtcactgaatttgttgtgatcaagtaacaatgatcaccaaatgatgtttattcaatagaaatatgtccaatacaagaaagttcaggaaagagattttctcaaaacaggtcatcactctttgggaagttgataacctttgctgttcttttattccttgtcctaaatggtactatactgagctcacagcaaaccagcaggcagcagcattgttctgttggcaacattttgcttctgtgaattattatatatagatgaaatatttagatcaaattatacacatttctgcctaccttattatgcttctgctgtgtggtttctgagctggttgatctggcaggccaatactcaattaattctccctgtgaattgtctctaaaaaaaaaaaaaaaaaaaaaaaaaa

SEQ ID NO: 33587 - DNA, 864 bp, Oryza sativa
  Clone ID: PAT_MRT4530_37684C.1
atggtggacccctgcctcgcccgcgcggtattggcaacaccagcacacgcgttcgtcccgagttgtcccggggtctggcaaaccctgtgtcacgtctcgtccttcacggttcgactacattggctcttcggcgtcatctacctcaacgactgccaggatcgcgtcactgtcatcgtctccagcgcgtcctcgcttaccttggtccacgacaccctcccgtgcgtccacgaccactctacggcgccccatgcgcgccctacggctcggctacctcaacatcagcttcccgacttcggctatatcgaccacggctactctacgcacggcttcattgaccatggctccctcgcaccctttgctttggctacatcgactacgacacagagggctatcatcgtgttgagtactcttgaagccactggtgagcactacagtttccttgtcaccattcttcgccggcgcaaaaagcaattgacgatgacttctgttgccacgggaagctccagcaaaagtgctactatcatcgacgcgagcacgagctgccaatctttgggtggaatctctccaccaagcatcacgccaggcacaggtcctcatctacccgagccccaccgtatggactccaacacattcccactgcaggtgattgccatatactccaccatacctttggacacctacgttttagctagttactcatccaggggattcccagtacgtctgtgtggtcgtattgtgatgaaggatgtaggtcccgatcttctgataggtattgataaacaatcgatttgggcggagtcgcgacacaactcgatacggcttctgaacgaacatgctactgagccccgcaatcgcagcacctag

SEQ ID NO: 33588 - DNA, 1517 bp, Oryza sativa
  Clone ID: PAT_MRT4530_37685C.1
atggctggctatcctctcgagacagtcctccggttcctctcttgcggcagtgaaaaggatatggaattaagaatagagaacgcgcccagccagaatctctacgtcgtcatcttccttgctctctgtctctttcttcttctccatcaatctctcggaaatactccttgtgtttcggaacaactcctgggccgtgacaaaattttgggttccagtttgagtttttctaagcttcatcgattggatgagccatctttttactcctatccgcttgattcgcgggagcctaggacaccacctccactaccccaatttttttagggatgaaaacggatcggatacggtcggaaactacctttatcatattcgttttcatattttttcttagaatcgaaatcggaatagaaaacccggatacaaaaacggaatcgaatattatcaaatacagatacggagcgaatacgaatcgaaacaaatacggtaacaaatattaatcggaacataaaagcccctcaaactgaccttcacaaatcagcgaagaaatataacttgttttttataatagaatgtgttacaattccaaaagatcaacgattaataataccataacgagaaacatctacaaacttgcacatactgacaaagtcacactgtcacacacattaccggttacaaacttgcacatgatggcagttacacgcattaacacatagggataatttcgttcttacccttatttcgatatgcaattgtgattttgcccctactttatagggtcaagcaggatctggaggtgcctcaagcaggagcacggcgcttggagccttggatggccagccagtagccacccaccaaggatctggcatcatctcaaagtcggtcaccacgctgccattatcaacctttggcatcagaatgaagcttgctaggtggtcgtcggcaagcgccgacggcggcatctcagccagccatgccatgggcaggaggccacagcaggcggtgtccgggccaggagcagccggccacgggcaggaggccacagcggtgctgctacctgctggccccgtcaatggtttccgggctgggagcaggcggtggtgcgcaggaaaccgttgcggcgagcgggaggccgcggcggcgggcaggaagctgcgacagcgagcaggaggctggcggctgcacgaggcgccggcggcggcggcgaaggggcgaggcggcggtgggcggtagcggcggccgcctagatgcacgtcgtgggggattgggatttgggaggcagcggcgacgaccggatctagcaaagcaacagagaggacatctgatgagaaaatggtggttttgctcgacgacgacatctgatgtaaattccgtctctcgctcctcgcgcacgcccgcagcctcgcgcacggtgcgcctgtggccgccgccgccgcctccgcgccgtcgcgcaccgcgggcccgcggtcgccgcctccgcgccgcacgcgctccctcgcggtggaagactcaaccctatccat

SEQ ID NO: 33589 - DNA, 181 bp, Oryza sativa
  Clone ID: PAT_MRT4530_37687C.1
attaggactttttcggtaatgggggttcattccttcaattcaaaaggactgcccaaacataccaagggtttaatcaacaattattcaaccaaatttttttaacacaacttaaaagaaacacttatactccaataatatacctcgaagccgcgtatctctaacaaatttccaccttcttaac

SEQ ID NO: 33590 - DNA, 239 bp, Oryza sativa
  Clone ID: PAT_MRT4530_37688C.1
cattattgcaaaaacatcatcttcttcttcatcttcttagtgtacacaacaccaactcgatcatcatctcggcgcactaaacccatcttccccaacccaaagacatcgtaacttcgctggccacaaatcccatccaaccacaatctaacccacttgcttaagcttacggatcccccacattcaactttgccggggtaccgaagattggtgagcgtacagcccaggacgttttgttgttt

SEQ ID NO: 33591 - DNA, 111 bp, Oryza sativa
  Clone ID: PAT_MRT4530_37689C.1
gacgaggaaattgatggcacatcaattgagtagatgcggaaatttctggtttttagttacgggtgtgtagaccaagccgatgccaaagtgctgccgtttaatcgaatacaa

SEQ ID NO: 33592 - DNA, 3415 bp, Oryza sativa
  Clone ID: PAT_MRT4530_3768C.1
gttttatcatttcctccactaccatgcgctggagcactccgtctcccacccgttgacccgagcgagctcctctactcgccgccagccgcttcgataagaccggactccaccacggcatcgatcgatcgggggcggcgcggccaaggggcggatcggagcggagccagcggcgacgacgaccgcatccactgtcccgaccctccaattccggcattcaacatcagataggccaagatgaacatcgccacaggggcaatgaacaccctcctccccaagcttggggagctgctggttggcgaatacaagctgcaaaagggtgtcaagggagagatcgaagaacttgagaaagagttgaaaggtatgaccgcagcactccacaaggtggctgagacacctgtggatcaacttgaccagcaggtcaagatctgggccagcgaggtgagagagctatcttacgacatcgaggatgccatcgacaccttcatgttaaagtgcaaggggcatgaacctgccacgagcttcaagaaggtcaccaatttgttcaacaagttcaaaaccaaccatcagatccacggtgtcatgaaagacatcatggaccaggtcaagaaggtcagcgaacgtcgtgataggtacatagtcgacgacaatgctgccaggccaactgttgtggatgttgattctcgcctagaagctatgtaccgaaaggcgacagaactcattggcattagcaagccaaaaaatgagctaactaagcaactcttggaatatgacggctcatccagccaacaatcaaatataatttctattgttggattcggaggcttaggaaagacaactcttgccaattcattatttcaggagcttaaggcaaaatttgacagctattgttttgtttcggtgtccttgaatcctgatataaacaagattctcaagaacattcttctccaacttgatgagaaaatgtattcccacatagatgaaacatgggaaacgaagcagctcatcgacaaaattagagacttcctcaacaatagaaggttcttgtgcgtgattgatgatgtatggaaaaaatcagcgtgggatactatcaaacttgctgtgcaagatgctaaacttggtagcaaaataattgtaaccacgcgaaacaaggtcgttgcagaacatgcaggcagtggtgtttatgaaatgaaacccttatctgatgatgattccagacaattgttctgcaaacgaatatttgactctaacgatgactgtcctgctgatttgtgtggtgtcactgagaaaattttgaagaaatgtggtggtgtaccgctagcaatcatcactacagcatgcctacttgctagcaaaccaaggaattcagaggaatgggacaaggtcaataagtctatcagtttggggcttgagaacaaccttgatgtggacaagatgcggaagatattaagcctcagttacaacgatctaccttttcatttgaagacttgcttgttgtctctaagcaaatatcctgaggatgaactaattagaaaagatgttttgatatggggttggttagctgagggttttattacagatgaaacacgacctgtagggacaagcttgcaggagattggagagagctacttcaacgagctcatcaatcgaagcttgatccagccgatgagtgaggacaatttttgggatgaagatggtaaggtgcatgttttttgggatgaagatggtaaggtgcatgcatgcaaagtacatgacatggtgcttgagctaataaatcagctgtcagtagaagaagattttgttacaacgtatttatcagatggtcaacaaacaggtaaacatacatgtacagcacaaaagaagaagattcgccgattatctctccataacagcaataaatcctatgcctcaccagaagcaagagaacaattgtccaaagtaaggtccattactatcttcggcaaggtcgactcgataccacccttgtcgagctttcatgtcctgcgtgtgttgcagcttgaggactgcagtggaatggacaagaaccatcttaatcatctcgataagctacgcctcctaagatttctgcgtctagggcactatagtgccactgagctccctgaaagcattgggaaactggaatctctcgaaaccttggacataagaggtgcacgtaaaccaagttcttttaaatctcataaggtactgtttccaatgtcttttgccaaactaaggaaactgttgcggctatatgctggcagagtgaagctggcgcaaggtctgatgctggggaatatgaaatctttacaggagcttgtaatagaagctacccgaaaggtaataaaagagattggtaatttgacagagctaaggactcttaggatcgttttcggtagtgaaaaaacatttgagttaaaggaatccattcaaacgtctatacaaaggctcaccaatttgcaagacctagatttgagaaataatattagttttgaagaaatcatagacatgcaacaggttccttccggtctccaaaggttgttcatgcccgattcgtttatgaaagcattcccatgttggatcaattcgtcgatgctctcccacctcaccaccttatccatttgtctggatttcgaatatctccagtctgaccaccttgatcgcctcgctgagcttccatctcttcgctttctcaggctacagttagcatttgtttcggaacaactacaggaaaagctcactatccacagaggtgcatgtgcatttcggagtttaaaagattttcagttttatagctccatgatgccatcgtttcaaccaggagctatgccccaccttgaaaggctttatctttgtatttggaccagactaaggaggggtggcttaaatgatttaggtttggagaatctctactcccttcggcatgcaaccatttattcctttgatgatgacagcaaggctgttattgaagaggcacttaaggactatcctaatcaagcagcgctcaaaatacaatcgatgatgatgaactaactcaggcgtcttactcgtcatgtaattatggtcattcagtatcacctgcaatctatcatcgtaagcccaacaagggagcacacgaacaacaggcgatgcaacagagtgggtgaaattatcagtttatctatctatctatctatctatctatctatctaccagttgttttggttgtttccattccatgaaattagaatggagttgtttagttggctctctataaagagcagtactatgttatttggaattcaagcaagaagatataagaccctgttagttttcatattattcatggtgggattgttgaaatggattatttactccacggattgaaatatatattctccactgcatttgttaaaaaaaaaaaaaaaaaaaaaaaaaaaaa

SEQ ID NO: 33593 - DNA, 2298 bp, Oryza sativa
  Clone ID: PAT_MRT4530_37690C.1
atgtcgagtagctttcgcagtcggaggacattgccgatcgaggaggatggcgaggacgcgccacgcgccgacctgctgcccggtcaccaacgctccgacaggagatccgctagctccaccaaccttgaccagcatgtcgtgctcggctcgcactcgcccgggcacgtcgtcgtcgacttgcggccaacggcggccaacgtcgacggcggcggcaagctcgagctcgaccccgtcggtcgcatgcccgtgcatttcgtgcttgcgttccacgacctgacgtacaacgtcgggcggccgaggaggatggcgttttggcggcggagccgtcacgtcgagaccgacgcgacgactgcacgcgggggcggcgcgagggcgcgggagggggcgctgctgctcgacggcgtctccggggaggcgcgggagggggagatcatggccgtgctcggcgcgagcggcgccggcaagaccacgctgatcgacgcgctcgccgaccggatccagcgggacagcctccgcggcgccgtcacgctcaacggggagcccctcggcggccgcatgctcaaggtcatctcggcgtacgtcatgcaggacgacctcctctacccgatgctcaccgtcgccgagacgctcatgtactccgccgagttccggctcccgcggtcgctctccgcgtccaagaaggcgacccgggtgcaggagctcatcgaccagctcggcctgcgcgccgcggcgaacaccatcatcggcgacgaggggcgccgcggggtgtccggcggcgagcgccggcgggtgtccatcggcatcgacatcatccacgaccccatcatcctgttcctcgacgagcccacctccgggctcgactccaccagcgcgttcatggtggtgaaggtgctgcagggcatcgcgaagagcggcagcgtcgtgatcatgtccatccaccagccgagctaccgcatcatcggcctcatcgatcgtctcatgttcctctcccgaggccggacggtgtactacggcccgccggccagcttgccgctgttcttctcggagttcggccacccgatccccgacggccagaacccggtcgagttcgcgctcgaccacgtacgccagctcgaggccatcccagaaggaaccgacgagctcgtggagttcagcaaagcgtggagagagaaggcgttggcccgtgcagtctcgtcggcggcatgcaccggccgccacgacaagccgtcgctgccgcttaaggaggccatcagaatgagcatcgcccgtggcaagctggtgtcgggcgccaccacgagcaccggcgacaacggcaccgcggcggcggcggcgtccacggccaaagtggcgacgtacgcgaacccgtggtgggcggaggtgtgggtgctggcgcggcgggcgttcaccaacacgcggcgcacgccggagctgttcctgatccggctggccacggtggtggtgacggcgttcatccttgccaccgtgttctggcggctggacaacacacccaagggcgtgaacgagcggttcggcttcttcgccatcgccgtgtccaccatgttctacaccagcgccgacgcgctcccggtgttcctcgtggagcgctacatctacctccgggagacggcgcacaacgcctacaggcggtcctcctacacggtctccaacgccatcgtcgccttcccgcctctggtcgcgctctccctcgccttcacggccatcaccttcttcgccgtcggcctcgccggcggcgccgggggtttcctcttcttcgccctcatcgtgctcgcctccttctgggccgggagcggcttcgtcacgttcctctccggcgtggtcccccacgtgatcatcgggtacacggtggtggtggccgggctggcctacttcctcctcctgagcggattcttcatcacccgcgaccgcatcccgagctactggatatggctgcactacctgtcgctgatcaagtacccgtacgaggcggtgatgcagaacgagttcggggcggaggccgggaggtgcttcatgcgcggggtgcagatgttcgacgggacgccgatggcgaggctgccggtggagacgaaggtgagggtgctggaggcgatgagcaggtccatggggttggaactgaacagcggctcgtgcatcacgacggggccggacatactggcgaggcaggcggtgacggagctcggcaagtggagctgcctctgggtcaccgtcgcgtggggtttcctcttccgcgcgctcttctacctcacgcttgtgctcgggagcaggaacaggaggaggtga

SEQ ID NO: 33594 - DNA, 294 bp, Oryza sativa
  Clone ID: PAT_MRT4530_37691C.1
atgggccgcgggtgctatatgtgggccaatccatccgtggccgtgtacgcggcgccgtacccgaccccgttgggccgcaggtacaaaacccttccgcgtggagttcagacgacggagaagagggcaccgaccaccgagccggcagcgggcggcgccaaccgggaaggcggttcgtccgccaccgcgagcgcgcgaggtggcgcggcggcggctccttcggtgctgcgggagcactttggtttggagaccttccgccaaacgaagatggactttcagagacctgaacaagcatag

SEQ ID NO: 33595 - DNA, 192 bp, Oryza sativa
  Clone ID: PAT_MRT4530_37692C.1
atggccagcgtgcggcgtgccaacgctggcgagcgagatgagatgtccgcggcgcggcatgtgcacccgcggctcttcgtttcgttgcgagagaccgaggccgagggaccagaccagagggtgtacaactactacagcgttcgcatcagcggatcgctgtgcaaagtgcgttgcgagaggggaggagggtga

SEQ ID NO: 33596 - DNA, 573 bp, Oryza sativa
  Clone ID: PAT_MRT4530_37693C.1
cggcacgaggctcctctctcactctttctctcctccccctcgctttctcttcctctctcggcgcccccgtcgctcgggctgccctccgcgcgcggccgctcctccccggtgatggtgatggcggcggcgccgaccccgacgacggcgttgacgagtgggcgacgacgacgatgacacgggtggtgccggcggcggatggcgacctcgggcaggagcggcgatggcgtcggcgggcggcggatccggcggcgccgccctcgggagggccggatccgccgccatagggagtggctacggtggcggcggcggcggctcggcgacctcggctcggcggcccgccatcccctcctcaccgccgctgacaacgacgacgacgaggcgaccctcccccctcctcaacaccgcggccgcgggggcggctcggccaccccgcgcggatccggtgccgccgacgataaggcagctatagctttactcaaagtgatttggcaacaagtagtataagcatatggcatgtcatcagatggatctgtgcttcgtaattgcaagcacgttaacatagtttagcttagc

SEQ ID NO: 33597 - DNA, 201 bp, Oryza sativa
  Clone ID: PAT_MRT4530_37694C.1
gctttgtcacaagaacactacagacttagaagcactacacttctgaaaagagggaataaaagcaagactgagtacaaccattgtactcagcaagccacaccaacgatgcagatctgcaaggggatacaaggatggtttgtggctatttgcataaaggcggttgtaaaacattttattgagcaaaacagtaaaactgttgag

SEQ ID NO: 33598 - DNA, 369 bp, Oryza sativa
  Clone ID: PAT_MRT4530_37695C.1
atggcggtggcggcgctcggctttgtcaccctcctcgccttctgttttttggcgccggcggcgttgatgttggggtactaccacgactcgccggagctagtcgtcgtcggctcaggttgctcgaggctcgtggagacgaactcgttcattgtgcaggacatcaaggcgaggacggatggagggtcgccggagaatgggttggtgctctacgggatgccgttcttgcgggctttggtttgtgcagagctgattgaccgctgcatcgggtccaagatttgggtgattatgaagggtgacaaggagctcgtcggcactctctgtgggttcgatgtgtacgtcaacatggtgctcgaggacgttactgagtag

SEQ ID NO: 33599 - DNA, 1074 bp, Oryza sativa
  Clone ID: PAT_MRT4530_37696C.1
ttaagtaaaactccgacatatgatgttgagatgtgcaaaacctccaccaatggtgatggcgcatagccaccgcgccgtcaaccaccgctgctgccgtgaccagccgcgcgccgctgtcgccaccgagagcctcgcgccggccaccacgggcgctgtcgcggctgcctcagccaccgctgtcgtcgtcatcaccagccgcgcaccgccgtagccgccgtcgctcacccgctgccgccgacccatcgccgcgagctccgccgccaccgccgcaagctcgcccgcccgatctgttcgtcgggtggccaactccgcaggcgcggcctcgtgcccctccgccaccgtcgcggcctccgcgtcgtcgcgcccgtcgctaccagccgcaccctccgtcaccggacaagaagctgcccccgtcgccagtcgtcgtccggctccaccgtcccccagcagacgccgacatcctcccgccagcgtcgggcgccgccggatgcctccccgccagatccgccagatccggcacggatctggcagcctcgtcctccaccaccagcgcctccaaactccgccgccacccccgccaaatgctaccgcccgaacgaagtaccccgccaccagcaaccgccgcgccaggtccagccggtcggcacggatctgggcggtttccgcctcccgatgccggcagtcccccctgtcatgtgggttgatgtttctcaaagtttcagtgtggataaaatttacagacagatgctcgaaggagccattgggcgaccatcctataagtaccaaaatcttgatgccctagaaaataagctaaaagcggaattgagagacaaaaggttcttgctggcgctggatggtctccagtcggatgttgctcagcaagaacgggaccaactcagaagcactacacttctgaaaagggggaataatagcaaggctgagtacaaccaccgtactcagcaagccacaccaacgatgcagacgtgcaaggggatacaaggatggtttgtgtctatttgcataaaggcggttgtaaaacattttattgagcaaaacagtaaaactgttgagtaa

SEQ ID NO: 33600 - DNA, 1739 bp, Oryza sativa
  Clone ID: PAT_MRT4530_37697C.1
ctttgtgtttgtggtgttaactacgacacaaattaaactcgtaatttatagttacatgaacaactatgatggtacttatttcgagaaaacattaaaaaagttgagcagcataacaccataagggcatgaaacacaatggaatgctcatgatcgctacttggcaggtacgggtcacaggagacacatattgtgtgaagcagttacgagccaaactatagaggcacacggacctttggaaccaggtaaagatcattcttccttcggatggtgatacccatctcctcttccatgtctagattgcttggcgcaacaccactagggagttcccagtcgaaatgatatagcaatgaggctagagcaagctccatgctaacctgcgcaaatgccaaaccagggcacatccttcgtcctgctccaaatggtatgaactcaaagtctgtgcctttaaagtctacggtgctatcctcaaatcgctctggtatgaatgtctcagcattttcccaatgcctaggatctctgcatattgcccagacgttcacgagcacgtttgtacccttgggcacgtcgtaccccataatgttacatgtctcttgacattctctcggaagaagcagtggcactacaggatgcagccttagggtttccttgatgacaagcttcaagtatttcaatccgatcaaatcatcttctgacaccgattgctttcctcgaagacaatcacgtagctcagtttgtgccttttgcatcactcttgggttcctcacgagctcggacatagtccattggagtgtattagctgatgtctcactcccggcaccaaaaaggtcacgaacgacggctttgatattgcccatggtgagaggcatctggaggctcccatccttctgaaccctgagaagcacatcgacgaggtcctcgtcgtcgtccacggcgccggcggccctccgctcctcgtgctgcctcagagcgcactctatcagctcgaagttcttgcggggttcgcctccgcccgccgcgtcgtgccgccgacgaagctggccagcctcgacgacgggaacaggtcgccgaggctgaacccggaggtgatcttgatcgcctcggcgagaccctccaggaactcgtcccgcctctcgaaccggtcgccgatgatggtgcgcaccgccgagtcggagatgagcgccgcgatccgctcgctgacgttcacgggctgcgccgccggggcggcggcgacggcggcgacgaggcggccgacctcgtcctcccggatgcggcggaacgactggacgcggcgcgcgctgaggagctccaccacggcgatcttgcggagctgccgccacagcgcgccgtagggcgcgaacaccagcccaacgccgtcgctcatcaggacgcggatggtggagctccacggccgcgtcgcgaacgcgacgtcgtgcgtcttggtgatctccctggcagcgtcggcggacgaggcgacgacgacgcgaagctcgccgagcctgagcgacatgagcggcgcgtcgtgccggcgcgccaggtcggccatggtgcggtggacgagcgggccgcccatcgcgacctggtggaggttgccgatgaccggcagccgccacggccccggcggaagcctcggcttgccggcgccattaccggtcgccttcctcgccaccttgtggaggacgagagtgagcaagaggagagccaaggagaggcacaggtagccggtgatgtcttgcaccaaa

SEQ ID NO: 33601 - DNA, 254 bp, Oryza sativa
  Clone ID: PAT_MRT4530_37698C.1
ccaaataattgatcataatttcccaacaattttaaatgtcttaaaatagtccttggtcctctaactccatcttcagctcagaagcactacacttctgaaaagggggaaaaatagcaaggctgagtacaaccaccgtactcagcaagccacaccaacggtgcagacgtgcaaggggatacaaggaggggtttgaggctatttgcataaaggcagttgtaaaacattttattgagcaagacagtaaaactgttgag

SEQ ID NO: 33602 - DNA, 2836 bp, Oryza sativa
  Clone ID: PAT_MRT4530_37699C.1
gtctttctagattaaggtatcgaagtttgttttgagtgatccgaaggattgcgctttgtaagctaaggaggcggtgtattccccatagctggtgagcttccaagagatatcgtcggcctcgtctggtgatagtgttatctgttgaattgccgtccacatagtgaccagttggtcgagcaaattcgttgtcaccccatgtgcaatgggtaagtcgagaccttcaagccactgccagctcgagattgccttattgagcaaacggttctttctccgggagaccgaatacgctaggggtgcaacatctttaggccgtcgaccattaatccaagcagctatcctagaagctaatcgtgttcccgttgccgatttgaattttgacggctaccgcgaagaggagtttgtcattgttgttgcacaacgtctccattcccacccaagcattttctagtgacctccacttgtgccctagctagtgaaggtgtagggccgtcacaaatttctcgaggttgaggatcctcatgcaagttttgatccagttgaccttgcattttctgccagtgatgtctcgagatctggcccagaggaaacattttcgttgcttgtcgagaacttccaaggattctttgttcaccttgagggcggtgagaaggtagacaggttgcgaggtgagcatagatttaaccaaggttgttctacccgtcagacccaggttcctccctatctacccagccaggcgtcctaccgactaatcgaagaggggctagaggtgcactttgtgcaatcgaccgagcattagaggtaggcctaaatatttcagcggaaaggctgtccttgtgacttgggattcccccaggatggtgtcgatgtcaagattgtcacacctgattggtgccaccagcgatttctggaagtttgtgcgaaggctcgttgcttctccgaacttctcgagaaggctcgtgggagcatcaataaattgtgttgataaaaaccacggcgcatctgcatagagagaggttcaaaggtgtgcatgcatgcctctcaaactgctgagaatctttagctccgtagctttgcccataatttttttggagtgggtcaattgcaaggatgaagaggagaggggacagtggatcgccctgacagagtccacaaccatggcgaatctcctcccctgggatgccattgagaaggatctttgaatgggaggttacgaggagggcccctagccaatttatccaccgttgcgggaaaccctgatgctgaagcaacgccattaggtaatcccaacgaacgaagtcggaagctttggagatgtcgagcttgaacagcagtgtgggtcgcttgttcctgtggtagcttcgagctaggttgcgcacatacgtgaaatcacagttagaaggattcaagtgatacataccaagaaatcgagaatgaggtcatgatgatcttgtcgctaattacttttccgcaaatcctatctacaccgatgaaatgtttcgtaggagatttaggatgagacggccgttgtttctgcttatcgtacatgaacttagtgagtggtctccttatttcacccaacaagttgatgcaactggtaggaatagtctttcaccgcttcaaaagtgtacagcagctatcaggatgttaggttatggaaccgcggctgattaacttgatgaagtcttgaggattgctccaagcacttgtttagaatgtttgggaaaatttgctgaaggggtgattgaaaagtttggtgacgaatatctacgcccgccaagagccgatgaattggaaaaaatcttacaagaaaatgaggctcgtgattttcctggaatgtacggaagcatcgattgtatatattggccatggaagaattgttcgaaaggttgggcaggcatgttcactagtggtaacaaaggcgttcctactatgattcttgaagcagtggcaactaaagatcttcgtatatggcatgctttttttggtactgccgggtctcagaatgacataaacgttctaaacaagtcgccactatttattcaagcaataaaaggggaagctccaacggtacactacaacgtaaacggaacacaatatgacatgggttactatcttgccgatagaatatatccagaatgggcagtattcgtgaagacagtgacggcccctcagttggcggaagacaaattatttgcattaaagcaagaaggggcgaggaaagatgtcgagtgcgcatttggtgtgctgcaatcacgctttgatattattcgtcgaccagcaaggttatggaagcagggggacgttatcaacataatgcaagcttgtgttatccttcacaatatgatagtggaagatgagaaggaagcaattagagatgtcttggatttgaattataatccaagtgcaacgatagtgctcccgcctgaagtgcaaagaagcgacaacccagatgtcacgcccagaaatttagcccaaatttccagactattttgtgtattaaatccctgtccaggaccagccaggaagaggcacttagtcctcacaccgaaacaaaagcagcagcagcggaaaaaggcgatcctagcggggcttcagctccactccacaggcaaaactcaactggggtctgagccttggtcctctaactccatcttcagctcagaagcactacacttctgaaaagggggaaataatagcaaggctgagtacaaccaccgtactcagcaagccacaccaacgatgcagacgtgcaaggggaacacaaggacggtttgtggctatttgcataaaggcggttgtaaaacattttattgagcaaaacagtaaaaccgttgag

SEQ ID NO: 33603 - DNA, 613 bp, Oryza sativa
  Clone ID: PAT_MRT4530_3769C.1
atcctgtaacaacacataaatttggcagtaacatatcatgttactacccttctgggataatgttgctggcgaatcatagtaacgtgcaggaaaaaataatcttgggcatggaagggcgctcctcaaatgaaatatcatcagctgaagctgttttggtgggagcactgtcttctggtgttaacgcgccaacgtggtttgtgctcaagatcacattcttgctactggctttctgttttactgctatgctttctctagcattcttttcaagtgacttcatgattattgcacatgttcttttgcttgtgaccattggcacggtgctatttgtgcttctcaacaggtttctggcagaaactggtctggtaccagttgaacaacagatgaaggagatgggtattcataaaatagaagctacagagaaggacaagggaaactaagcctcttgcttttattgacatagatgacagctcaaaatattacatcattgaacagtgtccttttgtacagactgtatatgctcattcaggcatggatgtaaatttcaggctgacactaacacattttgatgaagctacatttatctaggaatataccacttttaggaatgcttgtc

SEQ ID NO: 33604 - DNA, 431 bp, Oryza sativa
  Clone ID: PAT_MRT4530_376C.1
aattcggcacgagctcgtgcgaaattcggcacagaaaaaaaaataaatccaataacaccacaaggagcccgaagcgaggagagagagagagatggygctcgcaatcctggcgaggaggcgggcggcggaggcgctgctgcrgcggccgctgggggcggcgggggtktcggcgctgagggcgtcgtacgmagcggtggcgggggaggagagcaacgtggtggtggtggcggcggsccgagagggatacgwwagcggcgatcaaggcggcacatctdggctctcaagaccacctacatcgagaagagggacacctcggcgggacatgyctcaacgtcgtctdcatcccctmcaagtctcttttrcactcatctcatatrtaccataaagcaaaaagttcctttacacaccatdagagtaaaattttccaatct

SEQ ID NO: 33605 - DNA, 337 bp, Oryza sativa
  Clone ID: PAT_MRT4530_37700C.1
ttttgtggttttaaatttttgggggtttttttttttttttttttattttttctattttcttataatttttctttttttctttacggggaaagagtcttgcacaccacttatttggacccgggaaaatcaccccgttgggaaaatcgagcaacacaagctgaactcaccccttcacccgacagggtgtcactggcccaggccggatactcttgatataaacagtagaacctcgcatgcagcaaaaaaaatggtattattcaccctttgcgactacacggaagaaaaagggggattgttaacccccccccaggccttattttaaaagggccaaaacccc

SEQ ID NO: 33606 - DNA, 613 bp, Oryza sativa
  Clone ID: PAT_MRT4530_37701C.1
atgtcgcccgaccaccagctccgtaagctacgaggactcgaggtcgaggaggtagcaagcatgcggcgagcggcaggggcaggcccactagtgattcaaggtattgagatgtataccaagatttttggacaaaaggcaaaactcaactggggtctgagccttggtcctctaacttcgtcttcagctcagaagcactacacttctgaaaagggggaataatagcaaggctgagtacaaccaccgtactcagcaagccacaccaatgatgcagacgtgcaaagggatacaaggacggtttgtggctatttgcataaaggcggttgtaaaacattttattgagcaaaacgaggtgtacaactgtatccacaagacagccccacgacacgtttctgtgcgccgacatgtcaccatgacataccggaaagaggccgtgacaggacccttcgcatatccccctctaaccgatcgcaccagacctgagggttcgcccccgtccccagcaggcaacgggcagccctcctctcgtgccgcggtgaatccggaagccgatcaaccggacaccccggccgacccaactccatcacgcccaccctcgcctgggtacgtcggctag

SEQ ID NO: 33607 - DNA, 325 bp, Oryza sativa
  Clone ID: PAT_MRT4530_37702C.1
acccgggataaaaatgttcactggctgagcggtactttcattgttgtagtccgctctccacagtaggcgcagatttttttctcccgttaggggggtgtccagttgtagtctgccgccccactcggtggagtcaatttcagactgaaaaatactattgcccaagctaacggaggctcggccgtcgaaagggaaaaacctagtcagataatcacgatagtagatttgtcccttaaggttgccattgaggacgttactgtggctgtaatcaaggctgactacggtgttattgctggtttggggggtatcaaggtccagcccgtcaatc

SEQ ID NO: 33608 - DNA, 1415 bp, Oryza sativa
  Clone ID: PAT_MRT4530_37703C.1
agctgatgagctgagctaatcagggcagaacaaaggcaggaggatatagttttccaagatcctagggccggcctgcatcaaaaagaaggatgcatccgagcggcggcgcgctgtcggtgccaccggggtttcggttccacccgacggacgaggagctcctctactactacctgaggaagaaggtggcctacgaggccatagatctcgacgtcataagggagatcgacctcaacaagctcgagccctgggatctcaaagatcggtgcaggatagggacggggcctcagaacgagtggtacttcttcagccacaaggacaagatggatggatctagtatgagcagcagcagcacgcagcagcaggcgcaggttcctcctggatttcgtttccacccgacggacgaagagctggtggattactaccttcggaagaaggtggccgcaagaaggattgatctcaatgtcatcaaggacgtcgatctctacaagattgagccatgggatctgcaagagcgttgccggatcaatggcgggtcggcggcggaggagcagaacgaatggtacttcttcagccacaaggacaagaagtacccgacggggacgaggaccaaccgtgcgacggcggccgggttctggaaggcgacggggcgagacaagcccatctacgccaccaagcagcacagcctcctcgtgggcatgaggaagacgctcgtctactaccgcggccgcgcccccaacggccacaagtccgactggatcatgcacgagtaccgcctcgagaccaccgagacggccccgccgcaggaagaagggtgggtggtatgccgggtgttcaagaagagattacccacaacaagaagagattcagaccatgacgcaccttgcggcagctggtacgttgatgaagatgcaccgggcgccttcatgtctccgatgatgatcaccagatcatcaatattgcgcccacaccaacaccacgccggcatcacgctgcaagagcaacacctccacaccacttacaagcacagagacctcactactaagattcagcagctccaagtccctgcggcaggccatcatctcctcaacaccatgccccatgacctggagagttctacttcctccttccattctcttttggtctcacctgatcaccaccaaatcaacatgcaccatgctcaggctgatcccttctttgacgacatgcatgcagtcgatcaagccactaccactgactggagagttcttgacaagtttgttgcctctcagcttagcaatgatgctacaaacaagcctgcggatcattatactgatgaaggagacattcttcaggtcagtgacaagcagcaagaggtggcagccgccgattatgcgtccacatcaacgtcaagcagccaaattgatccatggaagtga

SEQ ID NO: 33609 - DNA, 429 bp, Oryza sativa
  Clone ID: PAT_MRT4530_37704C.1
aaggtggggcagggcacgcgcctccccgcgcagaactgcgcgaggcccggcaccccgccccggggggcagaacggaacacatcgacgagggtccccgcccacacaaccaagtgcggcagcgcacgcctgcccaaagagcccccgggggggaccacccaggcccccgctccgcggcccggtactgatgcgccgcatggtgaggcggccgcgggaggcatctcgcaagggaacgggggaaaaccagggcccgccgccgtccccccggaacgcgcccccgtcggccccccactaccccgcgagccggcgaccccccggcaaagcacgcccggctgcccacagcggccaacccctagcccccactcccgcgttaaccatgcgggccgtgccagcgtcgctcccatccacattgatggattcccatcaatatga

SEQ ID NO: 33610 - DNA, 465 bp, Oryza sativa
  Clone ID: PAT_MRT4530_37705C.1
atggctacacaactttatcgctgggcgccttcatattcattgctggctgacctgactgttgccgactggtttcttcgcctccacggctatacaacttcatcgctttcgtctgctgtggctactgcggcctactgcatcaccaagaggcagctcaagagtatatcagctgagactgagaggtggtgtggccaccagctcagcaacacatttgctgagagacctggaagacgccacgtcggtgacgacgaccctccagctccaatccggatgcgaggcggcggcgtgcggctggtgaagcgaggagacagcgcgcgcggctggcgacgcgaggaggcgacgcagtggcgcaccagcgtcgacggcgatggcgacctcttcccatctgacgtccgcgctctctgctgccttctcgccgagagcctgccggcggtgctagatgatcgattcgccacctgcaaggggtag

SEQ ID NO: 33611 - DNA, 1146 bp, Oryza sativa
  Clone ID: PAT_MRT4530_37706C.1
atgaaatccaagcattacatcacaatacctgcaaagcactgtttgatctccttttccaaaactatattaatcttgccggcaactaaacaaaccaataaatgttcactacatttatctgccatccgctccacttcgttcagttccctgggcttcggctgccgctgccgcttccgcttccgcttcctctcctcgccgccgcggccttccctccgccgcgtgactcgatggagcgcggcgtccctctccccccgagcctccctcccgtctccccggcgtgtgatcgccgcggcggcggcggccacggtggtgctcgcggtgatgaaccgggtgctgtacaagctggcgctcgtgcccatgaggaattacccgttcttcctcgcccaagccaccacatttgggtatgttatagtatatttctctattctttttataagatatcatgctggcattgtcactaaagaaatgctagcacttccaaaatcacgcttcatgttgattggcttactagaagcactaggtgttgcttcaggcatggctgctgcaggaaggaaatacagagcaaatcaaatatttggatgcctgctcgtcacagcgggggtaattctagctgtggcaagtggagcgaacagtggtccatttctatctgatgtcaagctgttctggccagcagtactgatggcttcgtctgcatgtcatgctggtgcatccataatcaaggaatttgtttttattgatggtgcaaaacgccttaagggaaagaggcctgacatatttgtggtcaactcctttgggtcaggttttcaggccctgtttgtcttcctactccttccgtttctgtctaacttaaaaggcatcccgttggctgagcttcctgcatacataaaccgtggtgcagcatgctttctgaatattggagttaagttttcagattgccatggagctcctttgctgccactgctcttcatagctatgaacatggccttcaacatttctgttttaaatctggtgaagatgtctactgcactggttgcttcgctaacagcaactttagcaggtatagttgtgtgcggtcattttcttaggaaacgaatgctaaagtattggaaacatctatgacccgtgcatatcattttgtaggtttgtgca

SEQ ID NO: 33612 - DNA, 1385 bp, Oryza sativa
  Clone ID: PAT_MRT4530_37707C.1
tttttttttttttttccactcgagaaagcagcagattacgaatttacattgcaccacagaccacggttcaatacattgatgaaattgatagttgtggcagcactttctctacaagttaaaaacaaaaacaaaaagagaaaaaaaaaagggggagtgtttttctggttctctattttctctttacagttgttgcagtaccctctctcagatcaaatgtagtcaggtagcagacactagaaaccagattagtagcacctctgtatatatatagtacattttaaggaaaaactagcaccaaggtctgatccggagtaggatctcctgtgctcatcaagagtcaacacagctcatcatctgcttggagtttttgaagtgctttcttcgcataaatagttattgcagcggtagaaactgcagcaactgagaagccaaggccgttgtaaattatctgatctaccgacaagaatgaaccttgggtagtagctacggctaggctttggagaagtttcccactgtatattgcaaggaaggtttcatgtaccgttccagccattgaaccagcaatatatggcccatacttgacatttgtagccacagaggcatagttaaaaactagatatggaaatggagagatcctaagtaaggcaactgctctaaattgatggaaccaatccccttcaccagcaagtctaacaaaagctgctttcttcggccacttctccaaccacctgtgtattttagaatggaatgcggaccctataaagaatggcaacgacatgcctatgctcattgctgaggagaagaaggtagcaacacacttgggaaaaaagcgattgcgccgaaacatatcagagcaatgactggcctgctgaaagttcttgactcccattcaataaccggagcaatcacctttttaatgacgaggggtccgaggaagacgacggcggcggcggccgcaccggcgaggaggatcccgagggcggcgacctgcgcccaccaccggatcgcgcgccaccgcagcacggcggggcactccccctccccctcccccttccccgcctccttccccaacccggcctccacgtcctccgggatcctgatgtactcgccggcgccgcagccattggtggcccccgacatccccatcgtcggctcgtcggtgcggacaaggtgagccgatcaggcggcggcggcgacgaccatgccccggaggaaaaaaaaacgcgcagctcgctccccgccgccggatccccgctgccccgccggtgtgggtgggtggggaggcgaatccggctcgagctggcggattccgatggggctgggaggctagggtttgggtcgcggaggcgagggcgagggctcgcacgcgcttatgaggggagggg

SEQ ID NO: 33613 - DNA, 334 bp, Oryza sativa
  Clone ID: PAT_MRT4530_37708C.1
gtcccgttttcagagggatcgactgtctgcacgtgagaccatgtcacgaacaagacgcttaggacatcaacgatgggaacaaggctcgtgtcccaccattctgaagaccatcagtctgaactactaatgccgtttgagattgtgtagtcaaaatacgcacgctcagatgacaagctctccatcgttagaacgcagacgcgtatgactgctaagcaggagatcaaactggcaggatgcacgacatcctcaggcataagaggcatggcctacaagcgcgattatacatgtcgctggtagatcactaaatgatgagactgcttactagacgatagtg

SEQ ID NO: 33614 - DNA, 790 bp, Oryza sativa
  unsure (1)..(790): unsure at all n locations
  Clone ID: PAT_MRT4530_37709C.1
gccgccgtcgtcttcctcggacccctcgtcattaaaaaggtgattgctccggttattgaatgggagtcaagaactttcagcaggccagtcattgctctgatatgtttcggcgcaatcgcttttttcccaagtgtgttgctaccttcttctccttttatgtggatggcggggatgtcctttggatatttctatggctttttgataattacagcagcaatgagcataggcatgtcgttgccattctttatagggtccgcattccattctaaaatacacaggtggttggagaagtggccgaagaaagcagcttttgttagacttgctggtgaaggggattggttccatcaatttagagcagttgccttacttaagatctctccatttccatatctagtttttaactatgcctctgtggctacaaatgtcaagtatgggccatatattgctggttcaatggctggaacggtacatgaaaccttccttgcaatatacagtgggaaacttctccaaagcctagccgtagctactacccaaggttcattcttgtcggtagatcagataatttacaacggccttggcttctcagttgctgcagtttctaccgctgcaataactatttatgcgaagaaagcacttcaaaaactccaagcagatgatgaagctgtgttgactcttgatgagcccagggagatcctactccggatcagaccttggagctagnttttccttgaaaagtactatatatatacagaggtgctactaatctgggttctagggtctgctacctgac

SEQ ID NO: 33615 - DNA, 687 bp, Oryza sativa
  Clone ID: PAT_MRT4530_3770C.1
atggacccacaacaacagtatgtactcttcttcctccctctctctctctcccctttcttccttctcttttcttcttttcccctttccttccttcccatcgaccacgcagatgccaacggcgtggggaggcaggaggtggcgcagggagtccgcaagcgacagggacatcagcttgggaggggcggcgacgaagctcagggtggggatggcgacatcggcttggggggagctcgggatggggatggcgacggcgactggagcgtggatttgctcctcgccggcctcccttgctctccctcgccgccatgccttccatccctcgccatcgagccctccctcccttgccgtcgacggcgcccgggaggaggcggcggccggcaagggggaggcggctggaggggagttggcggccggatcgtaggcgggctgcttcctcccgcctccccccgccaacctcacccgcgctgcctcctctctcccgtcaacctcgcccacgtcgccttctccgtcggatcctccgccgcttttcgtcttccttgacgttgacagcgtcttcgtccccgtggtggcggccgacgcggaggacgacgcacgagcagcgaagcggtggtggcggcagtggtggtggaggaggctcgtcggctccctctttctctcctgggagcactccctcctcatctccgccat

SEQ ID NO: 33616 - DNA, 728 bp, Oryza sativa
  Clone ID: PAT_MRT4530_37710C.1
gtgagagatgtgagactaatcacgaaaaacattgctcaactcgcccataaccgcgggcacggctattcgaatagttttactctggccagaggtgtaccactgtacccacaagacacagcctcaacattatgtctaccatgcgtcgcgatactggaaagtacccgaatagaggctgtgacaataccccctgcacaacacaactcaccacagtgcaccattcctagatcataatcaccccctctataaatataaccagaggcatggactccccggcgacccccacggacttcttaccgcttcacagtctggcaccccgcaatgaatcatgttatacaaaaggtaaagtcgacgcgaccaccggcaaaagagagctcggttgggctatccgaggacacctacgcgaagaggacgacgacgcgaactcaccggtgcaagaaactacgacgaacgacgacgaacgacgaccggcgacgaggttcaacggcggcacggttcggctcaacaacgacgacggcgctccggcggtcttcggcggctgcgaaggggcggacgaggtactccttctccgtgcgcacccgaaggcggcgacggacggcaacggcgacggcgctagcggcggcgcgatgcgaccggaggatcgccagcgacggcggcggctaagacaacgtggcggcggcgctacgggcgacggctcaacttgggactagaggcaaatggaagaggacggt

SEQ ID NO: 33617 - DNA, 1053 bp, Oryza sativa
  Clone ID: PAT_MRT4530_37711C.1
atggagacgctcatcggcaagtattctctacgccttgccaaggttccccttaaatacctcgggaacgccagagctcctcttgctgctgttaacattacgttcagagcatatgaggatataagttcatggaacaggcacaggcggatctacccattaggcagggtgggtcaaccgacccagctacgacccatgtcgtcccacacctcaaagacccaggggaaggaggacaaggtggcgagcagcggtcgggacgacggggcggaggaagaggcgacgatgcgggaggaggacgggacggcgagcgatgagtgtgcttgcccgcgcgttcgccggcaggcggcgacggcggggaaggggaggggaggaagaggaagtggcacgctcctccctttgccccatcgtcctagctgccaccttcgccgccacctcctcccggtttttgttctgctcttcactgagattgggctaggcttgacaggctttggagtattcttctcattcctgggaatcattttcttctttgacaaggggcttattgcaatgggcaatattctcttcctgtcaggtttgggtttgacaattggtctgaaatcaaccatgcaattcttcaccaagcctaagaattacaagggtaccatctcatttggtgctggctttttcctggttctcattgggtggcccttcttcggcatgcttttagaggcatatggctttgttgtactcttcagtggattctggccaactcttgtggttttcttgcaaaggattcctattattggttggatatttcaacaaccatttgtcacatcgttccttgaccgctacagaggaaaacgggttccagtgtagcacagctatgtttcttatgatgtagcaactgaaggttttggggggttacaacagcaagtggttctcccaatgtgtaatcctttttctctaaatgtttacttgctggtaggtttgttcttttgtaaattacaaccctggacctccactgaatcgtttggccaaagacatgcaaattctacaatgaaatggattggatcattggag

SEQ ID NO: 33618 - DNA, 649 bp, Oryza sativa
  Clone ID: PAT_MRT4530_37712C.1
cccacgcgtccgcccacgcgtccgcccacgcgtccgggtcttgacagctgccaagatattaatgagtgtgacgatcctaagaagtacccctgctatggtaaatgcattaacaaacttggaggatttgattgtttctgccctgcgggaatgagaggaaatgcatctgttggaccatgccggaaagatttcccactgggaattggtattgcaattggtttgggtgttggtttcggaattctcctacttagcttgtctgtggtgtttcttatccgtaaacagagaagcgacatccaaaggcaactacggaaaaaatattttcagaaaaacaaaggccttctactagaacaactaatatcttctgacgaaagagctagcgatagcacaaaaattttctccctagaagagcttaaagaggcaactaataactttgacccaacacgtgttctcggtagtggaggtcatggtatggtttacaaaggtatcttatctgatcaacgtgtggtggcgataaaaaaaccaaacatcatcagggaagaggagattagccagtttatcaatgagggtgtaattctctcacaaataaatcatcgccatattgtcaaactctttggatgctgtcttgaaactgaagtccctctattagtgtatg

SEQ ID NO: 33619 - DNA, 663 bp, Oryza sativa
  unsure (1)..(663): unsure at all n locations
  Clone ID: PAT_MRT4530_37713C.1
gtngtngtttccgcaanaaacggggcaantngntgctgctcncggtnntgcttctcgngcgggtncattncggtgcnccgtcgcccccgccaancaggaggaggaggaggaanatggagaagggtnctgcgaggggcagtgtccaggccggggtcgccgatnccgaacgggcccctcaaaccatcattcctatctgctgcggcggcaatcgctgatctgctncctcccgtgctcgatcggtagctagctcgnctgcagttcatgcaaattgaccagctgctgagagcaaaaacataggagtatatagacataagggtcaggttgtgggctgtgtttgtgtttgtgcttgaaatcacgtcgttgagatgtttaaccgggagaaattcagtctttgagagggacattgagttatcagcaagagtacaattatcgtcacgtgctagctgtgcgaccgaacatagctccaaaaattatgtatttcaatttaagctaatacgaggttccaatatatttaggatttttagattatatttttaaaaatttcactctttctactccattgaatcgattataacgagatgttttcttttcaactaagataagtgttataccgtattcgatggtaatcataacttcctttcccataaaaaaaaaaaaaaaaaa

SEQ ID NO: 33620 - DNA, 137 bp, Oryza sativa
  Clone ID: PAT_MRT4530_37714C.1
gaaacaaattgaaatatggacccaaattatggggggaatttattcatttgcgacaggaatttcacacattataaaaactaatacgaacaattaaattagcataatagcaaagcaacttacaaaacacaattcatata

SEQ ID NO: 33621 - DNA, 3031 bp, Oryza sativa
  Clone ID: PAT_MRT4530_37715C.1
atgggtacacattgcatttggttgctcggcgtgcttcttctcaaggccgccattgctctggtacttctgataaaaacaaccatgctaatggtatactacagtaatatactggtaatgggtctgataatcattttacgtgctcttcatgttgctgcaattcgactgttaggtgatatgtcctgggaacttgtagagactatgctgacggaggggatgatagatgccctggctaatactgttcgcgatacccttggctctctaggtattgcgtctccaggtgggaagacaaacacggcattgtcggcgcctttaactactgcaccataaggggccaataatgtcaaaggcctacctcaaccagggaatcatgtacatccagggtattcatttctgaatcatgaagtccaaatatcagaactacctccagcaggctgttttcctcgcagcatggttattcctgcttctctcacagttcatttggagttcatccaccgcatggataaagtactccagaaaaattgcaccctatccgttgttacaaaaacccagcagccacttcaatcggaggaagctcatctatttctctacactccacgtctgaaggttctgatcttattcattgaaagagcccgacaacttcttggtggcagtgctgcttctgctctttcacatctcgcacaacgaatccagagagattctggcacgagtgatgcatctatacgtagccagatccagaatgaatcagctcagctgggagtagcaatgcagcatttgggtgcaatgtagccaatgcattgagtgcaaatcaacaaggccaggatggggccatcccctgctgatgcttttgtcaatgctggatcttctgtttatataaactctgcaggaccgaatccaatcatggttcagccatcttttcaaaatactcctccttttggagtttcgagcataccagtcctcggtggaatttctggtgccttgggtattgtgcaggtatttctccttcaaacacatctgatcccaatttagcatcggaagacagcagcactgaaaatgctcccaacatcggcagtattcaacaacatctcaatgcatggattgccagcaaggacagttattgcggctattcctgcacggtccacggctgaggctccaaaccatgtcctgagtgttatcctgcctgttcaagtgaggagtcaagtagcaatgcctaatcaatcaacagtttctcaaggttctcagactgcagtgggcggtggatctcaaccacaagcctctgtaggtggtgttgctagcattccttctatagtggcacaggtaactgcacaagtagccaatgcattgagtgcaaatcaacaaggccaggtttcatcatctgcgcagaacacagtagatcagggatctcgctcggtcacaactaatggagttgacaatgtggattctctggtatcagcaagtacgcaactgcaaaatgagctgtcagattctaacaatggacgcacttcactaaatgcacaatctcttgtagctggagcaggtatttctccttcaaacacatctgatcccaatttagcatcggaagacagcagcactgaaaatgctcccaacatcggcagtattcaacaacatccagagatggaagggatccatgcagataatgtcagaaaaccttctgaggaatcaacaacagccaacttagtggggcagatcacaaccacctgtacagatgatatttctgtgaacagatcagcagaaaattcttcacagaagaacattccattggatggagtatctgcacagtccattaagccatctgcaagtagtaggtctgaaccagtaggtcttggtggaggtttgcagcctaagaggcggagcagaacagcaaagccacctgggagtagcagtgatactggcgaagtcgtcaattcctctcgcatcagcaatagccaaaatgctgtttcaatgggccagcaggttctgcaagcccttgcttctcaaaatactaatgtaaacagaagccatgttacggattctccacttccatccactacttctcagttttctggtggaatgcctccgagaagacagggtggtgaaggacaagttgattttggcagtatgatatccagtgtgctaaacaacccagcttttggcaatctgttgtccaatgtagcagagcaaacaggcatgggttccgcaggtgatttgagaaacatggtggaagagtgtgcacagagccctgcaataatggatactatgagtaatttagtccaaaatgtggatgggtcaggaagaggtcaaggtggcattgacttgtctagaatgatgcagcaaatgatgcctgttgtatcccaagttcttggtggagctggggctcgtcctgctggtacaaatagtggacaatccagattgcagcctcggcgcagtgacatgagagtggatgatgcttcagattatggaaattctcagattgatctacaccaagctcgtgaacacattgagcaacatgactcccccagggatatcttcggtgcggtcctcgaaactgctgcacaggcttatggtgaagatgagagtattgaggacatgcttgaagagcttgtcagtgacccagaacttacagatgactacctgaaacttctgctccaacaagttcgccagaggatacagtcggcatctcaatccgggaaccagtcttgagcaatcatggcaaagaaggtgatccagatatagaggtgattgcataggcaaggtggttgaaccatgcaggtattcactgcagagtttatattttataagttgaaaatggacagaacccagtgtttggtttggtggtcatgattaggcgcctccgtggatgtacatgtgccgtgttctctaattttggcctcagagatgatgtttacaccacccactgcacttgctttaaatgttttacagattttgttagtggtacatagctatcatcaagagcttagatttcgtggaatttatgtggtttgccgatctgtcggtaatttaaaatcgtttgtcg

SEQ ID NO: 33622 - DNA, 960 bp, Oryza sativa
  Clone ID: PAT_MRT4530_37716C.1
agtcccccgcgctgctggtgggcagtcgtttccgctcccctctatatcacctccccaccccccccctcctcgccgccgccgccggccaccgccgccgccgccgccggaggggggagggggacgacgacggaggcgcacatgctgggcacgacggccgcgcagccgacgagcaggcggggcgggctctccacacctcgcacgaggcatggatttgggtgcggccgtcgacaagatgaatcgtctgcggttggcgattccctccgcttcaaagaatgtgagccgctgtgggaagcttgctatctgcagagcacaaagtgaagattctaaaggtgggggaggattcttgactggatttcttatagggggcgcaatcttcggaacattgggatatgtctttgctcctcagatcagcaagacgctagattctttattagatgaaaatggacaagacagtgaatctgatgaacatggccttgtaaagccacggtatggtcgatattatgatgaaggtttagagaaaacccgtcaaacactgggcgacaagataagccaactaaacttggcaattgacaaagctgcctcccggttgaagcgcgttgctggcaatgtggaaaaggaagctattaatgatgaatcagaagtcgagacttcttcattcaacgataatgagcttgtggcggaaaactgggtcgcgcatcgttttgtgcatggtgcgtctccttcgcactgtatgtttatgtcaggccgcagacccgccgtgtgaagccatcagcgcctttggaacagtaagtagactgcagaataccaaactgaaaaaatgttgtagccaatccatttatattgtggctaattttggggacattttttctgctaacatgtagctgaactggatggcctgtccaaccgattggcagcatgaaatgaatgaaacattttcgtatttgtgcccttttccctgat

SEQ ID NO: 33623 - DNA, 387 bp, Oryza sativa
  Clone ID: PAT_MRT4530_37717C.1
cttctcttgtcctccgtgactggtgaagctgtgagcgaggagcatatgtccatgggtggcacgaaggtgtggagaagcacgatgtacacacccaggtgcctcctcttctagccttgcacataatcaattaatggtgcggtgttcgttgcaacaaggtttctttggtggtccaattcttggtttccttccgttgcattctggggactctcttgatcgaaaggggaataaattttggtttccatcgtccatattggtgttaatttggtacaaatttgctaagttcttattgcaatcaattagattttggtgcaatggattaaatggctgggaaaaaaaaactcccctaaaaaaaaaaaaaaacaaaaaaaaaaaaaaaaaaaaaacaac

SEQ ID NO: 33624 - DNA, 142 bp, Oryza sativa
  Clone ID: PAT_MRT4530_37718C.1
gcagtttgactacctcttctatatggaccttgaggcatcaatggctgatccaaaaactcagaatgctcttggaaatttgaaggagtttgcaacctttttaagagtccttggaagctatcctacagatgtaaatgaagcttaa

SEQ ID NO: 33625 - DNA, 553 bp, Oryza sativa
  Clone ID: PAT_MRT4530_37719C.1
tttttttttttttttccagcacaaatcaactttcatatatatatatggctagaatctcttttcctaatctcacacaatctaattttcatatatggctagaatgccgtggtttcctaaatctactagaagaataccttctataacacaaggccacagaaagtatgccgatgtgtcctaacagatcattttcgacgtcagacagaacccatcattctaaggtacatgaacacccagaaaaatagaacccacaccccacaacaaaccccacaaccgcagccacaggaggaaactgcagagcttttactatcatcaattccaacaagaaagcgacactcgcccatggatggatcaaggtaagttatcatcccattcccatcgaaatcgcaactcttagcatcctgcttctgttgctgatagtagctgttgaaagcataagaaacgttggccttctctccaatgccatagcaggaacctccatagtcgagtgtggtacaatcagccatagagcaagcaagctttaagtgatttgcaacattatcaagattctgggcag

SEQ ID NO: 33626 - DNA, 3615 bp, Oryza sativa
  Clone ID: PAT_MRT4530_3771C.1
ataaggtagatggttgactatcacaggaggaagaatgtgataaacttacacatcagctgtcttacactgaagttgtggccaagttgcagcctgcagcagtgtcttttccttctaaaagtccaacatgctcctttcaccggcctaaccaggaaattgcagacttgactcgtcacttggggttcatcaagcttgactcttgacaacttgtctcgtactttcctgtgctaatttaactgctgttccgattcacatcccggcagattgtacactaattttagagaagaggcattgctgcccagctttatactgaaagcataacagattgtacactaatagactatgccaatcggagaagctgtgctgtccgcgttcatgcaggcgcttttcgagaaagcggtggccgctgcttccagcgagctgaaattccctcaaaacatagctgtggagctgcagaatctatcaagcagtctgtcgacaattctggctcacgttgaagatgcagaggagcggcagctgaaagatcaggcggcaagaagctggctttccaggctgaaggacgtcgcctatgagatggatgacctgcttgatgagcatgctgctgaagtcctccgatccaaacttgcaggcccatccaactatcaccatctgaaggttagaatctgcttctgctgcatttggttgaaaaatgggttatttaacagagatttagtaaaacaaataatgcggattgaggggaagatcgataggcttattaaagacagacatattgtcgatccgatcatgaggtttaacagggaagagataagagagaggcccaagaccagttcgttaattgacgactcgagtgtgtatggtagagaagaagataaagaggtcattgtaaacatgttactcaccacgaataactcaaaccatgtcaacctttctattcttcccatagtgggtatgggaggagtagggaagacaactttaacacagctcgtctacaatgatgtgagagtaaagaagcatttccagttaagaatgtggctgtgtgtttctgaaaactttgatgaggccaaacttaccaaggaaacgatagaatcagttgcgagcggattatcatccgccacaacaaacatgaacttgcttcaagaagacctctcaaacaagctgaaaggcaaaaggtttcttctagtattggatgatgtatggaatgaggatcctgatagatgggatagataccgatgtgctctagttgctggtgcaaaaggaagtaaaattatggtgactactcgaaatgaaaatgttgggaaattagtgggcgggttgactccttactatctaaaacagttatcatacaatgattgctggcatttattcagaagctatgcatttgcagatggtgactccagtgcacacccaaatttggaaatgatcggcaaggaaattgtccataagttgaaaggcctaccattagctgcaagagctttaggtagcttattatgtgctaaggacaacgaggatgactggaaaaatatcctagaaagtgaaatatgggaattgccatcagacaagaataatatcttaccagctctgagactgagttacaatcatcttccacccatattgaagcgatgctttgcattctgctcggtctttcacaaagactatgtgtttgagaaagacatattggtccagatctggatggcagttgggtacatccagcctcaagggcggagaaggatggaagagattgggaataactattttgatgaattactgagcagatccttcttccaaaaacacaaggatggatacgtgatgcatgatgccatgcatgacctagcgcagtctgtctccattgacgaatgcatgagactggataatcttccaaacaatagcaccacagaaagaaatgccaggcacctatcattctcttgtgacaataaaagtcaaactacatttgaagcttttcgtggatttaatagagcacggagccttctactgctgaatggatataaatcaaagacaagctctatccccagtgatctgttcctcaatttaaggtacctccatgtccttgatttgaaccgacaagaaattacagaattgccagaatctgttggaaaattaaagatgctccgatacttgaacctatcaggcactgttgtaagaaagctgccttcatcaattgcaagaactgaactgatcactggcatagccagaatagggaaattgacttgccttcaaaagttggaggaatttgttgtccataaggacaaaggatacaaggttagtgaattgaaggctatgaataagatcggaggacatatctgcattaaaaatctagagagcgtgtctagtgcggaagaagcagatgaagcattgctaacacttggacagctgcctctactcaaggttataatcattgggggttttcctaccattattaaaattggagatgagttttcaggtagtagtgaagttaaggggtttccgtcactgaaagaacttgtatttgaagacacgcctaatctcgaaaggtggacttccacacaagatggtgagtttcttccattccttagagaacttcaagtgcttgactgtcccaaagtaacagaattgccacttctcccatcaacactagtggaactgaaaatttctgaggcaggcttttctgtacttcctgaagttcatgctccaagatttctaccatcattgacacgcctacagattcacaaatgccccaatctcacatccttgcagcaaggattgcttagtcagcaattatcagccctccagcaactaaccatcactaactgtccagaactaattcaccccccaactgaaggattacgaactttaactgctcttcagagtcttcacatttatgattgtccaaggctggcaacagcagaacatcgtggcttactacctcgcatgattgaagatctacgcatcacctcatgctccaacataatcaatcctcttcttgatgaacttaatgagctctttgctctcaagaatcttgtcattgcggattgcgttagccttaatacttttccagaaaagttaccggctaccctcaaaaaattggagatcttcaattgcagtaatctggcctccttgcctgcttgtttacaagaagcctcttgtctaaaaactatgactatcttaaattgtgttagcataaaatgcttgccagcacatggacttccactgtccttagaagaattatacatcaaagagtgcccatttctggcagagaggtgtcaagaaaacagtggagaagattggcctaaaatatctcatatagccatcatagagattgacgatgatagtgccatgccagataggagcataaggagaagattatgctaaaagcttcttagcaactcaacaaaaagggtatgaattaattgccttctctagtttcttttgtctaaatataatagataaggctggctgtgaacatcatactcaaacctattctagccaaaaaaaacgaaggacgcgttgtagattcgctccacacacacactcgctatatctctcctcccccttccacgtctccggttcgcggagatacgaaccggcggtagccccgcgccgcggcggcggcgccgccgccgc

SEQ ID NO: 33627 - DNA, 344 bp, Oryza sativa
  Clone ID: PAT_MRT4530_37720C.1
gtgaggcgaaccaggcagcggcggcggctggctgggaatggctgcgacgtgcgaggagaggaggtgttggtctggcagcgggatatatacggcacgcccagcctcctaggcgtcggatttgaaggaaggcgagataagggaagacgggcgacggcgcgcggcatgcggcgtctgctcgtcatctctgttctccagctccgccgcgcgcgaagacctccttgcaggtacctccctatggtggtcagcgtccaccacatccaaaccagccattgatggggatggagggggacgcggacagacggacggacggaggatgctggcgccatcttggcgaccacaggctc

SEQ ID NO: 33628 - DNA, 303 bp, Oryza sativa
  Clone ID: PAT_MRT4530_37721C.1
atggcgccccattgtttggtaaaattgcaagataactgtactctcaaagcaggaaagctgtttggaatcgctgtctggaaatgtctttgttatcccccgaaagttgaagctcatggactatggtattcagcaaggccttgcagcgtttgtgattactgctgcttccagtcgcagctgaacacagacaagtctttttcatctgagaatgtttatcaaaatactaatattatgggtttctacgaaaccggaaccagacagatcttctttatctggaatttgaccacaaatctgacatatctttga

SEQ ID NO: 33629 - DNA, 486 bp, Oryza sativa
  Clone ID: PAT_MRT4530_37722C.1
atggagctcgatcgctcgcgagcactcaccatctccgatctcgcgaggcactacctgcaagaagtgcaacaccgaccgtacgcgagcgagcgagcccgccccggccgtgataatgcgcgatacagtgcggggccgatcgatcgggacgacgcgcgggggcggacgaaagcaacgcccgcgacgcgaaagaccactttaaccggcccatccgatatatatccgcgcgacaggagcaaaacggcaaaacgcgccgcaattattgtgtttctgccgtcacccagccaccccatgcgccgcccggccggcgctgcacgctggggagggcacgcggtcgcgcggctctggccgtcctcttggacggccgcgcgggcccggggcggaaggcacgggaaagcttaccaacaaatgagcaaactgcgatcttccccgtcgtccgactccggtacgaaccgcagcagcaaaggcacagctaggaggagagaataa

SEQ ID NO: 33630 - DNA, 201 bp, Oryza sativa
  Clone ID: PAT_MRT4530_37723C.1
atgcagcggtggtgccagccctgcatgcagcaaccgaagctgcggaaggaggccctctccggctgcggcggggaggcgggggaggtcgtgcgggctcccaccattcacaaggcgtgctcgtcttcgcgcggaaagatccggaaagcgaagctggggatgaggagtccagctcggcggccgcgtggtgggaaggcgatctga

SEQ ID NO: 33631 - DNA, 213 bp, Oryza sativa
  Clone ID: PAT_MRT4530_37724C.1
atggagtctcctcgatctcctggagccgacaattcaagagccagcccaactgtgatggaggagggaagaatcatctccgccagtattgcctccgttggtgttgacgggaggctcctcctccttgtcaccagtgttgttgttgtcgccggttgtcgacatgttggtgaagatgatgcagagcagtcgcgcttgaagcgctacccaaaaacatga

SEQ ID NO: 33632 - DNA, 882 bp, Oryza sativa
  Clone ID: PAT_MRT4530_37725C.1
atggcggcaattaagttactcaaaagaggcaagccagacttacttgctggtgctggacttggttgcattgagcatgatcccttaagccgaccggcgggtggtgtgggacgaggtcgccggggcgaggcgggaggggaggaggtccggcaacgtggcggtgggcgacaaggaggcggcggcctccggtttcccccggcctcagcccgtctcgccaacgagtgccttcgccgctcttcttccctgccggccaccggtcgcaccatgcgcctccggtctcccccgagtgccgcccatctacgccaccgagcggcgccgccatgcttctcccctgtcggtggtcggacacgccgcgcgcctccggttctcctccggccgccgctcgtctttgccctagaccccgacctcggcgcgacggcctcccctgtcggccaccgtccgcgccgcgtgcctctagtcttccccggccttagacctcagctcatcttagccaccgagctctatcgccgcttttctcccctatcggccaccggccacaccgtgcatgtccggtctcccccaagccgccgccgtgcttctccctgtcggcggtcggacacgccgcgcgcctccagttctccgcctcaccccggagaccgtaggccgccgccgccgtcgtcttcgccccggacatccgaccccggcacagcagcctcctcccacgtcgccgccgccgccggttctcctcctgtcccgcctcgtcctagcgacctcctccccaccccacccgccggccggttcggccaaaggagaaaaatcgaggaggaccgtgttcttggcggcgatgctgaccgcagtctgacacgatcttgtcaactaaaattcgcgatgctactgaatagctga

SEQ ID NO: 33633 - DNA, 263 bp, Oryza sativa
  unsure (1)..(263): unsure at all n locations
  Clone ID: PAT_MRT4530_37726C.1
cacacacgcacgcaccgtcagagcatcgacgacgagcgagagcccctcggcgncagaagacactcacggcgatggcggtgacgaggacggcgctgctngtggtgttggtagcgggggcgatgacgatgacgatgcgcggggcggaggcgcananccgagctgcgcggtcgcantcatngcagctgncgccgtgggcgagtcgncgtngcgcgnngcggggcagccgctgncgcgccccgtgtagtgctnctcgtcgctgggcc

SEQ ID NO: 33634 - DNA, 1405 bp, Oryza sativa
  Clone ID: PAT_MRT4530_37727C.1
atgcccggagggtgttatcaacacactcacaaccgtcgtatcgctagggatgcaattccccttcagacaaaggggaaaaaaatcgcatccgatccgaatccggcgagccgaatcaaatcctcccctcgagcaccagcggagcggaggagcgaattcgccggagacgagacccctcgccgtcgtcgattccccaggcgagcccgtgcattcgttcctccgcggcgagcagaagcggtgcgcctgcctgcgatggcggcggagaagccggctccggtgagggtgctgtactgcggcgtctgcggcctccccgcggagtactgcgagttcggcccggacttcgagcgctgcaagccgtggctccgcgccaacgccccgggcgtctaccccgacgagctcctcgcctcctcctcctccgccgccgccgacgtcgacaaggtcggggagcggcttcagggcgtcgggatctccgccgccgatggctccaccagtgcaggggatgcttctgcgtcgaagcaggaagaggtgaagcgcttgcctggtggtaaggtcaagaagaaggataaacaagaggttgtgattgagaagattgtccgcaacaagcgcaaatgtgttactgtggtgaagggtctggaattatttggtgtcaagctgagtgatgcttcaaagaagctggggaagaagtttgctacaggagcatctgttgttaagggccccactgagaaggagcaaattgatgtgcaaggggatatatcgtatgatatcgtggagttcattacagatacttggcctgatgtacctgagtcagccatttttttcattgaagatggaaggaaggttcctgctgcttgatgttttatggccacaaggcagaataccaatggagttacaaatatagtagaaatataagacaagagtatgcctgcagctaaggcatgggccttgcatgagctcatcaatgctactactccttcaaagacaaaaaactgtttcttttcatttctggtcttaagttcatcacaactggtgttatatcgacaactggtcccatgtgtatcaactttatcctgcaagttagtttggtattgctaagccatttgaagtggcaaatgttttgtgcgagcatcaggcttcatatttaacgacatgcaaagaagagtgcaaattagtagtgtttctgccctttctgctttcatagagaaaggttgtttcacactgcaagtttggatttgaatttgatctttcgttgagttctcgctcatcagggcttctaactgcaagttatggtttgtaattggggttgtaattgcagaattcaggatgatcataatagggtgtttttgtttgcaagaactacatatcatgcgggctgtagaataggcagagacgagtctgctgggcttctatt

SEQ ID NO: 33635 - DNA, 192 bp, Oryza sativa
  Clone ID: PAT_MRT4530_37728C.1
atggcgttcggcctgacgcgggagaagccagagccgtccaatctgatagacggggaagttgccgagttgggcgttgctgctgaatcggcaaaggaaaatgatgtcgtcgagccctacgacgccacactccgccaccttgatctcgggaagcgctcctacacggcggagatgcgatgcagcgccaaccaatca

SEQ ID NO: 33636 - DNA, 384 bp, Oryza sativa
  unsure (1)..(384): unsure at all n locations
  Clone ID: PAT_MRT4530_37729C.1
ctagcatgtncatatatatattaaagnntggtatgacaacttaaaaatgggataatctggtgccttcctctgaaagaaaaagtgcaactatagaaccattcagagtccacaaactgcccacaccatctgcattcaccacacactgaagaagaagaagagtatgcaaggagacatacaaatcactatcttcctggtctatgatgcataattgttgtggctatcagccttatctacggactagtataagttaacctatgctatcaagcaccgcgcaccaggtaatacgtgcggacacttccaagctagacgaacgtgacgcgcaccatacattttccttttacaagttaacaacgagacgtgaaagaccagtaaagggccattttt

SEQ ID NO: 33637 - DNA, 123 bp, Oryza sativa
  Clone ID: PAT_MRT4530_3772C.1
atggagacatcaattgcaccttggtgccagtcctatttgttggccaaggtgctgatttgtgccaagcaagagtgggaacacaccctggacaatgccattgttgctattgagtacgaccgttga

SEQ ID NO: 33638 - DNA, 243 bp, Oryza sativa
  Clone ID: PAT_MRT4530_37730C.1
aaaggcccactttggatgttggcgggaagccaacaaactgttgcatgttcactttacataattacgtacaatcttccaaaattcacaggatttaattaatgttagcactctataattaatcctttcttctactaaaagatactaaacaatattccattcactcatggtcttgatttttttaaaatatatctaaagacattaaattttgtcatattaagttttatagttattattatccgtact

SEQ ID NO: 33639 - DNA, 1139 bp, Oryza sativa
  unsure (1)..(1139): unsure at all n locations
  Clone ID: PAT_MRT4530_37731C.1
atggcggaaggcgccgccacgctgacgcgctgcggggctcccgtcgcgccgctgcggctcccgccgaggcaggcagcaaccatgatatccccgcgccccgcgctgtcctcctccagcttcctcgcgttccgtcccgcggcggcgtcgcccacgacgaacccctcgccgccgccctccccgcgcctccacgccgcgccgccgccgctctcggcctccttctccccgtcgacctccgtcgtcgcgccggaccacgtggccgccgccgccgccgcctcgttctacgacgtcctcggcctccacgcgggggccagcgcgcgggagatcaaggacgcgtaccgccgcctcgcacgcgccgtccacccggacgcctccccgcaccccgccgccgcgtcctccgacgacttcatccgcgtccacgccgcctactccaccctctccgaccccgacaagcgcgccgactacgaccgccgcctcctcctcctcgccgccgggcgccgccgcgccaccccgtccctcggccgctcgccgacgttccccgcgcgccgccgccgcacgtgggagaccgaccagtgctggtgaggtgaacaaccacccgcccgtgttccgacgagctacacagaagcgtccaattcgttgggagacgcaaagattccggcagccactaggcacgcacactagcttagcttgtggcagcgcactacgcttctagaagaaatggccctttactggtctttcacgtctcgttgtgaacttgtaaaaggaaaatgtatggtgcgcgtgacgttcgtctagcttggaagtgtccgcacgtatgacctggtgcgcggtgcttgatagcataggttaacttatactagtccggagataaggctgagagccacaacaataatggagcagagaccaggaagatagtgatttgtatgtctccttgcatactcttcttcttcttcttcttcttcttcttcttcttcttcttcttcagtgtgtggtgaatgcagatggtgtgggcagtttgtggactctgaatggttctatagttggagtttttctttgagaggaaggcaccagattatcccatttctaagtcgtcataccagactttaatatatatatgaacatgctagaagttgattcnanaa

SEQ ID NO: 33640 - DNA, 264 bp, Oryza sativa
  Clone ID: PAT_MRT4530_37732C.1
acggcgacacaagagaacgatggaggcgggcgacaaggctttgtagcggtgaaggagacagcaagcgagatcgagcggaggaagaggccgagtgaatttgttgaaggcgaaatcgtgtgtaggtggcgcgtcatcgagggcgagatcaaggggaggaggaagctatcgtcagagatactgattgcggtgacgacggcggcggaagtgcggatgatgacggatggtgcagcagcgttcaaaggcgcggcgacggcgttatcatga

SEQ ID NO: 33641 - DNA, 508 bp, Oryza sativa
  Clone ID: PAT_MRT4530_37733C.1
agaaaggaagagagtgcattggacttctcaaatgaaaataaaacatgaggtatgagctctcgttatattttcctatagaaagggggcatacgaaggcaaccaataagaattttggcatatccctattctttgatccaacgtacggtcctcataggaaaattttttctaaggattcaatcctccacaaatcctttgaaaatccttcaatgcaaaggagccctgaactttttgtgtacatgtttgcatagttgcattgcatcatgcatggtactctctctgtctatctctctctctctctcaatctctctgagtgtgcctgttttgcaaagagctggctctctggactgggctttgactctgcctgtttggaagcaagtaggattcccctgtgcaggacagatgtggaccagacctgtgtgagtcaagaatcaagatagctagccattgttttgatttgtttcaacctctttctccatggccatgcatgtgctactgctagctagctagc

SEQ ID NO: 33642 - DNA, 195 bp, Oryza sativa
  Clone ID: PAT_MRT4530_37734C.1
gtcaacgccgggagctcggcgatggttgcagcggtacctcatcgggaactcggtgacccaaatctatggcaagtcaatgtttggtggtcaacgtcgggagcttggcgatggttacgtcggcgattcgttgggaggtcggtgacacaaatccatggccagtcgatgtttggtggtcaacgccacctgccgcataag

SEQ ID NO: 33643 - DNA, 198 bp, Oryza sativa
  Clone ID: PAT_MRT4530_37735C.1
atggcgttaagtttactggcgcagtttctacctcgtgaagttgtcatcactcatcagctgcccaggcaatgcaatgcagaacagctggctgaagcgtcactcacgtccacggaccacggtccgccgctgatgatgataatgcccggcattgcaggggagatcgggcagctgcaagcagcagcaggaggaggaggatga

SEQ ID NO: 33644 - DNA, 467 bp, Oryza sativa
  unsure (1)..(467): unsure at all n locations
  Clone ID: PAT_MRT4530_37736C.1
cccntggatacaacgttgggacggccggccgcaggtggctgcagtaccgcctccgtcgcgtagtgcgcccgcagtccaggctccgatgaggcgatgaaccaggagcaaataaatagctcgctccgtccaccgaacgaagccataagataagtggcccagtgcgagctgtctatctaccaaaattataacaaaattataatagaaaaaatgatacctcgtgatatttttataaagactgtaaaattacttatctatatatctatatccaacagctgtgtaaagaagccaggcatctgaataatatttgacatcgccctagtttgataaactaggaagagaagaaaagcccgtccacataagcaggcatatgtttctcaaactttttattatatatcttaaatatgtgagatgtatatctatgtgtcttctttaagaataatattattctactttaaaaaaaaaaaaaa

SEQ ID NO: 33645 - DNA, 286 bp, Oryza sativa
  Clone ID: PAT_MRT4530_37737C.1
aactggcaaatggaaggtggcatgggattctagaaactgcatatttggacagaccaatccccaaacagaacaaatacaagatcaagactggtgggcagtaaacaaattatgctgggatttataagccccgattcattgaccaagttattcatacctctatgtccaacttcttagcagcgtagaacctccgtttcgaggactggctcccaaagaattgacatttcagccaatagcgatgtcacgacatacgggtccatgttggatgccagtcaacagttttttcaag

SEQ ID NO: 33646 - DNA, 325 bp, Oryza sativa
  Clone ID: PAT_MRT4530_37738C.1
attatggaggtcattgaagggacatttacatttggaataaattattaatacaaagtgtggaacacataatggactacaaaaggggatttttcaagccttaaaatagcaataatccagggacaagggtggccattgtaatacgtcttggacgctaactaagtgtactatacttgcaacaatgccccatgtaagatggaaggatactgggaaaattacatcagcgaattccggagtaatttggtctgaaaaaccgtggatccagatgtgactaacacagggaaggctggccgaacgctagacagccatggcgaagaagtacagattg

SEQ ID NO: 33647 - DNA, 366 bp, Oryza sativa
  Clone ID: PAT_MRT4530_37739C.1
atggggatcacgccgccggccgtgggatcctgccgcgtcccctccctcttgccggatctggtggaggggagccttctactgcccatgggagcccgccggtgctgccgccaccggtgcctccctcttgccggatctagcggaggggagtctgccgctgcccacgggagcccaccggcgctgccagtggggaacccgcgccgagcacaagagcccgccgcatcccctcccgccgaatctgttggagggaagggcacagccgccgggcagtggcttgcaatggccgccattgccatcctgaaacaccggtggatctacatcctcctgtcataccgtgatgctttgacgaagagcaaactggcgatttga

SEQ ID NO: 33648 - DNA, 781 bp, Oryza sativa
  Clone ID: PAT_MRT4530_3773C.1
cttcggcggcggcggcgccgccgccgcggcgcggggctaccgccggttcgtatctccgcgaaccggagacgtggaagggggaggagagatatagcgagtgtgtgtgtggagcgaatctacaacgcgtccttcgttttttttggctcagaagcagattctaaccttcagatggtgatagttggatgggcctgcaagtttggatcggaggacttcagcagcatgctcatcaagcaggtcatccatctcataggcgacgtccttcagcctggaaagccagcttcttgccgcctgatctttcagctgccgctcctctgcatcttcaacgtgagccagaattgtcgacagactgcttgatagattctgcagctccacagctatgttttgagggaatttcagctcgctggaagcagcggccaccgctttctcgaaaagcgcctgcatgaacgcggacagcacagcttctccgattggcatagtctattagtgtacaatctgttatgctttcagtataaagctgggcagcaatgcctcttctctaaaattagtgtacaatctgccgggatgtgaatcggaacagcagttaaattagcacaggaaagtacgagacaagttgtcaagagtcaagcttgatgaaccccaagtgacgagtcaagtctgcaatttcctggttaggccggtgaaaggagcatgttggacttttagaaggaaaagacactgctgcaggctgcaacttggccacaacttcagtgtaagaagctgatggtgtaagtttatcacattc

SEQ ID NO: 33649 - DNA, 2615 bp, Oryza sativa
  Clone ID: PAT_MRT4530_37740C.1
ctacttggacaaggggacacctatgggtataaatacaaggccccctaggaggagaggggagagaacatagacacggacaatcaacacacgagcacctaaatcaacacccaacacaatcgacatagaagccataacatagaagccgcgaatacaatagccggcgccccgcgcgtacacggccccgaggccgaggcgcggtggctcggcgaccgcgcgctgcacactcagcgctcgcgcagcagcatttccactcacttttccggtttccatcgcccgcaccgcggggcgagacggggcggcgagcccagtggtggtgacctggtgggcgtggagccaaccaaggcaggagaggggaagggggatgagcagctcggcgtggtgaggtgagccgagaggtggggcggtggctgctgcattgcattgggcgggagagatcgatcgatcgctcgccggcgctggggctgggatctcgcggcgctcgagggcgctgaggaggagctctgtggctgctgcggcttcttggtcaggcgccggcgttgtgcccattgggctggggtcaagctcgccgtgatctggggatttggatctccgaggcgcgttgcccgttcgctgtcgggagccgccggggcgggtggtgggtggaaggctccattgcggcagttcggtgggcggctgctgattgggggcagccgggtgggagatctggccgtcggcggggagctgcagatcccctgcctactgcgcgtccacgcttcgctgccgtggagattcttgaggaggttggtggtggggatggggatggtcggagcctacgcggatcccttcctgcctccgaagatggccttgtcggcgtacgccgcgccgatgggggagtatggccagccgcagccgcagccggcgccgcgcccgccggcctgcccgtactcgtcttcctcctcctcgccgccgccggtctccgcgtcgtaccattcttggcctccggcgacgtcagcttcgccgctccagtgcctcctgctgcagtctctccgtctcctcccccaccccgaatcgcctccccaccgccgccgcgtattcacatcaagccccattacctgccgcggtcatctgcgaggtcgcattcgaattcgacccgcgcatcaaggcctgctgctgtagtctatccgcctcctcccccaccaagaatcgcctctccaccgccgccgcgtaatcacatcaagccacatttacgtgccagcggtcatctgcgaggtcgcattcgaattcgacccgcgcatcaagtggcgccggcgacgcagcagccagctccgccgccaccgccaaactactttccctcttccggtggatcctcgctaacgtcagatgcatttttcatatcacctggatatcatccggtcaggttgttcagtgcggggagccatgggtatccatattcaccagctgattctgccattgggtactctaggatgctattcaccccagaaaatttggcagaattcacaaatggctttgcagagcaaaaccttttgggagaaggtggatttgggtgtgtttacaagggcatcttgccagacaatcgccttgtggctgtcaagaagctcaaaattgggaatgggcaaggagaacgtgagttcaaggccgaagttgatactatcagcagagtacatcatagacatttggtttcactagtaggctactgcatagcagatggccagcggatgcttgtttatgattttgttccaaacaatacgctttattaccatctccatggtcatcctcggattatacatagagatattaaatcatccaatattttattggatgacaacttcgaagctcaggtttctgattttggacttgcaaggctagcagctgactccaatacgcatgtcacgacacgtgtcatgggtacatttgggtatttggctccagagtatgcgttgtctggcaagttgactgcaaaatctgatgtatattcttttggagtcgttcttttggagcttattacaggaagaaaacctgttgatgcttcccagccactgggagatgagagccttgttgagtgggctcggccccttctcctcaaggcaattgaacatcgagaatttggtgacctccctgatccaaggatggaaaacaggtttgatgaaaatgagatgtatcatatgataggagctgcagctgcatgcattcgtcattctgcagcaatgagaccgcggatggggcaggtggttagagcactagatagtttagcagactctaacttgaacaatggccttcaacctggccgcagtgaagtattcttagaaccacagtccgaagaaattagattgttccagctgagagaattcggcagccgagattgtagtgacgagatgagccaagctagctggagaagccgaagagatttgtaaacatgttcagcacaagatcattaacaattttttggccattctttacatgtaattatctcttttacatgatttttttcccctctgaggcaattcatgtttctccatggaataaaattttgcattctttgaggagataagtaaatcattccttcccttttcaaaaaaaaaaaaaaaaaaaaaaaaaaaaaaaaaaaaaaaaaaaaa

SEQ ID NO: 33650 - DNA, 255 bp, Oryza sativa
  Clone ID: PAT_MRT4530_37741C.1
cccacgcgtccgcttcggcgagttcaagtgcatgatgcaggggatcaccgtgtggggcgcttgacggcggcgagcgaggccgccgtccttcgtcctctccccgtgtgtcatgtatgtatccacgcattgcaacgtgtctctgctcggcaaatttttcttgatcgtcctgtggaatcctcctgttcttgacttgatctgcttaattgtagcattgagaattttctgtgaccaaaaaaaaaaaaaaaacaacaaacc

SEQ ID NO: 33651 - DNA, 397 bp, Oryza sativa
  Clone ID: PAT_MRT4530_37742C.1
aaaagccacagggggggaagaaacattaaaagaaagaaaaggcccctttttcaggttttgggacaaaaaagcaaaaaacccgccttttacggaaccccccaggctttttggcagccccgggaacggattaaaaaaaaaggccccccccccggggggcccaggaaaaacaccgaaaaacccgttaaaaaaaacacccaggccaaaccggttgaacaccccccccaaaaggggcagggggatccccctggggaaccccagggggggggctaaacccagggggccccaaacccccacctcccgggggagaaaaacacgggccccacccctttgggccctaatttaaaaacaatttgaaagggggctggggacaaagacccccccccaagagcccccccca

SEQ ID NO: 33652 - DNA, 687 bp, Oryza sativa
  Clone ID: PAT_MRT4530_37743C.1
atggcgaacggcgcgacgagcggcggttgcggacggcgagaggcggacggacttcgagaggacctaaggaacaaaatgggggaagttagagaggaagaaagagatcatcgagggcgggaacgtcggccaaaggaggcaaccatggctgaactcaccggcgcacgaggcggacggggttccggcgacggacggcgacgatcgggcggtggccggggtgcttcacgcgatggcgaatgcggtggtgtcggcagcgaggttcagcgcggcggcttgcgacggctagcggcggccggagagcggaaaagtggcggcggcggcgggtgcacgctgctagagcgaaagagggcacaggggagctcggccaaggcaaaaagaaaaaatagttataacttggaaggagagaaggaggacgtcgaagacgaaggttctggagatctgctcacccgatcgccggtgcacatcgacgagtgggatggagtagactacgagcgacggcgcagtatagaggagcggggccgcagcggccggcggctggcggggcggcgctcggcggagggcggcggggccgcggccggcggccggcggcgggtggcggggcgaaggccggctgggccgcgcgtggtggcgggcggcgggcagctgcagccgcggccggcggcggacggggtgccgcgcccggcggactaa

SEQ ID NO: 33653 - DNA, 439 bp, Oryza sativa
  Clone ID: PAT_MRT4530_37744C.1
gattgcaatgtcatatgcatttcacattccaccaggcttctgattagataaatctaatggcggctgcttgctttaccttcctgcatagccgctgctcttcttgggtaggccacatggaaagcctttgcctcataccctatccctctccaagacttttgtgtcggtgagcggaattcaacagtgcgagtaaatggacttgaatgcaagaacccaatgaacgcgagtgcccacgacttccccaaggcagccatgctctataaccctagacacccaaacaatacggatggccccaatgtcactatggtcaatgtcttgcagcttcctgatctccaaacccttggcatgtggatagcacgtcttgactttgcacccttgggtttgaacccaccacacacgcaccctggtgcaaccgacatcttcacggtgcttgaaggaacac

SEQ ID NO: 33654 - DNA, 337 bp, Oryza sativa
  unsure (1)..(337): unsure at all n locations
  Clone ID: PAT_MRT4530_37745C.1
nagactcgtacggcactatgaaggacgcacccttaaggcgattctcgagcagacgttctatgcatcgatgctcttactggaatggacgagactaacgcacactctgcggttgcacgtaaagttccaaagctggcacacatgctagacgggggtgcgactgctcccatagggagccctgctcacacttctggaggacggctggagacgtgtggtctaaccatagcggctggctggacgatcaatcgctccacgggacgatctctacacgcattgatattctgctgcacagacgtgtacgctactctctgacaggagacgaggatctctaggtctaacc

SEQ ID NO: 33655 - DNA, 531 bp, Oryza sativa
  Clone ID: PAT_MRT4530_37746C.1
cggacgcgtgggcgcgagttggatgatcgtctctactgttcgctacggctcgtcccagggacgccgccccaagccgccggcaccggcgacgccatgttcgcggcggcagttgggcttccactccggccacgggaagccccgccgcacggggacgcgcggcccgcagcgagcctcgtgctcgagctcccgcttcgcgcccgggctgaccgcggagtcgtagcgtggcctgaacctgtgcgccgtcgccgccgccggcgcagcgacgacgacgactgcatcgtcagcaacggcagcgatggcgtcgtcgtatcccgttccccctccggcgggtgccgccgccgccgtcggtgcatcggcgggccaccaacatctgtcgtcgccggagagggcggggataatgtcgtctgctgtcgttggctcggctgacgccacggccgccggcgacggcgagagcagtagcaccgccgccatggcgcacagggaaaggaggcggcggaggaggagtgttgccggagcacgtcgagcttgcat

SEQ ID NO: 33656 - DNA, 304 bp, Oryza sativa
  Clone ID: PAT_MRT4530_37747C.1
ggaagctagaaatctccttgatcgatcacacacacacacacaattaagggacatacatacatgcactggtgcaactgcaactgcaggggcggggcgtggctactacaagtgtacacatggtacgttggttggcaccatctcgatcgggtcgttgggctcacttgccggggaccaagttgggggcgtatgcccaggcgttgttggcgacggggtcggcgacgtggtccaagaggttcttgatggggcccttgccggggacaatggcctggacaaaaaagcccaacatggagaacatggcgggggg

SEQ ID NO: 33657 - DNA, 314 bp, Oryza sativa
  unsure (1)..(314): unsure at all n locations
  Clone ID: PAT_MRT4530_37748C.1
tcgaccttgcgtccggcctctttttttccttaaaaaaacaggttattagttaaaaaaaaaaaaaaaaaaaaaagacaaaacaatctcgacgctctctacttactccacgcttacatacaccttcatacctcttcttaactctctcctatattcaacccactttcacttcactttaccactttttttcctcgggatgggttgtgtgttcccaactttttcccaccttttttatattcccctttcatccccctttcnccatctctaataatcccccaccaatcccccttcctacccccttcccaacacttattcac

SEQ ID NO: 33658 - DNA, 606 bp, Oryza sativa
  Clone ID: PAT_MRT4530_37749C.1
atggcggtggtgcggctcggcgacggcagcaggaggccgcggcggtttatgggggcgctccggaggctgcggctgcggtgggtggtggcggcgatgtacaggcgggcgctgcggcggctgcgcgcgtgctacgccaaggccatcagggacgtcctcgagggcgccgcgctcgtcggcgccgtgcgcgcggacgccggggaaacgatgtcgcatactcgcacgtcaatttactgccagatgacggcgacggggctcctcacggctgtcgtcatcagggccgacttgatcgccgccgggctccagcttggtcgtgccaccttgagcatggcggcgacgccacgccatggacgtgccatagatgatgctaaactcgacgcgcctgtcgtcgactctgatggagcttggcgggttttctcccgaccatgccgcgaggatgtcgacaccgggtgctatcatatccggcttgaggatctcagccgcgatgcggtttggcccacggctcgagaaggaagcgaccctcggagcagatggcgattggctgatcatggattcatggtgccacggaactcgattcttgcaaccggtctcgtcgtcgaccgcaggtag

SEQ ID NO: 33659 - DNA, 3852 bp, Oryza sativa
  Clone ID: PAT_MRT4530_3774C.1
tttttttttttttttggcgaattataaggtagatggtgactatcacaggaggaagaatgtgataaacttacacatcagctgtcttacactgaagttgtggccaagttgcagcctgcagcagtgtcttttccttttaaaagtccaacatgctcctttcaccggcctaaccaggaaattgcagacttgactcgtcacttggggtcaatactagagatataaccaagttgagtcccccagcatcctcacctgctgttccgattcacatcccggcagattgtacactaattttagagaagaggcattgctgcccagctttatactgaaagcataacagattgtacactaatagactatgccaatcggagaagctgtgctgtccgcgttcatgcaggcgcttttcgagaaagcggtggccgctgcttccagcgagctgaaattccctcaaaacatagctgtggagctgcagaatctatcaagcagtctgtcgacaattctggctcacgttgaagatgcagaggagcggcagctgaaagatcaggcggcaagaagctggctttccaggctgaaggacgtcgcctatgagatggatgacctgcttgatgagcatgctgctgaagtcctccgatccaaacttgcaggcccatccaactatcaccatctgaaggttagaatctgcttctgctgcatttggttgaaaaatgggttatttaacagagatttagtaaaacaaataatgcggattgaggggaagatcgataggcttattaaagacagacatattgtcgatccgatcatgaggtttaacagggaagagataagagagaggcccaagaccagttcgttaattgacgactcgagtgtgtatggtagagaagaagataaagaggtcattgtaaacatgttactcaccacgaataactcaaaccatgtcaacctttctattcttcccatagtgggtatgggaggagtagggaagacaactttaacacagctcgtctacaatgatgtgagagtaaagaagcatttccagttaagaatgtggctgtgtgtttctgaaaactttgatgaggccaaacttaccaaggaaacgatagaatcagttgcgagcggattatcatccgccacaacaaacatgaacttgcttcaagaagacctctcaaacaagctgaaaggcaaaaggtttcttctagtattggatgatgtatggaatgaggatcctgatagatgggatagataccgatgtgctctagttgctggtgcaaaaggaagtaaaattatggtgactactcgaaatgaaaatgttgggaaattagtgggcgggttgactccttactatctaaaacagttatcatacaatgattgctggcatttattcagaagctatgcatttgcagatggtgactccagtgcacacccaaatttggaaatgatcggcaaggaaattgtccataagttgaaaggcctaccattagctgcaagagctttaggtagcttattatgtgctaaggacaacgaggatgactggaaaaatatcctagaaagtgaaatatgggaattgccatcagacaagaataatatcttaccagctctgagactgagttacaatcatcttccacccatattgaagcgatgctttgcattctgctcggtctttcacaaagactatgtgtttgagaaagacatattggtccagatctggatggcagttgggtacatccagcctcaagggcggagaaggatggaagagattgggaataactattttgatgaattactgagcagatccttcttccaaaaacacaaggatggatacgtgatgcatgatgccatgcatgacctagcgcagtctgtctccattgacgaatgcatgagactggataatcttccaaacaatagcaccacagaaagaaatgccaggcacctatcattctcttgtgacaataaaagtcaaactacatttgaagcttttcgtggatttaatagagcacggagccttctactgctgaatggatataaatcaaagacaagctctatccccagtgatctgttcctcaatttaaggtacctccatgtccttgatttgaaccgacaagaaattacagaattgccagaatctgttggaaaattaaagatgctccgatacttgaacctatcaggcactgttgtaagaaagctgccttcatcaattggtaagctctattgcttgcaaacacttaagttacgaaactgctcgcataatcttgtaaatctcctatccctcgaagcaagaactgaactgatcactggcatagccagaatagggaaattgacttgccttcaaaagttggaggaatttgttgtccataaggacaaaggatacaaggttagtgaattgaaggctatgaataagatcggaggacatatctgcattaaaaatctagagagcgtgtctagtgcggaagaagcagatgaagcattgctaagtgagaaggcacacatcagcattctagaccttatatggtccagtagcagggattttacttcagaagaagcaaaccaggacatagaaacactcacatccctcgaaccacatgatgaactcaaggagctgacagtcaaggcatttgcaggattcgaatttccacattggatactctcacatttgcaaactatccatctgtctgactgtacaaattgttcaattctgccagcacttggacagctgcctctactcaaggttataatcattgggggttttcctaccattattaaaattggagatgagttttcaggtagtagtgaagttaaggggtttccgtcactgaaagaacttgtatttgaagacacgcctaatctcgaaaggtggacttccacacaagatggtgagtttcttccattccttagagaacttcaagtgcttgactgtcccaaagtaacagaattgccacttctcccatcaacactagtggaactgaaaatttctgaggcaggcttttctgtacttcctgaagttcatgctccaagatttctaccatcattgacacgcctacagattcacaaatgccccaatctcacatccttgcagcaaggattgcttagtcagcaattatcagccctccagcaactaaccatcactaactgtccagaactaattcaccccccaactgaaggattacgaactttaactgctcttcagagtcttcacatttatgattgtccaaggctggcaacagcagaacatcgtggcttactacctcgcatgattgaagatctacgcatcacctcatgctccaacataatcaatcctcttcttgatgaacttaatgagctctttgctctcaagaatcttgtcattgcggattgcgttagccttaatacttttccagaaaagttaccggctaccctcaaaaaattggagatcttcaattgcagtaatctggcctccttgcctgcttgtttacaagaagcctcttgtctaaaaactatgactatcttaaattgtgttagcataaaatgcttgccagcacatggacttccactgtccttagaagaattatacatcaaagagtgcccatttctggcagagaggtgtcaagaaaacagtggagaagattggcctaaaatatctcatatagccatcatagagattgacgatgatagtgccatgccagataggagcataaggagaagattatgctaaaagcttcttagcaactcaacaaaaagggtatgaattaattgccttctctagtttcttttgtctaaatataatagataaggctggctgtgaacatcatactcaaacctattctctgcaggtgcaattggtatatattcagtttattatctccaaaaaaaaaaaaaaaaaaaaaa

SEQ ID NO: 33660 - DNA, 780 bp, Oryza sativa
  Clone ID: PAT_MRT4530_37750C.1
atgatcagccaatcgccatctgctccgagggtcgcttccttctcgagccgtgggccaaaccgcatcgcggctgagatcctcaagccggatatgatagcacccggtgtcgacatcctcgcggcatggtcgggagaaaacccgccaagctccatcagagtcgacgacaggcgcgtcgagtttagcatcatctatggcacgtccatggcgtggcgtcgccgccatgctcaaggtggcacgaccaagctggagcccggcggcgatcaagtcggccctgatgacgacagcctacaacgtggacaacggtggcaacacccatcaagttcatgtccacgggccaaccggccgggccgttcgagctcggctccggccatgtcgaccccaattaaccgcgctctcgaccctggccttgtgtacgacgccaccgccgacgactacatcaccttcctctgcagcctcggctacacgcgcaggcagatctcgctcttcacgaacgacggctcggtgaccgactactcggcccggccgcagaggcgccgccgcagcgtgaccaacgtcgggacgaacaccgacgccgtgtacagcgtgaacatcgcctccccacccggcaccgcgatcatgtcgccgatgaggctcgcgttcaccgcgcagcgcaagacactgaactactcgatcaccatgtcggcatcggcggccggcccgaacacgtacaggtggggatcgatcttctggagcgatggccagcacaccgtgaggagccccgtcgccgtcatctggcagtaa

SEQ ID NO: 33661 - DNA, 327 bp, Oryza sativa
  unsure (1)..(327): unsure at all n locations
  Clone ID: PAT_MRT4530_37751C.1
caaaattttgtagacatgttgttactggattgtgtatcatttgtcgaatactcatgacaaagctaaatggccatacggtgacttctgagcgaacaaacttagccccctagcctgacaactatgtgaagatattgtacaaaaattgccaggaatgcagttctttttttaaccctttcatttgaactgaaggcaagtatacaaggcttgctaatcgctatcattgacgtggcactttgttcccctttgtagnggtccggaatgtaacttgatgtacctgaggttgtcttgtatagtccattgtgtgactctctcaaatgatagccctcc

SEQ ID NO: 33662 - DNA, 237 bp, Oryza sativa
  Clone ID: PAT_MRT4530_37752C.1
atggcggcgacgaccgactggggaccgatcatcgcggcggtggtgctgttcatccttctgtcaccggggttcctgttccagttgccggcgagggcgagggtggtggagctgggcaacatgggcaccagcggcctctccatcctcgtccacgccatcctctacttctgcatactcaccatcgtcgtcgtcgccatcggcgtgcacgtctactccaccaaacctgatccgatcgattag

SEQ ID NO: 33663 - DNA, 217 bp, Oryza sativa
  Clone ID: PAT_MRT4530_37753C.1
ggggaaaaaaagggaggggggaacaaattttctaccaagttggggcttatttcccacgggagggagcaaaccccccttaaaaaagggggggggggaaccccaccggggggggtttataaattttttggacccaacattttaaaaggggaaaaactggtggaccaaaaaaatttttttggacaagccggtttcaggggaacctcccccggggtttggg

SEQ ID NO: 33664 - DNA, 1153 bp, Oryza sativa
  Clone ID: PAT_MRT4530_37754C.1
tttctttttttttttttttttttttttttttttttttgaggaagaaaaaaaattgtgacatatattcaactgaatcagattctttgtcgtagcaaaatcacaatgtttgggacggcattatcattattttgattggtacagtttgacaacaataacacatttggactgagcatcacacgtactcaactttctctattgtcaccaactgaatgctcaaaattttgttagcttcttcatcttctgttcttcaatgtttaacagtctttcttttctttcatgagctactcgaagatgggtagatcaagaggcttattctttgacccatcttgagtgtctcttgaagatgatgagagagagagagcagagaaggcttttgtatcagattctttatccatgtccaggaagaaccgatgccatctagagtctgatgtcaattctgggtgaaaagcagtagcgaggatgttcccttgccttacagcaacaattacccgatctttcgagtacacttcttcctcaacaccctctccagacgctattgtaatactgggtctatccgatggaacaggacaatccgccagtacttcaacatttgaacctacatccaagatagcaggtgctcgtataaatacgccacggcatgtatcgctccctccttccttctctgcaagcattggcactgaaagttccgtttcaaagctttgaagctggctcccaaaaaagttccggtggacagtacaatctagtcctccaataagctcctgacctccggatttttggcctactgccttgttagctaggaagatgagtccagcacaagttccccagacaggccttcctgtaccaacaaattctcgaagtgcaggaaacaggttgtggtagttggcgagtttggccatggtggtgctctcgccgccggggatgatgagcgagtcgagcccctgcagctgctccggcttccgcacctccacccccctcaccccgatcctcctcagcgcggccaagtgctcgttgaaggagccctgcagcgcgaggacgccgacgaccgccattgctgctgctgctgctgctgctcccctcctcttctctcgctcgcgttgggatgtgtggctttggctttgaattggggcctcgggcgaagtggacgggagaagca

SEQ ID NO: 33665 - DNA, 608 bp, Oryza sativa
  unsure (1)..(608): unsure at all n locations
  Clone ID: PAT_MRT4530_37755C.1
ggaattcccggngtnncgacccacgccgntnnccgaataccgcggcagctatagacacacatctctccacgttgaaagatccctgtccgggtaattatcactggccaatgccgcctccctactgcttggaggcatcgggtgatcggccgtggtactgcgcgggcaatcgcaaggcccacccggacaagagattacgcaccggctatactggcccgtggctacccgcgctgggctgatgcaactgacggcacttaacgatgcccgctgacatccgctgtggcttgctggcccacgcaatcaaagaacgatgacctggctgcttgaccacgggaagcgtactgcttcgccatacctgctctcgggacggcccaaggagacgagtaaagactacgatgcgacttgacttgactacgagaaagccttaaagctgtcctcgatggccgtcctaactgacatgatcaacgagacggatgaatccttccaagtggctgttatgcgggtggtcgcatgatgagctgacattccaaccataaggagacggatacttactacggccgcgatattggacgaccatcgcacgcggacccactatcaacgcctatttatgc

SEQ ID NO: 33666 - DNA, 218 bp, Oryza sativa
  Clone ID: PAT_MRT4530_37756C.1
gcacgaggctactctagtcctctcccaccaccaccaccaccaccactacatcactttgctcatctcatctccctcctacccttcctatcggagtccaaacccggcgcatcccggttcagtgtccatgccgctccccattgtcgccgcccctcgatgctcgactacgtcggcctctcgcctccgccgccgcctccctcctcctcctccgccgccgccgc

SEQ ID NO: 33667 - DNA, 294 bp, Oryza sativa
  Clone ID: PAT_MRT4530_37757C.1
atgggcagcccccacgacgccgagccgccgactgcttcgatcttggttggtacattcttagaatggcgtcggcgagcacggctagccaacgcacaaggtggtgcacagcagcacagggtgacggacgctgacaacaacctccgtgccggtgacccgttccctggcgcaacggcgaacatcacagacgtgggggagagagattggaaaaaaaaagagaaagaggagagggtggaggaagaagatgaatctgacaggtgggtcccacgagcatatgagggagaggatgaaaaatga

SEQ ID NO: 33668 - DNA, 234 bp, Oryza sativa
  Clone ID: PAT_MRT4530_37758C.1
atgactgggatagtgagggcacctcgaatatcagagacccaggagttgttcgctagggcagaagcaactgtgcgtgaacctcaaaaacgttggggaacgacgaagaggagatctggagccaaggacgccaccgagcggccgtcgatccattggtcagatgagaagagcatagactcaccatttcccggcacaaagaaagtggatgccgcgaacatgtcggagacggtctgctag

SEQ ID NO: 33669 - DNA, 498 bp, Oryza sativa
  Clone ID: PAT_MRT4530_37759C.1
gtagtttattaatgctcaccaaactgactatgtctgagagggagaaatctatttgttcagagacgtataacttctggtggctaatgtgacaagtaatatgcaatcagtccatgtctcattcggaggaatctgtttattaatttactgtttatattgaataaaggtggtgatagtgatttaccatttttgtgtagttactcactcataaggatatacagtatatacttttactcccattcattagggttctgcaattactgcaaatgtgtatactgaatgtggatttcacattgcaatcactttgatacttctactttaaatttaggtgcttcgtggtttgggaaatcttattgccgctgatgactacatggttgattcagtcctaactgttggaaacaatatcattggtaaactccatgacccttttcctaccatatctgtttacaatgtttattcatcagttaacagttccttgtctttctggaaaatatatcttgc

SEQ ID NO: 33670 - DNA, 320 bp, Oryza sativa
  Clone ID: PAT_MRT4530_3775C.1
tttctttcgcactttcacagctttatcgacgacggaatcccttctcaccttcgctattcttttccaagcaccttatgccatagccaactacgtctaggattagtccattgcacagtcgatgcacgcgctctaccctgtaggacaaagatggacacggccctatcaccagctaggcggtaggaaccgtgaggcgaattttcccgctcagcccactttatgcaagaaatgtacgacattatcagggctggcatctcctaacagcagccggatcgaaagagtgaattgcgtttccgcttctgaggggccgccagctgttggac

SEQ ID NO: 33671 - DNA, 1180 bp, Oryza sativa
  unsure (1)..(1180): unsure at all n locations
  Clone ID: PAT_MRT4530_37760C.1
gctcgcggccccgccccgcgctcgcgcccccccgagcgtctcgctcccaccccaggcctcccccctcgccgtccgcgcgcgcgcccgcggtttcccccgctcgccgccggtttcccccgctcgccgccggtttccccgaagcgcgccgcgcccgcgcctgcgcccgccggtcgccatcgccatctcgccctcgcgcggagactggtgtccctgttttgctctgtagtatagagccacgcaaacccccgccaggtgttcgaccgagcgacacaagagtccagcctcttgcaacctgtaatggaggtcggcaacggcaagtgcggcggtggtggcgccgggtgcgagctgtgcgggggcgtggccgcggtgcactgcgccgctgactccgcgtttctttgcttggtatgtgacgacaaggtgcacggcgccaacttcctcgcgtccaggcccccatcaggaccctaaaatcttgtggtttaggaagcctctcttgtggttaacatcaaatcacaagtctaaatccaatggatgggactctaatttttctgtgtagtattagtatacatgatgatagtacatttgatttgttattaattggttattaattaaaggtgatttgatcactagactttatgtggtccaaaaagtaaccaaataaagcaccgcccgccgccggttgggggttgaggtggtggatgaggaggatgacgcccggtccacggcgtcgagctcgtgcgtgtcgacggcggactccgcgtcgtccacggcggcggcggcgncggcggtggagagcgaggacgtcagaaggaggggcgggcgcgggcggcgtgccccgcgcgcggaggcggttctgnaggggtgggcgaagcggatggggttgtcgtcgggcgcggcgcgcaggcgcgccgccgcggccggggcggcgctccgcgcggtgggccgtggcgtcgccgcctcccgcgtcccgatccgcgtcgcgatggccgccgcgctctggtcggaggtcgcctcctcctcctcccgtcgccgccgccgccccggcgccggacaggccgcgctgctccggcggctggaggccagcgcgcacgtgccggcgaggctgctcctgacggtggcgtcgtggatggcgcgcgcgtcgacgccgcccgccgccgaggagggctgggccgagtgctcctga

SEQ ID NO: 33672 - DNA, 321 bp, Oryza sativa
  unsure (1)..(321): unsure at all n locations
  Clone ID: PAT_MRT4530_37761C.1
atggacgacgacggcgatgacggccttgctatccccatcccgctccccgtcggcgccatccgcccccgctctctggggcgcgatgtagacagccgcctgccggtgcggcntgacattatgcgcccctgccgccgcagccccttcctctcccgcagcgccggtgcgcgctgccgcatcaccggtcgtttccgcgtggcggtgggcgacggcgcgcggtgcctgtcgctccggtgcccggacccgtcctgctcggtcgccggcgaaacaaacaacaaaactctcgcatatcaaatttggcacgagctctcgcatagccgctga

SEQ ID NO: 33673 - DNA, 775 bp, Oryza sativa
  Clone ID: PAT_MRT4530_37762C.1
tccaaccgcaaaaccggatacaacgcatcctccaacttacaaaaccagggcaaactaggtccctcggcggttttgacctcagttttttccgacgtagcagctgactcagcgtggaacccacatgtcagcgtggaacccacatgtcaggatgccacgtcatctctctctttcccctcttctctctcagctttcacctcgtctgggtgggcaggccggccgacgggttggggaggaagccgacggggcgaggcgggagaggaggaggttcggcggccggtgggcaggcgggtcggcggcggcaggcaggcgacaggcggagcggaggcggcctccccacgccatggacgacgacggcgatgacggccttgctatccccatcccgctccccgtcggcgccatccgcctccgctctctcctctccccgttcttgtcctctctctgccctctaaatggtcgatgtcgacagccgcctgccgcgtgcctgcccaccgccggccggccactccggcccgcgtcgttgcccgcttcgcccaccatttgcccggtcctccggcaggccggtgcggctgccgcatcaccggtcgtttccgcgtggcggtgggcgacggcgcgcggtgcctgtcgctccggtgcccggacccgtcctgctcggtcgccggcgaaacaaacaacaaaactctcgcatatcaaatttggcacgagctctcgcatagccgctgaaaatttacaagcacaaagatactatccggcaatccaggccatagatgacgacgat

SEQ ID NO: 33674 - DNA, 237 bp, Oryza sativa
  Clone ID: PAT_MRT4530_37763C.1
atgccctctcctcctcgccgcctccgagctctctccctagccacgccagattcatccgcctggaggtctggggctgccagatccgggctccttgaggttggggcttgccagatccggccagctctgacagcacatgctcttgggctagaagaagatgatgatggtggcagtggtggctcgaaggagatagcgatttgtaatgtggatggggaaattgcagatggggctgagaattag

SEQ ID NO: 33675 - DNA, 1602 bp, Oryza sativa
  Clone ID: PAT_MRT4530_37764C.1
ctaactcctcacctccgctgcccgaccatggccgtacctccggtcctccgccggcggcgacgggctccaattacgccggtgcagaacgccggcaccgccgccgccaacagcttgcgtgcgtgtcccgcgatcgataaagcctcctcttttctcattcgggtgccgccctgcaattagtgatggatcatttgcactgagggtgtcaagttggcggcctgagggtatcattccagataaattgttgtaggacaaattcaagtagcttaggaatgccaaacttgataagctcgatgggattccaccagaaagtttgttcttagagaggtcaagagattccaatgactgcagggtaccaatcttgttgggaatttctccactcaatccagcctgaagggtggaagccaatctgaatccattgaaaacttcaaataattggaagacaggtctatgttcttcaagcttatcagacccggtcttgaccccaacccggcccaacttggtcatagccgtgacgaaggcctggttgaaggcggcgctgctctgggcccaagaatccacgatgggcctggaccgtgggtccgagtacagcacctggtcagagcccagaaggcccatcccgttctgcaggttcttgaagtactggttgtcgaaggcccgcggcgtcaccgggtccatggtcacggcgatccgcgggtccacgttgggtgggcacgacctctgtagctgggctgcgtatcttgggctcatcgttggatccaccgacgacccacggatccgacccaagaatgtgttgcagtgtgcgaaccccaccgtgtgccccgcggagagggcgatcatgtcggcctgagagaggccgttggcggcgaagagcgccgtgagctggtcgaggttgaacgtcggcggcggcagcctcccgttgacgctgctcgccgtcgatctcagcccgtccagccgcccaagctccaccgcgtacgacggtcctccggccagcgcgatggcgtctctggtggccatggcgaggatgtcggcgcaggagacgcggtcgcggcatcccggcacggcgtcgacggcggccttggccttgatgacggtgtcgaagccgtcgccggcgagggagaggttgttggggtggtccttctccgccgtgttgttccccgccgacgcgaccaccaccgacgcgtcgcagccgtcgacgaagcagtcgtggaagaagagccgcacggtggcgccgacggtggcgaacgtctcctggaccttcctcgccacagcgccgcggacgatggactccacgttggggcacacgccggcgtagtagttccgccggagctgcgccgcgcacacggtggcgccgcccgccatagcgaccagcaccagcatcgccgccgccgccatccgccgcctcatcaccaccaccatcatgtacgtcttctccgagatcagcttaagcttaagcgaagctaagctatatagtgagctaagctaggtgtgaattaagttaatgtggtgtactggttgcagtggagcacaagtgaagctagctaggtagacgacgatcgatgataatgctctaggcagagtggccggtgatgaaggcgtaaacaa

SEQ ID NO: 33676 - DNA, 1617 bp, Oryza sativa
  Clone ID: PAT_MRT4530_37765C.1
aaaaaaagaaagaaaaaataaatatctgccacgcaattacactgttccgtttccacgcgggagacgtgccattcaaggcagctcacgcacaaagcgagcgcccgccttgggccccacgccaccaccatttactactactgctcacttcactagggagtacaaactccgctgggtttttttttactgcgccgaaataataataataaaattaatataatactagtagtaataacattgctgctggttgctgctgatgccccgtctcccgccaacttttcccgccccgagagcgcgaaatgggtggaggggggcagcggcgtcatttcacgctgacggcgttgctcgccgtcagccccgccgtcacgaagtcctccccttcccaccacggcagccagtcgaactccgccgccttggtggaaggcggcggcgccgagaggtcgcccagctcgacgaggaggtgctcgaaggatggcgcggtcacctcgtccgctgccgcgtaccggagcacggaggtcggcgacgcgaacgggttgaacgagctgtcgttggcgcggtcctcctccggtggcgccggcgtcggatcggggacggaggccttggcggcggcggcggtggaagagcttggggtcttgtccggggtggtgtgtcggcgagggtggagcttcatctgcttggccttggcggagggggtgtcggagtcggaggggaagttggtgacggcgtgggagcccttgatgcggagcgcggcgtcgtcgtacacggcggcggcctcctcggcggtgtcgaaggtgccgagccacagccgcttctgcaggctcgggtcgcggatctccgccgagaacctgccccacggccgccgccgcacgccgcggaaccgccggctcgccgccatccccgcgcgccgccgggccagcgccgccgtcgccgtcggaaccagccgcctcgggtgcttcggcgccggcgccggcgaggcggccccgacgtcgatgtcgatgacctcccggacgcgcggcctggagcgctcgtccccggaggagtcggtgtccgtggcgtcggcgtccacgaagtagacgcggacacgcttgggccgaggcatgctagccccaacacggcggctcctgccggcggcgagggagtccgccggagacatcgccggaggacgcatatccaccgcccgctacgaggacgtcaccccaaatctcatccaagaaaacgcacgaaccaacccagcaaacaaactcacccgaattggaggtaaaacccaaacaaacaagacctcaaatttctccttcaaacttcccaaatcaacttcaaaaaaacacaaaagaaaatcccaaagatttctcagatctaagcactcccccagtgagtgaactatcactaccaccactagctcaccgctcactctccaagaaccgggtcaaacaagcaaaggcacccggaaaatcccaaacccccaaaacctcaaaaccagagagatccaagaactcctcaaccgaggcaaaagaaaacacgaaaccctccgtcgatctcaggataatccggggggttttaagaggggttttagctttgaggttaagggcgggaaagggagaggagggggatttcctcgtgccg

SEQ ID NO: 33677 - DNA, 886 bp, Oryza sativa
  Clone ID: PAT_MRT4530_37766C.1
ctgtggagtgacgtcctttaaagatgtgctaaaagcccgtagtgaacccactaccatgtgtgtcacccctggttgcctgcataagggacaatgttaggagcttgggatgcttcaactgtggaagggggataatgcaagccttacagaacacatgatatagtgaagaagccaaataggttatgtgagcttccattttgaaaatgcacttcataagacatgcaacagtttcgatgaaacaccacaactgcctttgtactggtggcacattgtagatattgccaaaattcgtttccaatatcggctataattttgtaggcatgaactaagtggtaatgctactgagtgatttgagtgtgttgcaaatattgtttaatgtgttctcttcttagttccttgtagcatgaagatgttgacagacagaagctggtaatcatcatacgttccggcgaacaagacagcagatattacatgtattcttctcaagttccaacctttgcgctttcttattatcaaagtgtctcatgatgtgttcagacttcagagttataaatctctgttccccgcaaaaaaaaaaaaaaagagagttataaatctctgtaacagaggaatatatttgtcttaatttttctctttgcctttgaaataggagggtgccattctgaatcttcaaacaacaaatcaattatcaggttgcagattatgcttttaggaagttcgataattccttcatgatttccctggattaacctactaccttccctccggatgataatgtcagagaatgtgctctctgtgatcaccactaaggttattttgtgttacttgtggcaacttattttctgtatgctagtgtgttcccactggaattatgggtagtttttcttga

SEQ ID NO: 33678 - DNA, 874 bp, Oryza sativa
  unsure (1)..(874): unsure at all n locations
  Clone ID: PAT_MRT4530_37767C.1
atctgcccccgcgcgctcgccacacgctcgcagatcctctgcacagcgccacgctcgcacagcgcccttgctcccacgcctcagcacagcanatcatcatcacaccatcgcacatcacgccaccacatcacgcatcgcctcgcgcagcctcccctcacagcctcaccatcgtcgcgcaatcctccctcggctcgtcgcaacactcgcgcacacccacagcatcacacacaccagcaacgcaacagatcgcacacgggccggctcgtcctcacatcaatcgtgcattacgcaaccaaacactcgccacaagtcaaacactccgcttccgcagctcccccggcaaaacagcaaaggctacaagngctcccacttggtcgctccccgaaacactgatcccgctccaggaccgccaacccgcgtctactcctnncatgctgggcaatctcacccaccattccnatcgttcaattggattgaacgcaacgggcaaaaattgccacttcctcgaagggccaaacgccctggccattaacgatccatttggttgtttgccctttcttttaagacaattggcccaaaacttggggccggtcaatgtcttcccagctttcctccttcctccctcccccanttccttcttctngatcgggaattcaaatgccaaanggatgtcngttggtaacccctgggtaaccatttaaaaattttcccccttttaaaaccaaagttaaatttaatttttcttcccnccaaaaccaagggggttttttaaaagaangttatatataaacttaaaggttaaattttccaaatttgggtttaccccttgggcttaaaaaaattaactttgggattttttcccgggggttttaaa

SEQ ID NO: 33679 - DNA, 238 bp, Oryza sativa
  unsure (1)..(238): unsure at all n locations
  Clone ID: PAT_MRT4530_37768C.1
gggaaaaaaatgccccaaaacatataaaaaaataaccggggagacaacccccccccctaggcaaatgggcaaagctagcatgtttttatcccttcgcaaggtccatgccaacaagaggaaattttctcagcccttccaagggtttgggccaaggaccagcccaatagctttaccaaaaaccccccctaaaaggaagnnntnnaaacttctattaaaatntnacagagtacggttagct

SEQ ID NO: 33680 - DNA, 760 bp, Oryza sativa
  Clone ID: PAT_MRT4530_37769C.1
attttctccccttcgcttttcggcccctctaaacccagaaccccaaccctagccgcctccccacccgccgccgccgccgctcgccgccggatcgtctcgatggcctcctcgacgacgacgtcggaggacgcgctgcgccgggcgctggcggagaggcaggcggccgtggacgcgcaggcggaggcggtgcgggcgctcaaggcggcgggggcagctgcggccaaggccgaggtggatgccgcggtcgaggcgctcaaggcgctcaaggtggaggccggcgccgccgcgcggaggctgcaggcggccgtcggggcttccggcggcggaggcggggccgcgcgggaggagatgcggcaggcggtggtgaacacgctggagaggaagctgttctacatcccttccttcaagatctaccgcggcgtcgccgggctgtacgactacggcccgccgggatgcgccgtcaaggccaacgtgctcgccttctggaggcagcacttcgttttggaggagaacatgttggaggttgactgcccctgtgtgacgcctgaggttgtgttgaaggcatcggggcatgtcgagaagtttactgacctcatggttaaggatgagaagacaggcacatgctaccgtgctgaccacctgttgaaagatcactgcaaggagaagcttgagaaggatctcaccttgtccccggagaggcagctgaattgaagcatgttcttgctgtcctggatgacctttcagcagatgaacttggcgc

SEQ ID NO: 33681 - DNA, 327 bp, Oryza sativa
  Clone ID: PAT_MRT4530_3776C.1
ccagtgacggaaagactccaccgccgcccacgacctcgccgggatcgcctacggccgccactgctgcgcagcaccgtcaccgtcacgaccaccatcgccgccgcccacgtcaagcagggcgacgacaacgacgatggccgggacttcctcctcatccaacgcgtcaaccaagagttctatcagccacgtgtacgcgccgccgtcgccgaccaatcacaggccaccgccggcgccgttttcttctcccctaagcagctgtcgccgtgtcctcctcgtcttcctcctcctccgaaccgaccatccggaaccgtctatcgttccctataa

SEQ ID NO: 33682 - DNA, 653 bp, Oryza sativa
  Clone ID: PAT_MRT4530_37770C.1
cgttcgcatccgccgccgcagccgcagccgccgccgccgacgccgacgaggagaggaggagagggaaggcgagagggaggtaggtaggtaggcagttagccatgtcgccggcggagccgacgagggaggagagcgtgtacaaggcgaagccggcgccgccgagtccaaggtcttctacctcaagatgaagggcgactaccacatttaccttgcggagtttaagtctggcgacgagaggaagcaggctgcggagagcaccatgaatgcatacaaggctgctcaggacattgctctcgcagatttggctccgacccaccccataaggcttgggcttgcactcaacttttcagtgttctactatgagatcttgaactcccctgaccgtgcctgcaacctcgcgaagcaggcgtttgatgaggccatatcagaactggacagccttggtgaagaatcctacaaggacagcactttgatcatgcagctcctgcgtgacaacttgactctgtggacttcagatgccaatgatgatggtggtgacgaaatcaaggaagccgcagcttcaaaagagcctggggatcagtgagatgaattcggacgccagtctgatgcaccatctgttgttgttggggcattggacattgatgtcttcggct

SEQ ID NO: 33683 - DNA, 782 bp, Oryza sativa
  Clone ID: PAT_MRT4530_37771C.1
cttccatcatccgtcaaaaaaaccggacgaaaaaaaccaagtttgtccgataaaaaaaccgggcgaaaaaagtgcgaaaaaaaaagaaaaaccaaatatgtctgatctagaaaaaaggggaaaaaaccgggcggaaaaaaaccaaaattgtccgatacaaaaaaaaccgggcgaaaaaaaacgtgtgaaaaaaagaaaataaaaaacaaaatagcgataaaaaaaagtccgactcggtcccctaaaaaatagagataaaaattaaaaaaaatgtccgactccttattgcgattccctcttagaaaaaaaaaaaaggtgcatgaaaagaaaaagaaaagccacacaaaaaagaaaataaataaaaaacaacaacaacaaaaatctatttcccctaagtagcccaaaaaaaactgtagatgcaaacgaaaaaaatccaattcctataaaaggcaaaaaaaaaaaaaagtggtgaaaaaaaaacgctagatccaattcctttaaaaacgggaaaaaagtctgattcctgtaaaggcaaaaaaaaatccgaaaaaacatctaaaaaaaaaaaacacgcgagaaaagaaaaacaaaaaaggggagaaaaatatgattttcgtcatcagtaaaaaaaaaggaaaaaacatgctaggaaaaaactgttagaaagaaatgcgctatttctgaaaaatggtttgagaaaatcgcgcaagaaaaaaaacaccgtttataaaaaaacaagccgctcattaaaatcaaacattgtcattgacatgattatgtat

SEQ ID NO: 33684 - DNA, 1218 bp, Oryza sativa
  Clone ID: PAT_MRT4530_37772C.1
ccggatatggctaagatgggtttcgctcccatgctttcagtggccgtgctccttggaaccttggcagcatttcctgcagcggtacactccatcggcgtgtgttacggcgtggtcgccaacaacctgcccgggccgagcgaagtcgtgcagctgtacagatccaaggggatcgattcgatgcgcatctacttcgcggacgccgccgccctcaatgcactcagcggctcgaacatcggtctcatcatggacgtcggcaacggcaacctctcgagcttagcttccagcccctccgccgcagccggttgggtcagggacaacatccaggcctacccgggcgtctccttccgctacatcgccgtcggcaacgaggttcaaggcagcgacaccgcgaacatccttccggccatgcggaacgtcaacagcgcgctggtggcggccggcctcggcaacatcaaggtatccacgtcggtcaggttcgacgcgttcgccgacaccttcccgccctccagcggcaggttcagggacgactacatgaccccgatcgcgaggttcttggccaccaccggcgcgccgctgttggcgaacgtgtacccctacttcgcctacaaagacgaccaggaaagcgggcagaaaaacatcatgctcaactacgccaccttccagccgggcacgacggtggtggacaacgggaacaggctgacctacacgtgcctcttcgacgcgatggtcgactccatctacgccgcgctggagaaggccggcacaccgagcgtcagcgtcgtcgtgtccgagagcgggtggccgtccgccggagggaaggttggggccagcgtgaacaacgcgcagacatacaaccaggggctgatcaaccatgtccgaggcggcacgcccaagaagcgcagggcgttggagacttacatatttgctatgttcgacgagaacggcaagcctggggatgagatcgagaagcactttgggctgttcaaccccaataagtcgccatcgtacagcattagtttctaaggggatcgtacagactgatatatatttttatatggaataagttgctcccgtgataggccaaacgcaagcatgggaagcaagcatagtgccgtgtggtgtccatgcatctttcccaatttgtgaaatatatactcccagtgaattttaagcgaaaaaaaaaaaaaaaaaaaaaaaaaacaaaaaaaaaaaaaaaaa

SEQ ID NO: 33685 - DNA, 636 bp, Oryza sativa
  Clone ID: PAT_MRT4530_37773C.1
tcagcccgcggcaccacctatcgccgccatggtggcatgtcctcgagctcctctagtcatcttcatgacaaccttgagcttcacgggtaagctaagaagcggtcgcaagtgagtccgcccgctggaggtcaccgcctcgccgcggtcgccggcgagaggcgccgcgctgcgcgcgtcgagaggatcgcctcctcctcctcctcctcctccggcagccatgtcctccatccacttcttcccggccacctcccaggccgccgccccgtcgcgccgccccctcaccaaaccctccccaaaaccccccgccgccaccgccgcgtaccaccgcggcggagacaacgagccggtgctcttcccgcgcctcttcctcaggaggcgtgcccggcccgccgcggcgccggccgaggcgccgccggtgggccccgacggcagcagcagcggcggcgggggaggaggaggggaggggggcgggggcggaggggacgacgaggaggatgaggggacgaggaaggggctgctgccggagtggctcagcgtcacgacggacgacgccaagacggtgctggccgccatcgccatctcgctcgccttccgctccttcgtcgccgagccgcgcttcatcccctcgctctccat

SEQ ID NO: 33686 - DNA, 1067 bp, Oryza sativa
  Clone ID: PAT_MRT4530_37774C.1
gtacgaggctcacttcaacagcagcgccgtgtgactggcacgggcctccttcctcctcactgctcgcctgcgccgccgcctcccccgaaccctccggccgggctccccggccgaggcaacagtaacaccgctgcagcagcgaggaattgtgtcggcgagaatggattccaggatctccctcgtctgcttcctcgtcctcgcttcctccttgctgcattgcgccagatctgatggaagtgattcacagcttctcaagggcatcaacagctacagagcttccctcaaagtccctgcgctatccgagaacaagaatgctgcctgcttggctgagcagctagcacagcaattcaaagaccaaccttgcaccaacaccaccggagcaaacactgtccctggcaccgagcagcagttccccgactacccaaagtacctcgaccattgccatctcaacgcgtcggtgaccggagacggtcaggtgatgccggcctgcgttcccggacttgtacctgatgtggttctgaccaactacaccaagtcacagtacaaccagtatctgaatgacaccaagttctctggtgttgggatcgcgaatgagggagattgggtggtcgttgtcctcagcacgagctcgggttcaggtgattactcccctgctccccctggctccaactgggctccttcagttcatcccttcaatcaactgattcttttgttggtaggcattgtatgtttgctgatgatttgagagatttgatcatactgcagagagtgtaccttacttttgatgtaatccttttttggatcgtccatatttgaattgaactttgtctcattgacaacttgctagtatttgctacgaggatatggatcggaacgtattcttttgactgttttttcttaaacctttgactacaatatataatggtccttacgcaatgtgttcaaaagaagtgtatgcatttgaagtatgtctttggatatttaggttggcagttggctgccggtgtgtattcagcttgtgatcattggagaaccaatgcagttgaacaatgacttgcatgctttgt

SEQ ID NO: 33687 - DNA, 497 bp, Oryza sativa
  Clone ID: PAT_MRT4530_37775C.1
ctgctcccatccttttctttgtgttagctgcctccttattcaaccatgggtataggagaagacgcacatcaacattggggtcattggtgcacgtcgactccgggcaggtcgaccaccacggtccatctgatctacatgcttggagagtatcgacaagcgtgtgattgagaggatcaagaaggaaaccgctgagatgaacaataggtactttaaggcgcgtggtgctcgacaagctagggccgagcgcgatagaggcatacaccgaatcatgtcgacctgcggaatatcaagaccaccaagtactactgcacggacatagaagcgcctggacaccgtgacttgatgaagaacatgatcacagctacctcccaggctgactgggccgtgctcattattgactccaacactggtggttttgaggctggtatctacgacgatggacacatctcggagcacgctctccttgctgtcactcttggagggaaacacatgagctg

SEQ ID NO: 33688 - DNA, 1066 bp, Oryza sativa
  unsure (1)..(1066): unsure at all n locations
  Clone ID: PAT_MRT4530_37776C.1
cattgggattgcctccctcccggccggccgggcctcgcacgcgcgccgccgcctccccgacctcgccgccgcttgccgcagacgcctccgttccagcccccgtcgacgagatgacgaagcgcaccaagaaggctggaattgttggcaaatatggtactaggtatggtgccagtttgcgtaagcaaatcaagaagatggaggtttctcagcactccaagtacttctgtgagttctgtgggaagtttgccgtgaagaggaaagcagttggaatctggggatgcaaggactgtgggaaggtgaaggccggtggtgcttacaccatgaacactgctagtgcggtcactgtcaggagcacaatccgtcgtctgagggagcagactgaagcctgattgcactacgtttgtgccgtaaggagtcctgtgattctgtatcgagtcaagacctatattggctgttgagccaaagcacatcgtttagcatttttgttctctactttaggatctcctaagcatgttgctaaaacctgtactttgaagccattgtgaacttaaaatcagttacctgcgatccaaatattgaatgagcgctttgcgatgcaaaaaaaaaaaaaaaaaagacgcggccaaaaaatttgcggccnnnnnnnnnnnnnnnnnnnnnnnnnnnnnnnnnnnnnnnnttgaggcgacaccaccggagcattacatgatcctgactcctagcaggagttctgcgactacccaaagtacctcgaccattgacatctcaacgcgttggtgaccggagacgggcaggtgatgccggcctgcgttcccggacttgtacctgatgtggttctgaccaactacaccaagtcacagtacaaccagtatctgaatgacaccaagttctctggtgttgggatcgcgaatgagggagattgggtggtcgtttgtctcagcacgagctcgggttcaagtgattactcccctgctcctcctggctccaactgggctcctttagttcatcccttcaataaactgatttttttgttgggaggccattgtttgtttggttggtgatttga

SEQ ID NO: 33689 - DNA, 408 bp, Oryza sativa
  Clone ID: PAT_MRT4530_37777C.1
tttccgtgtaacttggtccactgcaatggaggggccagttctggaccagattcaccctcctcgtgctctggaagttgagtggggcctctctgcgctctatgtcctgatggttaccatagtcccaggacaactggcccttgtactgcttgtccaagccgagcaacatccgaggcagcgtcagtattgatcacaattctgattgtgctgattgtggtcttgttgtactgggccgtattgcgggcagatcgtgagctgatcgaagagcacaagcagcggttgaattggaagatggaggattggttcgaggaggattaccaagagcagcgcatgacatctgtgtatcgacgcgacgactcgaccatttacagtttaccgaaagccaagccgaatgtgacctacaagatgaaa

SEQ ID NO: 33690 - DNA, 1094 bp, Oryza sativa
  Clone ID: PAT_MRT4530_37778C.1
ccggccgggagttcgctcgcagccgccgccgccgcctctctcactgccgccgccgccgcctgcctcgtactccaactcttcggcgacgagatgacgaagcgcaccaagaaggctggaattgttggcaaatatggtactaggtatggtgccagtttgcgtaagcaaatcaagaagatggaggtttctcagcactccaagtacttctgtgagttctgtgggaagtttgccgtgaagaggaaagcagttggaatctggggatgcaaggactgtgggaaggtgaaggccggtggtgcttacaccatgaacactgctagtgcggtcactgtcaggagcacaatccgtcgtctgagggagcagactgaagcctgattgcactacgtttgtgccgtaaggagtcctgtgattctgtatcgagtcaagacctatattggctgttgagccaaagcacatcgtttagcatttttgttctctactttaggatctcctaagcatgttgctaaaacctgtactttgaagccattgtgaacttaaaatcagttacctgcgatacaaaaaaaaaaaaaaaaaacccgcggcctccctgttaacaagtgtgttgttctgaattacctttgttttcaattttatatgcattgtttctgtataatcgcttcttgctaaccatgtctactgcaattcctgattcacagtttgctgtgaagagaaaagcagttggaatctgggaatgcaaggactgtgcaaaggtcaaggctggtggtgcctacaccatgaagtaagtgtggtgttttgtaaggtgcaccgtccactattatgtttcccaacctttgttattacgctcttccagcactgccagtgcggtcacggtcagaagcacaatccgtcgcctgagggagcagacagaagcctgatcaggatctgtttgagaaagtgttcttggagttctatcaagactggtgaagttgccattttgcatatttagctaaaaagagaaatctagaatgttatctatctatttgtagatggaatatctgtccgcattgtgtacttgatttcccaagctaattttatcaaatgcgagcacttgatttgcgatc

SEQ ID NO: 33691 - DNA, 450 bp, Oryza sativa
  Clone ID: PAT_MRT4530_37779C.1
atggaacgacaaacaggttctgtgcttggtacatctttaagacgagagtatcctgggttggttaaagaatatgcaggtcctggacaacgtaaaagaaagagattggccatgtcatggggtcactactttggggagaaggatcataatggcatgacagctggtaatagagtaaaagatgaattctgggcacgtgtagatgctatgaagaagtactatggtaaagggatcaaaggaaaaaatgccagcgccattgaactcaattttgagcagtacatgacatgcaaattagattggattaatgtggacgcttggaagtgcttttgtcactggtggacatcagataagtacaaggagaagcgcaaaagaggtcaagatgcacgttttgctaatgaagactatgctcaacagcagggaggatctcttccattctgcactatacaacaaaacctg

SEQ ID NO: 33692 - DNA, 1255 bp, Oryza sativa
  Clone ID: PAT_MRT4530_3777C.1
tttttgccactaaagtgcagcaaattattcggataaaactacaagcaaaatttgctgatagcctcatcaggtttaaatatcaatattcgcacatcctcttccctaggggaaatcgtgcgcagagtcgcacatccaatggactaacaactaacaagaggattaactctgagaaagttcacggcaacgctttgtagcagcaacaacggcatttatcagcgtcccacggaatgcacccttctcaagctcttgtatcccagttatggtggttcctgccggggaagtgaccatatccttcagctgacccggatgttttccagtcttgtttaccatggttgcagcaccaagaactgtctgagatgcaagaccaagtgcaagatcccgaggaagaccagcagcaactccaccatcagccatggcctctattgctaagaaaatataagccgggccactaccacttagcccagttacagcatcaaaatatttttcttcagctgtccaaacttttccaatggcactgaataaacttcttacacggttttcatcattctcagtagccatctcccccaaacacatcactgatgctgcttgtccaacagctgaaggggtgtttggcattactctaataaatcttcgatgaccagaccaaccctgcagatcttccatcttgatgccagcagcaatggacaccagaagcttttcttctgacagcaagggttttagctcaaccagtacctgccttacgatctgcggcttcacagagatgacgatcacgtcactgtcatcaactacctgcgcgttggtctccaagatgtgagctccgatggatgagaaggcctcggcgcgctcggggcggcggtgtggcgcggtgcggatcgcggtggccgggaggacgcccgacgccgccacgccgcgggcgatgctctccgcgaggttacccgggccgatgaacccgagccggaacacctccggcgacgcggccgcgggcgccggcacgggctgaggcggcgccgccattgcgagggatccgaggaggaggaggaggaggagccggagaagaatggcgtggatgtggaaggtaggtttcgaggcctaataatgctgacaagctggatggccgtcggggccactcgccggtgcccggggtcgccggaggtcggagcacggagcggcggagcggggaactgcgccgccgtcgcgcgtctccgctgtatttttttttttgggtgggttttgctcgtcacttggcccctcgtgc

SEQ ID NO: 33693 - DNA, 1238 bp, Oryza sativa
  Clone ID: PAT_MRT4530_37780C.1
ccggccggcgtcctcgtcctgcatatggaattcgcggacgatgcccttgtagacgaggatggggacggcgagtccgaagaggccgacgacggcgaggctgcggcgggtccagcggaagttgaactcgaggttctcgcggcctgcgttccactcctcgatccacttgttcttgtgcacctccatgccgccccccatcggcccggccccgagttcgctcgcagccgccgccgccgcctctctcactgccgccgccgccgcctgcctcgtactccaactcttcggcgactagatgacgaagcgcaccaagaaggcaggaatcgttggcaaatatggtaccaggtatggtgccagtttgcgtaagcagatcaagaagatggaggtttcccagcactccaagtacttctgcgagttctgtggcaagtttgctgtgaagaggaaagcagttggaatctggggatgcaaggactgtggcaaggtcaaggctggtggtgcctacaccatgaacactgccagtgcggtcacggtcagaagcacaatccgtcgcctgagggagcagacagaagcctgatcaggatctgtttgagaaagtgttcttggagttctatcaagactggtgaagttgccattttgcatatttagctaaaaagagaaatctagaatgttatctatctatttgtagatggaatatctgtccgcattgtgtacttgatttcccaagctaattttatcaaatgcgagcacttgatttgcgatccggattctaaaaactctgaacaaatgcgagcatttccaagatttgcaaaaaaaaaaaaaaaaacaaaaaaaaaaaaaaaaaaaaaaaaaaaaaaaaaaaaaaaaaaaaaaaaacaattttaaaaaaaccaatcttaaatttctcattcttccaacctccctaacttttcattattccaatcataaaaaaaaaaaaagggggggccctttttaggggtcccatttttaaaacccgggggttgccccttttttttttttttttggggccccctttttttttttctgggccgggtttttaacccgggggggcggggaaaccccgggggctccccccttttttgggtttggggaacattccccttttgccggggggggtttttggggaaagcccccgcccgttccccctttccccccctttcccctccctttggggtttggggccccccccttgttgggggttttttccggggggggggggggggttt

SEQ ID NO: 33694 - DNA, 1729 bp, Oryza sativa
  Clone ID: PAT_MRT4530_37781C.1
ttagtacagaaacttcctgtacggccggccggcgtcctcgtcctgcatatgctggataacccaagagggcacggcaaggaagaggagggggggttcggaggaggggattacgaattcgcggacgatgcccttgtagacgaggatggggacggcgagtccgaagaggccgacgacggcgaggctgcggcgggtccagcggaagttgaactcgaggttctcgcggcctgcgttccactcctcgatccacttgttcttgtgcacctccatgccgccccccatcttctccgctccctctcctcgatccgccgccgccgccgccgccgattccgatggagttctggggtcttgaagtcaagcctggacagactgtcaaatgtgagcctgaagatgaacgctttttgcacctttctcaggctgctcttggggaatcaaagaaaggatctgacaatgcagtaatgtatgttaaaactgatgatcaaaagctagtcattggaaccctctcagctgacaagttccctcaaatccagtttgatttggtctttgacaaagagtttgagctgtcacacacttcaaagactgctagtgtgttcttttctggctacaaagtttcccagccggctgaggaagatgaaatggattttgattctgaagaagttgaagatgaagaggaggaagaaaagatcattccagctcccagggcaaatggcaaagttgaagggaaggaaaatgagcagaaaaaacaaggcaagacagattcttcagcttcaaaatcaaaggctgcagtgaatgacgatgatgatgatgatgacagtgatgaggatgattctgaggacgaagatctttctcctgaggatgatgatgatgattcttctgaggatgattccagcgaagatgatgaggatgagagtgacgaggaagatactcccaagaagccagagactggaaagaggaaagtagctgaaattgtgttgaagacaccttcgtctgataagaaagcaaagattgctacaccgtcaggccagaagacaggtgacaagaagggtgtccatgtagcaactccacatccggcaaagcaggctagcaagacccccgtgaatgacaagtcaaaggagaagtccccaaaatccggtggtgggtcaatttcttgcaagtcatgcagcaagacgttcaacagtgaaatggctctgcaatctcactcgaaggccaagcaccccgccaagtgaagaatgagacaacggatgctgagctgagaaatattggtgtcgtttgagttggttatctgaaatgaaatgaaatgctgcaaactatttggtgttatgagtagtgtcgtgacggtttatgtggtgcaaactatttagtctagaaaaaaaaaatctgtggtgcgaactgagctacaattttattcggtcaaggtcagtggagtgattggtttattttggatggaaaaattgttcttccctgttattcggttaattcccacgagaaaggattgataacaccacactgaattgactagctgaacaaagtcgtaatatctggttttgccctcggccaaatccgaatattagggtgtgtttagttcgtgttttttgggtgttacattggatgttgaccttagaaaggatttttttgatacgaatgaaaaaaattaatttctaacttgcttggaaaccgtgagacgaaaaaaaaaaaaaaaaaaaaaaaaacctgcagcccggggatccactag

SEQ ID NO: 33695 - DNA, 279 bp, Oryza sativa
  Clone ID: PAT_MRT4530_37782C.1
aaatatatatagggggagcgtgcatatatttcattcacatatgcctcacccaacaacatataatcgtagcatataccactcttacatcaagtcacagaaagatcaagttgaacaaaaacaaaatcacaccacggcctgtaaaatcaaaaaacgatgaacaaactgggaacacaccaaacaaggggggagacatcatccaatcagagatgaacaatctaacaaggctatatattacgattactgcttaatttccaccagactacttgcaacccgggggct

SEQ ID NO: 33696 - DNA, 336 bp, Oryza sativa
  Clone ID: PAT_MRT4530_37783C.1
atgaaaggatctgtactagtgttggtggccgtgaacgaggcagccgcgaccagcagagaaggctttgggcggtgcctgaccgacgcagacctcgacgagctgaggggctccttcgagctcgggttcggtttcgacaaggagaaaggaggcgccggcctctgcgacaccctcccggccctcgacctctacttcaccgtcaaccggcagcgcctctccgacggctccaagctgcggagccccacgtcgacgctgtcgtcgtccacgctgatctccggcgcgtcatcgagccctcagttttccccacgccgacgcatggacgatcttctctccaggtga

SEQ ID NO: 33697 - DNA, 241 bp, Oryza sativa
  Clone ID: PAT_MRT4530_37784C.1
gtttattgttgatgaaaaaaatcatggattcagcaagaaagttcagaaattgcaggaacaagatattttagatgatgttgtgacattgccaccttctgggacatcgctcatgaagctatatatggactgtccattttatggttcagttggtgacaagctgatagatctatgtgattatgtgaggaggacgaagggcaggaggtcagaagagacccgagaaagtgacatggcacctcattga

SEQ ID NO: 33698 - DNA, 238 bp, Oryza sativa
  Clone ID: PAT_MRT4530_37785C.1
aaaatatataatttttttattttttaaaatttagggctcacgaaaccaaaaagaataagtcgttctgattccatgtttcaaaataaatgcagttgtttaattttgaaatagagactacatttattttgaacagttctctaattaatttgttacacttattttgagattgaggaagtagtactcatttagtcctttgaggattatttaggatgcgcacttgcagttgcacaaataactt

SEQ ID NO: 33699 - DNA, 369 bp, Oryza sativa
  Clone ID: PAT_MRT4530_37786C.1
aacttcttccggccctgttggcccaccaatcttcacctattcaggacattaacatttgtttcagcccatagcgccaccagctacaacttccacagtttggtgatctctaccttggatcgggaattctgggctccaagctcaagctcatattggcttttaacgtgcccactcttagatatggtatctaccctaggtactatggtgccacccagtaccattaccaccctggccggtttctgtaatgattttaacagtatatgtttcggaattaaaaataagcttcagatatcatcatatgtaacatgtgaactttgggtgatataaatagaaataaagttgtcttttcatattaaaaaaaaaaaaaaaaaa

SEQ ID NO: 33700 - DNA, 473 bp, Oryza sativa
  Clone ID: PAT_MRT4530_37787C.1
gcacgagggtttcattcagcactgaagcaaatattattgcggatagactacaccgggcctcagatgctgctgaagcttctggatatgcattccgtgatgatgatggtggtgtaagtgatgggtatgataatgctcaggactggggcaggagagagccggagataatatgcaggcacattgatcatgttgatatgatggggcttaacagaactactcttagattaagatacctgatcaattggctagtaacttcactgttgcagctgaggttaccaggctcaaaaggtggtgatggagacccccttgtccacatttatggcccaaagattaagtacgaaaggggagctgctgttgctttcaatgtgaagcaaagtgatggcacttttgttaatgctgaagttgtccagaagattgcggagaagaatggcatatctcttggcattggttttctcagtcatataaaggtggacctg

SEQ ID NO: 33701 - DNA, 743 bp, Oryza sativa
  unsure (1)..(743): unsure at all n locations
  Clone ID: PAT_MRT4530_37788C.1
aaagatttaaggccgcggagaaagatattgaattctttacccacactcgccgcatccaaatctcctcctggaggaagcaatccggtgttctctccttttcctcctctttatcttactagtagtagctgttttgctccctgcacattatctgtccattggcagcggcggcggccatggcgatccgcgtggccgtttcctatccaagaaggcaagaagcaaccgagaaaggcctacaaagtttgcgttcttgagagaaagagggtggaagctagtaggtgttagtgggagggaggggccaagaatggcggcgctggccgccgcattggttgggtttcttcttgctgtctcgtcggcgccggcgggagccaccaccgacgcctccgacgctgcggcgcttgggaatctgtattcgtcgtggaacagcccgtcgcagctggctgggtggtcggccggcggcggcggcgacccttgcggcgcggggtggcaggggatctcctgctccggcgctggcgtcaccgaaattagggcttgctggggtaggactggatggctctctgggatatgaactctccagtctattctcattgaagacattagatttgagcaacaacaacttgcatggntcaattccttaccagttgccaccgaatntcacatatcttgaatctggcaaccaacaacttatcttggaaacctttccgtactctatatccaacatggttcattagaggacctaantgtaa

SEQ ID NO: 33702 - DNA, 461 bp, Oryza sativa
  Clone ID: PAT_MRT4530_37789C.1
gctattgatgatatggaccctaaggtcaaagaggcatttgaaaatatcaaattttacaaattttatcctgtaaaaactccagacacccctgatgtaagcaacgtaaaggcaaagtacatcaatagatattacaggcatgcacatcatctgatgtaattgcatcctatcttgaaatgagctatccaacttggagagctgacaccgaaattttgaaagccgtgggagagattcctggcgacatcttcaaattgggtctcttatagacccggggtgaaaacttgttgcaccttaactctgtactgcagttttcgtcagatcctgccattccttagagtatcgcttccttcggcattcttttttgttgtgcgtcgtgtaacattctgggaatagattatgtaaccatcaggccgtacatcttgtaagagcaaaacattggtttaggaaaaatgctgattcctttc

SEQ ID NO: 33703 - DNA, 254 bp, Oryza sativa
  Clone ID: PAT_MRT4530_3778C.1
cgcggcgcacgggcagagcgagggagagagggagagagagagaggggggagggagagagagagagggagggagagagagatgggccgagaggaaatcggcccatcgaacctgagggaggcaaaatagacttttgcggaggaattgaattgggaaggaaaattgagattagggtttgtatttgacgatggatcggggattcgagatccggaatggcacggagactgactgcaagcgaagaaacaattttcgcaat

SEQ ID NO: 33704 - DNA, 492 bp, Oryza sativa
  Clone ID: PAT_MRT4530_37790C.1
atggctgagcgggagggagccgtggtgaagaaggggcccgacgagggcatgaagatggccacggcgctgctagaggagttcggtctgccgctcgggctgctgccgcttgcggaggtgatcgaggtcgggttcgtgcgcgccaccggctacatgtggatcgcgcagcggaagaaggtggagcaccagttcaagatggtgagcaagcaggtgagctacgacgtggagatcaccgggtatgtgaaggccaagtgcatcaagaagctcaagggcgtcaaggccaaggagctgatgctgtggccgccggtgaacgagatcaccgtcgacaacccgcccaccggcaagatccacttcaagagcctcgccggcgtcaccaagaccttccccgtcgaggcctttgccgcggggaggaagaatgctggctgcatgtggggagggagacgggagaagcggaaggaggccgacttctggtcggaggtgggagaagctcgctag

SEQ ID NO: 33705 - DNA, 669 bp, Oryza sativa
  Clone ID: PAT_MRT4530_37791C.1
ccatgtgctcaaggcctctggaggattcttttgtacttcccctctcggatgatgcatatggtggattcttatagttggaggagttgagtcaggaagatatgatgcttggattttcatttggggaaccgacacatatacaaccaagaggttttataagcttaatttctctgccgtgcaacctcctagactcatgatctggctgtggaaaaccaaatgtgtcatgaagataaaagtttttgcatggtttttgttctgtgacaggtttaatacaagagatatgcttgacagaagacactatgccaaagaggatgatgatctcacatgtgctttatgtaatacacatcagagagaaacaagactccatctctttttcacatgtcctttcagtgctcgatgctggcagcacctaggaattcaatggaatcacaacttggaattctttcagatgattgttctggcaagactcaggtttgcttagagaggcttccttgaggttttctttttggtatcatggcatatttcgaagcaacgtaacggatttatctttcagaacattcagccatcatttcaatcctggaagtcactttttttgttaaagaagttcttctgcatatgtgcataatgaaagatcccctcaagcaatctatttctgattggttacaaaccttg

SEQ ID NO: 33706 - DNA, 563 bp, Oryza sativa
  Clone ID: PAT_MRT4530_37792C.1
cgtcgcccccgccgccgcaactgccgcttgccgaagctcctcctcctcgccgacgagatggttgatagactgcttaaggatgatgcgaccgaggagaagggagagcgtgccaggatggcatcctttgttggtggtatggcaatcagtgatttggtcaagacaacgttggggccaaaaggaatggacaagatcctacaatcaactggcaggggacgcagtgtgactgttacaaatgatggtgctacaattctgaagtctcttcatatcgacaacccagctgctaaggtccttgttgacatcttcaaaagtgcaagatgacgatggcggcgccggttcggcttctgctctggttttggccgctgtgcctttggggggagctgttttgttcgtcattttgttgatacttccttggaccttcttggcggccttccggttggctgctgaatgtgctcgtggtgcttccttactgtgggcctcggacatctcggaagtgccagatgacgttggagctgatcggacgacctctgctgtggcaacgttgagttcaaaaatactttcccagg

SEQ ID NO: 33707 - DNA, 1488 bp, Oryza sativa
  Clone ID: PAT_MRT4530_37793C.1
gcacgaggtccacggccaatctcttcagcatgatatgatacgtacggccatctctcaagctgatttggggatgtggagatgagagagttaatcatgaaacagtgtaacatattttatcctatattttattagtcgtgtgtgtgcaaatgaattcctgatcatgaccctagacagagaacatatgtgtatatgtgccacaaaaatttacacgatggaaactaagtactccacatccccaaatcagcttgagagatggccgtacgtatcatatcatgctgaagagattggccgtggagatgagagagttggtggcgagtccgatgaacgcgatgaaggaaaaccacaccgcgctgttgatcttcttgttgaacggatccttgccgaagctcgacatccacagatcgttgcgggacgctgccgccgacgaggccgacatgaggagatacgccaacaccaggcggcgaatctcgccgaacgcttgcgcgatcgagtagatgcagacgacgatgttcactccgacggcgtacctgtactgctcgtagcggccgtagtggtcgccggcccagccggacgtccgcgcgctgaccatgagcgcgaaggacaccaggctgagcaccgccgtggccactcgcagcgccaccgacgtcgtcctcctctccccgacggcggccacggccgccacctctggcggcacgtcccctccgttctccgccgcccctgccacgggcccgtgctggtggtcgagccgcgcggccttgccgttgccgatccgcagaggcgacgtcatggcctcctcggccgggttgaacggtatcgcgatcgccgtcgcgacgggcgtggccggcggcttcaacgcctccttgtgcttcggcgtgttctgcccgctcttgcttttggccgtgggcgtgggtgcgggcgcggtggtggcgggcgctggagtcagcggtgacggcggcgtaggcgacggcgagggcgacgacatggcgagggacccctgcgacggcgtccggaagaggcggcccgtcgcgaggtgaagttgcgggcgtcccggacggcggccttgcgccgtcccggcggcgccatcttcaccgttgacggcgggagagcccggcgcaggcgggagcaaccggtggggcgagggcgacacctggagccgcaccggcgagagctgcgggctcttggcggcggcctccgatcccccgttgacgtcgacgacgccctcctgatgaggcaccagcgcctcgtcacgcgcctcgtccagcgacggcggcggcgtgtggtactcctcgcgcggcgtcgaaggcgccgactccggaaacaacagcggcgtcggcggatcgggcgcgggaggcggcgacggcgacgcctgcggcgtctcgggctcgggctggggctctggcacgggaacgcgcaccggcacgggaggcggcggcctatccggcgccggggtacgcggggtctcgcccatggcgcaaacacggctcgtgc

SEQ ID NO: 33708 - DNA, 354 bp, Oryza sativa
  Clone ID: PAT_MRT4530_37794C.1
gaacgcatgtcttgagattcaaaacagacaaaggctccaattgaggagtgccgcaagaaggtttggctgctggattcagaggggttgtcgttaactcacgataagatcctcaggatttaaaagcttggcacatgagcatgaccttaacgacctgttagatctgtcagtctaactcgtctgttgactcgagtgcaacttactaagagattggcatgttcttacacacgattctttgtaaccaccaccctgggctctggagtatatacagcgcgattcacggccgtgcttggcatgaagcaccagacgccctctctgtctggtacctagcgtcggactcgttgacacgacctgctt

SEQ ID NO: 33709 - DNA, 408 bp, Oryza sativa
  Clone ID: PAT_MRT4530_37795C.1
atgcaggtgaacgatggtgatgatgttcaatcgctgtaccggcctgtgcatgcatgcgaatcattgaaggcgaaagaacccatcgagcaaactatattctttgtgggggagaaaataagaagcagccaagactggttgttgattagcaagggccgaacaaaaagaaaaggtatatgtggacctcaacgcgcaggcacattgaatagtgggccaaagataattggaccgaaaggcccatgggcttcccttaggcaaaagccgtcgccgattttcctcgccggaaacgaaccaaaactggagcagaagcccacagaatgtcactcaaaactgcccagaatacaggagatgaagtcaccaaaagcaggttttatcatagtctcatctgatgagactgacataactgcgtaa

SEQ ID NO: 33710 - DNA, 1045 bp, Oryza sativa
  Clone ID: PAT_MRT4530_37796C.1
gtgttgttttttttttttttttttttttttgaggcaaccgggttcatcagatagattcatcattcatttataatttataaatttacccccattcttctacgggaaatttaactatttgccactcttgtgacatgtcaattaacgatttaccacaccttgtcaatgacatgtgggccctcatgtgtttatgacacgtgggcttagtggcaaatcgttaagcaccactcgtaagagtggtaaatagttaaaagccccttcttctacagacagaagaagcactttcttcttgagctctcatacagcaaccaaatctagacaaaatcaaagaatccccaaatcctccccccaagttcctaaagccccaagcgaacgccatcttctcagaacccggccaccgccgcgccgaggagggcggcggcaacgagcacggcgccgctcgccggggtcctcccggggttcccagtcgccggcgctggggcgggggcctggaagaggccggcggccagcggggactgcgcgggggccggcacgggcgcgaagaacccctggccgcggcggctgtgcttctccgacatgacgaggacgatgacgcgctcgcccttgtcgcagctccccggcgcggcgccgacgaagaagtggtacccggagctcgtcagcggcaccgtggcggcgccgccggtgggcttgtgggtggcgaccgggctccccgtgccgcagtggttgtagtcgtcccgcgtcacctccagcaccgcgtccgccgcgccgtcgaacttgaacacgaggttgtcgccgatgtggaagcgggtggcctcggcccacctgttgagcgcgtcgggctgcgccggcaccttccacccgccgccgttgttgccgccgaccacgaggtccctggcgttcgccacggccacggccgccgcgaaggccagcgcggcgcagagcacggtagccaacaccttcgccatcgaagtagggtgggaggactagcagaagtagaacacgagagcacgagaggagggaaacaggggaacgaggaggaggaggtgat

SEQ ID NO: 33711 - DNA, 261 bp, Oryza sativa
  Clone ID: PAT_MRT4530_37797C.1
atggcagcagcacggcatgcgcctccttttcctcaccagccatcattagcaggtgtgtgcgtgctgagcgagagcgatactgataggatcgcgcccgtgtccggacccggggcacggaggaggcaatcgattgctgcggtgaaaacaatgtctcctgatgaagacaacacaatgggaagccaagacgacggccagcatggatgcactttcggctctgagtgcgagccaagctatgagtggctatacgagtacaggggctaa

SEQ ID NO: 33712 - DNA, 1411 bp, Oryza sativa
  Clone ID: PAT_MRT4530_37798C.1
ccacgcgtccggaagagacgaggacgccctccccagtggcggcgagcgcccccccccccctacccccacccccgaggaagaagaagaggaggaggaaggttttgcgcgccgttcgcggattcctctccgtcctcacgccccggattcggttcgtcccgcggtcccgactgaagaatgaggatggacaggaatgaggaagagatggtcacgaatgactcggaccctcttctcaagagggaaaacgaggaggcagagtcatcgtcgcagctgacaccgcctaagccagcaaccttgagcgcgctggagattgaggatgaggagaccgacggttcttctgcagggtgctgccgcatttgtctcgagactgattctgagttaggtgatgaactgatatcaccttgcatgtgcaagggaactcaacaatttgttcaccggtcatgccttgaccactggagatctgttaaggaaggatttgcattttcacattgcacaacatgcaaagctcaattccatctccgagtggaaacttgggaggacaattcatggcgtaaaatgaagttccggatatttgttgcaagagatgttatccttgtgtttcttgctgtacaacttccgagcgctatgattggggcaatttcttactttctagatagggatggaagtttcagaaacagtttcagtgatggttgggatcgcttcttgtcaaaacatccaataccattctattactgcataggtgttgttgttttctttgtgctactcggattcttcgggttgatactgcattgttcgtccttcaatgataaccaagacccatgcctagctgggtgccggaactgctgctatggttggggcgtcctggactgcctgcctgcttctctggaggcctgctttgccctggtggtggttttcgttgtcgtgttcgccatcctcggtatcgcatacggtttcctcgcggcaactatggctgtccaaagaatctggcagcggcattaccacatcttgaccaaaagagaactcacaaaggagtacgtggtggaagatcttcatggcagctacacgccaccgaagcttgatccagagcatgaggagcggctgaaaatgctgaagctcctctagcctctcatggcaattacagaactactaccgcctgtatatctgctcctcctctttcgcttcagattaacaaacggcaatctgttgtacaccagtgtaaatattgagtacgtgtgccgaaacaaaatgtctcgggtgagtgtttgttgtcaatttaattcgatcgatatgtttaccttgtcgcgtgagtgttcctcgatcatactgctgctggaactacactatgaacaactagtagtaattttatccttgcgatgccataaaaaaaattaacaactgaataaatcatgggtcc

SEQ ID NO: 33713 - DNA, 570 bp, Oryza sativa
  Clone ID: PAT_MRT4530_37799C.1
atggcggatgggccatggcccacgacgcccccagggtcagcatcgctctcagtcctgaatcatgtatggtatcgaagacagaagacgaagaggagcgaaggaaaagtgaagcgatctgactccgttcccgtcgcctcgatcacgcctcgcgtcgcgttgcaaacggtaaacggcggcaaaccgcaacgcaaacacggcaatcggcagcaaatcgcagcggctctgcatgactggctgactacgtcgattggaggccaaccgcccggcggcgcgccctcatcggccgatcggctgctcgcgcctcgcagtcgtcgtctaagcacaacattaatcatattgtcaagaaaatatgtatccggtagcgaaaaaagaaaacggaaaaaatgttcggatgatttcattgaaattttagaagaaacttttgaaagtgccaagggcctccacacctcggggaggctggaaactgagaaggtggtgatgcggccagcgaagggaagaagggaaactagatggtgcagcacaacaccgccgttgctggccgagaaaggagatgtggaggaagaatactaa

SEQ ID NO: 33714 - DNA, 435 bp, Oryza sativa
  Clone ID: PAT_MRT4530_3779C.1
atgtctaagggcatcgccgtcgtcgagccaactaatggccggccaaggctttcgccaaagatttcaatccaacaccacacgaccaacccaaacaacaaccgttgccggcgccagaccaccacactatcactccaaccaccaagcctagtccaccaccccaaaattcaggcagattcaggaggctaccatcctccactgcacaaagttgttgcctctaccctccacttgaagctccccatggccagaactggcgatccagccattggaggggagaagctccatgaagaggatattggtcggcaagttcaggagaccgccatcctccactacatagagttggttgcctctaccctccacctgaagctccccacgaccagaactggcgatccagccattggaggggaggagctccatgaagaggatattggtcgataa

SEQ ID NO: 33715 - DNA, 435 bp, Oryza sativa
  Clone ID: PAT_MRT4530_377C.1
atggggaaccatcaaactgttactactactagtattaaggttgagggcagatctctagaacagaagctagaggctaacgcaaatttggagaagaaagacagaaagtgcgtgggtagagaggtgtgccgtgtgcgtaacggatgcgggcagaaggagcagaacgagcgacggatggggatcggcgcaggcgggctgcggtggcgggaggatgtgctcactcaccaggatggatgcggtgggaggatgccgacgaagcggcggtcgcgtgatggatgggggtcgccggaggcggaggcggcgcctcgcgtgatggatggggatcgccggaggcggaggcggaggcggagtcggcggcggcgcctcgcgggatggatggagacggcagcggtggccggtgggcgagatagaagcgtcaaaatggcgagggcagtttag

SEQ ID NO: 33716 - DNA, 828 bp, Oryza sativa
  Clone ID: PAT_MRT4530_37800C.1
ctatgcataggcgctccgcctgcccaagccgcatccggtcagctcctcctcctctgccaccgcagctgtcaccatcaaccagacaacatcgacggcggcctgcgtcggcggccatgatgggtcgatggctgatacatcaaggccggggaggtcggtgttgttgatgtggttggtgcggttgcaggagatgtgcggccaggcggcgttggggtcccatcccagatgaggagctcgccagccggacggcagcgccgcgcgcgaggaggaggttgccggccgtcggcagcacccgccccctaagccgctgccgctcgcgagggcgggggagctggatctgtccgccccaaggccgcctccacctccacctcttccaccgtgaccggcggtgatggggatgaagacggcggcatttgagttgaggtggccacctgggacaggtacgactacgcaatcgaagagaatgtcgaggtcgaggtcatcgtgatagtcctcctcaccatcgtggttgttggggacgacgacgtcgtggctgcaggatccctcctcttggccgctgctggggatgtggcggtggctgttgtcgatgtagtgcccctcatcctgcgcaaacctgtcctccaccatgctgctggttggaagagtaccaaaaccagccgcagcaagggtctggtcgcgccggtgctgaccttggagcccgacctaagtccaaggtataaatatagattgtatgttgaaatagaagagaatgagaaacgagggctgagaaatgaacgcctttggtgccagcttgtaaagggtcataggtgccggtttttcatgcaacactaa

SEQ ID NO: 33717 - DNA, 483 bp, Oryza sativa
  unsure (1)..(483): unsure at all n locations
  Clone ID: PAT_MRT4530_37801C.1
tttttttttttttttttttttttttttttgtttgtttttttttttttaaaaaaaccagctattggcggggtgaaaagtaaaatgtggacaaaagttataaaggggcatgtatcaaccaaacttgcgcgaagcaaaaagaattgctcnttcaaagatcaaaagggactggagcgcccgaaagcctgccattaactagcgccgccaaatgacaagatcatggcacgggatcaaaaagcgcggggggaaggaaacccacatgccccacaagggaaaagatgaccctgcaagacaatgccgacgaaagttgcttgaaaataacatgaaaaattggtgaagaacaaatgcaaagaaaccccccaggtgaagggaggggtgaagtcaaaatataggaccctacccaaacatgtggacaagcaacgagattgaactccgcctttagaaaaaacgagaggagaggttaataatgggggaggggccattcct

SEQ ID NO: 33718 - DNA, 762 bp, Oryza sativa
  unsure (1)..(762): unsure at all n locations
  Clone ID: PAT_MRT4530_37802C.1
gcacgaggaagagggagagcaccaaggacacgcgactagcagaagccgagcgaccgcctcctcgatccatatcttccggtcgagttcttggtcgatctcttccctcctccacctcctcctcacagggtatgtgcctcccttcggttgttcttggatttcttgttctaggttgtgtagtacgggccttgatgttaggaaaggggatctgtatctgtgatgattcctgttcttggatttgggatagaggggttcttgatgttgcatgttatcggttcggtttgattagtagtatggttttcaatcgtctggagagctctatggaaatgaaatggtttagggatcggaatcttgcgattttgtgagtaccttttgtttgaggtaaaatcagagcaccggtgattttgcttggtgtaataaagtacatttgtttggtcctcgattctggtagtgatgcttctcgatttgacgaagctatcctttgtttattccctattgaacaaaaataatccaactttgaagacggtcccgttgatgagattgaatgattgattcttaagcctgtccaaaatttcgcagctggcttgtttagatacagtagtccccatcacgaaattcatgaaaacagttataatcctcaggaacaggggattccctgttcttccgatttgctttagtcccagaattttttttcccaaatacttaaaaagncactttctggttcagttcaatgaattgaatgcacaaataatgcntttaaagcgt

SEQ ID NO: 33719 - DNA, 647 bp, Oryza sativa
  unsure (1)..(647): unsure at all n locations
  Clone ID: PAT_MRT4530_37803C.1
gattcggccgagcacaccactccatttctgagctcttctagtttgagtgagagancagcagaaaggantngtgcaagatnccgatccgcaacatccccntgggganccaccaanaagtgttcacccnggtgcactcaangcggcgtttggcnaattcatctccaccctcatcttcntcttccccngccanggntcccgcatngccttcaacaaactnancngcggcggaacnanaanaccccccnggctnatnccgcggcggtggccaccccttcccccngttcnttgcggtgttcntccggccnacatctccngngggcaccttaaacngccntnaantccgccccntcctccgnnggaacatnnccctnttcccngcctcctccacnngattccccactccnnggntccnccntggcnttcttcctcctccncttcncccccgggggntccccacccgnaccttccggcnnanccgngtttcccttttggaagccnngttctngaaannctccnnaacntccggctcctcntcncccttttnccncccccttnaacccaaaaagggannctccggaacatncccccccnttcccntnggttcnttcttcgggcnaaaattctcctccgggggccttttnaaaggg

SEQ ID NO: 33720 - DNA, 1643 bp, Oryza sativa
  Clone ID: PAT_MRT4530_37804C.1
atggcgatgtcgtcgtcccgctcggcggccgcgatccgggggcggcgggtcggggcgctggcgagggcgaggaggcacgcgacgagggcgatggcgtcgctgttcggccacgtcgagccggcttccaaggaccccatcctcggcgtcaccgaggccttcctcgccgacccctcccccgacaaagtcaacgtcggcgtcggcgcctaccgggacgacaacggcaagcccgtcgtgctcgagtgcgtgcgcgaggccgagcgccggatcgccggcaacctcaacatggagtaccttccaatgggaggaagtataaagatgattgaagagtcactaaagctggcatatggtgaggattctgatttcatcaaagataagaggattgctgcggtgcaggctctttcaggcacaggtgcatgccggctctttgccgatttccagaggcgtttcttgccaaattcacagatctacatacctacacctacatggtccaatcatcataacatttggagggatgctcaagtacctcaaaggacattcacctattaccatccagagtcaagagggcttgatttcgcaggactgatggatgatattaagaacgctccaaatggttcattctttttgcttcatgcttgtgcccataatcctactggagttgatcctacagaagaacaatggagagagatatcctaccaattcaagataaagaatcatttcccattctttgacatggcataccaaggatttgccagcggtgatccagagagagatgctaaggcaatccgaatcttccttgaagatgggcatcaaattggatgtgctcagtcatatgcaaagaacatgggactgtatgggcaaagggcagggtgcttgagtattctgtgtgaggatgagatgcaagcagtttctgttaagagccaattgcaacagattgcaaggccaatgtacagcaacccacctgttcatggtgcactggttgtctccataatccttaatgatccagaattaaagagtttatggttgaaagaggtcaagggtatggctgatcgaatcattggaatgcggaaggcactccgggaaaatctcgaaggcctaggttcaccattgtcatgggatcacatcaccaatcagattggaatgttctgctacagtgggatgacacctgaacaggtggatcgcttaaccaatgaataccatatttacatgacccgtaatggcagaataagcatggctggtgtaacaacaggaaatgtggcgtatttggctaatgctattcatgaggtcactaaaacgaaatgaagctacttcctcttccctcttcggccaatgaaatgaggcttgcaagcggcggcgttttttttttggggggtggtctattgacctttaagatggttgtactagagaaataatccagtgaacatgctggtgtttctccaacttcggattttccctgtatggaggagagaactagaaacctacccaattttgagagctatagatgccgatcctgttatttcaatcgtcagatgttatgcctgtggcagcctggcaggtcacctcagaaacagagatatgtgaaagagaataaatgcaaatgagctgagcattttgacaaaaaaaaaaaaaaaaaaaaaaaaaaaaaa

SEQ ID NO: 33721 - DNA, 251 bp, Oryza sativa
  Clone ID: PAT_MRT4530_37805C.1
ggccccctccgtgatggcgtacgcggacaccaccgccgctcccttgcaggggctcaagtccaccgccagcatgcgcgttggccgtcgcttcggcaactccagcttttgcaacgtctgcaatggcggctggatcaggtgcatgcaggagtggccgactgaaggcatcaagaagtccgatatcctttcgtacctgtcaccattcaccacgttggaccttctgaagcatattgagttcctcggtcccagtcaag

SEQ ID NO: 33722 - DNA, 242 bp, Oryza sativa
  unsure (1)..(242): unsure at all n locations
  Clone ID: PAT_MRT4530_37806C.1
cctttgtttgcgacgctggcgaaggccggcggtcgggaggcggcggctgaagaggaggtcgtgttgtggacggaggacccgaggaggttcgagacgcccgacggcgaggcctacctacagtaccgtcttctcgccgncgcccagccgggcttctacttcttcagaaacggaaagcgcggcgagcgtgcgaccacgccggcagacgggatggagatggctcacacgtacatgccggggagcaa

SEQ ID NO: 33723 - DNA, 270 bp, Oryza sativa
  Clone ID: PAT_MRT4530_37807C.1
atgggggcggtggcggagcccaagcctgaggcaaaggtggagatagtggaggagcaggcgacgctggagcccatgttgccggcgagctcgacctctggctgccgtccacctcccttgcatggaccggcgagctcgagctctagcagccctccacctccccgagtgcctcctgctgcatgcatcggcaaggttgagctccaactcccccagcaccggcaaaaaccgcctagtcaacaatatggggataaattgaacggttttaatagttag

SEQ ID NO: 33724 - DNA, 509 bp, Oryza sativa
  Clone ID: PAT_MRT4530_37808C.1
catgggaaaaaaaaggaactttaatttaatttgtactagctcggtactatggatcatataccacacacacagtaacacttgttttaaaacagaacacaacaacaacaacgttcgtactaacatcgaccacgcagtaaagaacacgtaattaacccacccagcgctattagacaccctccatatcgactaactacgggaacatcctgcagcagtactgaaaacacaattaagctaatcctagtcgaccattacatgcatgcatgcatgcatgggaaagtatttttgcactgtagaagtactatcacagaagctgtggttgctgctgggcccctccatgcatcagcccgcccacctgcgccgccgccgcagtgaactccggccacatgccgccggccgccatcctccatgtctcggcattattgctgctgctgtccaacagcccggtgggccagagcagaggcgccgccgccgacgacgacgacgacgtcgccaccgctgcagcaggtccg

SEQ ID NO: 33725 - DNA, 393 bp, Oryza sativa
  unsure (1)..(393): unsure at all n locations
  Clone ID: PAT_MRT4530_37809C.1
gacccacgcgaccggacgcttttgggcgccgcgcgccgcgccaaaccccccacagcgacaccctgcgcaggcgggcgggcgcggcaccccgcaacaccgaaccgggggcggagacgggcacacgcgcggccgcaggggcgccacgcgccgcggcggcgcgcgggccaggccgcggggagcggagcagagaggaggcccgagccgggggagaagaagttggtgtttgcgcccaaagcaccagccggccggcgaggcaccggggggggagaccaaacgccgcgccggagcgccanccgcgggcaccgaccgggcaacgaccacaccgggcgacaaagaggaggaggcgcaggacggagcggcgccggaagagcgnagcagacaaagggcccggcg

SEQ ID NO: 33726 - DNA, 771 bp, Oryza sativa
  Clone ID: PAT_MRT4530_3780C.1
tttttttttttttttttcccaaagaaagacttatttacatggatgaatgattctgaatgttcctgtgtacatcagctatcagctttgtccattctataggacagcactgtacaagtcgaatcaacttcctatagcagtcaaaacaaagagagagctatctatctagagccaccaacaagtatctgtatctgtacttcttgtaaccaaatcactacatacatttgtcatctcccaaagaaaatcttattctgaactatgaccagcagctatctgcctttcctgtgtagttgcctttacatgtttgctgtaagatgttaatctaataattatgcatcactatcttttttctttactcagtttcagaccagattattttccatggtccacctttgctccctaacctccagaacccagcaattgctcgcaaactcataaatagagtaaggccagcccagacgccaccaagaccaaacttaggagcggccacaagcagtactgctgatgagatagctcccgcaaataatgtagagtatgccacgaaagcaaagtcagaaacaccatagtagagcccatccatcacaaacgcaacagcatttattggttgagaaacagtgacaaactgcaaaaatccatcagccaattactataaaaccattgcatatcacttggtaaatcaagtattgacttctcagaatagtcattacccagactccagtttgggcaacgtctaaaactgctgcatcatctgtaaacagcatggacaaatatcca

SEQ ID NO: 33727 - DNA, 3140 bp, Oryza sativa
  Clone ID: PAT_MRT4530_37810C.1
ttgatgtcccctcgtatgggtatgaggaaccatgctgggactgggaacacttcaaagaggatccaaaccaggtcgcggcgcgacctcatgctcatcgacgacctcatgctcagggaccgcgacatggctcccccggcgatctcagcacggcggcggagtaccgtagcgggcgcgggcgccggcgcggcggtggtgccaagccgcgacggccatggcggcctcctccactgctgcccgcctctcgccgcctcgcctccacgcgccgcctccgccttctccccatctcccgcttcgccgctcgcgcttctcccctcttcgcgccgccaagttggaagctgtgttaactattggaactcatctaataccacacccaagaaaggctgagactggcggagaagatgctttctttgtgaacggcgatgatggtggagtgtttgccgtcgcagatggagtttcaggatgggcagaaaaggatgtcaatccggctctgttttctcgagagctcatggcacacacttctacttttctcaaggatgaggaggtcaatcatgatcctcagcttcttctaatgaaggctcatgctgcaacaacttctgttggatctgcaactgtaatcattgcaatgcttgagaagacagggattctaaaaattgcaagtgtgggagattgtggtttgaaagtaattagaaaaggccaagtaatgttctctacatgtcctcaagaacattactttgactgcccataccagttaagctctgaagcaattggtcaaacgtatctggattgcactggtatgcgcagtatgttgcacagtaaatcttatggagggtgatatgattgtcagtggctcagatggattttttgacaatatattcgatcaagagatcgtttctgtcatttccgagtctccaggggtagatgaagctgcaaaagcactagcagagcttgcaaggaagcattcagtggatgtcacctttgattcaccctactcaatggaggctcggagtcggggttttgatgtcccctcgtggaaaaagttcattggagggaaactaataggtggtaagatggatgacattacggttattgttgcacaggtgaaggcagtgatgatcccagatgatgaggctgttgggcagtggccttcgggagaagaccagggtttcatttaccgccggggccgcggttaccgcgccccggcgacgcggcggcgcgacgccatgtcgtcttcctcctcctcgttggcggcggcggcggcgcggaagcgcgcgctgacggagcagaggttctcggagctgtcgcccgcgctgtccccggaggtggtgaaggccctgaagggcggcgggttccggcggtgcacgccggtgcaggcggcggccatcccgctgctgctttcgcacaaggacgtggccgtcgacgccgccaccggctccggcaagacgctcgccttcgtcgtccccgtcgtcgagatcctccgccgccgcccctcgcctcccaagccccacgagatatacaatgtggctcagcccttcttcgcgacgctgaagggcgtctcatccatgctactggttggtgggttcgacatcaaggcggagctaaagaaactggaagaagagggtgcaaacatactggtcggcaccccggggaagctgttcgacgtaatggagcgcttagacactctgaactacaagaatcttgagattttgatcctggatgaagctgataggctgttggatttaggattccagaagcagattacgtcgattatttcgaagttgccaaagctgaggagaacagggcttttttcggcaactcagacggaggctgttaaggagctggcgaaagcagggttgaggaatcctgtgagggttgaagttaagacagaggtgaagcccacaggtaaagatggtgctcaacaagagcttggtccatccaaaacaccgttgggtcttcgattggagtatatgatatgtgaagcatcaaataagtcatcgcaacttgttgatttccttgtgcagaacaatggaaagaaaataatggtgtacttcgcaacatgtgcttgtgtagattactgggctattgttctcccgctgttggactcacttaaaggttctccaataattccttatcatgggaagatgaagcagggccctcgtgagaaagctttggcatcattttcagctctctcaagtggtattctagtttgcactgatgttgcagcaaggggtcttgacataccacatgttgatctgattgtgcagtatgatccacctcaagatcccaatgtgttcatacatagagctggccgtactgcacgttatgatcaagaaggagatgctattgtattcctcttaccgaaggaagatacttatgttgagttcttgaagaggagaggtgtacccctcactgaaagggagtgttccacaaatgctgtagatattgtaccacagatcagaagtgctgcattggaagaccgaaatgtcatggagaaagggcttacagcttttgtttcgtttgttcgggcatacaaggagcaccactgttcttacattttcagttggaaagaccttgaaattggaaggttgggtatggagtacggcttactccaaattccatctatgccagaagttaagcaccattctctttcattggaagggtttactcctgttaaagatgtcgatgttacaaaaatcaagtacaaggataaagctcgagaaaaacaacggcagaagacattgaaaaggaaagcagaagaactagctctaaggccagagatagagaagaggaggaaagccccggagaagcctgaaaagccaaagcggaagaagacaggtaaacagcgtcaagcagtccaaaccaaggaggacatggatgagctcgcgaatgagtaccggctcctgaagaagctgaagcggggggtgatcgacgaggacgagtacgagaagctcaccggattcggggaatctgacgatgacgattcctcggatggcggcgattctgacctggacgagagaaaggagaggggcaacaaggtgctcaagaaaatcaagcagaaagggaaggcaaaaggtgtaggttgcaagttttgccctggctattgtatgttcgattttgtgatttgtgacaaggacggtgaatga

SEQ ID NO: 33728 - DNA, 3359 bp, Oryza sativa
  Clone ID: PAT_MRT4530_37811C.1
aatatattcgatcaagagatcgtttctgtcatttccgagtctccaggggtagatgaagctgcaaaagcactatcagagcttgcaaggaagcattcagtggatgtcacctttgattcaccctactcaatggaggctcggagtcggggttttgatgtcccctcgtggaaaaagttcattggagggaaactaataggtggtaagatggatgacattactgttattgttgcacaggtgaaggcagtgatgatcccagatgatgagggtgttgatggcggcctcctccactgctacccgcctctcgccgcctcgcctccacgcacccactaccccttctccccatctcccgcttcgccgctcgcgcttctcccctcttcgcgccgccaagtatgcctccctgcttacacctgctgagactggcggagaagatgctttctttgtgaacggcgatgatggtggagtgtttgccgtcgcagatggagtttcaggatgggcagaaaaggatgtcaatccggctctgttttctcgagagctcatggcacacacttctacttttctcaaggatgaggaggtcaatcatgatcctcagcttcttctaatgaaggctcatgctgcaacaacttctgttggatctgcaactgtaatcattgcaatgcttgagaagacagggattctaaaaattgcaagtgtgggagattgtggtttgaaagtaattagaaaagaaccttctgattttgatccagttgtctaccaggtttgcacagtaaatcttatggagggtgatatgattgtcagtggctcagatggattttttgacaatatattcgatcaagagatcgtttctgtcatttccgagtctccaggggtagatgaagctgcaaaagcactagcagagcttgcaaggaagcattcagtggatgtcacctttgattcaccctactcaatggaggctcggagtcggggttttgatgtcccctcgtggaaaaagttcattggagggaaactaataggtggtaagatggatgacattacggttattgttgcacaggtgaaggcagtgatgatcccagatgatgaggctgttgggcagtggccttcgggagaagaccagggtttcatttaccgccggggccgcggttaccgcgccccggcgacgcggcggcgcgacgccatgtcgtcttcctcctcctcgttggcggcggcggcggcgcggaagcgcgcgctgacggagcagaggttctcggagctgtcgcccgcgctgtccccggaggtggtgaaggccctgaagggcggcgggttccggcggtgcacgccggtgcaggcggcggccatcccgctgctgctttcgcacaaggacgtggccgtcgacgccgccaccggctccggcaagacgctcgccttcgtcgtccccgtcgtcgagatcctccgccgccgcccctcgcctcccaagccccacgagatatacaatgtggctcagcccttcttcgcgacgctgaagggcgtctcatccatgctactggttggtgggttcgacatcaaggcggagctaaagaaactggaagaagagggtgcaaacatactggtcggcaccccggggaagctgttcgacgtaatggagcgcttagacactctgaactacaagaatcttgagattttgatcctggatgaagctgataggctgttggatttaggattccagaagcagattacgtcgattatttcgaagttgccaaagctgaggagaacagggcttttttcggcaactcagacggaggctgttaaggagctggcgaaagcagggttgaggaatcctgtgagggttgaagttaagacagaggtgaagcccacaggtaaagatggtgctcaacaagagcttggtccatccaaaacaccgttgggtcttcgattggagtatatgatatgtgaagcatcaaataagtcatcgcaacttgttgatttccttgtgcagaacaatggaaagaaaataatggtgtacttcgcaacatgtgcttgtgtagattactgggctattgttctcccgctgttggactcacttaaaggttctccaataattccttatcatgggaagatgaagcagggccctcgtgagaaagctttggcatcattttcagctctctcaagtggtattctagtttgcactgatgttgcagcaaggggtcttgacataccacatgttgatctgattgtgcagtatgatccacctcaagatcccaatgtgttcatacatagagctggccgtactgcacgttatgatcaagaaggagatgctattgtattcctcttaccgaaggaagatacttatgttgagttcttgaagaggagaggtgtacccctcactgaaagggagtgttccacaaatgctgtagatattgtaccacagatcagaagtgctgcattggaagaccgaaatgtcatggagaaagggcttacagcttttgtttcgtttgttcgggcatacaaggagcaccactgttcttacattttcagttggaaagaccttgaaattggaaggttgggtatggagtacggcttactccaaattccatctatgccagaagttaagcaccattctctttcattggaagggtttactcctgttaaagatgtcgatgttacaaaaatcaagtacaaggataaagctcgagaaaaacaacggcagaagacattgaaaaggaaagcagaagaactagctctaaggccagagatagagaagaggaggaaagccccggagaagcctgaaaagccaaagcggaagaagacaggtaaacagcgtcaagcagtccaaaccaaggaggacatggatgagctcgcgaatgagtaccggctcctgaagaagctgaagcggggggtgatcgacgaggacgagtacgagaagctcaccggattcggggaatctgacgatgacgattcctcggatggcggcgattctgacctggacgagagaaaggagaggggcaacaaggtgctcaagaaaatcaagcagaaagggaaggcaaaagggtctaggagatttgaagggaggagcaaacagaagactaggagaagatgaaaagtatatcttgttcttagcaattttgcttttttttttctttaaccagtgtaggttgcaagttttgccctggctattgtatgttcgattttgtgatttgtgacaaggacggtgaatgagcatgagcatcattcatagaagatagtgccatctctatttttcgtcagttaaagccagctgaatcactgtaacaatgccctagttcaccttttaaccaagaatgctggtagtatagagctacctctagggtctagctaaatgcgactacacaacctacggtttatgttctact

SEQ ID NO: 33729 - DNA, 2658 bp, Oryza sativa
  Clone ID: PAT_MRT4530_37812C.1
atgctctcggtgcgctgcggaggcggaggcggtggcgccgccgccgtggaggagcacggcgcggtgcgccaccatcgccctctcaccccgcgccagcagcagcagctgcgcacggtggtcgaatccctccggctcgaccccctcgaagttgacgagggcgcgcgcctcgagatcgcgcggcagagttacagagcaggggattacaaagcggcgctggagcactgcaatgccgtgtacagggcgaacccgaggctcttggagaacctcctgctgctcggcgccgtctattaccagctacgagagtttgacatgtgcatcgcgaagaacgaggaggctgttgcaatccagccgaattgcccagagtgcttcaacagcattgcgaatgcctggagggagaaaggcgatgttgataatgccattcagttttatgtgcatgcagtacagctccggcctacctttgctgatgcgtggacaaacttagctaatgcttatactcgaaaaggaaatctcagtcaggcagctgagtgctgccatcaagcccttgcactaaatcctcatctggctgatgcatattgtaaccttggtgatgttttgaaggcacaaggattgtacagagaagcatacagtcactacttggatgctctaaacataaagcctacttttgcaaatgcatggaataatattgctggacttctcatgcaatggggagatttcaataaagcagctctctactacaaggaagcaatcaaatgcaatccagcattttacgatgcacacctgaacttgggaaatctttacaaggttactggaatgcgtcaggatgcaattgtatgcttccagaatgctgctagggcaaagccagaaaatgcagtagcttatgtattttcagggaatcttggtaatgcctaccatgaacaagggcaactggatcttgctattctaagttatagacaagccatccattgcaattcatcttatgttgaagcatataataatctgggaaatgctctaaaagatgctgggagaaatgaagaggctattagttgctaccagacatgccttgctcttcagccttctcaccctcaggctttgacaaaccttgggaatgtatatatggaaagagtttcattttggagtacttgcaggaacatgatggacatagcagcttcactgtacatggcaacactgacagttacaactggattatctgcaccttacaacaacttggcaatgatttacaaacagcagggaaactgtaatcacgccattacatgtttcaatgaagtactccgcattgatccaatggctgctgactgtcttgtcaatagaggcaacacatttaaagaagcaggcaggatcactgaagccattcaagactattttcatgctgttacaattagaccaactatggctgaagctcatgcaaatttggcggctgcttacaaagacacaggcttgctggaggcatcaattatcagttacaagcaggccctacaattacgtcaagattttcctgaagctacttgcaatctcctgcacactctacagatgtcctctctcccaagtgtacaaccattccatgctatagcatatccaattgattcaactcttgcactggaaatcagtcgaacatatgcagctcattactctttggttgcatcacgttttgggcttcctacattcacacactcctatcctgttccaatcagcaatgatggcagaacttcaagacttagaatagggtatgtgagtagtgattttggcaatcatcccctgtctcatctgatgggttctatatttggaatgcacaatcaagacactatcgaggttttctgttatgccctgagccaagatgatggtacagaatggaggcagcgtattcgatctgaagctgagcacttcattgatgtgtcatcaatgtcatctgatatgattgctaaagttatcaatgaggataagatacaaattcttattaatcttaatggctatactaagggtgcacggaatgaaatattcgctttacaaccagccccaatccaggtttcttacatgggatttcctggaaccactggtgcagattacattgattatttggttactgatgagtttgtttctccactgaaattttcacatatatactcagaaaagcttgtccatcttccccactgttactttgtgaatgactataagcagaaaaatcgagatgttcttggtcctgtatgcccacacaagcgagctgactatggtctgccagaggacaaatttatttttgcatgcttcaatcaactctacaagatggacccagacatattcaacacctgcccgttgtgcaatggccacaccactggtacagatatattatgggctggtctcccaatgatcactcttccactagagaaaatggcaactagggttgcaggttcactgtgtctagctactggaattggggaagagatggtagtcaatagggttagctttttcacttccgtaaacaaaaatggcaggttgttggtctggtctgtcatcgtgataagtggacctgaagattggtggcagttcaggtcgtggatggttgtcgttctcttctctgaaattgttggtctcgacagtttcaaacttcagtacccgccctgtccggtgttcgtcattcacggataa

SEQ ID NO: 33730 - DNA, 549 bp, Oryza sativa
  unsure (1)..(549): unsure at all n locations
  Clone ID: PAT_MRT4530_37813C.1
caccgtgcctgtggggtcgtgtttgaagactgggaatcctcaaagcctggtatggtggtgacctttggtcccagtggcctgaccactgaaagtcaantcngttgaaatgcaccacnaagctctccaggaagctcttcctggtgacaacgtcnggttcaacgtgaaaaacnttgcggtgaaagatctgaaacntgggttacttggcctccaactcccaaggataacccngcccangaagcngccancttcncctcccangtngatcatcatgaaccaccctgggcanatcggtaacngctatgctccantgctggactgccacacctccccattgctgtcnantttgctgaacnggtgaccaanattgacanacnatctggcnangaactggaaaaagaaccccanttcctnaaaaaacggganncnggtatggtcnaaatannccnaccnancccngggttgtggaaaacnncnctnaattacccccccttggtcctntgcggtgcntnacntnaagcaaaccgnggntgntggggtcnccanaactng

SEQ ID NO: 33731 - DNA, 423 bp, Oryza sativa
  Clone ID: PAT_MRT4530_37814C.1
atgtcatgcaccaacgataaatttaaggactgcgtgctcagggaggaacttgtcaaagtcctcaaagaccaatgtggagctatcaacagagatatgactgttgtgatcgagaggatggttcaaacctctaccgagaggttccagcgcatgctgaatgccaatcttacaacgatcaataattgtctcgacagttctagtgatgttgaggaagaatattctcttgttgctaagcttctaggtgaaaccaatgatcctgagatggaaaatgatgatggggagattttaggagtcatcgataccacaaactacaagactatacttgtgcagcatgtgctaagcattcaagtggagcatgcgcaggaacttcaacactataattcttcgtcatcaaggattgtcgggtatttccctcttgggtcatga

SEQ ID NO: 33732 - DNA, 817 bp, Oryza sativa
  unsure (1)..(817): unsure at all n locations
  Clone ID: PAT_MRT4530_37815C.1
ctagcacacaaccacagacatacaaaatacaccagaggtaagtacaacaacaacataggcatacacataaatactacacccatagataatacaaacacagaaaaagcaaagataacacacaaaagtagcaaatagagcaacacaagacacacaacagacaatannagagcacaagaagcacaagatcaaaaggcaagagtacacaccgaggaagtacaagagaatgcaggtacgataggtagcaaacatanagagccaataacaggaatagtagaaggtacaacaaagacaagggcaacaaaaccaagaagttaccctaacccgaaataggtnccaccataaaaatagaaaacccaaataaaaacaaaatacggtaaccccgggaaagtaattctcgatcaagtccccgtccacacgattattagcaaacctaaaaaggcccatcatacatacccccatatacactaaatggtagcatcctctacatatatattcatcccaaaggggaaaaggtatctaatggggaatttaaacctaaaacccccaaggctagcccaaccaaacccatacccaaacaaaacaaaatcccccaccaaatatcttaagcccctagaaaaaggccaaaaagcccaaaagaagcccaaaaaaatttccaacgggaaatgaaacccacccaaaaaaaaattcccacccccaatttaaagaccaaagggaaaattatcgctaggcccccgggccaagctggggtgttttccccccattagggtttctaccaatgaaaaggcnnaaccccttcatatttccatacccatatgaa

SEQ ID NO: 33733 - DNA, 1578 bp, Oryza sativa
  Clone ID: PAT_MRT4530_37816C.1
ccgtcccggcgcgccctggcgccctgttgcagggcggcacccgcaacctcccccgaattgctcgggcactcgctcaacacccgacccctcccgccccccgtgccagagggcgctcctccactaacaccctccccgtcacccccaagacacactcaacccgcgcaacacacccctcctccaccacccccgccgggcgtttgttggccgcccccggctcggccgggtcgttgtccaggtcgagcccgcgcggcccggttattgcggctgggggcctcccccccccctcctcgggccaaatctgggaggaaggggggaaggacccgccgccgcggccccgtgggtcgtcgtcgccgccgccgccgccccgcgcgtcgtcgtcgtcgccgccgccgccgccctcgccggcctcccccctccctcctctgtacgccgcgccgccagctggacgccgcgccgccccgccgccttccgcgccaccccgcgccgtggccaccccccgcccctccctctccccctccggccacaccgccgccgctaccaccctcccccctccagccggatatgggagggagggaggtctccaccgtcgctgactgtctctgtgccgcctctgccatcgctccccttcctctagccagatatgtgaggggaggtctctgtcgccgccaccaccctcccatctccttactccagccggatctgggagagggaggggaggggagccacctccgcaccgccaccatcacgcgccgccgccgtcacccccctcgtccggccggatctacgaccggggaaggaaggagtggcctccactatcgcttcctccaccgccgccgccgcctccgccccacctccacgccataccgccgccgccctcccctcctccgcctccttcttctccctcatctttctccccttctctccaaaccccccttccctatcccatccgccggcgccgccccatccccatccgcccgccgccaccatcgctcgggctgcgtccccattcaccgccgccgccgccgctcgggctccgcccccacctgcttgtacgcctcctccctcagcttcgccgccctcaccgcttccgccgccggaagcatcgccgccgcgcgagccaccgccgcggccgccggtccgctctgtcggccacagcgcgcttggccataaccactcagccgccgcgcactcagccaccgcgcgctagcccacctgctccggccgctcgctgctgcccgctaccactccccactccgcccccgagcccttccccaccgcccttctcctcccgtccccatgttgtatgtcccccgccatcgttagacccaccgccgctcccaccaccaccatgtcggcacccagacctggacaagcagctccccgtccccatgttgcgcctgcgactgcaatgtgatgcgctccagcacgcgctgtagctgctccttcaccgtctgctccacggccacctcctgcggcgctcccggttgggccaacgtctcccggttttgggccaacaagtggtataagagccaaacccacaatctctagtgcctgtgtgtggggccggttagtggaccc

SEQ ID NO: 33734 - DNA, 273 bp, Oryza sativa
  Clone ID: PAT_MRT4530_37817C.1
atgaagcaaggaggaggcgcgattgcgacgcggagggggggtttagccccccgacccagctacagcctaacccagcagctcaccgcgaaggggttgacgtcgtcctcgtcgaaggggttccggtcgtacctccccgccatagctcccctccaccccaactcctcctcctcctccggaagcggccgcgtcggtggtttctctctccggcgagggaaggggaacgcgcgtgacggtggcgaccaactgctccggcctccgggcttccgcttttac

SEQ ID NO: 33735 - DNA, 811 bp, Oryza sativa
  Clone ID: PAT_MRT4530_37818C.1
tcggcaaaaccttcccatgtgtcctttgtgctgcggcgtcctccatttgaaggcatcgacaaactcttcggtgcactcaagcttgatgacactggcaaggttgggaaaggggctggcatgccatgcttcctctgcctgcaccccacatgtaaacaatctatgatcactcaaggagtgtgggggggggctgagtgtactggtaccctaattcttgatccagtcagcgcacccaaatggcggctttactgcaatagatgtaactgcattgtcctgctcccacatgccgctcataagatcagtactacagataagaagtgcccaacatgtgagtctactatcatcgaagttgattttaacaagaaaactaccccacttaaggatggagctactttgcatgagggttgcatcttgtgcgatgagctgttgcattcgctcattgagatgaagcatgggaagtcattttttatgaggagaggtagaggaagaggcaggggtagaggtcgagggagaggaagcagtaggggaagacgggggagctcaagacacgatgatcctaagatgagcttcagagatttctgaaagtttcagggcttaaacctatatgtaagtacatgcaacactagttagaaacttaaccaccactgttgttctttccattttcttcctgtataaaccctagatcaagttatctttcatggttttgctaccatgctaagactgttatttctgtttctattggatgaagttaggcttgtttcccaggttgaagaatggctgtgtagcatcgatcttatgtaaacagtggttggtt

SEQ ID NO: 33736 - DNA, 381 bp, Oryza sativa
  Clone ID: PAT_MRT4530_37819C.1
atgctgtcgagcagccactgcttcccccattgtcaccgctcgagtctagatccggcgagccacgggccggatctagagagctcggtgaagaaagaggtcggaggcggggagggaacaacggagggagagggggagggagagctgctccggcctggggaggtgagggacgcagctgtcggcctggggaggagcggggcgccggtcggggaggagaggaggggtgccagccagggatgtgaggcgtcggcgttggaggaagtggcgacggtagggaagggctcacgaaggaacgcgcgccgcgagctcgcatgggtcgggagctcgacgggtgtcaccgcccataccacagcgcaacccggtgaaactaggatgcctgcctag

SEQ ID NO: 33737 - DNA, 1069 bp, Oryza sativa
  Clone ID: PAT_MRT4530_3781C.1
caactcaacaaatcacaccttaacacttgactaaattaacatgcatgcacataatcagcatcatccatgacttggcctaaaacttctccccaactcatacacccaaaacaactagcccaagagctactaggccgactatgacatcgctccacttttgacgcacgacggcagaagcgtccgacgacatcggcggcgggggaggtggtgaggacatcggtgcgaaagccgccgccggaaaatctgcctccacggactgcacagtgggagccatcgccggcgccggtttaggcggaaggtgcctgctcctgtgcttcttgtgccccgaatgccttcgctgcgtcgccgcgggtgctggtgccggcgaccatactggcgcttgcgctggcggcaacggcattggcgccggtgcagtccgcctcttgtgtcgtggagaaggtggcagcaacggcggtgggctgggcgttgcgggtgcggggcggtcggcgacgtccaccaccagcttcattccggactggcagtgccccggcgcgccgcagatgaaatagcgcttccccggcgtcgtgagcacgatggtggtgctgccgctgctgtcggcggagacagggctggtcgcggagcacgcttcgtagtcgtctttggtcacttcgacgacgttgtggtacgagctgtacttgaatgttagcgtgtctccaggagaaaacgtttgcgatgcaacccaggccttgtactccccgccccagccgccggctgcactgccgatagtgtaatcggcagccgacacgacgtggatcagtgagacggcgatagcgaggttgcgtagagtagcttttgccaaaagcgggaggcacgcgaccccggttcctcgctgcaaccgattcgcgcacaaggggcccagggccagggccgctgcgccgcctcccaaagcgaatattcgcgccacgtcggaaggagccgcgtccctgcaaggtgcatgaatgctataggaggtccgaacacccttatcagaggtatcacacttttgaccggaagaatcgacgaggatgcgcgttgggtagctgtgtcgccccat

SEQ ID NO: 33738 - DNA, 293 bp, Oryza sativa
  Clone ID: PAT_MRT4530_37820C.1
gtttggtttgaaggatatgatgggttggaatgatcctatgccttatttggatagagggatgaagaaggatagcagagtagcgaccggcaagagaagaggcatcattagctccctgctcgtgcgctcccaccgccgccttgcccctgcttgcgccgttggctcacccttgctcacgcgctcccgccaccgcttcatccctgctcgcgccgctggctcgcccctgctcccgtcgccgcctcgcacgctggccgccgattcgcccctgctcccgccgctaaccctagaacgcagtc

SEQ ID NO: 33739 - DNA, 339 bp, Oryza sativa
  Clone ID: PAT_MRT4530_37821C.1
atggtgtatggtgagggcgaggtgcaagcaacagaggtttggctgtcggtgcaggaggcgacgagggttcttgagcgcttcaaggccatgccacagctagacagatacaagaagacgatggatctggatggcttcatcaaggagcgcaccgacaagctccaagaaaagttgcacaaggtaagacgtgatgccgatgaaagcgagaccaagatactcatcgttgaagccttctatagccgctgcgcaggcctcgaggatcttaccattgagcagcttaccagccttggctggatggcagatgcacaactcaagatcgtcaacaactcagtctatccgtaa

SEQ ID NO: 33740 - DNA, 948 bp, Oryza sativa
  Clone ID: PAT_MRT4530_37822C.1
gcacgagggggcaatgagatcgatgtgaaagacaaggaggaaaaacaccatgtcgatgagctctacactatggcagtggcggaccacctcaaggttaggaagaattcggaagagagctcaacgcagtggaccaccggcattgctgaagttcagccgcctattaaatttatcttctaggaaacaagttatgttccctggcgatcaaaaaatagtcaagtggcataacttctatacaaatagaagcatgcaaggtctgctggagagaaactatgctgcagccgcaacgaagaaggcacaccgcaagccctgaggcagctgggagatgaagctgtgtgcgttggccgccttggcggcggcgatcacctcctccgctgtggcgtcctccttcccgaacaggatgttctcccggatgctggtggcgaacagcgccggctcctggctcaccagccccatctgcgctcgcagccactttagccggagcctccggatgtccacgccgtcgaccatcacctcgccggccgacgggtcgtagaaccgctccagcagcgcgatcaccgtcgacttgccggacccgctaccgccgaccagcgccacggtgcgccccgccggcacgcggaggttgaagctgacgaagatggggctctccggccgtgacgggtagcagaacttcacgttccggaactccacctcgccggcgacgttgcccagctcctcgccggtgtcgctctcggagtcgatcttgggcacccgccggatcacctccaggatccttttcgtcgccgagctcgcctccgagaggccgccctggataacggcgtatgagacgacgaagacggtgccacccttgtagccatgggacatgacgaggcggcttccgtaccagacgttgaaggccaagatggcgaatgtgatgccgttgctaccgatggcgaccgccttggcaagccc

SEQ ID NO: 33741 - DNA, 291 bp, Oryza sativa
  Clone ID: PAT_MRT4530_37823C.1
tttttgggtttttttttttttttggttttttttttttttttttttttttttttttttttttttttttatctgatttctgttcatttgttcttggattaagaacacagggaataaattccaggaaggggaaagacatacacccctaaccaaaccggaatatggtgggctataaaaaagactactacggggggactgacacatacccgaagtggaaaaaaaaacccccccaagggagggacggcaagagaaatcacggggggcccgggggtttgcctacttaggcggggcccc

SEQ ID NO: 33742 - DNA, 534 bp, Oryza sativa
  Clone ID: PAT_MRT4530_37824C.1
ccacgtgaccgcggccttggcgtcactcgctccttataagggaggatgctctcctagccacttgaggcatgtgaggtggagagaagagggggaacatgcgcatagttgctcgcctggcatggcatgactcctaataatccgatgcataaaatggcgtagagtctggataaattacgcgcgacttatcaggtttggttacgcggagtggagatcgtgcaggtgtcttgatatttctatataagttgagccgccgcctccacgcaacacacgcggaatcaatctagggcttgcctcctcctgatcgggagagcaggtctctggaacattcgtcttcgatgtcctgcaccgggagaaggtgacaataaggtttttggaagcgcttcgcgcgactgctccctattgttatattctattttctgagagtagagtattctatttttaattctgtcctttgattgcatatacatcctagtgttttcccaaaagaaattgggtatgccggtgccaacccggcacacccctaggtccgcccat

SEQ ID NO: 33743 - DNA, 324 bp, Oryza sativa
  Clone ID: PAT_MRT4530_37825C.1
atggcggcgcaagccgttgcagcatcacgtcttgtcagctcctgtggaccgtgctggctggacgtcgccgtcgaaagcagcggcgcagcgccggaggaaatatgccgggcaagatcaagattacattttcaggaccgtgctagattccaagggaagaggaggaatatcaccaagcttagagggatggccgtggaagacgatggcctagcggtggacggggcacacgggcgggtggcgaggcgtcaacgacaagccaaagccgtggggatggagaccggcagtgagtcggcgccggtggcatgggcaaagcaagcttatggttag

SEQ ID NO: 33744 - DNA, 2274 bp, Oryza sativa
  Clone ID: PAT_MRT4530_37826C.1
atgtccctggcgccgacgtggtgaatgagggtgaagtcccgcgggcgtagcggcgacgaggatgggcgcccaagcgaggtcggcagcgtggtgcgggggtgcaataacactgatctggatgacttgctaggattcaaggcacgtctaagccatcagtcaaatgcacaggcttcatggaacacaacaacaagctactgtcagtggtctggtgtcatctgcagtcataggcataagcaaagggtattagcactgaatctcacctcgactgggctccatggctacatatccgcttccattgggaatctcacatatttgagaagtctagatcttagttgcaatcaactttatggtgaaatccctttgacgattggttggctgtcgaagttgtcatatctcgacttgtcaaacaattcattccaaggtgaaattcctaggacaattggccagctaccacagttatcctacctgtacctgtcaaacaattcacttcaaggcgagatcactgatgaactaaggaactgcactaaccttgctagcatcaaacttgacttaaacagcctgaacggaaaaatccctgattggtttggaggttttctgaagctcaattccatttcagtagggaagaacatcttcaccgggatcatcccgcaatcacttggcaacctctcggcgctgtcggaacttttcctcaatgagaatcacctcactggaccaatccctgaggcccttggcaagatcagcagtcttgagaggttggcactgcaagtaaatcatctgtcaggcaccatcccaagaacactcctcaacctttcctcgctgatccacattggcctgcaggagaatgagttgcatggaagattgccttctgatttgggcaatggcctaccaaaaatccaatacttcatcgttgccttgaaccatttcacaggaagcatcccaccttcaatagcaaatgcaaccaacatgcgctccatagacctctcttctaacaacttcactggaatcatacctccggagattggaatgctctgcctgaaatacctgatgctgcaaagaaaccagctgaaggcaaccagtgtcaaggactggaggttcatcacgttcttgacaaattgcacaagacttcgtgctgtgacaatacaaaacaacaggcttggtggagcactgccaaactctatcaccaacctatcagcacagctcgaactcctggatatcggatttaacaaaatttcagttaaagttctaacactagtgcagagattgagcattgcttctgatatcgccgctgcactagattatttgcacaacagctgccatccaacaatagttcactgtgatttcaagcccagcaacattcttcttggggaggacatggttgcgcatgttggagaccttggccttgccaagattctcactgacccagaaggagagcaattgatcaattcaaagagttctgtagggctaatgggaacaattggatatattgctccagggaaggcgcctacaaatgacatgtttactgatggattgacattgcagaagtatgcagaaatggcatatccagcaagactgatcgatattgttgacccccatctgctatcaattgagaacacattgggagaaatcaactgtgtcatgagttcagtcacaagactcgcactggccgcgcaattctacccgaagctattccaaattcaggacgcgttggtgaagaaacaagtatggggacagtggggggtaggagaagttcgcagtacctctgctgctccaggggagaggcgcggcctgcacgctgacccacccaccgggtcgaaggcccggaacacgccgggacaccggaacaggaagagagactcgtcgtcccaggagagggcagaaggatgcgcggcagaggggaaccaatcaacggcgagcagcggcgggcgcggatgggagggcactccaggcggcggcgggagcggcacggaggggtcgcggtggagaggaagcttcagatggtggcaacggcggggccggcggtcggcgtgcacggcggcgcgcggagaggtggaggggataggagagaggcgggcaccggtggccatggcgaagaggtcggccgtcgtggcgccggtcgctgcctccgtcgccgcccgcacggtccatatccgcctcagccaccgcgagctctgcctcagccgaccgccgcccaggcgagctccgcttccatgcgaccaggccgttcccaacgctacccaccatcgttgtcgctacgggaatctctcgaaggagtag

SEQ ID NO: 33745 - DNA, 270 bp, Oryza sativa
  Clone ID: PAT_MRT4530_37827C.1
aacaaaaacaaagcaacgggttcccaaaggtccacacttacagtactttcaacttacaacttattcaagcaaattaaacaggtttgatgattcccttatccgagaaactaaactgtttgattttatttcgaaaccaggctattattgacaatctgcggcgggggcaataaatttaataatccgtgggggggaacttctctttggtttgggaaataaaaaagaccttttaaattatccctgcaaggccaccccccatgagtgggccaaccc

SEQ ID NO: 33746 - DNA, 902 bp, Oryza sativa
  Clone ID: PAT_MRT4530_37828C.1
cacgaggaagaaattctccatatgaatgcaggcatggcgaaactagctatgctcgcaactccacagttcagaaaacagagcaagatagaatgaagatgctgataaatgaggccatcacagacttatgcgaaccgacgagcaccattctcccaaagagcatggcgattgcagacttgggctgctcctcaggcccgaacgcgctaacgcttgtctcggctgctctcgatgctatccaccatcactgtgcacagcagcaacagccaccgccagaggtgtgcgtcttcttgaacgatttgcccagcaacgattttaactccgtcgcgaaaagcttggcgactctgaagcacagccatggcgatctagacgatccggttgtgatcaccggaatcggaatgatacctgggtcattctacgagaggctattcccctgtggctctctgcattttgtttgctcgtcgaacagcttgcactggctatcaaaggctccagatgatcttaaggagggtaaaatacctatgtatgacatggttgaacatcttagggtgtcgaggcgtgcagctgttagggatgcttatgctcgccagttcaggaaggatttcacgcagttcttgagcttgagggctcaagaattggtgacgggaggccggatggttatctccttgtatggccggtgctcggaaaaccctatctcaagatccaatcaggcatggcaggtggtagcagtagctttgaatgacatggcatccaggggtatcattgacaaagaaaagctcgattccttctacataccactctacgcacctttggagaacgaggtgaacgaaatcattgaggatgagggttcatttgaaatcaacaagatgctagtgcgaaatccattcagcggcatggacgacgccacg

SEQ ID NO: 33747 - DNA, 214 bp, Oryza sativa
  Clone ID: PAT_MRT4530_37829C.1
aaagcataatacaacaaaaatttaaaagaacttttgttctgcaccaaagaaaatcattcttcacttgggagggcgttgttatagctgcttgcaccaccacaacaacaaaaagatgtttaaggtcaaaatataaaagaaggggcgggccctttaagggttccaactttaccaaccggtgcttagccaatataatgtttttttttggcggccctaa

SEQ ID NO: 33748 - DNA, 666 bp, Oryza sativa
  unsure (1)..(666): unsure at all n locations
  Clone ID: PAT_MRT4530_3782C.1
aattataacaaacatgaacgtttttatcattaatagagtacaatgaaaataacatcacatttgngtactttcatatcggtgtagactgacaagttgaaatacaaaagggatgagggacaagcagatgtaattaatcacagctaaacagtatatactggtacaaaacttttnggagggctatgtggcaatacattgctttgtttttctgccacacctgtggcatgggaggttcctaggccagggatcaaaccctcaccacaacagctacccaagcagctgcagtgacaaccccagatccttacctgctgtattacaagagaactcccatatgatacattttaaatatacatttttatgagttcctattatggctcagcaggttaagtacccaaatagtatttatgaagacatgggttaaaagacctggcattgcctcgagctgtggtgtaggctgcagatgaggcttggatctggtgttgctgtggctgtggcacagaactgcagccacagctgattggttccctagcctgggatgttccatatgccgtggatgtggcactaaaaagataacagcgaagaaagtaaatatacatttttacccagaaatttctcttctaaaatatatgtgtgctttatttatatattatatattaatagtatatatat

SEQ ID NO: 33749 - DNA, 225 bp, Oryza sativa
  unsure (1)..(225): unsure at all n locations
  Clone ID: PAT_MRT4530_37830C.1
ctgcccntcccccggccngcctgccnttcttcagtctgcatgagttcgtagatcaagctcgagctcgccngccaatgtcgtccagcgaggtcgcctgcacgctcgccgcccttcatcctccacgacgatggcatccccatnacctctgagaagatcgccaccctggtgaaggcggccaacatcaaggtcgaggcctacttggcccggatctcttcgccaaagctc

SEQ ID NO: 33750 - DNA, 756 bp, Oryza sativa
  unsure (1)..(756): unsure at all n locations
  Clone ID: PAT_MRT4530_37831C.1
agcgcactcgtaactatcgnagagaggnagagagaatacacacttcacaactaccgtgcccatggagaaggggacgaaagcctcgcctacttcgccgccgccgctggtggatagaagaccgctcgcattggatgctccgccggtgacgactggtccgttaccagcgtcggggccatacagtcctcgtctccgttggcgcagctaagactttgatgacgctaatgggttaggaggatgaggggagtgtctgcggcgccgcagaactattgaacctagagacctactactaccccattgcactgatgaggcatctctggagtgtatgatgcgagggaggggtatcgacaggcgccgctttgccaggctgtcctgactcctaccaacagcagctccaacaatcaggacaagcccaattgaccgaaaggagaagccagggccatgagttcaaggatcgacatcaaaagattagccgtttcagacaaggagatgttatcaggctgcctgctgatggagctcattggtgctcaatggtggtgaagtgcccggttgttgccatatatgtcactgatatcaacaacggtgctaatcaacttgaccctcgacagaggatttcttgttagctggaaataagagaaaccctcaagcatccangcgtgaagttgagggagtggtcacaaaacatatttagtggctttagcactgaactgctttagcgagcttttggcataagcaccaagttgcaggcagctccagtgt

SEQ ID NO: 33751 - DNA, 416 bp, Oryza sativa
  Clone ID: PAT_MRT4530_37833C.1
cttaatctgatcgtccacgcgttcgcccactgcgaacgctagtacgacaccgcgagcgtgcctgcccttttttttccgcagcacgagcacgctcaaacaaacgcggggccacgccgaaaaaaagggaaaccaagcaccccccgccgaaaaaaaaacccacaacaaaaaaaacatcacgggccaaaagaagaaaaacgatgttcgctgatcaaagaacagggacgaaagaacaaaacagcagaggcgcagaagacatgcccaaaacacaggggctagcacaatgcatgtagcacccgccagccagatgccagcatgcggacgtaaaaaagaaagacaaaaaaacaccggcccccagaggagcatatggcgaccccacagtggaagaacaaccgaacacagcctcagttctgagacca

SEQ ID NO: 33752 - DNA, 399 bp, Oryza sativa
  unsure (1)..(399): unsure at all n locations
  Clone ID: PAT_MRT4530_37834C.1
aataaggtatatgtcccattgaaaatggtacttacatccatcagcatacccaaactcatgcatgcaggtgtacaggtaacataacctctatgatatgtttacacaggaaaacataatagtacaactaatgcatgctctgaaaacaaatcatacaaacatacatacangggagcacatatgctgctagctctgacgcatatatgtgcagactttttacaagcatgcatgcatgatgcacattctatatggcaacatcgatgccaccggcaatctccacggtgccggcgtcgtcgtgctccgacttccgcgccgncttccggaggcgcaggacgccggcgagtatgtccaagcatttctgcggcgcgacgagctgggggaagtgcccgacggagccgatga

SEQ ID NO: 33753 - DNA, 364 bp, Oryza sativa
  Clone ID: PAT_MRT4530_37835C.1
gctattgcaagctgctgcagctctactgggtgaacaattactcacatgtcaccagaactctagcaatgaagcagcatattggaacctgaaaagatttggatctcaccaatgtggacaacgaggctcatgagttatgactgctatgatgatgatgatgaagatctgcttcagcaagctcatgttatggatgtactactttagtatgctttgctttgttgattgggagctgcatcagatcctgtttgactgctcaatcaattgcaccatcttactctcacctactgttggatgagggtggggctttgctgtatgctcaatgttcttgaactcttgcatatgacagtaatgatgttccgtccttaag

SEQ ID NO: 33754 - DNA, 417 bp, Oryza sativa
  Clone ID: PAT_MRT4530_37836C.1
aaaaaaaaaaagggctttttgcaccccatttaacttgttcagggttcaagctaacgttgaaccttggccaagtccaacatgctggcccccttgtccccattttggggggggggggttcaagcccaatccaacacacgggatggtgcatttcatcataatttaaaggccttaacctccctttgaaccaggttttgggggccacattttttttcccaccctttttaaggggtccccaaaaaacgtgccccaaataatactttgcaaacctttggttttaaacagcaacatgcccctagggccctttttgctcatgtttttagcccctttgggagctttttgaatgcaacaagcctgtcccttttcgattcatgaggccccctcagttgctgaatttttcccaagaaacttattttttgg

SEQ ID NO: 33755 - DNA, 1131 bp, Oryza sativa
  Clone ID: PAT_MRT4530_37837C.1
atgacgctcctcgccgccatcaccaatccctccgccgccgccgccgccgccgccgtcgcggcgaaccccatcgtcctcactcccggcgccgctccgccaccgccgacctcctccgcgctccccacccagatcccgccctccgactggtccctctcccccgccgaccccgccctcgccaccgccgcctccttcctctccacctccctctcctccacctccgtctccctcccgcgcttccgctccctcctcgcctccttcctcaccaccctctccaactccctctccctccccgccccctcccccaacctcccacaagccatccgctccgtctccccctacttccccgccgccctcgcctcccccgtcgcctcccgagcggcgagcctcgctgagtacgacgtcctcctcgccctcgccgagtgcggcctcctccgccaccccccgccgagcctcctttcctcgctctccgaggccgaccgccccgagctcgtctgcgccgtggtccgacaggccgccgacctccgctcctccgagctgctcgcgacgctccgctgcttcctctcgccggcctccgatgccgcctacgacgccatgatgagtgtcaagaaccggtggaaggaagccgcggtgctagcggtcaacaggtgcaaggagaagggcgcggggaagaaggtcgatgccatggcgaggcaggcggcgctgctgctcatgatgggatacgatgggttcacctcaccggaggtgtgcctgcattacctgtttgcgtctgagaatgtggactctgtggtcttcggcgcagccgtatcggagctggatggtggggaggtggtcaggctgatgaagtacctcaccaagtggatagggaaataccagaggttcccagaggcgcaggcatgcccagaggctgtgggaatgccagggctggagctgtgtgacattgtgccctcatttcgggtggtggctggggcgctaggattggtgtttgaccagcacttctcgcacctagcgctgaatgcagagttgaaggaggatttgaaggccgcggagatgatggtgaaacagctggccacagaagctgaatctgcagggcctatcctggacttgcttcgacgtatgcagcaagatgtgtga

SEQ ID NO: 33756 - DNA, 1044 bp, Oryza sativa
  Clone ID: PAT_MRT4530_37838C.1
atgccgactgacgagacagccgcggcggcgccggccaccaccgcgctctccggccatgggtgcaccgtgtgcgtcaccggcgccggcgggttcatcgcgtcgtggctcgtcaagcgcctcctcgagaagggctacaccgtgcgtggcaccgtccggaaccctatggacccgaagaacgaccacctgagagccctggacggcgccggcgagcgcctcgtcctcctccgcgccgacctcctcgaccccgacagcctcgtcgccgccttcaccggctgcgagggcgtcttccacgctgcctcccccgtcaccgatgatcctgagaagatgatagagccggcgatcagggggacgagatacgtgataacggcggcggccgacaccggcatcaagcgagtggtgttcacgtcctccatcggcactgtctacatgaacccctacagggaccccaacaagcccgtcgacgacacctgctggagtgacctcgaatactgcaagaggacagagaactggtactgctacgcgaagacggtggcggagcagggtgcgtgggaggtggcgcggcggcgtggggtggacctggtcgtagtgaacccggtgctggtgctgggaccgctgctgcaggcgacggtgaacgcgagcacggagcacgtgatgaagtacctgacggggtcggccaagacgtacgtgaacgcagcgcaggcgtacgtccacgtccgcgacgtcgccgaggcgcacgtccgcgtgtacgactgcggcggcgcgcggggccggtacatctgcgccgagagcaccctgcaccgcggcgacctctgccgcgccctcgccaagcttttcccggagtaccccgtcccgagcaggtgcaaggacgaggcggcgccgccggtgaaggggtacctcttctccaaccagcgcctccgtgacctcggcatggacttcgtccccgtccgccagtgcctctacgaaaccgtgcgaagcctccaggacaagggcttgctgccggtgctgccgcccaccgccgacgaccaccaccacccttcctcgtga

SEQ ID NO: 33757 - DNA, 428 bp, Oryza sativa
  Clone ID: PAT_MRT4530_37839C.1
cttcgtttcagacatggcacaacacccacctaaagttcgagacccagtgtgttctcttgttattctccttcgttgccacgataaaagcaggccatgagtctatccctgacctatcccataagacgagccaacattcttcatcatataacccgcagcctcgggacttcccaaacgatcggctctaccgagcctaccttgtcatccagctcttcaagagcaccgtcacttccgacccaaagaacatcactgccacctgggtcggccacgacatctgcagcaacacagcctaccttggcttccactgcgggacaccagggcgtgataaaatgctcacagtcacagcattcattctcaatggctacaacttacgtgcgccgcggctgcaaggcttcatcgaccagcttcccgaccttgctcttttccatgct

SEQ ID NO: 33758 - DNA, 223 bp, Oryza sativa
  unsure (1)..(223): unsure at all n locations
  Clone ID: PAT_MRT4530_3783C.1
gcgaagtgcntctggcaccacngtcggccnggcctgccgccgcctgccaccngccnggagagggagggcctcccggaccctncncgccaagaaggatccaatggcggcgggggcgnacgcttcgcgcgctntcggctcccgatcaattgcaggtctcacaaggttgctctttcgagcagcaatataaagggattttttccctcagttatgcaacttccaatgc

SEQ ID NO: 33759 - DNA, 2526 bp, Oryza sativa
  Clone ID: PAT_MRT4530_37840C.1
atggcgaagagtaacaatggtaatggctacctcggtgtgactgagccaatctcattgagtggtccaactgagaaggatgttgtccgtacgcaggaggttgagaagtgtcttgctgacgctggcctgtatgaaagccaagaggaagctgtctcacgagaagaggttttaggcaaactggaccagattgtcaaggcttggattaagaaggcaactcgagctagtggttttggcgaccaatttgtgcaagaagcaaacgcaaagatttttacttttggctcataccgactaggggttcatggccccggtgcagatattgatacgctttgtgtgggtccaaggcatgcaactcgaactgaatactttttccaggctctttatgatatgctagttgatatgccagaggtcacagagttacatccagtgccagatgctcatgttcctgttttgaaattcaaacttaatggggtttctattgatcttttatatgctaatcttacacatgttgttattcctgaggacctggatctttcgcatgactctatattgcacaatgttgacgaacaaactgtccgaagtcttaatggatgccgagttactgataaaattctacgattggttccaaatattctggtttgcacctcctgcattgtctatttttcagatgatatgctaaatgctctttggtggatacggtatgatggccgtttattcgcttcaactttccggacaaccttgagattcatgagattttgggcaaaacgccgtggagtctactcaaatgttatagggtttcttggtggtataaactgggcacttcttgttgctcgtatatgtcaactgtacccaaatgcatcaccaagcatgttgatatctcgttttttcaaagtctacagcaagtggaagtggcctaatcctgttatgctttgccatattgaagagggttctcttggtcttcttgtgtgggacccaaggagaaattttagagacaggggtcatcatatgcctataattacacctgcttatcctagtatgaattctagctataatgtatctatcagtactaggcatgtgatggtccaagaattcacacgagcttctgatatctgtcaggcaatagacgaaaggaaagcagactgggatgctttgtttgagccatatccattttttgaatcgtatagaaattatctaaagattgagatcacagcaagaaatgaagatgacctcaggaattggaaaggttgggtagaatcccggcttcgtacgcttgtattaaagattgaacgatttacacgtgagatgctcctctcacatcctaatcctagagatttcatcgacagctccaggccattgcattgtttttactttatgggtctctggaaaaaacaaatcagccaagctcaagaagctgagcagtatgacattagagcaattgtgaatgaatttaaaagcaatatccatgcatatcaacactggagagaaggaatggaaattgaagtttcccatgtaaaaagaaaagatatcccatcatttgtttttcctggtggaatccgtccttctcgcccatcaagaacagttggcaaggaagctcgggctgtttcaagaagtaatatttcagctaatgttcaagaaagaaatgttccaagcatggcccagcctatgccatataagagtagtgaagtaaacaaaattccgtcagatcctcatggtggctatcagtcgcaagaaagaaataatgcagtggtctctagtttgccctgtgaagaaactggccatatgttcaatgggtatgcaaatctccatacagaatctgttgagctggaacacttgagaagctacaagggaagtacatctgttcctgagaaccatgttgtgcatgatttagtcaagccaccagagagcatgccacctaactcaatccatgtttatccaagtccaacaaatggattgggccatcttttagatagttcttgtaaaaaaccagcagacatcattgtaaataaaaccacaaatttctcttcagctgtcctagcagtacctgatgaacttgatgagctggattctcatcaagtgaaggtaaatcagaaagatttaactgcagtagatcaaggattatctttggagcataaagttggaagtaatgggggcaaagcaggaaccacaggttcacctgataacaatcatctgaagcgtaaagctgaggaagagcttgagccacttgagcttgctgccccactagttcgccctcctgcaccaacgtccatgacccagaggaggcccttgagactgagattgtcaactgtggtgcaacccaaacctgctgaaggaacttcatgaatcgagttgcttggagacatggagattattctcttcaagggagggaggccgcctcaagctatccggtcctgtagagctgtgtaacggtagcaggaaaaaggcactgaaatgtctaatagagcaacatgtaaactaaatattgatgtaaaatccaaaattccaagttctaataaaattatcgtgttttgcccc

SEQ ID NO: 33760 - DNA, 352 bp, Oryza sativa
  Clone ID: PAT_MRT4530_37841C.1
atgcctctatactttatttacatgcaagattcaacacacacaagtacacaactactcaaggtagtagccagaaggccaacacatcttacacgtgtaagaatagaacaaaacggggtgcagagcggtgtgcacgtagcaggacgccctgcatacgtgtgcgtgattgggtggcgcaaccgaaaacgacctgatccaatgcaaacgcaacgtagcaatcacgattgcccccacggaatcgcacatcatcactagccggataattactttcgtttacggcagtatcaacactcgcacccacttatgtgccgctgaattatacatgggacccactgctcgtggggcctacacagtg

SEQ ID NO: 33761 - DNA, 225 bp, Oryza sativa
  unsure (1)..(225): unsure at all n locations
  Clone ID: PAT_MRT4530_37842C.1
cccacgcttccgggagagggtgagccatggcgtgcagcttcccgccttcttccgccacgaggctccaggccgtggacgcggcggccgtnaggagcagcaggntgccgcctagggcgcgtaccgtntccccggtgcagaaatcgctgggcgccggctgcaagnccgcggntgccnnccggcagnaaaggtgcgacgangacctngcnatctaatttttttcggcgc

SEQ ID NO: 33762 - DNA, 3999 bp, Oryza sativa
  Clone ID: PAT_MRT4530_37843C.1
atgccggctcgcaccaggtccgttaacagtttggatagtgtggatggatttgacgctagagctgagatcctgcagcttaggcgggagatgacagatctgagtaatctgagaggtgagatgggagaaatcaaggaccttttgaagagtatttgcacagctctacctggatttcactctgctggtgcgagtactagtgggacggctggtgcaggtggatctgcagggacccaggctatggctggtgcaagtgtatctgcaggagcacaggctgctactgggacaggggctttgattgcaccattagttccccctggattttcatcagtggcaccaattttatctacgggaggaatgcagtcaggagtggctctacctcaaactgctgatgagactcaggtaaactcaactaatgcaattccttccagtcagatacatgctggtatgggaagtgtttttccatcaacaagtcttccaccaatttttccaatacacatgtctggtgctgttccttctgttggacatgtgaatttttctattgagccaaacactgttaacccaaattttgcaccaatattcacctcagcaccaatattcacttcagctactagaactcaggctggtcatttacctggggggttaaatatacatggagtggagtctcaggaggatgtgggaatgaatcattatggaatagaaacaaaccagccatggaggtatccgcagatgcagccaacagccagacctcatctgaatgctacagggatacatatggcaaatggaggaggacctgtttggccagaaggacccagacatctgtttggtgggatgcctaatccatatgctgacatgacactaagaagccagaggttggagttaacaatatttaatggagaagatgctattgggtggttacaacaatgcgagaagttctttgaaatgacaggaacaccagtagagcaatgggtgaatttagccactgggcacttggtaggaagagctgggaagtggtttagaaatcttgggataccatggcattatattaattggccccaattttacttgatgatttcagatagatttactgaggcaaatgcacacgaagctgtggagcagttgcagaatgtgaggcagactggttctgtcatgcattatattgataaatttgaggatagtgttgcattggttaaaagggatcatccctatctgattgagtattatattttgagctgctttattgggggtcttagagctgatatcaaacatgatcataagtgcaggacagggaaggtgatacatatgatggaagaagtagaggatgaagaagaggaatcaggaagtcctgaagaaaaccaggaaggggaatatcaaacagcacctggaagtcctgctaagaaagaagatgataatgaagaacaactgatgcagatttctactcatgcaatacagggtacatatggaatcaatacattctctttgattacctatgttaaaggaaggaaagttgtggcattggttgacagtggtagcactaataccttcatgaattatgaatttgcattgagaagtgggtgtgaaatcatagaatttgaccacaatagagtcatggtagctgggggaggaatacttaattccacagctaaaaccgaggtgatccagtacaaggtccagggatatcttttcgtacatactctcaagactttggagatggagaatgtgccagtccctgattctgtagcaactatcctagctggatttgcagaggtttttgctgagcccaaggggttaccacccagaagagaatgtgatcatgctatcccacttaagatgggagctgaaccccctaatcagagaccatatagagtaccacaccagcagaagaatgcaatggaggaaattataaaggaactcctggagtctgaagagattaggcccaatttgagtccttactcttcaccagctgttatggtcagaaaaagggatggcagctggagaatgtgtgtggactatagacaattgaatgcaagaactattaagaacaagtttcctatgccaattgtagaggacttgctagatgagttgaatggtgctaagctggtgagaaaatgtgtactggtattcttcgatgacatattgatttacagcaaaaatctggaagagcatgaaaaacaattgcagtgtgtcctatctattttgagatcccacaagttatatgctaagaggagtaaatgcacatttgcagcaccaagtgtagaatatctggggcatatagtatcaggagaaggagtggcaaccaagcccagcaaaattaaagatgttctagaatgggcagtcccagtgaatataactaagttaaggggctttttgagattgacaggttactacagaagatttgttcaggggtatggtgctatctgtagaccactacatgatttattaaagaaggataatttccattggggtcctgaacagcagaaggcttttgaccaactaaagaagattatgactacttgtccagtattagctcttcctgatttcagcaaaccgtttgtattggaaacagatgcttgtggttcaagcattggggcagtactaattcaagagggcagaccaatagcttattatagcaaagctctggggcagagagcagcagggtcatccacttatgaaaaagaagcaattgccattttggaagcacttaaaaaatggaggcattatttgctgggtaatcaagtgattataagaattgatcagcagagtcttaagtatatggctacacataaactttcagaaggaatacaacacaaattattgctgaaactcctggagcttgactataacattgaatataaaaaagggaaagaaaatgcagcagctgatgcattatcaaggagagacaccaaagaagtggaagagaaggaaaaatgctatgcaatcacattggtctatcctgaatggatagaggatgtgaagagcagttatctaaatgatgcccaatatatgaaattggtggatggggaggaactaaatgaagaatctagcaatttttctttgggtgctggaatactaagatacaaaaacaggatatatgttggcagtactactaatatcaggaacaaactgatacaagctttccacaaatcagcttttgggggtcattctggagttaaagtcacttaccaccgaatcaagaagattttctattggccacagcttaagaaggaagtggagaaaattgtctctgaatgccccacttgccagattacaaaagctgagcatgttcattctcctggtcttctagatcctctgcaaatacctgaaatggcttggacacatatttctatggattttattgaagggctgccaaagtctcaaggcaaagatgtcacaccgtatgaagcactatatggtgtacatccacctcagaatggggagcaagctatccctggaaatgtaactgaagaaatcagaatcactgctcaacagagagaagagttgatgttgagattgaaagataacttgttgagggctcagaatcgaatcaggaaatttgcagacagacttaggtctgaaagaagttttcaggagggagacatggtgtatctaaagatgcaaccttatagacagaacgcttttggcttgaggggatcactgaagcttcgtgcaaagttctatgggccatttagaatcctgaaaagaattgggaaagtggcttaccatctgcagttaccggaggaagctggaatacatccagtgttccacgtaagccagctgaagaaacatgtgggaaatttggttgtaccacttcctaatcttccattggtggatgaagatggtaacatcaagactgaacctgtcgctgtactagcaagaagggtagttccaagaagaaatgagccggtcactcaatggcttgttcactgggaaaatctatctcctgaggatgctacttgggaggactctgcttttattcaagcaacgtttccacattttcgaccttga

SEQ ID NO: 33763 - DNA, 310 bp, Oryza sativa
  Clone ID: PAT_MRT4530_37844C.1
acgagtgtgtgcacacgcgttgggagagtaggcctccgaaaccatgcaaaccatgcactgctacgacgtttgcacggacgggcgggtgatcaggtttttggggagcgcaaggcgcgactactcattgttcgtcaatgtctacttcatcttcaccaacatgtcgaacactggagacaacggcaacactggagacaaggagaaggaggctcccgacaacaccaacggaggcaacactgcctcaaactctagcggaggaccattcttgggcaacatcacgacaggagccataaatcctttcagctacatctag

SEQ ID NO: 33764 - DNA, 4265 bp, Oryza sativa
  Clone ID: PAT_MRT4530_37845C.1
atgccggctcgcaccaggtccgttaacagtttggatagtgtggatggatttgacgctagagctgagatcctgcagcttaggcgggagatgacagatctgagtaatctgagaggtgagatgggagaaatcaaggaccttttgaagagtatttgcacagctctacctggatttcactctgctggtgcgagtactagtgggacggctggtgcaggtggatctgcagggacccaggctatggctggtgcaagtgtatctgcaggagcacaggctgctactgggacaggggctttgattgcaccattagttccccctggattttcatcagtggcaccaattttatctacgggaggaatgcagtcaggagtggctctacctcaaactgctgatgagactcaggtaaactcaactaatgcaattccttccagtcagatacatgctggtatgggaagtgtttttccatcaacaagtcttccaccaatttttccaatacacatgtctggtgctgttccttctgttggacatgtgaatttttctattgagccaaacactgttaacccaaattttgcaccaatattcacctcagcaccaatattcacttcagctactagaactcaggctggtcatttacctggggggttaaatatacatggagtggagtctcaggaggatgtgggaatgaatcattatggaatagaaacaaaccagccatggaggtatccgcagatgcagccaacagccagacctcatctgaatgctacagggatacatatggcaaatggaggaggacctgtttggccagaaggacccagacatctgtttggtgggatgcctaatccatatgctgacatgacactaagaagccagaggttggagttaacaatatttaatggagaagatgctattgggtggttacaacaatgcgagaagttctttgaaatgacaggaacaccagtagagcaatgggtgaatttagccactgggcacttggtaggaagagctgggaagtggtttagaaatcttgggataccatggcattatattaattggccccaattttacttgatgatttcagatagatttactgaggcaaatgcacacgaagctgtggagcagttgcagaatgtgaggcagactggttctgtcatgcattatattgataaatttgaggatagtgttgcattggttaaaagggatcatccctatctgattgagtattatattttgagctgctttattgggggtcttagagctgatatcaaacatgatcataagtgcaggacagggaaggtgatacatatgatggaagaagtagaggatgaagaagaggaatcaggaagtcctgaagaaaaccaggaaggggaatatcaaacagcacctggaagtcctgctaagaaagaagatgataatgaagaacaactgatgcagatttctactcatgcaatacagggtacatatggaatcaatacattctctttgattacctatgttaaaggaaggaaagttgtggcattggttgacagtggtagcactaataccttcatgaattatgaatttgcattgagaagtgggtgtgaaatcatagaatttgaccacaatagagtcatggtagctgggggaggaatacttaattccacagctaaaaccgaggtgatccagtacaaggtccagggatatcttttcggtaaagcattccagttgattcctttaaaggggtatgatattgttttgggggcagactggatatatgagcacagtccaattaatttggacttgaagcagagaactctgacaatgaacaaaatgctggacaaaaatgttatggggtttgtaattgaagtacatactctcaagactttggagatggagaatgtgccagtccctgattctgtagcaactatcctagctggatttgcagaggtttttgctgagcccaaggggttaccacccagaagagaatgtgatcatgctatcccacttaagatgggagctgaaccccctaatcagagaccatatagagtaccacaccagcagaagaatgcaatggaggaaattataaaggaactcctggagtctgaagagattaggcccaatttgagtccttactcttcaccagctgttatggtcagaaaaagggatggcagctggagaatgtgtgtggactatagacaattgaatgcaagaactattaagaacaagtttcctatgccaattgtagaggacttgctagatgagttgaatggtgctaaggtattctccaaactggatctgagatcaggcaaaaatctggaagagcatgaaaaacaattgcagtgtgtcctatctattttgagatcccacaagttatatgctaagaggagtaaatgcacatttgcagcaccaagtgtagaatatctggggcatatagtatcaggagaaggagtggcaaccaagcccagcaaaattaaagatgttctagaatgggcagtcccagtgaatataactaagttaaggggctttttgagattgacaggttactacagaagatttgttcaggggtatggtgctatctgtagaccactacatgatttattaaagaaggataatttccattggggtcctgaacagcagaaggcttttgaccaactaaagaagattatgactacttgtccagtattagctcttcctgatttcagcaaaccgtttgtattggaaacagatgcttgtggttcaagcattggggcagtactaattcaagagggcagaccaatagcttattatagcaaagctctggggcagagagcagcagggtcatccacttatgaaaaagaagcaattgccattttggaagcacttaaaaaatggaggcattatttgctgggtaatcaagtgattataagaattgatcagcagagtcttaagtatatggctacacataaactttcagaaggaatacaacacaaattattgctgaaactcctggagcttgactataacattgaatataaaaaagggaaagaaaatgcagcagctgatgcattatcaaggagagacaccaaagaagtggaagagaaggaaaaatgctatgcaatcacattggtctatcctgaatggatagaggatgtgaagagcagttatctaaatgatgcccaatatatgaaattggtggatggggaggaactaaatgaagaatctagcaatttttctttgggtgctggaatactaagatacaaaaacaggatatatgttggcagtactactaatatcaggaacaaactgatacaagctttccacaaatcagcttttgggggtcattctggagttaaagtcacttaccaccgaatcaagaagattttctattggccacagcttaagaaggaagtggagaaaattgtctctgaatgccccacttgccagattacaaaagctgagcatgttcattctcctggtcttctagatcctctgcaaatacctgaaatggcttggacacatatttctatggattttattgaagggctgccaaagtctcaaggcaaagatgtcacaccgtatgaagcactatatggtgtacatccacctcagaatggggagcaagctatccctggaaatgtaactgaagaaatcagaatcactgctcaacagagagaagagttgatgttgagattgaaagataacttgttgagggctcagaatcgaatcaggaaatttgcagacagacttaggtctgaaagaagttttcaggagggagacatggtgtatctaaagatgcaaccttatagacagaacgcttttggcttgaggggatcgctcaagtttcgtgcacagttctgtgggccatttagaatcctgaaaagaattgggaaagtggcttaccatctgcagttaccggaggaagctggaatacatccagtgttccacgtaagccagctgaagaaacatgtgggaaatttggttgtaccacttcctaatcttccattggtggatgaagatggtaacatcaagactgaacctgtcgctgtactagcaagaagggtagttccaagaagaaatgagccggtcactcaatggcttgttcactgggaaaatctatctcctgaggatgctacttgggaggactctgcttttattcaagcaacgtttccacattttcgaccttgaggacaaggtcgtgctcaaggggattggattgttagagatggagatttcagagaagaaatggagaagagtttcagaagtttcatttaaaaattcagaagttcagagttagagtgggataccggttgggtgac

SEQ ID NO: 33765 - DNA, 393 bp, Oryza sativa
  Clone ID: PAT_MRT4530_37846C.1
atggactccgagaacgacatgctcaacgcgaacaactctgccagcgacgacttctacagctgcggggaggcaagcccgtgctccctggcggcatctgcgccctcttgcccagcctcccggctagggctgtcaaaaaagctcgaggctcgcgagctttgtcgagccgagctcaagctaccaacgagcctagctcggctcgagcttgtatcgagctcgagccaggcagacgagcttgctcaagctcggctcgttgacaaccctactcctggcggtggaactcccgaggatcagccatttgagcgccacggcggcagccgcggcgaggaggagcagcgcggccgcatccatggttgtgtgtgtgcggaaaggagatgggaggaggaatgcgtgtga

SEQ ID NO: 33766 - DNA, 336 bp, Oryza sativa
  Clone ID: PAT_MRT4530_37847C.1
atgagggcgtcggacagtctggcgacagccgcgctgtcaaattggcttgcggccgtggctgtgacgaggcggtcgcgcgggctagacggcgccgtggagtacgggctcaccgccgtggccgccgagcatggtgtcggagccctcggagacggccagtgggcgcccgtggatggcgtcaacggtgtagacgcggtcgctggcgccgcagtcgacgtcgtctgggaagcactcatcatcgcagaagtcgaggctgctggcgacgcagagagatggcgtcaacgtggagggatggaaaacgcgatggagtggcatggatccaatttaccaaaattgtag

SEQ ID NO: 33767 - DNA, 210 bp, Oryza sativa
  Clone ID: PAT_MRT4530_37848C.1
atggcgtgggtgcgggagggggcggcgccaacctcattggcgcgtttcccctgccacgtcggcgccgaccagtcatcacggtggcaagcacaatgtgtgaccacctcctggttcatctcgagcaggacaccatggagtgcaggcggtcgcagttggtctcaccgcagcgccgcgacacgcgccgtcgtcaccagggaggcggctctctag

SEQ ID NO: 33768 - DNA, 307 bp, Oryza sativa
  Clone ID: PAT_MRT4530_37849C.1
acacatacccacctctccctctccccttccctcctccttcctaccccgccgccggtgcttgtcgccgtcgccgccgtcatatagggcgatgagggcggttcgaggaggatcagcagcagcagcactatgaggaggatggtgttcatcttgttcgtcgggagggtgctcttctactgcatcttgctcctctccgcctaccaagagtttagtgaatttcggactgatggtgggccaacccccaagggcttgacagctaaatttaatctatttacccaccaagtgttccagaacttaggaatggcacagc

SEQ ID NO: 33769 - DNA, 1764 bp, Oryza sativa
  Clone ID: PAT_MRT4530_3784C.1
atggcgctgtcaggctttaattcggatgagtcggactcgcctcgaattgacagcggaagcggattacgacatcccctgactagcgcggatctcaaagcatttcattggtacggcaacgaaatgtttggtgtgacttcatcaatatcaaaatatatcggttcaaatcttccggaggcgccgccgcggggagatgtgccggagaggggcagaggagggggggagccggaggcgaaggagagggaggtgaaggtggtcgtggtggacgagccgcctggggcgccggtggcgaggctgcaggcgcagcggccgctggcgccgctgcaggtgaccacgcaggcgccgccgccgcccatgtccgtggcctccggcggcgttgagccgccgccacaggtggcgactttccagcccgtcatgcagaccccaccacaggtggcgttcgcgtcgctcaattcgcgcgtgtacaccaatggcatcacgctgtgcgtgttcctggtccacctcgccgcggccacgttcgccgtcgggttcttcgtgttcagggccgtcaaggacatcgtgcagcacccgcgttcccggaacgcgcagcgcgagcgaagcctgctgcgggaatggctgcctccggtggagggcgcggtggcgctcagcatcgtgctggcgttcgcgtggcagaaggcggtgcgggcgtggccgcgcgccatggtgggcgtcatcctgtggtccagcttcggcatcacgctggcggtgggcgcgatgctgatgtgcttctccatgccggccaccgtagggctcggcgtcgccatggtgatgttctccatcgggacggggctgtacgcgtgctgggtgacgcgccgcgtcgggttcacggcgcgggtgttcgagcgcgccgtgcagccggtggacaagttccgggggctgaacgggccggcctacctgatggtggcggccgggttcgtgtggatctccgtgtggtgcgtcgcggtgatcggcgcggcgaactaccggttcccggggctgaccatcctcggcctggtgctcagcttgatgtggacggcggaggtgatgcggaacgtggcgaacctgacggcgagccgggtgatcgcgctctactacctccgcggcatgcagtccagcgtgcagttcagcttccagcgcgcgctctcctacaacctcggcagcgcctgcctcggctcgctgttcgtccccaccatcgaggcgctccgcatcgtcgcccgcggcctcaacctcctcgagggcgaggacgagttcatgttctcctgcgcgcactgctgcctccacgtcatgaacgccatcttcgagttcggcaacagctgggccttcgtccacatcgcggcgtacgggagggggtttgtgcaggcgtcgaggagcacgtgggagcagttcgagaggctacaggggatgccggcgctggtggactcggacatcacgagctcggtgtgcttcctcaccggggtcaccagcggcgcgctctgcgtcgcgctcgcggggtcgtggacgttcgccacgcacaagcactacaccgccaccgtctcgctgctcgccttcttcgtcggatacctcatgacacggattgggatggcgctgccacaggcgtgcgtgggatgctactacgtgtgcttcgcggagaacccgacgtcgcggctgttcgatcccacgataccggagcggctgcacaagatgcaggaaggcgccgacccgctcgtgccgacgccgcgcttcccgcaacaacaccccggcgccgcctga

SEQ ID NO: 33770 - DNA, 235 bp, Oryza sativa
  Clone ID: PAT_MRT4530_37850C.1
tatggacatggcggtggcgttggaggagggtttggtggcggaaaaggtggaggcctaccttcccgctgctatatctcctccttagccgttatgggattcttcgtcgcgccgttccacatgttgtagattcagctcgacgacacgacttttgatgcctatgttgttggtaaacgaaaatgcccctggaattgttgttttgcaaggaatggcggggggttgccttttagatcaagaa

SEQ ID NO: 33771 - DNA, 414 bp, Oryza sativa
  unsure (1)..(414): unsure at all n locations
  Clone ID: PAT_MRT4530_37851C.1
ggtccacgtatggacatgatgcaatatataaacgtaggatgacacgtacacacagcggtgtacagagacaagaaaattaacatcgtatgcacgcacggagtgggcagcattaagcttacacagatggaaagagcgatgaccggcgctggattgatctgccccaggtgatgtttgtactgcacctattatgtgaggcttgaagatcaacctgcgagtccaggcattggatcgatgatctncgatgcggtcgggaccaagctaggattaactctgcctaggctggtctttgctgctatcagctgaagagtgctgtaggggaatgccctacggtgacgctagcacttgcctggggatgctctctggacactccttggttgagagactagatggcgtcagcacgggactagaggcacc

SEQ ID NO: 33772 - DNA, 537 bp, Oryza sativa
  Clone ID: PAT_MRT4530_37852C.1
atggagggtggccatggacaaggatgggtgacggctagccacttcgtcgacgttgaacgggaatgggagaagaggacgacgctctacaggccaagggtgaagagcttctgggtgctcgtgcgccgccttctctgctgccgccgcaagagttacaggccggattatgcggctgccggggaggaggacgacggcgagaagagcagcctcctcttgaccagcagaagctctttggaggagctcctggtgtcggacgacgccgacgacgacggcgccatcgacgacgccgccgtgacctgccggaacgcgtcgctgtgcgccaagaaagatggtcaggcgccggtggtcgtgctaccaccaccggggctgcatcacccagtgatggctcggccggcgcacggcatggtgacgacgtcgtcgggcggcggccgtgatggtgcggccgtgcagtgccggcggcggttcatgttcggcgggctccggcggcggctgatgatgaggagaccgtggcggccggtgctcgtcgccatcccggagtga

SEQ ID NO: 33773 - DNA, 581 bp, Oryza sativa
  Clone ID: PAT_MRT4530_37853C.1
caaccaccggcggtggtgagctgaggacggtgacgcgtggggacggagccagcagggagtggcggagggggactaaggacagcggcgcgtgggggcggagcatgataggggcggcagaggggggccgaggacggtggcgcacgggggcggagccacctagggcggcagaggggggccgaggacaatggcgggtgggggtggagccacctggggcactgccgatggtggttccggcttctacagccacgcgacagcgggtcttcgttgcaggaggagaggagcagcaagtgacgagtgagacgagggtggcgagatgggacacaacctcggcttccatcgaggcgcagaagggggggcgtggcagcagggggacacgggtgtcgcctcctccttctaatgcggtggctggcggccgcccgagcgccgccgccgtggtgtacgaggaggagattgaagattacgacgacgagctcgggtgcggctgctacagcggtggtggtgggggactcagagcggaaggtggaagaggttttgttgtcgaagggtctaattcggtcgactgcgatagttcagagatataa

SEQ ID NO: 33774 - DNA, 308 bp, Oryza sativa
  Clone ID: PAT_MRT4530_37854C.1
cacgagggcccattcctctgggtggtccgcgccacccagaggaatgggctgccgctgctgtggaggccctcggcgacctcggccatcgtctccggccccggcgccgcgatgctcccgaacgaggcgtacaccacggagcccgccggccgcgcgtccagccactcccggcacgccgccgccatcggcgtgtggaggtggaagccgtgcgacgcgtcgtccgggaggcggttgtcgaggtacgccgatggcacggtcggcccgatcgtcctcgcgccccatgtcgccgccatgtactccgcttcctgagg

SEQ ID NO: 33775 - DNA, 2199 bp, Oryza sativa
  Clone ID: PAT_MRT4530_37855C.1
attctgacggacaaattggattgcaaaaatatcattcgttgaattttgggatgtccaaactcctaagtggatcaagccacaaatattattcacgacccatattctagcgggccatctttctctgtggcatttgccgaagaacatacaagtaggccgcacatgaatgggtcaactggtgttaaatctaccatccaacacttctcaaaaacaaaactactaccttgtgcttactgtatttctatgatacaccttgtcaggtagaacctattgctggacaatctctatgacacacaccttgtcaggagagcagtagttcaagacactagtgacctctgcatgcaagcgatgacagttcgttgcctctggttggacatcgacccattggccatcgacatgctcgacgtgcacatgttgctcctgctgcgcagagaacctgagcttagtaacatctctgcacatcttgtttacgtggttcatggaaagaatcagatcaaaatcatcttctgtttccttgctgctcttgcgaagcatgaggccagcatccgcgccaaaggagctgacagccccaaacagcaacggatgcccaaggtttggcttattggataagctgcatatctgtacatactccacacccatttcatttagagtatctaaaattttatttgatgatagcaagctgaaaatcaccccagttcctgctggcttctgtagtatctcccatggagacttcaacagaatcttcctgctgtttagcttagaggacatactgacaatcggaagtttcatttcttccagaacccataccttctgagtgtctaaaccaaaatagtcattctctaccaaacaattctgaactgaccccacatgaccagcaggacaaacaataacaaaagggatagagcctcgggtttcttcaaccttcattaacttattaaaagaattaagcaatccctgaaactcagcatccagggtatcagagtcatttgtaataagtatggtggctgctttcgacttctgaatgatcccagcgccttcattgagttcactagcgaagttcgcattctcttcatggttcaagagggtttcgtaaggtattctcatcaattttttcctcgatgaagaggatttgacaaagacatcttttgacaagctgccaattggtctgctaacactatgcattgcatgtcggaacaactgaaagtcaatggacccaatctgttctgcaagtgaagccttctgaaccttgtccccagatagcaaaccttccagaacatgaccctggtccatttcagatagtatcttctttgctgcaattacacgacgctgtaacctcttcttttccttccattccatagcacgcctttctttctttgatctcttatcagaacgcgcgttgagctcaagaagcccctttggaggtgtaatccacatttctctactctccatatcaatatcaggtacaatatcctcagcaaatggaatccacacatgctcaccagatggggtggaaccttgattttctgaatttggctgagaaacagtatcctcagtgccaccaaccataacctgtagaagatcaccagctccaaagttgaaaacctgaccaactgttccaacaagcttgcccgtgtccttgacaataactctcatgccaacaagatcaagtgaatagatttcatcttcctccatttttggtctatccccaactttcacaagtatagctgaaccaactatttgcctggcctcatccacggaatcgaccccatcaaaggtgacgatccaactcttcttcccggtatgagctcttcctcgaacaagctcaaattcctttacctgctgcttcccagcggcacgggccctcagccatctcttccccggcgtggcaaagcggagttgggggaagtcggtgcggggcgacacgaggacgtcgccgcgaaccccgtgcgcgccgctcacgtatcccaccaccactagctcttcctcctcctcgtcatcgtactcctcctcctcctgcgcgtcgccgaggctggagagcagcgcggcgccaagacgggccggcgcgagcgcgaggcggcgcggggggaggtgggtgtgtggcgcggggaggccgcgacacgaggaaggggagagcgggagggagaggaagaggagggagaccggtgccgaggcggaggcggaggcagtggcgggaggcgccat

SEQ ID NO: 33776 - DNA, 174 bp, Oryza sativa
  Clone ID: PAT_MRT4530_37856C.1
atgggtggtagctccgcacagttgcctcaaggggttatgaagaggaaaggtagatctgtgatcctgaatcctgggagagtgatgttcagtgatgatgtcacaacaccgtcccctaataacagctttgcccaagaagtgccgcattttgaagctcatattttgaatacagtatag

SEQ ID NO: 33777 - DNA, 156 bp, Oryza sativa
  Clone ID: PAT_MRT4530_37857C.1
atggggatcatgaagtatccaagacaccctagcataacattgtggcggccaagccgcttttggagaccgtccaagacaagttacgcgaagaccacgctatcaactcacctgtcgcccagcgacctatgcgagaagattgaaacaataagaggatga

SEQ ID NO: 33778 - DNA, 2151 bp, Oryza sativa
  Clone ID: PAT_MRT4530_37858C.1
atgggtgtcgtcgaggcaaaggcgttgcatggggcggtggaggccctggctgggtcgctgcagccgcacgtggccaccgccttcttcgtgttctcggcgtgcacggtggccctcgccgcgctccttgccgtggtgcgcctgcgcccgccgtggtggtgcgactgcaccgtgtgcgaggccttcctgacggcgtcgtgggcgggagagttcgacaacctctgcgactggtacgcccacctgctgcgcacctcgccggcgcagaccgtgcacgtgcacgtcctccgcaacgtgctcaccgccaacccggtcaccgtcgaccacgtgctccgcgcccgcttcgacaactatcccaagggcgctcccttctccgccatcctcgccgacttcctcggccgcgggatatttaacgtcgacggtgacgcgtggctcttccagcgcaagctcgccgctgccgagctcgcctctccggcgctccgcgccttcgcggcgcgtgtcgtggcctccgagctgaggtgccgcctcatccctctgctccactctgcttcacgtgagggcaacggcaaggtgctcgacctgcaagacatgttccgccgcttcgccttcgacagcatatgcaagatctcgtttggcctcgaccctggctgcctcgagctgtcgatgcctgtatcgacgctcgtggaagcgttcgacacggcgtcgacactctccgcgcggcgggcgacggtgcccatgcagataatctggaggctgaagcggttcttgaacgtcggggacgaaaggaagctccgggacgcggtccgtttggtcgacgcgctcgcggcggaggtcatccgacaacggcgaaagcttggcggcgctgccaccggcagcgacctcctttcacgcttcatgggctccatcgacgacgacaagtacctccgcgacatcgtcgtcgccaccgccatccgagacgaggtcgcccgcgtcacgggcgacggcaaccgaaccatggccgccacattcgacaagctcaaggacatgcactatgtgcacgccgcgatgtacgagagcatgcgcctgttcccgccagtgcagttcgattccaagtttgccgccggcgacgatacgctgccggacggcacggtcgtcgcgaagggcacccgggtgacctaccacgcctacgccatgggccggatggagtccgtatggggccccgactgcgccgagttccggccggagcgatggctccgggacggccggttcgtcccggagagcccgtaccgttacccggtgttccaggcgggcgttcgcgtctgcatcggcaaggagctagccctcatggagatgaaagccgtcatcgtcgccgtcgtccggagcttcgacatcgaggcgatcgcgcggagctcgcggcggcccaagttcgcgccgggcctgaccgccacgttcgcaggcggcttgccgcccaccacctgggatgctgaggcgtcggcagcgtgggacagagccagcggcaaggtggcggagctagtgatctgccccatctacgccaacctccccgccgagctgcaggccaagatcttcgagccagcgccggcgggcgcgcgcaaggtggtgctcgccaccaacatcgccgacgccgagacgccgtacaacccgcgcacagcgatggagtcgtttctcgtcgcgccggtgtccagggcgtcggcggagcagcgcgcctgccggtcgggtatccaggtcgaccgggacagcgacaccatcggggcgtacgtgtgcaacccaacgacaaggcggtgggcctccttgacgcagccggcgaccccgtggccccgcagacacgacggcgcgttcatcgccttcgacccggccgtctcgcagacacgacggctggcttgtggcgtggttggacgtacgccgacgctggatttgctcataccggagtcgtcgtccggagaagacgagctagcgccgtcgccggaggagaggacgttgcttctgcgcgtgttctctgtgtcccacgctgccgccgcctccgcatcccaggtcgtgggctgtagctgccaggtccggctccgccgccgcgcgctgaccacccgtcgccgtgagctgccctgctcgccgagagagggagagagagagagagtgaaagaggggaagaggagaaggagatga

SEQ ID NO: 33779 - DNA, 3253 bp, Oryza sativa
  Clone ID: PAT_MRT4530_37859C.1
atgaagggcctatcattgaacagcggtaagaaaaggatatcttccctccttttatctccagtgaccagtaggatagacatccggtccatccggacattggtcgagcacaccaggcctactgctgccaatgttattactatcaggtccctctgcgacaactatttcaaagatgacggacccacccagccctcctccctcaccggcgacagctccctctcctcctccctccccaccgtcgggcgcgtacatgacgacgagcaaggcgtcatcgtcctcttcgcgctcctcgacaagaccggcatcctccctatcgaccatggcatcatctacgcgctgctgcttggcgggctggtgctcgatgtggatgccatcctcatgctcctctcctccaaccagatgatcttcttcttcgacagaaagccaaagctggcgtggcttgcgccgcggcccggcccctgcggcggcggccaggccgaggcgttgcatggggcggtggaggccctggctgggtcgctgcagccgcacgtggccaccgccttcttcgtgttctcggcgtgcacggtggccctcgccgcgctccttgccgtggtgcgcctgcgcccgccgtggtggtgcgactgcaccgtgtgcgaggccttcctgacggcgtcgtgggcgggagagttcgacaacctctgcgactggtacgcccacctgctgcgcacctcgccggcgcagaccgtgcacgtgcacgtcctccgcaacgtgctcaccgccaacccggtcaccgtcgaccacgtgctccgcgcccgcttcgacaactatcccaagggcgctcccttctccgccatcctcgccgacttcctcggccgcgggatatttaacgtcgacggtgacgcgtggctcttccagcgcaagctcgccgctgccgagctcgcctctccggcgctccgcgccttcgcggcgcgtgtcgtggcctccgagctgaggtgccgcctcatccctctgctccactctgcttcacgtgagggcaacggcaaggtgctcgacctgcaagacatgttccgccgcttcgccttcgacagcatatgcaagatctcgtttggcctcgaccctggctgcctcgagctgtcgatgcctgtatcgacgctcgtggaagcgttcgacacggcgtcgacactctccgcgcggcgggcgacggtgcccatgcagataatctggaggctgaagcggttcttgaacgtcggggacgaaaggaagctccgggacgcggtccgtttggtcgacgcgctcgcggcggaggtcatccgacaacggcggaagcttggcggcgctgccaccggcagcgacctcctttcacgcttcatgggctccatcgacgacgacaagtacctccgcgacatcgtcgtcagcttcatgctcgccggccgcgacaccatcgcctcggcgctcaccgccttctttctgctcctctccgatcacccagaggtcgccaccgccatccgagacgaggtcgcccgcgtcacgggcgacggcaaccgaaccatggccgccacattcgacaagctcaaggacatgcactatgtgcacgccgcgatgtacgagagcatgcgcctgttcccgccagtgcagttcgattccaagtttgccgccggcgacgatacgctgccggacggcacggtcgtcgcgaagggcacccgggtgacctaccacgcctacgccatgggccggatggagtccgtatggggccccgactgcgccgagttccggccggagcgatggctccgggacggccggttcgtcccggagagcccgtaccgttacccggtgttccaggcgggcgttcgcgtctgcatcggcaaggagctagccctcatggagatgaaagccgtcatcgtcgccgtcgtccggagcttcgacatcgaggcgatcgcgcggagctcgcggcggcccaagttcgcgccgggcctgaccgccacgttcgcaggcggcttgccgcccaccacctgggatgctgaggcgtcggcagcgtgggacagagccagcggcaaggtggcggagctagtgatctgccccatctacgccaacctccccgccgagctgcaggccaagatcttcgagccagcgccggcgggcgcgcgcaaggtggtgctcgccaccaacatcgccgacgccgagacgccgtacaacccgcgcacagcgatggagtcgtttctcgtcgcgccggtgtccagggcgtcggcggagcagcgcgcctgccggtcgggtatccaggtcgaccgggacagcgacaccatcggggcgtacgtgtgcaacccaacgacaaggcggtgggcctccttgacgcagccggcgaccccgtggccccgcagacacgacggcgcgttcatcgccttcgacccggccgtctcgcagacacgacggctggcttgtggcgtggttggacgtacgccgacgctggatttgctcataccggagtcgtcgtccggagaagacgagctagcgccgtcgccggaggagaggacgttgcttctgcgcgtgttctctgtgtcccacgctgccgccgcctccgcatcccaggtcgtgggctgtagctgccaggtccggctccgccgccgcgcgctgaccacccgtcgccccgcctgcttcttggatttccatgcaagaggggaagagcctgcaccgcgaccacgagaagcacgatgggcacaatactcagccaacttctctggatgttgagcaaaacaattctctgcactatgtcctgtctttccacaatgcttacaaggcactgaagagcgtgaggcgcagcgacggctgcgggataggcaccgcaactggcggcatggaagggcaccgcgacgggcgacgtgaagagcagcgacgactacgagactgtcgtcacgtggatgagcaggatggatcccgccgcggggaggccggatccgtcgcctgcgacgacgacggcaatgacctaatggcgttcgagcggctccacgccggcgatgacgacggtggtggcggtgacaacctgaaggcgttcaagtggctccacgctggcgacgacgactgtggtggcagcgacaacctgatggcgttcgagcggctccacgccggcaacgagacagtgttgacggcagctagattaggatgctctctcctctttgtcccactttatgtgcctccattgctgggcacctggcccacctcttgcaccctgtcggacgcctcatcgatggctctgatcgacaggcatattgcacaaggacgctga

SEQ ID NO: 33780 - DNA, 2412 bp, Oryza sativa
  Clone ID: PAT_MRT4530_3785C.1
atgagaggcgtcagcattttcaccacatcgatctccttccttctcgcgctcaccattgctcttgcagaagatcagagaagctcccttgcaaggggttcctcaatctccacccaagatgacaccaccaccatccttgtgtcccccaatggccacttctcatgtggcttctacaaggtggccaccaacgccttcaccttctccatctggttctccaggtcgtcggagaagaccgtcgcgtggacggcgaaccgcgacgctccggtgaacggcaagggctccaagctcaccttccggaaggacgggagcctggcccttgttgattacaacggcacggttgtgtggagcaccaacaccacggccactggcgctagccgtgcagagcttgacgacagcggcaacctcgtcgtcatggatccagccggtcatcgcctctggaagagcttcgattcaccgaccgacacgctcctcccattgcagccgatgactcgagatacaaagctggtatctgcatctgccaggggcttgccttactcaggcttgtacaccttcttctttgacagtaacaacatattgagtatcatatacaatggccctaagactagcagcatatattggcctaatccttatgagcggtcgtgggagaatggtaggactacttataacagcagccaatatgggattctcaatcaggaaggcatgttcttagctagtgacaagcttcaatttgaagcgtctgatcttggtgataaggatgtcatgaggaggttgacactcgattatgatggtaacctaaggctatatagcttaaacgcaacgaatggtaaatggtcagtctcttggctggcattccctcgactctgtgagatacatggtctgtgtggcataaacagcttctgcacatacatgccaagccttcagtgttcctgcctcgaaggtttcgagatgactgaacctagttactggagccaagggtgcaggcacaaggaaaacatcacagtcaaaggggatcataacgcaaacaacaatacagagcaaaaattcatattcgtggagatccccaagactgacttctatgggtatgacttcaactacaccccatctgtcgcattgccagtctgcaaacagatttgcttgaacgatgatggctgcgaagcttttgcatatcggaagggaaaaggtgaatgtttcccgaaggctttgcttatcaatggcaagaaattcccagatcctagcaatgatatttatctaaaattttccaaggaggcgtcgtcttcacaactattggcttctaaaccatcccatatctgcaaggtaacagaaaaagacgcctatccttcatcgcaaatgttcgagggtagcaattcgaaattcaagtttggatacttcctttcttcagcattgacattgcttgtagttgaagtgattttagttacagttggatgttgggctacatacaaatggggaagaagaccagagattcgagacgaaggctgcaccataatttccagtcaattccgaaggttcagttacaaggagttagagaaggcaaccggattttttcaagaagaactaggaagtggaggatcaggagcagtttacaagggaatcctcgatgataataggaaggtcgcggtgaagaaactaaatgatgtgatccacggagaacaggagttcaggtcagagctgagtatcataggacgagtttatcatatgaaccttgtcagaatttgggggttttgtgccgaaaagacgcacaagctcttggtttctgagtttgttgagaatggctctttagacagagttttatccaaccatcagagcgtgtttcctgtgctaccgtggagccaaaggtacaatatcgcacttggggtagcaaaaggattggcttatctacaccatgaatgtctggaatggatcgtgcattgcgatgttaaaccagagaacatattgttagataaagattttgagccaaagattgcggattttggattggtgaaattactgaatcgaggaccaagcacaaatatcctatcacgagtgcatgggacaagagggtacattgcgccagagtgggctctaaatcttccgatcacaggcaaggctgatgtttacagctatggagtagtgcttcttgagttagtgaaagggaatagggtttctagatgggtggttgatggtgaggaggaggtggaactggctgttaaacgaactgttgatattctcaaagagaaattagctagtggggatcaatcatggctgctggattttgttgactgcaggctgaatggagaattcaattattcacaggcagccttagtgctaaatacagcagtgtcatgtctggatgaagataggcgcaaaagaccaagcatgaacagtgtggtcgaaatcctactttcacttatggaataa

SEQ ID NO: 33781 - DNA, 608 bp, Oryza sativa
  Clone ID: PAT_MRT4530_37860C.1
ttcacttttgcagcgatggatcgaagttggatgtatagaagaactgtgcgacgtcatagcaaatagtatagaaattgagtattaaattttataaacaccgcggaggaggataggaaaagaagaaacaagattacatatgttgtcaatgtgcatattgcaaaaatgagatatgtttgatagcagagtggacgtacatgctcatctgatacaacgaggattcatggagggctacacatgttgggtgaagcatggagagcaagaatcacttgacgatgttgcagctgcagacagaagtggagcacaaaattaggaaaatgaagatgagcataatatgtttgtaccttctccattaggcggtgaaatggttgatgtggatcacgatctgatgcaagacatattacatgacgttgaggacacagcttacaacgagagagattccataaaattcagcaggttggtcggtgactcggagacgcctctatacgccggatgcaaggcaaaacacaccaaattgtcagataccttgaacctaacgaagctgaaggcaagtagtggatggacataaaagagtttcatagatctttggggaatactgaaagcaatgctat

SEQ ID NO: 33782 - DNA, 4122 bp, Oryza sativa
  Clone ID: PAT_MRT4530_37861C.1
atggggctcgccgtggagccacctctggcactgtcaagatcaaggatcagaaatgctaagtctgtaggagttttagaagaagttcagaatcgatctgtgaggcaaaaggggaggaattctttccgaaccgcccttgcagaaagctggatggttactaagactcattccaacgagtcgatagttgatatggaggagatgaatgaatttagattggatgttgccagcttgaagaaagatgtggcggatctgaaatcactgaagactgagatgagggaaatcaagggattgctgagggagctatgcaagcagaagaatattgaagaaacggaaggggaaaaaggggaagctacgactcaactacctcaggacaggacagtggcgcaagctgctgatggtgctggacctagcaatccaaatgctgaggtacgtgtcgccattgagaccactactaatgctccaaataatgaattggtgaatctatgggccacgactggaggagcttccaggggaaatggacatgcaggacaacccacacagcagttctttactgatcatcagacaagacagaatatgcaagggggtaatgtgggaggtcaccagggtttcactcaggggacaggcatgtttcatgggaattctagggtgcatgtcattgaccctcagaggaatatgtatggtggaaatggtaatcattatgcagaggcaatcatcaaagggcctagactggaaattccactgtttggtggggaagaacctgtggactggctgaagcaatgtgagaagtttttcgagataactgggactcctgttgatcagtgggtcaatttggcattagcacatttgcaagggagagctataaaatggtatagagggattggcataccttggcaattaatatcatggccacaatggtgcgccatggtgtgcactcggttttcagctgctgatgtacatgaagcagttgagctgtttcaaaatgtgaaacagcatgggcaaactgtggatcaatatattgacaagtttgaggaatacatggacctggttaaaagggatcacccctacttgcaggagcagtacctgaatagttgctttattgggggattaagaaatgacattaagcatgatgtgagtggacacaaaccacagggactacttgaaacctattggtatgccaagaactatgaaaaggctgccaatgctaggaggatgacaatgggtttgaataggaacaggcttccaaaccaaaatgtgatcaaccaaggtagaaactttgctaacaaggtgccacccaaaaccaatggggataagaagtgttggttttgcaaggaagtttggtttcctgggcatcaatgcaaggtcaagaaagctttgaatgctttaatgttagaagatgaggaactagaagaaaaaggggaagaagaaaaggaagtaaaaactagagagatgacccaagaaaatggagaaacttctcctgatgaaagtggtacagaagagttgatgtatgtatcccagaatgctatgcaaggtactactcggcctgacactttttcaatgattatacagatacatggaaagagagcaatagggctggtagatagtggaagtaccagtacttttatggatgaggagtttgctttacgtaacaactgtcccacaattagtacggaggttaagagggtagaagtggctggaggtggagagctgaaatcaggagtgcagattactcaagtgacagatgtaagtgaagaagatgcaaactctggtattcctgctgatattcaaacaatactccaggaatttcctactgtacttgaagcaccaagtggtctgccaccaagaaggagttgtgatcatgtcatcagtttgaaggagggtgcaacacctccaaatttgaggccttacagagtaccccaccatcagaaggaagcaatggaaaagattattgctgaactgatagaatccaaggagattcaggttagcaatagcccttattcctccccggctgttatggtaaggaagaaggatggatcatggagactttgtgtagactacaggcaattaaatgcacagactatcaaaaacaagtttccaatgccaatcatagaagacctgttggatgaattgaatggtgccaaggtgttttccaaattggatctaagatcaggataccaccaaattaggatgtctgaatctgatgttcccaacacagcatttagaactcatttaggccactatgagtatcaagtgatgccatttggtctaactaatgctcctgcaaccttccaatccctgatgaaccaagtgttggcacctttcttgaggaagtttgtattggtattctttgatgacatcttgatatatagcaagaatagagctgaacataagcaacacatcaaatttgtactagaggtactgagagctcatgagttagtaatcagacctaagaagtgtgcttttgggttatccagtgtatcatatttagggcacattatctttcagaatggagtggctacagatcccagtaaagtggagaagattgctaattggcctattcctaagaatgttactgatctcagaaaattccttggaataaccggatattacagaagattcatcaaggggtatggattaatatgcagacctttacatgacatgctcaagaaagaggggttccaatggggtgaaaagcaaactgaggcattccaggaactgaaacaaaaaatgtgtagcagtcctgttttgaccttaccggatttcactaaagaattcactattgaggccgatgcctgtggaactggcattggtgctgtactcatgcaatctggaaagcctatagcatttttcagcaaatcattgggacctaaagctgcagcacaatcgatatacaaaaaagaagcaatggcaattttggagtctcttaagaaatggaggcattatatcctgggaagcaagttaattatcaaaactgatcagcaaagcttgaaacacatgatgaaacaaaggttggttgaaggtatacaacacaaattactcctgaaactgatggaatacgactactgtattgaatacaaggctgggaaggagaatgtggtggcagatgctctatccaggctaccacagggaaaatcagaagaggaacaatgtgatgccattacagtagtgatacctgattggatcctggacatccaaagaagacactcaggtatgagagctacttatcacagaattaagtctttattttactggcttggactgaagaaggtggtggaacaatttattagagaatgccctgtatgtcaagttacaaaagctgagcatgttcatatccctggactgctgaatcctttagaagttcctgatatggcttggacacatattaccatggatttcatagaggggcttcctaagtcaaaaggaaaagatgtgattctggtggtggttgacagattaacaaaatatgctcattttcttgctctgacacatccttacagtgtggagcaggttgtggaggtttttatggataatatacataagttacatgggatgcctatggccatcattactgaccgagatagaatattcaccagtcaattgtttcaggaagtgtttaaagcaatgaaggtccagctgaggtttagtactgcatatcaccctcagacagatggtcaaactgaacgggttaaccaatgtcttgaatcgtatctaaggagtatggcatttcaggaaccacatcaatggtattcgtggttggccttagcagagtggtggtataatacaacctaccatacatctttacagatgacaccattccaagctatgtatgggtatccaccaccccaaattaatgaattttcagtgccttgtaatgtttctgctgaagctagggtcactactgagcaaaaggaagcaatattgcgaaaactcaagtcaagcttaactgaagcacagaggagaatgaagcattatgcagacagaaataggtctgaaaggagtttggctgtgggtgatatggtttatattaagctacagccttacaggcaaactgccttcggcattagaggctccttgaaactgagatcaaagttttatggtcccttcaaggtgttggaacgtgtgggatag

SEQ ID NO: 33783 - DNA, 292 bp, Oryza sativa
  unsure (1)..(292): unsure at all n locations
  Clone ID: PAT_MRT4530_37862C.1
gtcgccatggcgtcgtcgccgccgcttgtcgcctgcgtcctcctcgccgccgtcgttttcaccgccgtggcgccgccgccgggngcgcgtnctgcgttccgcgcaacgggaagncggcgccggggaagcccgggatgtcaccggcgccgccgaagaagctgacgcccgcgccgccgacgacgccgccgccgaagaatgccanttccttcccggccccggcggcgacctcgtgaaggcgtntggcgaagacgggacttacccggtggtgtgcagatgacggtggttgccgccg

SEQ ID NO: 33784 - DNA, 1176 bp, Oryza sativa
  Clone ID: PAT_MRT4530_37863C.1
atggatatatcatatgcaagtagcaaccgtgcaagtgtatgcagtgcgagtgttgcagctttgtgagcatcagaaccaactcttgcaaatgaaggagatcatgctgcaaatgttgttgtagtagcaagagttaaagttgatttgacacaggaaactacagatccaaatgtccctcttgcaaagaaggcaaagaagtgcagttctgaagtttggagccacttgacatgtatgagaaaaagacagtaggatatgatggaacagagatcgtagagctttgggaaaagggtaagaagtacagctatacatctcgttgtgagagcaacagtgcacaacaatattttggagtcacttagacaacaagcaccaaataaaaagtggccaacagcttcaagatttcaagaagagtgaaagcggcactctgttgggatttacaggtatgatgagggagttagcttgaagaaatattacttgatcattatatatgaatatccctttaatattgttgagcatgagtactttgtggatcttattaagtcattgtgccctacttttgcaatgaaaagttgcataactgttaggaaagacatattttttgaaaggggttaagaaagataatgtatgagtacttcaaaactctttcatgccgcttttgtacaactatggacatgtgggcttcaaatcaaaataaaggttaaatgtgcatcattgtgaattggatagatgataattggtgcatgcaaaagagaattataatgttcatgcatgtagagggtcatcacacagggaacttgagcaaagaattctatgatagtgtacgggattggaaccttgctaggaaattgcttgcacttactttggacaatgcatcagccaataatgtatgtgctaaggggttagtacaaaagctcaacaagatacaacccttgatctgtgatgaggccattttccatgtgagatgtttgaatcatattttcaatcttgttgctcaagatgatttgaagcaaatttcaattaatatttcaaatatcaggaggacggtgtgagaagttggcacgcaaccaactgagtggaactctagaggtcttcgtcagcctctgcctgtcagggatgtcatgtcacgtgcggcctcaaatcagaccatgcctcatgaaaacacatgaacacacacgcatagcg

SEQ ID NO: 33785 - DNA, 639 bp, Oryza sativa
  Clone ID: PAT_MRT4530_37864C.1
atggtgcgcatggctggtgtagaccgggagtggttacacagcatggcacatgtgctggcactggacacatggacgtggccaagagaggacgttcctggcctagggcggagcgaggaggacggcggcggcgcgaatctggagcggcggcagcgcgagaggacaacggcggcgggcggattctggagtggagcggctcgtgctcgtcgtcgccgtcctcggagcggtcatggcgggcggcggcggcggcacatccttgccccgctctcctcaccgacggtgctctcctcaccgcctgccccaacgccgcggtggcggcatcctcgggacctagcggtgcggatctggagcgtcctcgccgtcctcctcaacgacggcggcggcggcgcgtcctcgcccgccctcaccggcgacggtggcgcggattggagctggagccggagtcgtcggagtggaaggagtttctgctcgggaatcaaggtcggcctcctgcacagcgcgttctcgtcctcgcatctctcatcggacgaagtaaggctccagctagacgaaggaacgcccactgtgaagggcctgatgctgagatggaatgagcctgtgaagggcctgatgctgagatggaatgagccgctgaaagggtag

SEQ ID NO: 33786 - DNA, 348 bp, Oryza sativa
  Clone ID: PAT_MRT4530_37865C.1
atggcggatctgacgaggacgacggtgatggtgacaagcggctgccctaccccgcgcggcggcagtgggaggcacagtggcggtggatctggctctggctccggcgacgggagcgggcggacccagccgccgctaggcccctatgcccccacaacgacgacgaggagggcaggcgccggaaaaaccatcggcgcatatcacgacgctcccacccccacccgccagcaccatatcagccgtaggaagtgcaccagaaaccacccgataccttgggcaggcatacaagacgtaggaagtgaaccagaaaccgcccgataccctgggcaggcatcggcgtccgtccgttaa

SEQ ID NO: 33787 - DNA, 941 bp, Oryza sativa
  Clone ID: PAT_MRT4530_37866C.1
ctcgccgccggcgcctccttgagaccgtcgagatcgagatagagagagagtgatggggtgggcgacgcggttcctggcggcggtctgcttcttcgcggcgggcgtcgtcttcgcccccgacgtcctcctcggcgcccgctccggctccggctccggcggcggcgccgccgcggccgccaaggtggcccacctcctctgcttcgccacctcatggggcgccgccctctgggccaccttcatcggcggcatcatcatgttcaagaatctgccgaggcaccagttcgggaacctgcaggggaagttgttcccggcctacttcatgctcatctccgcctgcgccgccgtctccgtcgccgccttcgcctacctccacccgtggaagacggcgtccaccgtcgagcgctaccagctcggcttcctcctcgccgcccttggcttcgacctctccaacctgctcgtgttcacccccatgaccatcgagatgatgaagaagaggcacaagattgagagggacctgagcattggtgaggaggttgggtggtcgaagaatgttcaggtggcaaaaaacaaccctacccttgccgcaatcaacaagaagtttgggatgatccacgggctctcgtctttggccaacatcatgtcattcggcagcctagccatgcattcctggtaccttgctagcaagcttgagatgtgaagtgaacaaacacccttgaccaacattcagttgaatcagatctgattgcatcacaatattaatgtggcaaagcctcatttggagagcttgcaaatatatttacgtgtacaatgattcgactcgagattagttgtacttaaaataatgtacagaatccacgcatttctcgccagtttattataagttcatgaaccaaaactattcaaacctaaaaaaaaaaaaacccgcagcccgccaacccccg

SEQ ID NO: 33788 - DNA, 1196 bp, Oryza sativa
  Clone ID: PAT_MRT4530_37867C.1
ggaaatattccccgtgattcccaggtcataatccttaatcaattccaaccatctccgctgtctcatgttcaaatctggctgggtaaagatatacttcaaacttttgtgatccgtatacacctccgtacgagtaccgaaaagatagtgacgccaaatcttcaatgcatgaaccactgcggctaactcgagatcatgagtagggtagttcttctcatgcggacgtaactgacgagatgcataggcgaccaccttcccatctttcatcagaacacaacctaacccaagcttggatgcgtcgcagtacacttggaaacccttctttggatcaggcaaaatcaaaatgggagctgatattaagcgacttttcaactcttgaaaactctgctcacattcttctgaccacttatacttcacatctttctaaagcaatcgtgtcatgggcttggcaatcttggagaaattctctatgaacctccggtaataacctacgagacctaggaaactgcgaatctctgaaactgtcttcggttgtttccagttggttacggattccacattactaggatcgacggcaactcctccggctgagatgacgtgaccaaggaacttcacttcagacaaccagaattcacatttgctaaacttggcatacaactgatgttctcgcagcttctctgatgcaagacgaagatgttcttcatgctcttctttggttcaagaataaatgagaatgtcatcaataaagacaactacgaacttatccaagtattccataaacaccttattcatcaagttcatgaagaaagcgggggcattggtaagtccaaaagacataactgtacattcaaacaacccataccgagtggtaaaaactgtcttgggtatatcttcttctttaatcctcaactggtgataccctgatcgaagatctatcttggagaaaacggtggcacctttgagttgatcaaacaaatcatcaattcttggtagcgggtacttattcttgatagtcacatcattaagggcacgatagtccacacacatcctctgggtatggtctttcttttccacaaagataactggagctccccatggagacgaacttggtctgatgtatcctttctgtaacaaatcatctacttgcctcgtgacttgtaacatctgcaggcatgcaagcttgagtattctatagtgtc

SEQ ID NO: 33789 - DNA, 458 bp, Oryza sativa
  Clone ID: PAT_MRT4530_37868C.1
ccacgcgtccggaactttatctggctcctcccctttcaagcccccatgcgaaggtagcactagagatatgagcgaagcttgtgccccaccatgacctggggaattagctcctgccccatagagcaaagttgcttccaatgttaacaagatcaatgtctatacctgcgccctcgagggctcggtagcagaacaggatactgaaattcttatcgagggtttggcgaccaccatgtataagatcgattggagggtcttcagtgaccctataggagcgcggcaccttacaggacaaacatggacgcacgttttcgaggaagttccttctgtgaagaatacgagaaccacctttcttttggacagacctatatgcccctggtcaatgccacttaatcaagaacatgatcacaagatatccttccagggctgacatgcgcccgagctctatcattgtactccac

SEQ ID NO: 33790 - DNA, 261 bp, Oryza sativa
  Clone ID: PAT_MRT4530_37869C.1
ttgcatcgccttcgcacctcgccggcgcgctggacgcggcgcgccccttcctgcgcggcaaggaggagcaggcggacccggcgctccccaagctggccgccgtgctgcgcgccgccggcgccggcgagtgctggcacaagcacggcaccttcctcgcccaccttcttgacgtccaccgtatcctccgtctttggggcgcccccgaccccgacgcgcgctggggcctttaccactccgcctactccaactcttacgtaaacc

SEQ ID NO: 33791 - DNA, 360 bp, Oryza sativa
  Clone ID: PAT_MRT4530_3786C.1
gacaagcagaaatttttcctgctttaggaaaaaatgacgctggttgaatcggagggtggctgctatggccgctcgagctcaatggcgtctcctcgcgctgcctctagctattatactagcggccgatttgtcgcctggcctcgtgaggcatacgtgtgctatctgcggaggactatccttccttccccatggccatcttatacctgatggaggcgatcgtgaatgatctgaggttccagtcgatggacctcaaggtgtccgattttcacgattgccaacctctcatgaggcatgcggtggcgtacgaattcaacattgatgtccggaggaacgtggtgccggtgcacctgcttcaggacg

SEQ ID NO: 33792 - DNA, 723 bp, Oryza sativa
  Clone ID: PAT_MRT4530_37870C.1
cggcacgaggggaaacacctgtgggttccgatgatgtgcttagttctccaacatgtgcacaacccagttggcaaatcgaccaaagtaaaagcttagtgacttttgctgcttctgttgaagcctgccttggcactaaacaggaaaacaccaaacttaccaattctcctgtgcatgacacaaagagtacttactcatcctcgtgtcccacaggacgtgtatcattcaagttgtacgattggaatcctgctgaatttcctcgacgcttacgccaccaaatatttgagtggctttctagcatgcctgttgaactggagggctatattcgtcctggttgtacaattttaactgtatttgttgcaatgccacaacatatgtgggacaagttatccgaagacacaggaaatcttgtcaaaagcttggtaaatgctccaaatagtctcctgttgggtaaaggggccttctttatccatgtcaataatatgatatttcaagtattgaaagatggtgcaacattgaccagtaccagattagaggtacagtccccgaggattcactatgttcatccatcatggtttgaagcaggaaagcccatcgatcttattctttgtggaagttctcttgatcagcctaaattcaggtcacttgtgtcatttgatggactgtacttgaagcatgattgtcgccgtatactgtcacatgagacctttgattgtattggaagtg

SEQ ID NO: 33793 - DNA, 298 bp, Oryza sativa
  Clone ID: PAT_MRT4530_37871C.1
ctccaaaacaaactcaaattaacagggcgaacttgatacaatgtccactgaacgtttcaacagtgataacattcctaccggaatcctaatgcccccgaagggctttatcacccgactctaccatactaactattacccttgttaaaacataattccacaacaaacagtactgtttgtttctaataccacaaacttcagtttaaaaattttgttccccatgccaattgcattacaagaagggacttttcggggtcgtgggtcacacacacttgccatgacaaataaatagcattacacc

SEQ ID NO: 33794 - DNA, 4322 bp, Oryza sativa
  Clone ID: PAT_MRT4530_37872C.1
atgagctacgcggcttacaagatgatgcactggcccaccggcgtcgaccactgcgccgccggcttcgtcacccactccccctcggacgccgccgccttcttcaccgccgcgacggtgggccccgggcccgaaggcgacatcgactcggcggcggcggcgtcgcgtccaaggcgcttaggcccctcgcccaacctggtcgtggcggccgcgaacgtgctcgaggtgtacgccgtgagggctgagacggcggccgaggatggaggcggtggcacccaaccgtcctcttcgtccggtgccgtgttggacggtatctccggggcgcgcctggagctggtgtgctattacaggctccatgggaacattgagtccatgaccgtgttgtcagatggagcggagaataggcgagccactattgcacttgcatttaaggatgcaaaaataacttgtttggagtttgatgatgctatccatggcctgcgtactagttcaatgcactgctttgagggcccagaatggcagcatctgaagagaggcagggaatcatttgcttggggtcctgttataaaggctgatcctcttggaagatgtggtgctgcacttgcttatggacttcagatgattattctaaaagctgcccaggttggccacagcttagttggagaagatgaacccacctgtgcattgagttctactgctgtttgtattgagtcgtcatatttgattgacttacgagctttagatatgaaccatgtcaaagattttgcttttgtacatggttatattgagcctgtgttggtcatacttcatgagcaagagcctacatgggctgggcgtatcttatcaaagcaccatacatgcatgatatctgcatttagcatcagcatgactctaaagcaacatccagtgatatggtctgcagctaacacgaatctgccccacgatgcataccaacttcttgcagtgcctccccctattagtggtgttcttgtgatctgtgcaaattccatccattaccatagtcagtccacatcgtgttctcttgacctgaacaatttctcatcacaccctgatggcagcccagaaatttctaagtcaaatttccaagttgagcttgatgcagctaaagcaacttggttgtccaatgacattgtaatgttctcgacaaaggctggagagatgctgttacttacagtggtttatgatgggcgagttgtgcagagattagatcttatgaaatcaaaagcatctgtcctcagttcggctgtgacatctattggaaactcattcttcttccttggtagtcgtctgggggatagccttcttgtgcaattttcctactgtgcatcaaaatctgttttgcaagatttaacaaatgagcgctctgctgatattgaaggtgatctgcctttctccaagcgcctaaagaggattccttctgatgttctacaagatgtgaccagtgttgaggaactttcctttcagaatatcattgcaccaaacagtttagaatcagcacagaagatatcatacattgtgagagatgcattgatcaatgttggtccactgaaagatttttcatatggtttaagagccaatgcagatcccaatgcaatgggaaatgcgaagcaaagcaattacgagttgtatggcaaaccaaggtttcaaatcctacctcaatgttggaacccattggtagcagcagtgcaccatcaagatagcatctgttggatctgtggagatcatgggagtaaggtgtgctgttctggtcatggtaaaaatggttcactttctgtccttcaacaatctatccgtcctgatttaattactgaggtggaattaccaagttgcagaggtatttggacagtttactataagagttaccgtggacaaatggcagaagataatgaatatcatgcatatctgataataagtctggagaatcggacaatggaaacctgcattggttcctttttaggtatggtacttgagacaggtgatgacttaggagaggttacagaaactgttgattactttgttcaagcaagcaccattgctgctggcaacttgtttgggaggcggcgtgtcatacaggtatatggtaagggtgctcgtgtgcttgatggttctttcatgacacaggagctaaactttactacgcatgcttcagaatcatctagttcagaggctctcggtgtggcatgcgcttccattgcagatccatatgttcttttgaagatggttgatggatctgttcaacttcttataggagattattgtacttgtactctttctgtgaatgctcccagtatatttattagctcaagtgagcgaatcgctgcctgtacactttatcgtgacagaggtcctgaaccatggctgacaaagacacgtagtgatgcatggttatctactggtattgcggaggcaattgatggcaatggtacttcatctcatgatcaatctgatatatattgtatcatttgctatgaaagcggtaaactggaaatttttgaagtgcctagtttccgatgtgttttctctgtggaaaattttatttctggcgaggctcttttggttgataaattttctcagctcatatatgaggatagcacgaaagaaagatatgattgcactaaagcttccctaaagaaagaagcaggagatagcattcggatagttgagcttgcaatgcatagatggtctggtcaattcagtagacccttcctttttggactattgaatgatggcacattgttgtgttaccatgccttctcttatgaagcctcggagagcaatgtgaaaagggttccattgtcacctcaaggttctgctgatcatcacaatgccagtgattccaggctcagaaatctcagatttcaccgggtttctatagatataacatcacgagaagacataccaactcttggacgaccaagaataacaacctttaacaatgttggtggctatgagggattatttcttagtggcacgaggccagcttgggttatggtttgtcgacaacgattgcgggtgcacccacagttatgtgacggtcccattgaagcctttactgttctgcataatgtaaattgttctcatggctttatatatgttacatcacagggttttctgaagatatgccaattgccctcagcatataactatgacagctactggcctgttcaaaagttcaaattaaaaaccattcaggtccctttgcatggcaccccacatcaggtcacgtattatgcagagcaatctctttatcccctaatagtgtctgttcctgtagttcgtcccctaaatcaagttctttcttctatggctgatcaagaatcagttcatcacatggataacgatgttacaagcactgatgcccttcataagacatatactgttgatgaatttgaggtccgcattttggagctggagaaacctggtggacattgggagacgaagtccacaattccaatgcaattgtttgaaaatgctctaaccgtgcgcattgttacattacataatacaaccaccaaggaaaatgagaccctgttggccattgggactgcttatgttcttggggaggatgtagctgctagaggacgtgtgcttctgttctctttcacgaaaagtgaaaattctcaaaatctggtcactgaagtctactcaaaagagagtaaaggtgctgtatcagctgttgcgtctcttcaaggtcatctgctgatagcttctggtcctaagatcacattaaacaagtggactggtgctgaattgactgctgttgcattctatgatgcccctttgcatgttgtgagcctgaacattgtcaaaaacttcgtttcgtttggtgatattcataaaagcatttattttccgagctggaaagagcaaggttctcaattgagtctcctggcaaaagattttggatcactcgattgctttgcaactgagttcttaattgatggaagcacgctgagccttgtagcttcagattctgataagaatgtgcagatcttctattacgctccaaaaatggttgagagctggaaggggcagaagctcctctccagagcagaatttcatgtcggagcccatataacgaagtttttgaggctgcaaatgcttcctactcagggcttatcgtctgaaaagacaaatcgtttcgctcttctttttggcaatctggatggtggcattggatgcattgcgcctattgatgagctaacattccgacggctgcaaagcttacagaggaagcttgtagatgctgtcccacatgtgtgtggcttgaatccaaggtcattcaggcagtttcattctaatgg

SEQ ID NO: 33795 - DNA, 693 bp, Oryza sativa
  Clone ID: PAT_MRT4530_37873C.1
atggccgcctccaccgcctcatggtcgcgctacggcaccgtcccgccggcggcggcggcggcggcgcctcccctgaagcgcgaggaggtggtggtgggcggggacggggaggcggcggcggcggcgccctcgccgtcgcccgcgacggcggcggaggccggggtggcgttcttctcgcgggcgagggcggtggcgggcgccgcggcggggaggccgagggcgtggagggaggtgctcgacgcgacggcgttctcgcgcccggagagctgcggggaggcgagggcgcgggcgcggcggaacctcgcctacttccgcgccaactacgcgctcgcggcgctcgtgctcgtcttcctcggcctcgtctaccgcccggtctccatgctcgccttcctcgcgctcttcgccgcctggctcggcctctacttcggccgcggcgacggcgagccgccgctcgcctgcatgggccgcgaggtcgacgaccgcgtcgtgctcgccgccctctccgtcgccaccgtcctcgccgtcgcgctctcccgcgccggcctcaacctgctcgtctcgctcgtcctcgccgccgccgccatcggcgcgcacgccgcgttccggatgaacgtgtacctcgacgagagggacgcgtacgacggatcgtccttcatggggagctcctatggcggctacgcgctcccaagatga

SEQ ID NO: 33796 - DNA, 118 bp, Oryza sativa
  Clone ID: PAT_MRT4530_37874C.1
gtattaaatctcgttgaagatatgaaccagcgggttggggttatctttggcaagttttacccggaagttcggccattctttgttaaaacaattgctattgtcggcggggaaagtagcg

SEQ ID NO: 33797 - DNA, 813 bp, Oryza sativa
  Clone ID: PAT_MRT4530_37875C.1
gcacgaggaccaccaccgccgtggccttcaccccgccgccgcgggagaaaccacaggtaagggcaagcgcgccgccgctgcgggcgccggcgaagatgcagatcttcgtgaagaccctgacggggaagacgatcacgctggaggtggagtcctcggacaccatcgacaacgtgaaggcgaagatccaggacaaggaggggatcccgcccgaccagcagcggctcatcttcgccggcaagcagctggaggacgggcgcaccctcgccgactacaacatccagaaggagtcgaccctccacctggtgctccgcctccgcggcggcgccaagaagcgcaagaagaagacgtacaccaagcccaagaagcagaagcacaagcacaagaaggtgaagctcgccgtgctccagttctacaaggtggacgacgccaccggcaaggtcacccgcctccgcaaggagtgccccaacgccgagtgcggcgccggcaccttcatggccaaccacttcgaccgccactactgcggtaagtgcggcctcacctacgtctacaaccagcaggcttaggcgtaggctcctgttctttgggggcggaagtaaggaaggaggaggaaatcgaactggttattagatgataattaatccttttttgtcatgtcgtattaaactagtctccttggaactgaacaccttagcatcacctctgtgaagattgtgatgccctacttttggttttgaaatcatgttatgtactactgtcgaattatgtttgggttaatcatcttttttaaaaaaaaaaaaaaaaaaacccgcggcc

SEQ ID NO: 33798 - DNA, 1030 bp, Oryza sativa
  Clone ID: PAT_MRT4530_37876C.1
ctcgaagccgggaacgccaacgccgccgcttcccctaaagtctactagtcctcctcgtcctctccaccctcctcggcggcggcggcggcagcagcggcgcttgaagctcgggcgatggcgagcccgccgaggatcgaggtggagaagctgagcgtggagcagctgaaggccctcaaggagcagacggatctggaggtgaacctcctccaggacagcctcaccaagatccgctccgccgccacccgcctcgagaacgcctccgccgcgctccacgacctctccctccgccccaaagggaagaagatgctcgtgccgctcacggcgtcgctgtacgtgcccggcacgctggacgactccgagaaggtgctcgtcgacgtcggcaccggctacttcatcgagaaaactatgactgaaggcaaagaatactgtgaaaggaaaattaatttgctgaagtctaattttgatgaactagttgagatggctacgaagaagaaaaacatagccgacgaaatgggtcggcttctacaagccaagctgaggcagtcatcgccgagcccgagttcatgagacccgaccgcacctcctgtctccaccttgttagatggccaggttgagtagtttgtggcatctatctagccaacatagaaaatttttagctgctgctctggtcgtgtgtctgtgcaaaggcaaccggttcacttccatggtttactgaaagaacctgcctcatcaggttagcccagaagccggtgttgaacacgcaaattttattggctcaagtcgcaggtagccgaattgtgataatcatttgtgtggttgttaaatcagaatggctgatttcattagacattttgctgctgttccctgtttctggaagacgatattttagccatctttctatgtgatgaactgaccttgttgggactgtaaaacataaaacccactctttttaaaaaaaaggctaacgccatatgtttactaaagttactaaaacccaataataattgagtgtcttcgttagtaccccaat

SEQ ID NO: 33799 - DNA, 1232 bp, Oryza sativa
  Clone ID: PAT_MRT4530_37877C.1
cgcccgggaaaaaaaaaaaaaaaaaaaaaaaaaaaaaaaaacctaggccacctttccccccaccccttctcgccgccgaagccgcgggaggcgacccctcccccgccgccgccaagatgcagatcttcgtgaagaccctgacggggaagaccatcacgctggaggtggagtcctcggacaccatcgacaacgtgaaggccaagatccaggacaaggaagggatccccccggaccagcagcgcctcatcttcgccggcaagcagctcgaggatggccgcaccctcgccgactacaacatccagaaggagtccaccctccacctcgtgctccgcctccgcggcggcgccaagaagcgcaagaagaagacgtacaccaagcccaagaagatcaagcacaagcacaagaaggtgaagctcgccgtgctccagttctacaaggtggacgacgccaccggcaaggtcaccaggctcaggaaggagtgccccaacaacgactgcggcgcgggcaccttcatggccaaccacttcgatcgccactactgcggcaagtgcggcctcacctacgtctacaaccagaaggcctaggttgatgcttgctgctgctcgctttgctctgatctgatgcttttcattcccttttatctgttattatcatgagctgagatgagctgctgctggttacatgttattcagattatatgcgttttgttctccgtttacaattggaaaactttgagtagtagcctcttggaatattattatctgttactgaattgatgatgcgatgtgaaaaaaaaaaaaaaaaaaaaaaaaaaaaaaaaaaaaaaaaaaaaaaaaaaaaaaaaaaaaaaaaaaaacttggggggggggccgggccccaatttccccttatagggggtcttttaaccccccctcatgggccgggttttaacaccgtggaaacgggaaaacccttggggttcccaaattaattcgcttgggagaaatcccccttttcgcaagttgggttataagaaaaaagcccgcaccaaatcgcctttccaaaaagttgcccaaccctaatgggaaaagggaaccccccctgtaccgcccaataaagccggggggtggggggggttaccccaaggtgaacgttaattggcagcgcccttgcgcccggtcctttccttatttcccttccttttccccaagttcccgggtttccccggaaagtttaaaggggggctcctttag

SEQ ID NO: 33800 - DNA, 2928 bp, Oryza sativa
  Clone ID: PAT_MRT4530_37878C.1
atgctgctgcggagcgcgtcgtcgccgctgctcggccacgccgcgtgcgcgtcggcggcggagcatgtcggggcggtggtggtggtggtgcccgtgtcgccggcggcggcgaggcagcggggcccgccgctgtgccgcgcgacgtccgagggggacctgatggcggcggtgagtgcgcggccgcgggcgctgtccgtggcctcgtcggcgtccatctccgtcgaggaggaggttgaagaagaggaggaggaggaggaggatgtgctcggggcggccgtgccgctgcggcggctgctgacgagcaccgggctggacgcggacacggggagggggagggagggcgacgcggcggtcgtcgaggagggcgtcgggggaggaggcggcgggaggaaggtgtgcaacggcggcggcggcggcagcggggggaagggcgacggcggccgccgcgacgccgacgcgcactaccggcgtatgatccaggccgacccggcgaacccgctgctgctcggcaactacgcgaggttcctcaaggaggtggagggcgacgcggcgagggcgcaggagtactgcgagcgcgccatcgtcgccaaccccggcgacggcgacgccctcgcgctctacgcgggcctcgtctgggagaccacccgcgacgccgaccgcgccgacgcctacttcacccgcgccgtccacgccgcccccgacgactgctacgtcctcggctcctacgccggcttcctctgggacgccgaggaagacgatgacgaccacggcggcgagcagccgccgccgccgttcatgggggcagctcagccaccgcgtccagtaccgtcggtgtgatcgtcaacaaggacttccaggcgatcccgagggaggcgaagcagtacgagctgggtgaagcgcggtactacgtggtgctggtgttcaacgccgtcctgtgggagttcttcttcgtgggcgccgtcggcgtcatcttctgcgtgcacacgctgctcgccgggatcatcatcgccgtgttcatcccgatcacggaggtgctgggcgtcatcttcctccacgagaagttcagcagcgagaagggcgtggcgctcgtgctctcgctctggggcctcgcctcctactcctacggcgagtacgccgacgccaaggccaagaagaaagcggctttggcaagctgaagaagccttttattcgagggaaaaatcgagggtaattcctttggaaggaaagagttcgcgtattacgcgggttaggacatggacacatcccatgatgcccaccaccacaaaacataattaagcccctccgccctcgtcgcaccaaacgactgctacgtcctcggctcctacgccggctttctctgggaccccgaggaagacgatgaagaccaagttttcgaacagccgagggcgccgtccatcggttcagctccgcaacttgccatcaaagaagtatagtaagtgaaggcatactttgggcctctcttcggctggcaaaaataggaagcttttcactccccaaaatggatcatcccgggttacttcggcacggatcagctcccgaacgggatctgtagccgacgtgttgttttctacctgttcagtgactgtttgctctgatggcagtttggggagagacttccgttggggcttcctcaccgtgttcgcagcaggcaccttcttcacaccattctgggaggccctttcatccaggctcagacgagctgggcggcttgaaggaacggtactttcttcagtgcttactgagcttgtgttctttgagcggccaagctttggtgatctagctctggtggtagggatctttttcaactcaaccttgggaggaggtggttccttataaaagctgggcattggatttgccctaaaattcaaactcttccttagctttttgagttcagcttcttctgtttcctttgatttcgcctgcatgttgcttttctccaattcctgtgcatgaatcttctcctcaagctttgagtagaactctcttcttttttcagctctctcatcacatttgaatgcaaatccgtacgcaggagtgctgccaaccctttgaggctttactttttcacagtttggctcttcttcatcatttttgacagaacattggtttgatgttttctgagttttcttcttttcctttgagtcctccagtgattgactcgccctggcaactggacggaaactgctcttttcagcctttttcttaatatcagcaccatcattgcatgaagagctatcaaccaaatctgggtcagacactcgtgcaatgggtgccttgggataagtagaaccgggactgtttttcctagcttgactcttatctccacttcgtgggctctggcgctgagatttggtagtaaccttaggggaatgactttggcttcccttggaaacacgcggctttacgtcttctggctgtgaggtggcttctccacccacctcctcagcggggttgatcacctcactctcacccgagtgcgccccatcagcctgcacatcatgctcttctcctcgctcctctaaactctcgttcgacaacaacttccggcttgccccattatcaatgccaaccgtacccatagcatcagcaatctcagcaacttcatccatctcgtcctagcacctctgagactcgcctcttgactggttttatcagatctcctgccgcagtagctcggacaagccctttagttcatcatcctcaaacctcacttgcgggatcgtgatctgtacagcctcttcaccacctttagaccgtccacgagaaaagaaactgcaacacctaggatcccctccgctcccctgccctggtctgctctgctcggctcgccagaaggagatcggcgccgcgagatggcgcaaggagcggaggcgacgacgagacgggagatttttcttcctcgtgccg

SEQ ID NO: 33801 - DNA, 166 bp, Oryza sativa
  Clone ID: PAT_MRT4530_37879C.1
aaaacaaaacgatccttaatgtaaaaaaccaaaaagggggtctttacaggtcagatctacccccctctgttcgtcctaataaagcatgccgttggaacaaaccacaaatccttacgtttttttttccctgtccccccccgccgacatttatacaatgcatacagac

SEQ ID NO: 33802 - DNA, 487 bp, Oryza sativa
  unsure (1)..(487): unsure at all n locations
  Clone ID: PAT_MRT4530_3787C.1
gctatccaaattcatccgaaaaaacttatcccagaaatggtcctttttagggcgccagagtggctgacgccgtcgtccaactggacggcgccaggcgatcggggggggggtgtttgaggggctggaggagagagaaggaggaactcacaagaaccaaccatataaaaaataaactcaaacggacgaaatatgtggcctgtggaatttttcaaagctctaccgaaaaacttctcttctcgaaaacacaatcttgcaagttggaatttggaggttttaatatcgccgaaccccgcaaagccggggagaatcgggtgtaactttttctatagatgtccgtgaatatattatttgcctgattccgagtccgaggtgaggggtgggggggggggcgccagccactntggcgcgctccccctagccacctcagcattgccccgccacgtcggcagggggacggtgccagcctctctggcgccgtccagttgga

SEQ ID NO: 33803 - DNA, 933 bp, Oryza sativa
  Clone ID: PAT_MRT4530_37880C.1
atggagatgatgaggatggcgatgagcccggcgatgtcgtcggcgacggcggcggcggcgagcgaggacgagggcgacctgaggagggggccatggacggtggaggaggacatgctgctcgtcgactacatcgccaaccacggcgagggtcgctggaactcgcttgctcgctgtgcagggctgaggcgcaccggcaagagctgccgtctccggtggctgaactacctccgccccgacgtccgccgcggcaacatcaccgccgacgagcagctcctcatcctcgacctccactctcgctggggcaaccggtggtctaagatcgcgcagtatttgccggggaggactgataacgaaataaagaattattggaggaccagagtgcaaaagcacgcgaagcagctgaggtgcgacgtcaacagcaaggagttccgcgacgtcgtccgccacgtctggatgccgcgcctcatcgagcggatccaggccgacgccgccgccgccggcgaagttgcggcaccggcgccggtgtcggcggcggcgacgaggtcgatgagctcgccggctggcgcgatgtacctccaccaccagcagattccgctcgccgccggcgccatggtggtggcgccggcggtgagtagcgaagcgtaccaccaccacggctgcggcggcggcggcgacacgagctgcagcgagccgagccaggcggcggtgaccatgagccccgacgacgcatccagcacgctccggtcgtcgtcggcggcggcggagaacgacacgatccacggcgacgtgcttagcggcagctggtcggagcttcttgccaccaccaccaccaccatcgccgccaccgccggcttgccggacttcgatgagctcggagatttcgaggacaacttatggagccttgaggacatttggctgcaccagcagtgttga

SEQ ID NO: 33804 - DNA, 1293 bp, Oryza sativa
  unsure (1)..(1293): unsure at all n locations
  Clone ID: PAT_MRT4530_37881C.1
actaacgacggtagtattaaatagaccaccaaagaggcgcacgaccgaaaaataatataataaaaaaaaaacggtcggtaaaaaagtaatgtacaaacgaagaatgagtagagatcggataaagagaggaatacattgataaaaagaaagagaggagaacacaaacctccccctgtttcttgcattgacacattcctcatcaaacccagggaaaagaagaaaactcagaaaacatcaaaccaatgttctgtcaaaaatgatgaagaagagccaaactgtgaaaaagtaaagcctcaaagggttggcagcactcctgcgtacggatttgcattcaaatgtgatgagagagctgaaaaaagaagagagttctactcaaagcttgaggagaagattcatgcacaggaattggagaaaagcaacatgcaggcgaaatcaaaggaaacagaagaagctgaactcaaaaagctaaggaagagtttgaattttagggcaaatccaatgcccagcttttataaggaaccacctcctcccaaggttgagttgaaaaagatccctaccaccagagctagatcaccaaagcttggccgctcaaagaacacaagctcagtaagcactgaagaaagtaccgttccttcaagccgcccagctcgtctgagcctggatgaaagggcctcccagaatggtgtgaagaaggtgcctgctgcgaacacggtgaggaagccccaacggaagtctctccccaaactgccatcagagcaaacagtcactgaacagggtcgccgggccggcgagccggcgacgtcgacgacggccggtgcctcgccggagagaggccgccgtgattcctcctcgggtgttcgttgcttcgtcttctttacaggcggcgagagatcaagagcatctgttcactcaagacgccgctgtgatggaaggaggctgagctgcccccatgaacggcggcggcggctgctcgccgccgtggtcgtcatcgtcttcctcggcgtcccagaggaagccggcgtaggagccgaggacgtagcagtcgtcgggggcggcgtggacggcgcgggtgaagtaggcgtcggcgcggtcggcgtcgcgggtggtctcccagacgaggcccgcgtagagcgcgagggcgtcgccgtcgccggggttggcgacgatggcgcgctcgcagtactcctgcgccctcgccgcgtcgccctccaccttcctacggcggcttcctcccccgacgccctccttgacgaccnccgcgtcgcgtgggtgcgagtgggatntacnaatcat

SEQ ID NO: 33805 - DNA, 1591 bp, Oryza sativa
  Clone ID: PAT_MRT4530_37882C.1
atcccccgggctgcaggaattcggcacgcggaccacatcaccacctcactccactaaccaaagagagaacgcagctagtagcattattagcatcatgaccgcgatggcggcggcggcggcggtgttggtgtcgttgctgctggtggcggcggctgcggggcagcaggcggcgctggtgccgggggtgatgatattcggggactcggtggtggacgccgggaacaacaaccggctggcgacgctggtgcgcgccgacttcccgccctacggccgcgacttcccggagacgcacggggcacccacagggcggttctgcaacgggaagctggccaccgactacaccgtcgacaacctggggctcacctcctacccgccgccctacctcggccagctcgcccagtccgacaaccgctccctcctccacggcgccaacttcgcctccggcgcctccggctacctcgacaccaccgcctccctctacggggcgatatcgctgagccggcagctggggtacttcaaggagtacaagacgaaggtggaggcggtggccggcgggaagaaggcggcggcgctgacgtcggagtccatctacgtggtcagcgccggcaccagcgacttcgtgcagaactactacgtcaacccgatgctggccgccacctacacccccgaccagttctccgacgtcctcatgcagcccttcaccaccttcatcgaggggctgtacggacagggggcgaggcggatcggcgtgacgtcgctgccgccgatggggtgcctcccggcgtcggtgacgctgttcggcggcggaagcggcggcgggtgcgtggagcggctgaacaacgactcgcggacgttcaacgcgaagctggaggcggcctccgacagcatcaggaagcagcactcggacctcaagctcgtcgtcttcgacatctacaacccgctcctcgacctcgtcaccaaccccactgccgccggtttcttcgagtctcggagagcgtgctgcgggacggggacgatcgagacgtcggtgctgtgcaaccagggtgcggtggggacgtgcgccaacgcgacggggtacgtgttctgggacggattccaccccacggacgccgccaacaaggtgctcgccgacgccctcctcctccagggcctccagctcatctcctgatccatccatccgtttcctgagaatgacggacgcatgcacagccaacagcgctactagcttcttgctctcgcttctgcttctcaactactctactctactcctgtgaacttaattagttaagttgctatttgtttctcctgctagcgatcgatcgagtagccgccgtacgtgctgcatgctgctgtttcggttgccctgcttgtttagttttgtttttctctctatcgtgcagtcatgtgcacgggcttgggcttagttgttttgctgtagtatgaatgaactgcttgcttggtgtaatatgtcatgtacatgcgcttggattgtactatcccgctagcaatgggtgttttgcagctgtgtgctttggtactctgtgatccataaaggggggcctcgtgccctcgagactagttctctctctcc

SEQ ID NO: 33806 - DNA, 1263 bp, Oryza sativa
  Clone ID: PAT_MRT4530_37883C.1
atggcagtggcacctccttcgccgctgtccctcgtcttcgtcgtcctcgcggccgtctcgctctcggcctcggcggccgccgcaccggcgtcggtattgcccagaggagccatcccgaccaagtcgggctacctccccatcccgccggcaaacgcttcgctctacttcgccttctacgaggccaccgagccggtgacaccgcccgccaccacgccgcttctcgtctggctggagggcggccccggctgctccggcttcctcagcaacttcctccagatcggcccttaccttctcgccggcggctcactgtctcccaaccccttcgcgtggaaccgccgctttggtctcctcttcatcgacagcccgctcggcaccggcttcagcgtcgcgccttcccccgccgccatccccaccaaccagtccgtcgtcgccgaccacgtcctcgccgcgctccagtccttgtactccctcgagccgagcttccgtgcccgccctctgtacctcaccggcgagagctacgccggcaagaccatccccgcggccggcgcgctcatagtagcaacaaacccgacgttgccggagaagaagaggattaacctgcgcggcgtggccatcggcaacgggatgacgcacccggtcacgcaggcgagggcggtggagctgatcaaggcggagaggtggagcgaggcgtacgtcgcgcgggagggccttctgaagtggatggagaacgcctccggtgtgccgtcgctgttcgacgtggaggtgacgacgtcgctggaggcggaggccgcggcgctcgcgccgctgctgaacggcgccgaggcgaaggcggcgctgggcgcgcggggcgacgcggagtggaagatgtgcagcgcggcggtgggcgcggcgcagcacaaggacgtgatgaagagcgtgaagccggaggtggaggcgctgctgcggcgtgggacgacgccgacgcgcgtgctgctgtacggcgggatccgcgacgtgaaggacgggccggtgtccacggaggcgtgggttcgggagctggagtgggacggcctcgccgcgttccaggacgccgaccgcgccgtgtggcgacaccgaggcggcgagctcgccgggagcgtgcagcgccacggcgcgctcgtgaacgttgcggtgtatggcgcggggcacttcgtgccgttttctcaagggcgcgcggcgcaggagatgatcgaggattgggtgttcggcaagggattgttcggcgccagcggcgggaaggcgtaa

SEQ ID NO: 33807 - DNA, 305 bp, Oryza sativa
  Clone ID: PAT_MRT4530_37884C.1
atggggggaaagggagaggggatcacggggagtatttccccccactttattgcacgcggggacggcgggatgcggcggatttggcggcggcggcgtcgcttggcgcgggcggagcggcgggagtggcgggaggacggggatgatgggtgggccccacccgtcagcgagggtggcggcaatgttccgaagagggggaggaagttctcctctgtacccgggacccgccggaaggcgatgagcccagcggacttgggtgcgtctccaccgcctcagcgaaagcagaggttggtgacggtcggcgagaa

SEQ ID NO: 33808 - DNA, 3441 bp, Oryza sativa
  Clone ID: PAT_MRT4530_37885C.1
atggcggcgggcgcgggggacggcgaccagaggtggctggtggagtgcctgacggcgacgctcgacaccgcccgcgacgtccgggccttcgccgaggagtcgctccgccaggcctccctgctccccggattgattctgcaaactgcgccaattgaactccttgcccttttgtatggccttcttgcctcccagtcccagcctgtcccctctgcttgctgcgatgcagccctcgcctacgttaccactgccgccgctgctctatcgcgccgaaggtgtggacggcgggagggtgtctctggcggcctcactcgccccgtcgacgctactgccccgttcgtcgcttcagcctcatgctgttgccgccacccagtccatcagcagcacctacgtctccagcaaccttgccctatcaacacggctcctgcgtccatgcctagcatgagcccctcttccaaccaacagcaatctggcgacatcatcccaagcactattttcatgcttgaaaacttctcatgtcagaagattgtgattatacggcaactcctccttacatcgttggatgattctcacgggaagattcgtactgctattggcatggctgtagcagctattgggcagcaagattggcctgaagactggcctgagttacttccctatctcttaaagttaatttctgatcaaagcaatggttgtggagttcgtggagcattaagatgtctagctcttttatcggatgatttggatgatacatgcattccaaaattggtgccagaacttttcccttcattgtacagtataatatcatctcctcatagagaaacagtcagtttgataagttcaatgcttgatccactcatggagcaattctctgcaattttgaattcaccggtgcagtcccataatcctgatgactggaacatgcagatggagacctttgtctcatccttcaaggtctatcaattgtcaatgattcaagcctcggaagatgtggattctgttgggtatgattctgatggtagtgaaagaagtctggagtcttttgggattcagttatttgagctatggatatcaattgtggggaattcacggttagcaaagatcattgctgggaacattaaagagctagcatattatactatagcgtatcaacagataactgaagaacagttgcaaaactggtcacgtgatgctaaccaatatgttgctgatgaggacgatgtgacttatagctgtcgcgtatctggatctcttttgctggaagagatagttactgcttacgatgaatacggaatagagtcagttttggaggcttcacagatgcgttttcatgaatcacgtgaactaaagaaagcgggttctactgactggtggagactgcatgaagcatcattttttgctctaggttcactttccgaacagctctgtgaagcacagctattccatcagtttgactactgtaggtatgatttggattttggagtgttccaatgtggtatgatggattctggttacaacgtgcgagatttacttgagcagatggtaactgacactgtgggaacagaggtgcaccagtacccgtttcttcatgcacgtgcattctccattctgtctaagttctcttcagtgataagtaaggaaatctgcgaacagtatctatgcagtgctgctcatgcaattgcctcagatgtacctcccccagttaaagttggtgcttgtagggcactggcgcaacttctgccagaatctaaccagagcttgaatgtgcccaacattatgggcatactctcatctcttgttgatcttctggggaaggcatctgatgaaacgctgcatcttgttctagaaaccctccaatcaaccatcaaatcttgtggtgaacagtcaacattaattgagccagtcatctctcctatcatcctagatgtttgggcccaacatattgctgatccattcatcagcatcgatgctgttgaagtgctagaggccatcaagaatgctcctggatgtttagaaccacttgtatcacggattctgccaacaattgggtccattttagaaaagcccaagatccagcagaacggtcttgctgcaggctcactggacctgttgacgatgatactgaaaaatgctccaactactgtggttaaggcgatctttgatacatgttttacatctattattcaaatcgttcttgaaagtgatgaccatggagagatgcagaatgcgacagaatgtttggcagcatttatatcgggtgggcggcaagagttgcttctctggggtggtggacaaggacgtacactgaagatgctactcgatgcagcttcaaggcttttagatcctgtgttggaaagttcagtatcactatttgtcgggagttatattttacaacttattatacatctgccttcacacctatctccccactttcctgagcttattgctgctattgtgagacgtatgcaatccagcagcattactggattgaagagctctcttgttgttatagtagcaagacttagaggtcaacgatggtcagtttttagttgcacagagatggtggagatggtgcatggaggaagcggtggcagtggggtttgggagataggagagcgggtggtcagagatgttatagtgaaagactcgggcaaacatgtattggaatatgcatcttcggagttcatggacataatgacgccgtgggacaagtttttaaggattgctagtgaaatttactcttgtattttgagcgaaggggagggaggtggtgcttcaggaaattctaacatttatcacctgctacagggttataacaattcacttgcttatatcatgtctgaatggtcacagttacaaagtgaaattcaaggagcctatcagataaaggttacaaccactgcattagctcttctcatatctactcgtcatcctgagttatctaggattgaagtccaagggcatattattaagactagcgcaggtataactacacggtcaaaagctagggtggctcctgatcactggaccaagattccactcccagctaagatcttctcactgttagcagataccttagctgaaattcaggaacaagttgttggtgatgaagacgattgtgaagaggatagtgactgggaagagattcagaatggtgattctagtattccacatgatatgatatactcagcatcagttccttcaaatgctaagccatcagttgagcatctaaatgcaatggcgaaagtttttgatgaggatgacgacggaagttatgatgatgacctggcaaaagctgactctcttaatgaggtgaagctgtcggactttctaacaaacatctttgtcaaattgtgggagagtgatcggctgctttttgaatatctttgccaggccctaacagattcacagaggactgctgtggacaaagttttgaggaaataa

SEQ ID NO: 33809 - DNA, 187 bp, Oryza sativa
  Clone ID: PAT_MRT4530_37886C.1
gcagctgtcaaggtgacaaccaatatgattattgtatacacacgagggtcatttgaaaaatcttccaaagacaccccttcagcaatagtaggtccggacatgaatctcagtgcttgacaattctagctgatgaggtctatgcttctgcccttgacgacatgcctgcatggctggaaaaacctgctgt

SEQ ID NO: 33810 - DNA, 102 bp, Oryza sativa
  Clone ID: PAT_MRT4530_37887C.1
atggggtcggacgcgacgtacccgtcgacaatgagacacgtcacccgcgcgatctccgcttccacgcacacagccacactatccccgcgccccagcgcgtaa

SEQ ID NO: 33811 - DNA, 1097 bp, Oryza sativa
  Clone ID: PAT_MRT4530_37888C.1
ggagctaatctctgaataaccatgtaattaacaggagttaataaccatgtagctctagatgttgttccatacataggaatcattaataacaagttaacaacagctacgagactttgttccaggatacgtcagcctgaactatataagcaggcttccttccatgacagacagattcaactatctacatcagcataagagatgttatgtatctctatgcacaaaaaaacctgaaacctgtaaactgcttacctacctccttcggattgacacaaacaaacgacagtatatgcaaaagccagcctaagttcagatcaagggcagcacatttgctacccctttgccgttgttgcttggctttggccacagccgggcccatatgtcacccttggcatcgttgatatcagcgcgccctcgcgttccagctcttgcatgagttgctcaaatcttggagttggctgagcaacaaaagcaaacatcctgccttggggaattcctaagcttgggtcgatctgttcacgatttgccggttgggtagcagccattgaaggatgattggcccgggatgcgtttgatccaccgattgggggagccatgttccggtcagctgcgtcttgcatctccgctgcttcagggtcttgaggttcagtatccatgttgggatccggaacaccgtgaaattcaacttgttctgtgccatccttggaaccctcctggttctctagacacatggcatgtgctgcttgttcttctgctacgccaactatatctttcctgggcctgaacaacccccacaggtagtgttttccttgaaaggcttggtactgtttaggcagcattgtcgaagggaatatcagcatctccgttttgcccatgacagcacgtaaggccagatcatactcaatgacttccttaactagttgatctagttttccatcaggtctggaatgctttgtcacgttgaccaaggcacgcaaagatcttgacagcatacatacattctcgcacgatttggttgacaaatgtccagccaatggtacatattccttgctgtcaatcttgaagattccactttgcccacccttgtcgtaaagccccat

SEQ ID NO: 33812 - DNA, 2907 bp, Oryza sativa
  Clone ID: PAT_MRT4530_37889C.1
atgacgacgctgcagctggacccgccggtggtgccggcccggcgctccgcggcgacgagctgcgacctgcacccggacgagacgttcaccggattctgcaccgcgtgcctgcgtgagcgcctcgcggggctcgaggcgtccgccgccgcggcctccgcgcctgggcgcaagtccacgtcggccatacggtccctgttcgccaggccgttcggcggcggcgccggcggctcgtccgtcgccggcgccggggcgtcgctgccggaccttcggcgttgcaagtcgttctcgtgcggccgcgggggggacgcgctcgcggctgctgctgctgcggcggcggccggcaccgccagagctgatgagccacagcggcgctcgtgcgacgtgcgtgggcacagcacgttgtggtcgctgttccaccaggatgaccgtggccgtgtcccgtcgtcatcttccgccgctgacattgctcctccccatcaacagccgccgccgccgccgccgcgaccattcatcccggacgatttcttggacgaagatatccccgtcgtcatggagcacgatgagataatgccggtggtggagcccgtcattgtggtggacacctccggggagatcgaaaccgagcccaatgtggtggcccgggaagggaaggccatgaaggatcacatggatttcgagtcgtcgcagccgaagaagccgccgacgaaagacctgaaagagagcttctgggtcgcggcctcggtgttcagcaagaagtggcagaaatggaggcgcaagcagaagctcaagaaggaggccgccgtgagcaaggcggcggctgcggcaatgccgccgccggagaagccgtccaagccatcgttccttcggcggaggcgtctgcggggggaggccggctcggaactcgccgggggccgtcgctcgtgtgacaccgacccgcgtttctccctggacgccggccgcatgtccgtcgacgacgctggcttctcctgggacgagccacgcgcgtcatgggacggctacttgtttggtgcaggcgccggcattggcctcggccgcgcgcctccgccgctctcccgcctccctcctatgatgtccgtcctggaggacaccccggccaccattgtcgagcgctctgacggccaaatcccggtggaagacgacgccgacattgacccaccagggggctccttgcagacaagagattactacttggattcctcgaccaggagacgccgcagcctggaacgctccagctccgtgcgcaggccgtcattcgaagtcaccgagccaaaaccagcacccaccaccatagctaacggcaaggaatcccctctcggcggctcagagttctaccacttccaccatgccgaggacctgctcgaccgtgggttcagctccaactccctcatcgaggacatctccgcgagcttggaggccgccttgtcaggccccggcagcgccaagaagccacggcggtggcgcaaggcgtggagcctgtgggggttcattcaccggagggcctccggccgccggagcggcggcccgtccgacatcgccgaccgctcgttctcggaggcgtggccggacctgcgcgtccgtgggtacaaccccaagatgcagcggtgcaacagcaacttgagcgcgcgcagctcgttcagcagcaacagcggcgggcttggcagctcgaggcgcagccacgtggacgtcaacgggagcagcgcgaggcgtcgggaggagcacgtgctggagcgtaaccgcagcgcgcggtactcgccaccggggcgcgtggacaacggcatgctgcgcttctacctgacgccgatgcgcagcggcggcggcggcggtggtggccgtgctcgggttgccgccgcctcggaaaccgttaaaggcggcacgcgtttggccctcatcgtgtcgatgcgtcgctgcctcgctttaccactagagctccgtgtggatcttggatggagctctgcagatgctgacacagccagccacacagcttggcggccacatcgccgctgcgtgctttcggatgagctacttgctagcatagcgccagtagtattggccgcggcccacggtcacggaaaccgtcccacgcaggaacgaacggatcacagtggaatcgatcggaatgatggcaaagacaagcacgagaccgcgggtcaatcgagcgcccctgcatcggctgcgccaaccaaaaaccacgacgaaccggcaggcgtcgcatctcctgtctcacgtcaaaaacgccacggattccgccgtgcggagctgggtagtactagtacgcgccgcgtgcagtggcacccggcgcggtgtccccccgaaggcccgaacgctcgactcgcgactggacgtcggaatgtgtcccatgttttcggtcgacgtactagtagcagagtcccctgcgggctgcatggagctatgctacgtcatcaatcagagacgggccatattcgtagacatggcctgctgaatgcaggctgctgttttgtgtcattgcctggggttgcatggaaattccgattctgcaatcagagtgacacgataaaacgaacgaaacaaacaagtcgtactactccgaatttttctttctccatgcgtggagcattgattctcgatcagatggctcgtgcaaactgcacgcatcggactattccgtgtaccgccgaggatatgcaatggcatgtctggcactgtagctgcatgcactgcactgtgccactgtcgcatggcagcacggtgagaaacaaagcagatatggcgatagtactgcccgccgagaaggtcgatcgatgtgtggagacattcgatgacacaagtgttgtccgaccatgtcacttctcagtcctcactaagcttatttctaaacatatccttatttgccgttctaaatggatc

SEQ ID NO: 33813 - DNA, 333 bp, Oryza sativa
  Clone ID: PAT_MRT4530_3788C.1
atggagtcggggaggattgaaggcggcgcgcggcggcagaggagagatgagggcaacgataaaaactatggcgagctggcgcccttgacagctcttgcggggcagaggacgtacagtgcagcggctaatagggaggggagcgctgataagcatggcggagcggtttctggcgttagcacgtgcaggagcagaattggggagaggcgcaggggtgagtggggatgtggtgcacgattgagagagaaatcgggggacacacaagacaggcttcaacgggacgcggctttgttaaagacggtggtcactgacttctacaacacaagatttggatag

SEQ ID NO: 33814 - DNA, 243 bp, Oryza sativa
  Clone ID: PAT_MRT4530_37890C.1
gcgtggagcaacggggagctgcacaacgtgaggcaccgcgttcggtgcgtggcgggggtgcagcgcgtctccatcgcgctcttcctgctggcgcccaaggacgacgtggtgcgcgcgccggaggcgttcgtgagcgccgagcggccgcgccggttcagggatttcggctacgacgactaccggcggctcaggcagtccaccggggagcacgccggcgaagccctcgcgcgattagccgcatga

SEQ ID NO: 33815 - DNA, 363 bp, Oryza sativa
  Clone ID: PAT_MRT4530_37891C.1
atggggcacaggggtagcagcagcaacacgtacttggataaggcggcgcaggccgtaggcgtcctagatcccggcggcggcgaagacgagggcggggaggcagcggcgaagaggtcgaggcggtcggcgctgcgggccgatgtcgtcaatccaggcgtcggggaggtcggggtcagggaggtcggggccgtggtggtacagatggcgacggagagggcggcggtgatcggggatcccggcgtcgtgggggtggaggtggccggcgtcgtgaatcccggcgtcggggaggtcagggtcagggaggtcggggaagtcaatggacggacagcggagaggaccagcggcggcggtggagaggaagac

SEQ ID NO: 33816 - DNA, 470 bp, Oryza sativa
  Clone ID: PAT_MRT4530_37892C.1
gccgccatctctgccgccctctacgtcttcctctccaccgccgccgctggtcctctccgctgtccgtccattgacttccccgacctccctgaccctgacctccccgacgccgggattcacgacgccggccacctccacccccacgacgccgggatccccgatcaccgccgccctctccgtcgccatctgtaccaccactgccacctcaacctctccaccgccgccctctccgctgccatctccaccaccacccttgtgtgtttgccaccgtccgtccatcaccggccccgacctccctgaccccgacctccccgacgcctggattgacgacatcggcccgcagcgccgaccgcctcgacctcttcgccgctgcctccccgccctcgtcttcgccgccgccgggatctaggacgcctacggcctgcgccgccttatccaagtacgctgccaccctccccccttcctccttt

SEQ ID NO: 33817 - DNA, 836 bp, Oryza sativa
  Clone ID: PAT_MRT4530_37893C.1
cagaagagatgccggtatatatatctctactacttaaaaaataagagaggcttccatcgtccgtcaaaaaaaccgagtaaaaaaaccgggcgaaaaaaaaccaaatctatccgataaaaaaaccggtgaaaaaattgaaaaaagaaaagaaaaaccaaacgtaaaaaaaaacaggcaaaaaaaaacaaaatctgtctccgatccaaaaaaaaaaacgggtgaaaaaactggaaaagaaaagaaaaaccaaaggtaaaaaaaaccgggcaaaaaaacaaaatctgtccgatcaaaaaaccggaaaaaaaaaagtccgactcccgtcaaaacaaaataaatagcgaaaaatattaaaaaaaaagtccgactccctcttagaaaaaaaaaaaaaaagaaaaaataataaaaagggagagaacaagggcataaaggtgcataaaaagaaaaagaaaaactggaaaaaaagaaaaaaaagggaaaaaaagaaaaacaacaaaaataaaattttgtttcccctaagtggaaaaaaaaccggacatccgattcctataaaaggcaaaaaaaaaaaaaagcaaaaaaaaaaagaacattaaaacgaacaagaaaaaaacgcatgagaaaagaaaagcaaaaaagggagaaatatatggttttcgtcgtcagtaaaaaaaataaaaaaaaacatgctaggaagaaactgttagaaagaaatgcgccatttctaaaaaatggtttgagaaaatcacacaagaaaaaatacaccgtttataaaaaaacaagccgctcattaaaatacaaacattattattgacatgattatgcatgaaaaacgtata

SEQ ID NO: 33818 - DNA, 780 bp, Oryza sativa
  Clone ID: PAT_MRT4530_37894C.1
atggccgcatcaacctctaagggcaaaggctcatggcgagagaagattgagatagcacttgcgctgtctaatatagatttagctctcaccgagccctgtcccactgcgccagttgcgccaaagtacgacactgatcatgcgaagtgggagtcttccaaccgcaagtgcttgatggtaatcaagagctcaatagtggaggcagtaaggggagcaatcccagtatgcaccaccgccacagagtatcttcagagagtggagaatcagtttactatttcttcaaaggcttatgcgagctccttaatcaagagcttagttactatgaagtaccatggcggagatgttagagagtatattttgaagatgagcggtatcacttcaaagctcaagaagatagacttggttctccctgacgacttcctagttcacctcatttttgcctccttgccttcagaattcgagtcatttgctgtgaattacaactcattgcccgaaaactggaacattgagaagttgattgccatgtgtgtgcaagaagaggatagacccaaaactcgtggtgattctgcaaattatgtgaagaacaagaagaggaacaaccacagtcagaatgtcgcctctcccaaagcacgtggaaaggcaccacaggttgatccaaatccacgacaagaagtggagagggacgcttgcaggtggtgcaagcagaaggggcactttcagaaggattgccctgaattcctgaagcatcttttaaaaaagggtgagacatcattacattcgtag

SEQ ID NO: 33819 - DNA, 537 bp, Oryza sativa
  Clone ID: PAT_MRT4530_37895C.1
atgctgcggcggcggcggcggcggtgggattcgaagaacttttcgggtgaggccatcgacgccgaggactccgtggcggagctggagcgcgcgctggaggtggtcgacaccgtgctgctgctcccggtggggcgtgagggcgacgagacggagcgggtgctagtggtggcgaaccgtggacggagggaggtggtcgaggatggcatctacgtggtggatagtgaggggaggttggtggtggagaaggggaggaagctgggggcggagggcgtcggcgaggccgccgccaaggtgctcatcgtcgttcggccgcccaaggacgaggacgaccgacataatcagtgcccacagccctctgctcgcagccgcagccgccttcggtcgcccagccgcgcccccagccgatcgcccgccgccgcgcgctggcttgcttacggagaaggcgagaacgcacgagagagagaaaaaggggaagaggagaaagaggggagagaggtgagcgatgtctggttctggttctcaagttcagaggggtaa

SEQ ID NO: 33820 - DNA, 475 bp, Oryza sativa
  Clone ID: PAT_MRT4530_37896C.1
ttatggatctcctacactactggcacttgccgaattgggggaagccgtaggtattattgcggttcaatctattgaagagcctggcactcaactaacattaagaacttatcatacaggtggtggattcacagggggtactgctgaccttgtacgaccccccttcgaattgataaatccaattcaatgaggatttggttctcccgttatgggtagcctgctttttctatgttatatagagtagtatgtaactactcagagtcaggttattttacatagcgggcagagagcctcataaaaagcttgattctagtgatcaatatcaggaatccgaattccggagattcgtgcgggaacgtccactttgcattttaaagaaagggggctatggatggcgagagaagccctcatacccactcttctctcccctccccatacccatcaactactaggttgtggagagggcctcggtatcact

SEQ ID NO: 33821 - DNA, 312 bp, Oryza sativa
  Clone ID: PAT_MRT4530_37897C.1
atggcgggtcaaattggagggaaagaaaccaatccccggatggatctccaatctacagcgtgtcccatcaagaaatggcgcgggaaagggagggaccacggatggaacaacgcgtaccttcaagctcgatccgagccggagatgccggccgcgctcgcgcgcgaggaggaggcctgcggctcaatggctccggcttttcctctcgacgccacgcgctctcctctcctctcgtcttcctcttcctctcgatttgcagccgcgaggagagagagagaggggggaggggaggggaggaggacgaagcgtaattaa

SEQ ID NO: 33822 - DNA, 320 bp, Oryza sativa
  Clone ID: PAT_MRT4530_37898C.1
ggtttgtttatttcagattacgtaggaaatatactttcattatactaatagttataccgccttttctcgataattaatagacacattgcttagtaatattttttttgtaaaaatctagaaagtgagaacaagcgcgaatttttgcaatagaaattttagtacaaggagagattctcttctgcttgttttatttggccttacaggttagtgtggatgtattggcatatcaggcaaggatggcttatctgagagccgcaaggatgggggaatttgtgctgacttatgaagacaagggtggagactggatgcttgttggcgat

SEQ ID NO: 33823 - DNA, 939 bp, Oryza sativa
  Clone ID: PAT_MRT4530_37899C.1
cggacgcgtgggcggacgcgtgggcggacgcgtggccggccactctcactgactcacaccccgtcactcccctcttctcctcacctcgcctcgccgcgccgcgccgcgcgctgaagaggaggcatgaagcggacgagagcgcagcagccgaagctccaggaggggcaggacggcggcggcgcggccgggaacgccaacccgaagccgcagcggagggcgaagcagccgaggcagcccaaggcggcgtcggcggcagccaagaaggcggcggcggcggcggcggcgcgcgagtcgtcgtcgtcgtctgtgggggcgggggcggcagtgacatccgcggcgtcctcctcctgctcctccggagcggacatggcgcccaccgtgcccgacgtgtgtggcggcggcggcggcggcgcgggatacgaggccggggcggcgaccaccgtcgagtgggacctcgacggcgggctcagcaacgggttgtcgtggtggacgttcggggtggaggaggagaagctgctggggtggttccccttcgtggaggaggacttccgctgcctcggcgcccgcggcgacgccgagatggccttcgacgacgacatttggaggatccaccaaatctacgagatacccaattacgccgccaagtgatcgatcggattcatctttggttttttcccctagattacttggtagtaattgttgcgtggtacaggaatcaatgtcgagtgcgtagccaacaatgtgttgacgaggttagctagctggagtagctgatgatgtggtggcatctcaattcccagattgcaaattgctgcaattccaaatgccccttctttgcattctttgcctgcttgctttcgatcacacttgacgtggtataccttccttgatcagcatgtcatccctgatcagtgatcattcaaagtggggcttgctatc

SEQ ID NO: 33824 - DNA, 304 bp, Oryza sativa
  Clone ID: PAT_MRT4530_3789C.1
cccctgaagatcacacgatgacaataggaatgatacagaagtgagtggccctctttcatcgggttctgcgcgtcgtgggctggcgggtccttgggttctcccggcgggccgtcgggcgctccgcgcgcggtggcgctttcctgggcgctggggccgggggggcgtcgccgccgcgctgggggggggcggacaatttctgcttttccggcgccggcgccggccccctctgggccgggcggtgcccgtcggggcttccgcccggccgggccccctgcgggtgctccttcttcggccgccccgccgg

SEQ ID NO: 33825 - DNA, 1467 bp, Oryza sativa
  Clone ID: PAT_MRT4530_378C.1
atggcagttgagggttttgaggaagcaattaaatgccttgagaatttgaagctggaatctggagaggccagtcttgagcagcggcttccggcggcggcgtgcggtgatcatcacacagcagcaggggcagggctgccgccgggattccggttccacccgacggacgaggagctcctcctccactacctcggcagccgcgccgcggcggcgccctgcccggcaccgatcatcgccgaggtcgacatctacaagtacaacccgtgggagctgccggcgatggcggtgttcggggagtgcgagtggtacttcttcagcccacgagaccgcaagtaccccaacggcgtccgtcccaaccgcgccgccggctccggctactggaaggcgaccggaaccgacaagcccatcctcggcaacgcagcagacgagactgtgggcgtgaagaaggccctcgtcttctaccgcggtcgcccgcccaagggcaccaagaccagctggatcatgcacgagtaccgcctcgccaacgccgccgcctcctcctcctcctcctatactagtaacatgaagcagctggcctcatcatcatcgtccagctccagcagcgccagcatgaggctggacgagtgggtgctgtgcagaatctacaagaagaaggaggccaaccagcagctgcagcactacatcgacatgatgatggacgacgacaacgatgacgaacacaacctgcaggtgcagcagcagcagcagcagcaggctcaaagccaccggatgccaaggcctccatccatctcagactaccttctcgactactccgacgacctcccgccgtccaccgatcagacgccatctctgcaccttggattcacggcggtgaacgagggcaacaacaagaggcacaaaactatggaggaatattattctatttccatttccactgcagatatgctgcatgcgtcgtcgtccacgtccaacaacaagtcgacgcaaatcaacttctcctccatatttgagccgcagacgcctgcagctgcgggccatcagctgatcgatgaagggcggtggccgggtggggcttggagaagtggccctcaagtgcaaacgagcgacggcaggaagagcagcggttgggctctcagcgtggaggcggtggaactttggatttggggatttggggcggcggtggtggccagatttggggaaaacaatggtggtggtcattgggcgccggcgaggagtgaaatggggtcatggagagacaaggagcttggtgatttcgtcatagaaatgcttctatccatgataaaggtgctcgtcacagaattgctttccagctggctagtgacaagcatcgtccaagccacgtggctgccatacgtggaatccacattggatgtgacatggcagatgacggcggttgatgtagagcatggtggcagcgacatggagtgcgcgcgcgtgctggctttatag

SEQ ID NO: 33826 - DNA, 528 bp, Oryza sativa
  Clone ID: PAT_MRT4530_37900C.1
atggccgccgccggagaggagaaaccgttgccggcggaggaaatccaggggatcaacgacgaggcggagccgcatcccccgaggcgtaagcgtaacgacgacttactccacgacgaggagttccagcgtgtggtgcgcgacatcgtcatcggcccggataacgttcccggcggaggacatgcgttgaggattatcagagaccctgctactgcgttcgaagagctcctagagtgctaccgcaaggccggcctgctagaaggtcaagtctggaagcgttgtaacatcttcaaggggttggaggggttggataacttgcaggatgagcatacggtggcgggggcgacggcgcgtcggcgcacggtcagcagtcgacgcgcggcatcggcatgcggctacgtcgacagtggcagcgtcgtaaggcggcgcgggtcggcgatgggcgtgcggcggcacgtgggagtagcatcggcggcggcagcggagggcaacgcgcgcgtgctgagcagcggcgttggcagcgcgagctga

SEQ ID NO: 33827 - DNA, 1103 bp, Oryza sativa
  Clone ID: PAT_MRT4530_37901C.1
cccacgcgtccgcccacgcgtccgcctccagcagcagcagcagcagcaggccagcagctagcattatcagagagagagagcaaagtgtgctctcttcttcctcttctctgctactaatcaaagctagccagctagagacatctatagcttgggagaaagaagaaagctgagagctctttcttgctagctagctagcaatggcggcttctgctgctgctccggccaccgtggcggggctgctggtggcggtggcggcgataatggcggcgtcgccggccggcgcgcagccttcgccggggtactacccgagctcggtgcacagggcaatggccttctctcgtgactacaccaacaagtggggcccgcagcaccagaccctctccgccgaccagtcctccctcaccatctggctcgacaaaacctgcgggagcgggttcaagtcaaggaagtcgtacaggaatggctacttcgccgctcgcgttaagctccccgccggctacaccgccggcaccaacaccgccttctacctgtcgaacaacgaggcgcacccggggttccacgacgagatcgacatggagttcctgggcaccatccccggcgagccctacaccctccagaccaacgtctacgtccgcggctccggcgacggccgcatcgtcggccgcgagatgcgcttccacctctggttcgaccccaccgccgacttccaccactacgccatcctctggaaccccgacgccatcacgtttttcgtggacgacgtgccgatcaggaggtacgagaggaagagcgagctgacgttcccggaccggccgatgtgggtgtacggctccatctgggacgcgtcggactgggccaccgacgacggccgccaccgcgccgactaccgctaccagccgttcgtcgcgcgcttcgaccgcttcaccgtcgccgggtgcgccccgtcggcccccgcctcgtgccgccccgtcccggcctcccccgccggcgccggcctcacgccgcgccagtacgccgccatgcggtgggcccagcagagccacatggtgtactactactgccaggactaccgccgcgaccactccctcacgcccgaatgctga

SEQ ID NO: 33828 - DNA, 541 bp, Oryza sativa
  Clone ID: PAT_MRT4530_37902C.1
atggagcaacccacaattcaaaacctttttgctcctcgggctgatctttgtgagccatcctgttcttcaaaaccaatcctttcggatggctacgaaattagtcctgactttatagccatgattcaagagcaaaccttctctggtagtattggtgaaaacctatacctccatcttcgtgattttgagctagtgtgttcgtgcctatccatcgtaggcatgacacatgaaactcttaaatggaaattgtttccttttttctcttagagatgaagcaaagcaatggtacactctgtctgtcaggaaattccacggtgaataggagctaaagtgcaaattctgccttgccttctttctgttaacccgtgtaattaatctttgattagacatcctttctttttgacggaacgagaaggaatctctcgctgcagcctgggccaagttctcactgttaactcagtctggcccatactcgtctttacctgaccatgtgttgctgcaacattttcgatatccgtcggcgcagccgtcggcttccgtcgcg

SEQ ID NO: 33829 - DNA, 404 bp, Oryza sativa
  Clone ID: PAT_MRT4530_37903C.1
aaaaaagaccaaaaatacccaactaaagggaacaacacaggggaacacagggcctttgcccatccaagaaaaaataaactttaaactccgtttaaaaatcaaaggggaggtaaatttttttaagaggggggggggccttaataaacaaacagggggggggcccgttatttaaaggcgcgggggaacaaaaatggggggggggggggcaacggtataacttaacgacgggaggggggctcgccggggtggacaaaaccctaaggccgggggggaaccacggacggtcacggggggggggggttttccggaaggggggcgaaaaaccccggggggccgcgggggaatccgggcccggggccggaatcaatggggggaaaaaaggggggaacgggggggggtgtaag

SEQ ID NO: 33830 - DNA, 157 bp, Oryza sativa
  Clone ID: PAT_MRT4530_37904C.1
atggaggccctcatgagtctaacaccgaggctcgaggaggggcgcctagcggacagagctagagaagggggcgccgtcgtgctcactggccaggaaggcaggtacacaactagatctgaccacgggtcgtcagtgccttctggttgcagatgtgcag

SEQ ID NO: 33831 - DNA, 1923 bp, Oryza sativa
  Clone ID: PAT_MRT4530_37905C.1
aatttcactagagcaccggcggcgtggttgcgggcggcggcgctggttcggctccttcgctcggctcggctccgccaccgcgccggaggctagggttctgcgaggcgggaggcgtacgcggcggcggcgacagtcgacggagcttccggagcaggagagctccgacggcgcacgctcctgcggctcctcctgcttcccgtccaatctcgcgacgccccccgggcagattcgaggacgaccggaggcggcgaacggcgacccccccgccggataccggcagactaggttttctttgttagcataagcttgtgaaaatttagcttgtttcttacttatggataactcacacgaacagccattaccccctggtgtcggggcatggccgccgccaccttccattcatcctgcaaaatttcaacctaatccacagccttatgcaacaccttatggcgctacacccaacaatggcagcaatcacaatgcagcgagctactctgctgctgcacaacccaccatgcctttccctaacatggatgctgggggtgcacaatcaaatcagacagctcatgaagtttccaaccataatgatagtgcagcagacattgaatctgctgtccaagaggctgttcttcgtgaacaggacattgagactcagcaagtcatacaaaatcaaagacaagcaaaagcaacaattgagcctacgcagtatggagaagacctcctttcaaaccgccgcaaccctaatgcattgaaggagcacttactaaaaatgacagccgagcatcgtgcagagatggcaaacaaaagggggaagccgcttcatgcagataatggcaatgttgaaattggcaatggctatggtgtaccaggagggggtgcttattatgctgcaaacatgtcaagtgataaacccaaggatatagctgataaagcaaaaggtgccgatgatctccctgaatttttgaggcagagattaagagcaaggggtattcttaaagatgaggcgacaaataatagattcacgattaaacaaaatgtcgattctccagtagggcagataaaagctgcccaagagttgcctcctggttgggttgaagcaaaagatccaacaagtggtgcttcttatttctataatcagagcactggaacgacccaatgggatcgccctggtgctcctttgaacaccatgcaacatcaagctcctccatcctcgtccttgccagagaattgggaggaggcacttgatcaatcaacaggccagaaatactattacaatacaaatacacaagcaacacagtgggagccgcctactgctgtgaacccaggtgttgcgcctcatgctcccaccaatgctgctgttgagatggctgctcaaaatacagatatttggaactctcaaatgcagagatgtttaggctgtggtggatggggtgtaggtcttgtccagccatggggttattgcaatcactgcacaagggttcaaaatcttccttttcaacagtatccatcctacccaaacaatactacacactcaagcagtaacaaaaatccagggaatgtagcagccaaggacagatcaagcgcaaaacctccatttggcaaagcaaacagaaaagatcaccgcaaaagaaatcgccctgaggatgatgagcttgacccgatggacccaagctcttactcagatgctccacggggtggctgggttgttggcttgaagggtgtgcagccacgggcagcagatactactgcagctggacctttattccaacaaagaccatatccgtcacctggtgctgtgctgagaaaaaatgcagaggttgcatctcatggcaagaaacgtggtatggctccgatcaccaaaagaggggatggcagtgacggtctcggggaggcggattagatcaatcgtcgtaaattttcctt

SEQ ID NO: 33832 - DNA, 162 bp, Oryza sativa
  Clone ID: PAT_MRT4530_37906C.1
ttaaggactgcggagcaccagactgagaagtggtggagataagcccatgggggtcgctagggagtccatgcctctggtttttgagggggtgactatgatccgggaatggtgcactgctttgagttgagttatgcgaggggtcttgtcacaatcactcgccat

SEQ ID NO: 33833 - DNA, 795 bp, Oryza sativa
  Clone ID: PAT_MRT4530_37907C.1
tttgtttcgcccttttttttttttttttcaattcaatctacagcggcggcaattctccttggattcagattattgttgttcttacattacagcttgaaaatgagggtaagggggaagacatgccagtgcattattgtgacggacggattgcaaatacaacacttctgtcagtttctgaaagtacactacatgaactggcaacgccattggcgggctaaatctagatcacaccgcagcgctggctgtcacggcgatccacatctaagtagtcggccacaacataacttccaacagagtgctggttggctgcaatgttcatcaggccatcgtttcctgctgcagccaaggaacataaaaaattagatcgcattatagctttgcaacaaaattatgtcagaatgaaatattagaatagtagccccagatacacaacatgtgaagaagaaaacccatacaatccatagactgtttaccaacaaaattaaggaacatttggcaccctgatgacaaaatacagatttcattcatgaaaaaagactagctggaccaagctacaccaaagtttggctgctttcaattatgtgcaatacaaaataaaagaaaaattccatcccttattacctagtactacataaagccaataaaagtagaaaatgcatcttctctggtttcctctagaacaatttagcataattaataaacaggtttgttgggcaagccaatatattcaggcggattaacctagaaatgctgattgcatactttcttaaacaaaatcaggggataagttaagga

SEQ ID NO: 33834 - DNA, 179 bp, Oryza sativa
  Clone ID: PAT_MRT4530_37908C.1
gcgtgcacgcgctcggtcgcgcttcaccttgtgctaccccgctggttctcctcgcgatcgccttcttgcacccgcaggcagcagactattcattctttacaggcaggaaggaatgatcttcgctgagtcaaggcctataaattgctgttggtgtgccgcaaaaaaggagacagtggaga

SEQ ID NO: 33835 - DNA, 762 bp, Oryza sativa
  Clone ID: PAT_MRT4530_37909C.1
atggacatctctagggcaaatgaaggctacacgagctgcggcccggtagtcgagatgtcatggcacatggccggtatcctgctgctaggggctcaaccttggttacctatctcgggggtcccggccgtagccagggttgggtcggtactcttgtttatggctaggatgggttgggaactatgtcacgtctttcgtccgtatgccgtggtgggcaagaagcttccggagaagtatggtgacgatgcagagccccgcgccgcttgggaggtcactgcggtgatcctcaccggctctcccgagaggacttcgctggcagtcaccgcgggtgcagactccttccccaccacttgccagaacgccgcgctcctcgccatcggcactcttcaccagcgctatccggacgagttgcagcactcgccctaccgctaccaccctcgtcgtggaggagcccgcgactgcgccaccttcagggatgcctgctcagaggatgacgctaccatcatgcacctagcgcgcatggtggaggcgtacgacatggctcgcatcgacttccatcatatggtggcgccgtgggttggtcaagaacaacatgaagatcctggagctgcgtcaggagaatttgcagctgaagaaggacttggacgccgtgaaggcgcagctgtgtcagctcaagattgctcagggggagatctgctgccccaagcgccgccacatttgctgcagccagaagatcaccacccgcaagagtacctccaggcctga

SEQ ID NO: 33836 - DNA, 272 bp, Oryza sativa
  Clone ID: PAT_MRT4530_3790C.1
atataaatgcaatatgagcttaattcggatagggatccgaataggagtcctacgggccttggaggcccgagtgatggatcctatatattcgtgaggggtgtgactggcggaggcattgtatcaccgtgggagtacggcgagcagaacgcacgaggaggagaaggtcgagccggtgcgatcgactatttcctctacatcgacgcgcgctacttcgcgagagttccttcgacttctcagcgtcttcttccgcttgacagcgcgtcgagtgataa

SEQ ID NO: 33837 - DNA, 901 bp, Oryza sativa
  Clone ID: PAT_MRT4530_37910C.1
gcacgaggtagctagctagctagctataggcgagatgctgggctgcttctcccggctgcggcggccggcgtcggcgggggcggcgccggcgcccatggcgcagtctgacgacgcgtcgacgtcgacctcggctggcggcggcggcggctgcaccgcggagacctcgccgtgctcctcgtcctcctcgctccggtgcaagaactcgggcggcgtcggcggtgaagacgacgacgatggtgtcggcggcggcggcgccgtcgtcgctgagaacgcctcggcgctgtccgactccgggctgtcgtcggccatcgcgtcgcgccggttcttcctctcctcgcccggcaggtccaactccatcgtcgactcgtcggcgcacggcgccgccgtcggcgtgggcgcggccggggtggcggtgcagacgtactcgccggacccgcacgccgacttcctcaggtcgatggaggctatcctcggcggcgctgcggctggacgcgcgccgccgcggcgacagggcgcggctccacgagctgctcttttggtacctcgcgctcaacgaccggcgcgcccacaagtacgtggtcagcgcattcacggacctcttcttcggcatcaccgcggccgccaacgtgggcgtgccatgttgcgatccctgcagcagcaacagaaacagcgctggagcagcaaccaacaaacaccggcatcttgcacaacaatacaatcagaaacaagatctggcaagtccaccaccggccagcagcactacacttcctttctgaccggcagcgacgccgacatacagctacttctccacctatctcctcatctcaaccaatcacaattgttccttaccggttaccgcaaccttaatctcttaaggatggcacaggtagttgcattttga

SEQ ID NO: 33838 - DNA, 446 bp, Oryza sativa
  Clone ID: PAT_MRT4530_37911C.1
atgctctaatgtcatttcaaggggaatttaaacatagattcagaggcattacagattttgagaagagaattactttgttatctctccctcagtgaaaaaggattgtgacacatcacctgaaagtagagtttatttcttcaggatgctgctcactttggacctggcttttggacctcactttgccggggcaaatctctcatgtgtcattcttcccctctcttcctcctcctagagttactcaaagatgaaaaaaaatttccccacatacatctttcttatatgtgacctgaatcatcttccaatacgaatgtacttgatggagaacagtggcagccttaaggatcagatacagatagcaatgcctccttcctactaaaacttttcttttcttttctcactgtcttttctccccctctccatccacaagaacaaacaaaccaagaaat

SEQ ID NO: 33839 - DNA, 200 bp, Oryza sativa
  Clone ID: PAT_MRT4530_37912C.1
agagataccccgtcatgcgcacgcgcacgtgcgcttgtcccctatattgcgcgcgcccttttttttttttttttttttagttgaatcaatttgactatttgaaacaaccttttttcacacttttaaaaccttgttttattttcacagggggggtaagactataaccgcacaaagggagtcgaacaagagtttcccaaaaa

SEQ ID NO: 33840 - DNA, 296 bp, Oryza sativa
  Clone ID: PAT_MRT4530_37913C.1
ggctagcaagcaaagctaggtagaggccaggccatagatcgagatcgatctgcaggtgcagtgcggtgggtgggcatggcgacgaaagctgaggtggtggcgggagcggcggaggttcaggtggaggcggcggttcaggtggaggaggaagcggcggcggaggttcaggcggtggaggaagcggaggcggcggaggaggaggaagcggcggcggcgggggaggaggaagatgcccgatcgacacgcgccaacatccttggcatcaacctcaacctccccatcaacctcagcctcct

SEQ ID NO: 33841 - DNA, 427 bp, Oryza sativa
  Clone ID: PAT_MRT4530_37914C.1
gccaaccctatcaacttgatttcgttcaccaatacggacattgaccggttgctgtcttgccctggatcatgcaaggaggaggagcactctatgcaattccctacaccgtgcgcattagtcgaccaatcctgcggttcctgctcacaccaacagaggaccatgactacatgaaggatgaacgttggctggaccaatgtcgcagaaggcgacccgatcgccttgatttcgtacgatgtcctccacactaatgaatgaagaatataaggcaactaaaccgttcatgacgtgctggatgccctcaagtgtccgcaccgactattgcatcaacgttggatcggagccacacgatggcctaccattctgcttccatcgaccgcatatccctgcatatgtgggggccagaggcaaactgtatttcttttgtgca

SEQ ID NO: 33842 - DNA, 3846 bp, Oryza sativa
  Clone ID: PAT_MRT4530_37915C.1
atggactcgtcctgtcgaccgccgagctatggaccttggcctaacatgaaccacctgcatcctccagagtttcatagctgctgcaaccacacatatcctcctggttactacagtttcaggctaccatcccctcaagaaattccaccacctcatctgtattaccatggtccttttccacaacacccgaatgcctacccttcttactttgcacgtccaccgccgtatcctgttgatcagacagcatacggctatgacaagttcaagagccattgctgtggatgcccaaaccatagttgccatggcggcgagaggagcaatattaaaattgaagaagagaggcctgaagtcaatcccgacactgagcagagggatgccagcggttctgatatagttcgacatccaaattaccaaaaccaggctatatggcttccttctggcaacatgaatgataaggagaacaaaaaaagcatggaattgccacctcagttctacaatggttggattcctgtgagtggtaagtgggttggggatgtgaagcaacaagatcaggatgatcagaaggctaaacaatttcagtggccaatattttggatgccagcaggatataatgagaaaaggcaagaagcaaaagaactgaaggaggtggatgaaagtccaaaggtttctgaagaagctcctccatcgcccaagatcaagattattcccttgtcatggtttgaaaatggtcacaatgatcagaagccatctgtgaaggatgaatctcatcataatgaaagatcaacagtgaagaagcagtctgcaggtactgagcatcaagatggcagggaaatgaagaatattccacttatgcccaagaaagaaagcgaagagaagatgcccgccagggaaaattacaagacaattccagtgatgcctaggaaagacaatgaagaaaacaaacccgctggtggtaattacaggattattcctgttatgcctgtgaaagaaagcgatgacaagaagcctgaggcaagtgtgcagagagatgaaaagaaggccagcagcactgagatggaagaagaaaatggtaaaagaagcaatgaagaatcatcaaaagcaaagaattcaaaattgcctcctgtatgtttgcgggtggatcctttgcccaggaagaaatctggaagtggttcttcaaggtctcccagtccaccaaccaggaaggatgcagatatagccaagaaggatgttaaagagatccatatgcaaaaacaggacgctaaacagtcagatccaaagaaggagagaactgtatctgaagctaaagaaaaagcacatgatgaaatgaataaagggagggcatatggcaatgaaaccgtgcaagctgcttctgtgaaacaaatgcaggaggaacaatttcccatgagtctggctgaccagaaggtgcaagctactggagtaaattttgatgctcaggaaaatgttggtgagaagaatttgcagggatctgacaaaaacacagagggtgaggcgaaaattcaaggtgagcctgcaaaagactatgatacaactcccagcattaatttctcagaagtagatgcagcagtttgtattcagtctgcataccggggatataatgtgcgaagatggcaacctttggagaaactccggatgatcaagaatgtaaatgaacagatgaaagatctgaaggagcagttgcaaggcattgaagcttcttccaagcaactgactgttaaagagcaagtggctatcaatgagactatcatgaatttactcctgaagcttgacaccattcagggcttgcatccaactgtaagggaggctaggaagtctgttgctcgagagctaattagtctgcaggagaaacttgattgtttatgcaagcaatcatctggcgagtctattcacacaaatggtgaaaaagagaaaccagaggcaatggagaataattttcaaaatacagatccagtctcagcaatagaagcatctgagaaagaaaaagctgcaggagtggatgaagaacaaggcctgtccacaatcaactccaagctgttgatgcctgatgcagtttcatcagtagtttcaatgtatacgacacaagatgcagatcctagtgatcatatagaagagtcaaatactactaaggaagaagcgcctaataatggagggaaagttgcaacacagtgtgactgtcaaggagaaccatcaatggatgtgatgggtgatgcagctttgttgggacattccactgagcagaagcaacaaatagaagaatcaaatgccatttcaatggacaaatcgtgtgaaagagaaaaagatgtacccccggttggaggacaggaaataccatcaggggaccacatggaaccgttacatgatgaagctttatcagagaactccaatgagctgcaacagtgcacaactagtgagagatcaagtacaatgatttctcctgctgccgctgacaacagtatgattactatggctgcaacatctgttgaaagtagtgtgtcagctgataaagtcagcccagttgaaggtcaggtgacagaagctgcagttgagcatgctcctgtggaaaaagatcagtgtgaagaaccaaacactacaattgttgattcgggggactcatcagtatccttgaagaatgaagagctgcaggatcatgatcaagctccttcaggatcctctattatgtccaattcagccgagcagccagaagaagctagcgatgtgaacatgcagcaacaagttgaaaatgtggataccacacaagatgcaaccgaagaatctgatgctacaccagagattggtatggttgatgttacctatgcagacacagaaaattatgtgcagtctcccttgctgcaaacaacatcaaaattgcaatcaacaacaggacaaaatgtcctgaaggaaccagaagcagcaaagcaatctgacgtttctggtgaatatgagtcagtacttgttggtaagcaaaatgaatccgctaacaatctgacaggagattctgcgaaagaagagccccctcttgtgggactgggaatggaagctgatactcatgaaagtgctcctagagaattgaaggatgaacctattttgccagagacggagagaagtgaattatcatgtgaacatggtgacatcacaggacatgaggattccgaaatgtatgcgccaccggaatgcgaaaccgatgtgcagaaagagagttgctgcgttgataggcgtcgtgcggacatgcaggtgccaaaggaagttgaatgcgatgagctgggagatgataatccgaaggaagatgctagtgttcagacagagaacatggcatctgaagaagcttccttggcttctgcaactcctgatggtatgaaagatgagaacaaggttgctgaagaaactacttcagattatgcgactccttatagttcaaagagtgacaatgagaacaaacttgctgaagaaaaccagaagctgaaagagatgctgcaaaaccttcttgcatctggcagcgatcagatgggagttatcacggaactgagcgagaaggtcaagacgcttgagcgtaagctggcgcgcaagaagaggccaaaggacatgtggcaggggagtgggagctgaagcggcggccaaagtccacagaagatgatctctggagttttgagtttgtgtttatggttccatgtggctgtttgtaaccatgcctgtatgaatgtactacttgtaatgtacacatgagtgttgtggtactatgcattggagaatgtaagatcatgcctgtgttgggtccttgtaatgctcatgtagcctagtttaacacgaagtatcaatgtcataagggagttgcat

SEQ ID NO: 33843 - DNA, 388 bp, Oryza sativa
  unsure (1)..(388): unsure at all n locations
  Clone ID: PAT_MRT4530_37916C.1
ctgtcttccaggacatttcacntaacagtcgccgtcaaaccagcacacagtcacacaggcttcgggaaatcttaacacacagattccacatttcggggcaacagcagcagtggttcagcagcatcttcatgcacaggggtttatccacacagtccacattagggatcggcttacccatgtgcaagtccagttcacatggaacctttctcctcttcaggccttcaaagttctcatttgaatatttgctactaccaccaagatctgcaccgacggccagctccgcccgggctcgcaccccagggttttcgcgccgctctagagaatccaagcttacgtacgcgtgcatgcgacgtcatagctcttctataggtcacctaatcattcatgc

SEQ ID NO: 33844 - DNA, 249 bp, Oryza sativa
  Clone ID: PAT_MRT4530_37917C.1
atggtcggcggcggccggatgacgacggggcggccgacggctgacgcctccgccatgccgtgcagcagccgaccaacctcgtcgcagcgcaccggcaggaacgccctcaccgcgcacggcgacgacaccaccacgacgccgcaggtcggcgtgcgaggccaggccgacgagcggcagcgcgccgaggacggggacgcctgggggtcccgggggaggcggtggccgccgctggggaagggtgggcggtag

SEQ ID NO: 33845 - DNA, 484 bp, Oryza sativa
  Clone ID: PAT_MRT4530_37918C.1
ctttaatcatttatgttactgttccattcttgttgagtaaaagatacaagtgccatctcctatcatctccgttcttctcaaattctcaatgaacagctcaacaccatgtttttcatatttagttgattatactcctgatgattaagcaatccctaagcctgcaattcacatttctctctaaattttgaaatttcaaataacatgttttcaaaatcatgttccttgacaataacaagttgccagtactccattgttataatattagtaggcatcatgtactaacacgggtttatctgttaaattagtttgctgccaagatttgccctgctgcatcatttagagaccacatgcctaatcgagaaaggccccaaaggtgccacttccacaaaagagctttggttaagcttttggagtgaggtgcactacaattccttggttgcaacttgagatcttcccaattccaagacccagaagaagccctggc

SEQ ID NO: 33846 - DNA, 159 bp, Oryza sativa
  Clone ID: PAT_MRT4530_37919C.1
atggcagattttgtttggtacggtatcacccaggccaaagccaaaacctacacatatttggtcttccacttgggtgcgggtgatgagacagtcagaacagaggacaacacagacaacatcttcaccaaccaactaatcaagtaccaggagaaaagttag

SEQ ID NO: 33847 - DNA, 463 bp, Oryza sativa
  Clone ID: PAT_MRT4530_3791C.1
atggaaaagataaggactaatcggattgtatccatattggtctccctagttttacttggacaagggggcacctatgggtataaatacaagcccccctaggaggagaggggacaagccacaagatcaacaagacacaacatatacacaagccaacacacgccgccagatctcgatattagagattagcctagatataccccatccggtgcctgtgaaggttggcaagaggaatctagcgccatttctgatctcgacgggtttatatttgaggaggaagactactctgtcattgactatgagctgattatccatgccgccaagtcgacgacagtcagataggttatcccaaatattgtactttctcgcatataccatggtaccgactatctccatactgtccaaataccgtagtcgtgatatcaaacgtcgataggtatcggttgtggacttggcgactcatata

SEQ ID NO: 33848 - DNA, 315 bp, Oryza sativa
  Clone ID: PAT_MRT4530_37920C.1
atggccgtcggatggggatgcgcgcggattcgcgaggtcccccgcctctccacgcccttctccacggtggcgcccctcccctctccttcctcccccaccatcggctcctttcctccttgtcagggtgccaccgccacctacttgccgcctcgttccacgctaggtccggcaagtcggcggctccccggcggcgcagcagtttgggattggctcctccctctcccttcaggcatctccccgacacagtggcgggtcagcgacttcccggcgcaacagcgccacggctgctccccggcgcagcagcggctcggctga

SEQ ID NO: 33849 - DNA, 520 bp, Oryza sativa
  unsure (1)..(520): unsure at all n locations
  Clone ID: PAT_MRT4530_37921C.1
ttttgtaatagttatgacttgtaccattagacttgcttcagaagcataccattaccacctgctgtgatctatgctttcacagttctttgtgaaagtattcctgttaaggataaacttctttcttgagggatttgatgtgttctgccaaagcccaaagataggttaggaacagcaagacatctagttgcatttgttgaatagtgtttcttggcttcttatatgatcttggtacctgttagctcattggcactgcatgaagattatatttgacaagcaaatgctgcagggcgtacttgttccttgtttgctttgagtttattgagatactttaagatagcatgttttagctgtttgcatataattgagttgacaaccaggaatactagaatactaaactactgggcactatttgaattgaagtgcaacaagttcaacatacgggatgcctttttctgcccttgatttctgactatattggtgttattctacttacatcctccgngtctttatgtgatctgtc

SEQ ID NO: 33850 - DNA, 1149 bp, Oryza sativa
  Clone ID: PAT_MRT4530_37922C.1
atggggatccttatacaaaaggagggcttaatgataggtctaatagtcagtggtggctcattacttctacttctgggcttcgctgctcccttcatattaatatcacgaaacacatattttgctgaaagaatgatcattaacttagaggagctagagaaggccacaaacaattttgacaaaactcgagaggttggagatggagggcatggggttgtgtacaaagggattatagacctacatgtcgtggccatcaagaaatcaaagattgttgtacaaagagaaatagatgaattcataaatgaagttacaattctttcacaagtgaaccatagaaatgtggtgaagctcctaggatgttgccttgagacggaagttccattattagtttatgagttcatttcaaatggaactctttatcatcatctccatgtagacggaccagtatcattatcatgggacgatagactaaggatcactgttgaagttgctagagctctatcatatctacattcagcagcatcaatgccaatatttcatagagatattaagtcatccaacatacttcttgatgatagtctaacagctaaggtatctgattttggaacttcaagatacatctcgattaatcaaacaggaataactactgcagttcaaggaactgttggctacttggatcccatgtattactatacagggcgacttacaagcaagagcgatgtttttagttttggtgttcttctaatggagttgcttactcggaagaaacctgttggtgatacatttgataatggtcacaatcttgtttcacattttgtattagtattttcagaaggtaacctttatgatataatagatcctcaagtcaaggaagaagatgatggagaagccctagaagtagccacactagctatagcatgtacaaaatttaaaggagaagaccggcctacgatgagggaagtagagatggcattggaaaacatagcttcaaagaaaggcctcttccataatgggaatactactgcatcaaggagacctgatgaaaatcagaattcaactctctacatgtcagttgaaggagttaccaaggaagcaataacagaaagcacaacagaagaggaaatattattgtcgtcaaggtttgcgcgatga

SEQ ID NO: 33851 - DNA, 775 bp, Oryza sativa
  Clone ID: PAT_MRT4530_37923C.1
gcccccgggcccccgctgcgcggcaccatggcggccgctctgcgcagaaccgcggctcccatggcggcggcggcggtgttccggctctccgcaccaccgcgccacgccgctcgcctcgcgcggttcctcggcggcgcctccgctgcttcctccgatgcggcggttgcttcgggggagttcgtcccgtggcacaacggcgggggcgtcttgcacagggccgcgtccgttgaccccaccgcggtggtggaggccggcgccgtcgtgcactccggcgccgttcttggcaaggatgtcgtcgtcggctcgggagccgtggtcgggccctccgtgtccatcggtcagtcaaccaggatctggtacaatgttgttttgagcaattgttcggtgggcgagttctgcactctccacaatggcgcctgcattggtcaagatggttttggtttctttgtgggggatgatggacagctttatgcttctccagatgttgcatgtaaaaattggaaatcatgtggagataggtgcaaatacatgtattgacagagggagattgggggactatgtaaccttgggtggtagggtggcaattcgggatcacgtctccattgcttcaaaggttcggcttgcagcaaatagttcggtgacaaaggatattcagaaacccggtgactatggcgggtttccagcagtccctataaatgaatggcgccggcagactgcaaacttgcgcatattttcgaagaaagatggtggtagaagatactataaggtattctaa

SEQ ID NO: 33852 - DNA, 1255 bp, Oryza sativa
  Clone ID: PAT_MRT4530_37924C.1
ccacgcgtccgaaaaaatggttcccaacttttcaccgatcgcttagcttagctagctagctttagtggcttgtctcgatcgatcatctattcatcttattgtcgatcagagaccaaccatttcggcatatcgttcgatctatcgcctaactttgctgctagctagccatatatatttggatttatattgttgtcaaatactatatcagattgatcgatcggtgatcggtctatgccgttgctgccgatgacgaagctggagctcggccaccgcggcgaggcgtgggagcccggctgcctccgcgccgtcgccggcgagctcctcttcaccttcctcttcgtcttcatcggcgtcgcctccaccatcaccgccgggaaggcggcgggtggggccggcgaggcggcggcggtgacggcggcggcgatggcgcaggcgctggtggtggcggtgctggcgacggcggggttccacgtctccggcggccacctcaacccggccgtgacgctctccctcgccgtcggcggccacatcacgctcttccgctcggcgctctacgtcgccgcccagctcgccggctcctccctcgcgtgcctcctcctccggtgcctcaccggcggcgccgccacgccggtgcacgcgctggccgacggggtgggccccgtccagggcgtggcggcggaggccgtgttcacgttcacgctgctgctggtgatctgcgccaccatcctcgacccgaggagggcggcgccgccggggacggggccgctgctgacggggctcctcgtcggcgccaacaccgtcgccggcggcgcgctcaccggcgcgtccatgaacccggcgaggtcgttcgggccggcgctggccaccggcgagtgggcccaccactgggtctactgggtcgggccgctggcaggtgggcccctcgcggtggtggcctacgaactcctgttcatggacgtggaggacgccggtggggcccaccagccgctgccgcaggagtgaagtgaagccggggaaggcgcgctcacgtgaggtccacgtggcttcgggagattgcacggccgtgtgcgtgcgttttcggccgttgattggtgtaatctccagatggaattatttttgtacgtttgatttttttttccattttgtttaaaaaaaatgggaggcgtgcgtgtaaatttggggtttttttttgtgtgtatgtgccggtacaagtgaggttttgctcgttgaaaatatgatgaataatacgtatttc

SEQ ID NO: 33853 - DNA, 1432 bp, Oryza sativa
  Clone ID: PAT_MRT4530_37925C.1
gagtaattttcccgtctccttcggcggcatccaccccaattcatccgggaaggggaggaggcgtccttccttcgccgctaagcaagcatccagcccacccagccatccatccagggaaagggtaggggaaggtggcaatgaggatgtccatgcccaggtgactcttagatttcttcggtttgagggaagggaggaagggggatcgatttcttcttcggttctgatttggcggaggaggaggaggagcacgacacccaacgatatggtgggcgtgctgtccaaccgggtagatcggctggacctcgccgccggggatcacatctactcttggagaactgcctacctctatgcgcaccacgggatatatattggtgatgccatggttattcattttacaagagcaactggacatgaaattgggacaggaacattcttggacatgttccttttcagctcatctccagcaacggaggagggtcctccctgcgagaaatgtggtcacctgattaagcagcagggggtcataatgtcgtgcctcgattgcttcttggatgggggcaatccgtacctgttcgactacgcggtgtcccccgctttcttcctcgtgaaagcgcgaggaggaacgtgcaccctggcagcctcggaccccgccgacatcgtgatccaccgtgcccagcacctcctgaacagcgggttcgggacgtatagcctgttcaagaacaattgcgaggactttgcgatatactgcaagacggggctgctggtggagaccgctttcagcgtggggcgcagcgggcagctggcctccctcacggctgccttcagcgcggtggcctcgtcgccgctccggttcctgacgaccagcgctggtgggctggtggttgtgacgagcggcatgtactgcgtggggcgatatgtctcagatatcggtgttcgccgcgatgtcgtcaaagtgcccgtggagaggctggtggagcactggccgccgcgggatgttgctgttgctcctcctcaggaaagccatcaagaatgccaaggaaatgatgttgctcctcaagaatgccatggagacggcgatggcggctgcgtctcggagtcgctgagctaagctcttactaataggaaaaaggcagtgtgccattcgatctgttgccgattgtaccgattatgaatgtatcatcgtttatgttgctcctcaagaatgccaaggaaatgttgctcctcaagaatgccatggagacggccatggcggctgcgtctcggagtcgctgagctaactcttactgataggaaaaaggcagtgtgccattcgatctgttgtcgattgtaccgattgctctgcgctgtttgtattctgtgattctgtccatatgaatgtatcatcgtttttatttactgtaacaaaataatagtaaaaaaaaaaaaaaaaaaa

SEQ ID NO: 33854 - DNA, 743 bp, Oryza sativa
  Clone ID: PAT_MRT4530_37926C.1
accctacgagcgcacgatcctcccctccgccgccggccttgcttcttccccattcctgctcttcgaggcgttttttaacttcacaatgaagctgatcgctgcctacctgctcgctgttctgggtggaaacacctctccatctgctgatgacattaagaacattctggaatcagaactggagggcaaggacataacagaagtgattgctgctggaagggagaagtttgcttctgtgccctcaggtggtggtggtggcatagctgtggcagctcctacagctgcaggtggcggtgcagcacctgctgaagaggcaaagaaagaggagaaggtcgaagagaaggaagagtctgatgatgacatgggtttcagcttgtttgactaagtaccttcggctgcatatttacccccgttcaccccagtatctttctgcattgcttgctttatcactatgtgtgcaaaaatgagcaatgtgatggctctatgtgtttctgctattttttggtcgagactgtatatgtctagtatcctaagaagtttaatgtaaaatttcagggaactggtcaaaacatgtaatgtttgctatcgtgagttagcattatctactctcaccgcaatgtgctctgcttttttttgttttatttggatgacgctaaattggttcgtcatcaattaaataaccctagaatcctggaaaacgctcacgatgatgaatcagaagctgttgctcggtggaggtttgatat

SEQ ID NO: 33855 - DNA, 920 bp, Oryza sativa
  Clone ID: PAT_MRT4530_37927C.1
taatacaatgcccggccgggggaccctacgagcgcacgatcctcccctccgccgccggccttgcttcttccccattcctgctcttcgaggcgttttttaacttcacaatgaagctgatcgctgcctacctgctcgctgttctgggtggaaacacctctccatctgctgatgacattaagaacattctggaatcagttggcgttgaagctaatgacgagaggctggagttcctgctctcagaactggagggcaaggacataacagaagtgattgctgctggaagggagaagtttgcttctgtgccctcaggtggtggtggtggcatagctgtggcagctcctacagctgcaggtggcggtgcagcacctgctgaagaggcaaagaaagaggagaaggtcgaagagaaggaagagtctgatgatgacatgggtttcagcttgtttgactaagtaccttcggctgcatatttacccccgttcaccccagtatctttctgcattgcttgctttatcactatgtgtgcaaaaatgagcaatgtgatggctctatgtgtttctgctattttttggtcgagactgtatatgtctagtatcctaagaagtttaatgtaaaatttcagggaactggtcaaaacatgtaatgtttgctatcgtgagttagcattatctactctcaaaaaaaaaaaaaaaaaaaaattttgttttatttggatgacgctaaattggttcgtcatcaattaaataacccaaaaatcctggaaaaaaaaacaaaaaaaaaaaaaaaaaaagttgctaggtggaggttttatataaccaaaccccagtaatcttgtaagtatgcccttgttccattattataaaaaaatgtgacgacgccaaaaaaaaaaaaaaaaaaaaaaaccaaaaaaaaaaaaaaaccaa

SEQ ID NO: 33856 - DNA, 172 bp, Oryza sativa
  Clone ID: PAT_MRT4530_37928C.1
acaactcgtgcatggagagtaaattctaatgccaacacgtgctctaaaaccagatctagagagctagcgtggcacaagactactacatggctgagaaggcctgatgttgaagaaatgagtacgctacagatcctgatgggtcgaagatgactcgcaacattacagatatgac

SEQ ID NO: 33857 - DNA, 158 bp, Oryza sativa
  Clone ID: PAT_MRT4530_37929C.1
caggtgaaagagaagttcattggcgtttacatgctgaaaccatgttatgacaaggtgcaaggactacaacaatagcacctatcaaaatcataagaaacgcttagtgcatatatacaccaagatagggccatctaaatctatacggaaagagaaaaagt

SEQ ID NO: 33858 - DNA, 3847 bp, Oryza sativa
  Clone ID: PAT_MRT4530_3792C.1
atgtcgcaagtcagatccgcccctgagctggacagccgtcgccggaggcgggactctgacgacgagagcggcgagcgcgacctcgacacccggcgccaccgccgccggagccccagctcagagtcgtgttcgtcctccggcgatgatgaccgtagccgtcggcaccgccatgacgagagctccaggaggcggcagagagaccagagccaccgccgggacaggggtggtcatgatgagcggcgccggaggagccctcagaggaggaaggagccgactccgccgccgccgcttctaccggagatgataccagggcgcacaggagggatctacatcccgcctttccgcatggcgcagatgatgagggaggtggaggacaagtcgagcgccgagtaccagcgcctcagctgggacgcgctcaagaagagcatcaatggcctggtgaacaaggtgaatgctaccaacgtaaagaatattgtgccggagctgttcgccgagaacctggttcgtgggcgggggcttttctgccaatcgtgcatcaagtcgcagatggcttcacctggcttcaccgacgtgtttgctgcgctcgtcgccattgtgaataccaagttccctgagattggtcgcctgcttcttgttcgcgtcgtgcttcagctcaagagagcatataagcgaaacgacaaggtgaccttcctcaattctccttttcagcttgacatgcaggtcattgctcatgagctcgtggcactggagcttcttactgtactgcttgagaacccaactgatgatagtgttgaggtgcatatcttgtttcttatgtccttttatgttgatcatgtcttcatttatgcaatatctgaagcatatggatatgtttcttatctggacttgtctccacaagggcttcatgctatttttgaaagatttcgaggcattcttcaggaaggtgaaatagacaagcgtgtgcagtttctgatcgaaggcctttttgcaattcgaaaggctaaatttcagggattccctgctatacgtccagagttggatcttgtggagcaggaagatcaatttactcatgagatatcccttgaggatgagctagaccctgagactaatctaaatgttttcaggggaaatccaaattttgctgaagatgagaaggcatatgagaacctaaaaagaagcatccttggagcagaatcttctgatgatgaagaagggtctgatgattcttctgatgaggatgctgaagaagaatccgatgatgaagaggacgaagagcagatggagattagggatcaaactgagaccaatctcattaaccttcgaagaaccatttactcgacaatcatgtcaagtgttgattttgaagaagctggtcacaagcttctaaaaattaaacttgagcctggtcaagagatggaattgtgcatcatgctgcttgagtgctgcagccaagagagaacatacctgcgatattatggattgctagggcagcgattttgcatgattaacaaagtttaccaagataactttgagaaatgtttcgtgcaacaatattccatgatacatcgtctggaaacaaacaaactgagaaatgttgctaaattttttgcgcatttgttgggcaccgacgcgcttccttggcatgttttagcttacatccgtttgacagaggaggacaccacgtcatcttctagaattttcataaaaatactcttccaggaattatcagagcatcttggtattcgtctactcaatgaaagactaaatgatcctaacatgcaagattctttcgattcgatcttcccaaaggatcatccgaagaataccaggttttccataaatttcttcacttccattggactgggtggtatcacagagactctgagagagtatttgaagaacatgccacggctaataatgcaaaaacagaagcctgcctcgtctgaatcagactcaagtgattcagggtctggttcagacagctacagctcagaatcggaatcaagttctgatgagagtgacaggaagcgaaacaagaggcggaagaagtgcagaagaggaggagacaaggtgaacatggaggagaaggtaggaggagatgtgagggttctgaagccactgatgcacctgctgcttggactggtcatgtactgggtcgccgaggagatgacggtgcctgtgctcgtcgacgtcaccacccgagcactctgccccggcgccgacatcgcctgcccggaggccatctacctcaccggcctccatcaaacggtgggagggattttcagggctgtaggatacactttgatggggcagctagctgatgaatatggccggaagcctctcctcctactcactgcctcaacttccatcatcccttatggtgttcttgcctgcaacaaatccaagattgctgtgtatatcttccttattctgcgtactttgtcattcatgataggccaaggaaccataaccagcctcgcagtgacatacacggccgatgtggttgatccatcaaagagagcatttgcatttggctgcataactgggatactatctgcttcgcatgctctgggcaatggcttctctaggtttctgcccgagcggtggattttccaggtctcggttgctttgttgatctcttctgtcatctacatgaaaatatctctggttgagacacttcaaagagcttcttctggttcgtttgagcatatgtcgttctcatctttggttgtcaggttaccactgcggcgctgggagtctatcaaggagaatattaacataatcaggagaagtgaaacacttagcagaatcacatacatttccttcttctacgagttgggcatgatcggcattagtgatgtcctaatgtactatctgaagtcagtatttggttttgacaagaaccagttctctgaaattcttatggtagtaggcattggttcaatcttttcgcagattttggtactccctgttattatcaatacagttggtgagaagggagtcctatgcgttgggatacttgcatctgttgcctacgctgtcctgtatggtttggcatggagttactgggttccttatcttacttcctcattgggtgtcatctatgttctggtcaaaccagctacttatgcaatcatctctggggaagtggactcatctgaccagggaaaggcacaaggattcatttcaactgtgaaatccacagctgtactgttggcaccattgttcatgagccccctgacctcttacttcatttcagaacaagcccccttcaactgcaaaggtttcagtttcctcgttgccggtttcttcttggcaatatctttgggcatttctttcatgcttaagccagaagccaaatgcacaagagttgcagttccagatcagcttgatcatgaagcagtgcaagcaccactattagctcaaccatgaacaaattggcaaggaactgaactttgtacctgtacataccattctacctggcaaacatctgaagtttgaagattgcattggttgtaacgccacaatcttgaaactcatgttgccaaagctgatattgggtttatagcaaagatattaattgtacatatagcggatgttaatgttatgtctagtactaattagttacgttttagattcaatagtagccaagtgaagtttgtgtaagaaggtaaagttgcaggtaactttatctccgacttaagttaggtgactttaatatcactggcatatgggtccacagcaatggcacggtattacaaaagtgtgcctgcactttatagttgcaactgactgaaccaaggctgttctcgtgaaattaatatatatagcacttgataatataagt

SEQ ID NO: 33859 - DNA, 642 bp, Oryza sativa
  Clone ID: PAT_MRT4530_37930C.1
atgtcagggttccagctgatgaaagcctacccacgtcgctacgaggctccaaatccttttcgtgtatttgcactcagcgatgaggtgcagagccgtttcatcctctccctagcacctcccgttattctgcccacccctggtcgcaagccaatcagaggcgtcagtgacggcaccgccggcctgctgcacgcgctccacttctcgcagcagagggcgacgccggggatgctgccggtggtggccgcagggctggacggcgtgcggcagccgtcggtaatggagatggtgaccgccgtgctcgcccgacaagtcctgggcgacgacgccgaagcaacaaggaccaccggctccaacgagattcgggccagagagagaggtagaagaaggcggtgcgtcgaagggatcctcgctgatgaagggatcatccaccggcggcggttcggcaacgcatgctcgccggcgaacgacggcgcgacgacgcaaacggaggacaccaacggcgacggcgaaggggcggacgaggacggcgacgcgacggcgaccacgatggcgaccttcccgagcgacggcgacgactggaacaacggcgaagcacggctggagcgacggcgacgacgacggcacgaggttacacggtgctag

SEQ ID NO: 33860 - DNA, 438 bp, Oryza sativa
  Clone ID: PAT_MRT4530_37931C.1
atggtcaccatgcacgccggacgacatggtgtagttgtcgctcccgatgcctcaaagggagaggagcacttcaccgttgacaccgagcatggcaacgacgaagcagaggatgagcacgatgagcggcaagaggattgctccgtgctccgccctccgccgcccatgtgccgaaaaggggaaagggagaaaggagtggagctgcggccgccgctcacccggctccactcccctcgctgctcgcctcgctctggcagctgggtgctccggccttcttgcaggcaccacgtcaatgccacgttggacgaagacttagtccgtgtagaagccacgtcagccaaaaccggtatcaatactgctgagggacctcgtttgtatggttctgataactacaccaacacaggcaccaaaagtaggcaattgatcatcaccaagcggcac

SEQ ID NO: 33861 - DNA, 404 bp, Oryza sativa
  Clone ID: PAT_MRT4530_37932C.1
aattaacggtcgatttattgtactgttgtgtatattaacacacagattgacctatgtgtttctaagccacaggtcatgtacaaacccccaccagaactgccccaaaaggtctgtacaatgggggggagtaaggggtcagccaacccccggacaccacaggaaacatcccaaacctggcacccaaaccagacagggggctcacatggggatactaaacatgtatgcgtaccagaaggcctaacaggtgaaagcagaatttttttgacacacaccgacaaccctaataaaaacacctcactaactacctaaatagaaggatttaggacaagccctgacccctacttgatacaacaccgggggtgggggcacctgcaaaacccttgcaggaatctggaaaacctttg

SEQ ID NO: 33862 - DNA, 159 bp, Oryza sativa
  unsure (1)..(159): unsure at all n locations
  Clone ID: PAT_MRT4530_37933C.1
acnaggacacatgggtcgagcgtaactgcgtgctgagcataagctccaccctgtcggagtgtcgtggatgcgcntgtcccatagtgttgtgtatatttgtgtttgatgcggttgcnacatgtatatttgggaaggatgaggcctcggggcctgcgaatg

SEQ ID NO: 33863 - DNA, 771 bp, Oryza sativa
  Clone ID: PAT_MRT4530_37934C.1
atgtcattggctcggggtggcagtccgcggtggacaaggtccacggaccgggaaggaggcggcacaccacgtggtgcacacgtggtgccgacgcggcaccgacgtggcagccacgcgggtgaccacgcgggcgacgggacgggcggctccgatctaccgcccggtagatcggacggcggaggcggctcgcggccgggcgcgcgcgggcacggctcaagccgacccggcggccatggcgcacagcggcactaccgtgaggcggcggcggcaaacagcggcgactgacggcgagtggcgccgcacggcgagtgacgacggcgcgaccccgagcggcaaggggcgtcggcgctaggagggagaggggaggagattgcgggggtttctcaccgggggttcggccggcacggaggggcgacgaggaccggccgagagacgacggcgaacaatggacggtctccggaatcacctagtgaacaagaggagagggggttagagggagagaggaaattgggagagggcgaggacgccggccgaaggcggcggccatggcgatgctcatcggcgagtgatgaaggaggggttccggcggcggattccgacggaggaggggtagacgaggtggcccgcacgacggcgaacgcgacgacgtcgacggcgcggctcggcgcggcggctagcggcggccggagagcggaaaagcggcggcggtggcgggcgcacggtgcgagagcgaaagagggcacgggagcgggtgattgcaaagcgaaaaag

SEQ ID NO: 33864 - DNA, 593 bp, Oryza sativa
  unsure (1)..(593): unsure at all n locations
  Clone ID: PAT_MRT4530_37935C.1
gnnnnntnnnnnnnnttcngggtgnnggattcggcacgagaacaagcactaatggggattttagcgcagttgtgtttggaggcatccagccagcatatgcatatgccatgggaancatgatctcantctacttcttgacagatcatgcgganatcaaggacaaaacaaggaactacgcactcntcttcntnggtctagcantgctcncatttttganaaatattggtcnncattacnactttggtgcnatgggggaatacctcccccanaaaatccnggagcanatacttgccaanatccnccccctccaaattnggtggtttgaacntganaaaaaantccnctggtgccntatgctcncacctagcttangaacccccttgtgangtctctccngggtgatccaatagctctcgtgatccncanaatttccccantgcttattgctgcccntnggtctngtcnttnncngncgtttgggccctgttnttataacaatgcccccccnatcattgtttgcttttatgctccccccgttttnctccnnaaaatntnnnnnaaatcaattacntnnncnnccnganaaattttnn

SEQ ID NO: 33865 - DNA, 1284 bp, Oryza sativa
  Clone ID: PAT_MRT4530_37936C.1
aacgcggtcaacgcgagggtgcgctggcggcatctatctggaggcgggaatcgacggcggcgcgatggcgaccggatggagagcggacggcgatgggatcgagaaatccggatggacaacggacggcgatggagagaggggcggcgcgcggcgggagagagaggggcggctggggtcggcggcgacgtgaatcgcggcgggggcggcgtgatgttggagatcggtggcgggctggcggcgcgtgggagggagagaagagagattagggctggggaggcgtgggctgggatgggggagggggcgcggttgagaggtgcgagctgctactcccgccgcggcgccactctactggacgcgcgccatgtgctcgaccatatgccgcagaggcgcgagccgccccgggccgctggcctccgtgccccgccggcggccgcggccgcgtcctcccggaggacaccaccgctgcgcgtggccgggcgcgccgccgccgccgccgcctgtccggccgcttcagctctcatggtgtcctcccagctgaactcttcggatgttgctcagcgatcagaggaatggtttgctctccgcaaggacaagctcaccacaagcaccttcagcactgccttgggcttctgggctggcaacagacggtcagagctgtggagtgagaaagtatttggatcaacagaaatcaagttggaggatgcggcgaggtctgctatgaactggggcacggtgaatgaaagtgtggccatagagcagtacacaagcatcaccggacggtcagtgggttcccttggcttcgcagtgcacacagaggccaactttgggtggctcggagcttcacctgatggcgttctagggtgtgacccagatggtgggatcctagaagtcaagtgcccgtacaacaagggtaagcctgagctcgctctgccatggcgtgctatgccatactactacatgccacaggtgcagggcctgatggagataatgggcagagattgggtcgagctctactgttggactcccaacggaagcagcctgttccgagtgccccgagatcgcgggtactgggagctcatccatgaagtcctgcgtgatttctggtgggggaatgtgatgccggcccgggagctggtgctgctggggaaggaggccgaagctagatcctttgaaccacagcccaagcaccggtcgacaaacctggtgatttttagaagcaggaagctagcttctgaagccaagttgttgtgcaaggatattggcggtcatgtagaattcttccca

SEQ ID NO: 33866 - DNA, 323 bp, Oryza sativa
  unsure (1)..(323): unsure at all n locations
  Clone ID: PAT_MRT4530_37937C.1
ggggggcnccgcccgcctccctgctcgctggaggaggccccgccaccgccgccgccgccgaccacggcggagtcgagacggcggcgttcttgaagaactgcgccctgtgcggccgcgacctcggccctggcaaggacacctacatctacagaggggaggtggcattctgcagcaaggagtgcagggagtgtgtgatcgagtactacgagcgcaaggagcgcaattgctccctcacttccatcaaggacaccccggctgtctccggcgccagcggctccgaccagtccggcgccagcggcagtgagaccgtcgccgccgcttag

SEQ ID NO: 33867 - DNA, 205 bp, Oryza sativa
  Clone ID: PAT_MRT4530_37938C.1
tcgacggctgctcggaattcggagggagggaggaaggaatcggagtgttcggtaagcttcgcgaagcgggatggaggcgccgcgcctccgcctcccgttcctcctactggtggccctcgtcgccttgcctccggtggtctcctctgctgccccctgctgtccaccccgtcgccaggtccccttccctcccttctctcttctctct

SEQ ID NO: 33868 - DNA, 281 bp, Oryza sativa
  Clone ID: PAT_MRT4530_37939C.1
ctacatatttctattgtgttccatattttactaaagctttgcccggtctataaagctttgctgcatctttgtctttgtatttgtttttgtctttgtctttgtctttgtcaacttttataaaatttagctacatatttctatggtttttctctgtaggagtttagagcaagaggagcctaggggccatggccgacaatgcctttctagagacccaagcaattccaaatgtgccaaagtgagcaattcctatgtgctacttcacattgtgcaaactacagagg

SEQ ID NO: 33869 - DNA, 449 bp, Oryza sativa
  Clone ID: PAT_MRT4530_3793C.1
ctaggccacaaatggctcctttacatcagtcgcatcagcaaaaacaaaagtcaccagccaagggtattggatttcctgatcacgttgactaacaatatcagcctgataattgatctgtggcataggagctaaagaatgatgcctgattgcctccaatggccgtcggctacgaaacccacggaagccgcgagcgagcaaccatgcccgtggccagcccatggcttcccgcgtttggaaggacgccgttgcccaccgccgccgccgccgccgccgccgtggagagagagagagagagagagagagagagaggcgaggcggaggagaggacacgcgcgagccggaatccccaggcttcccgctgggccgttcgctgcgagggcctggaaaatgggctgcggcccattttacgagcaaactggcccagccgcacactggcggccacgggctaa

SEQ ID NO: 33870 - DNA, 5398 bp, Oryza sativa
  Clone ID: PAT_MRT4530_37940C.1
atgccagagtggtcgcagaatgaggaaggtgaggccggcgtgggcgcggtggagagcgacccagccgcagaggcgcacgcagcggccggcatcaccggcgccgagctcgtcacacagctcgtccctcgtaggccactgcagcggctgcagcctctcgagcttcgcctcggccgcggggtcacggtgttggtggccgctagggttcggagcggagacggtgagcacgaggcctacgtggtggaggtggtggtggagagcagaaggaggcggaggaggtgcgaggcgggcagcctagggttgagcggctttaggcgggagaggaaggagagcggcgaggcgcagagaagagaggaagccattagattggacttggagacggtgggaaagcgagtagacgaagagaagggggcctgggttttcgaggaggaagacgagatggcatcggatccggcggccttgagggttctgacagaggtatcagagcacgagcgaatccttggctcttggatctctctggtgaaggttggtggaaggcggcggggcgaaatggtgaccaagacgcgctcaaacgatgagattgtgggactggaggagatgaatgagtttcgctcagatgtggcatctctgaagaaggaagtgaaggagatcaaggaccttctgctggagttgtgcaaacagaaggggaacgagggacaggagaatcctgtgggagatgctgcaacaaaagagaagagcacgggagaagcaggacccagtcgatctgtgcaggtaaccacgcctagtttgggagttcagttctctattgaaccaaatactatgagcctatctgcacctatgggtcaagaagctagaccacaggggggagtcagtagtgttcagacagatttggggcaggtgactactgtattatcaaaacctccaccattcataccatttgccccatttccaaaccagagggtacctttcttaaactcagctccttttcaaactcaaacaacagttgggggaagagtgcccaattcaaattttcaaacacaagggacagccactagctcaggcactgggcaacaaggggttcacatattagatcatagcagacctggtggtatggtttatcaaggagaaaatcaacattatgctgaagctgtaatcaagggacctcggttggaaataccactgttcacaggagaagatcccattgactggttgaagcaatgtgagaaattctacgagattactgggacaccatatgatcaatgggtcaatctggcaattgcacatctgcagggaagagcaatgaagtggtttagaggagtaggtattccttggcagttgattccttggccacaatggtgtcacatggtgagcactcgtttttcggctgcaaatgagcatgaggcagtggaactattccagaatgttaagcagtatggttcaactgtggaacaatatatagataaatttgaggagtatgtggatctagtcaggagggaccatccttacttacaggaacagtatctgaatagctgcttcattggtgggcttagaggggatatcaagcatgatgtgtgtgggcaaaaaccacaaggtctgttggagtcctattggtatgcaaagaactatgagaaggcagctaatgcaaggaaggtggcactgaatttcagcagaaacagaaatcagaacaccaatttcaacaatcctggcaggaacacaaataatagaccacaaaggggtgatggtgagaagaaagaagacagaaaatgctggttttgtaaggaaccatggtttcctagacaccaatgcaaggtgaagcaagctatcaatgctttactggtagagaatgaaccttgtactgaagaggaggaggatgaatcaaaagagaaggaacaagaggagctggccactgaccaaatagaggcacctaagcaggagggagcacatgaggagttaatgagtgtgtcatttagtgcagcttctggcacaactcggcctgatactttttcagtcctaatcatgatcaatgggaaacaagcagttggtctaattgatagtgggagtactgggactttcatgacccatgagtttgcagttaagtgcaagtgtcctatagcaacctcgactattaagaaggtgatagtagcaggaggaggagaattgaaatctaatcttgtagtcccagaagtggcatataaaattcaaggggtgaaatttgttaatgctttcagcttgatcaccttgaagggatatgatgtaatcttgggggcagactggatttttcggcatagtccaattactttggatctcaaacagagggaactgtctatcaccaaggaaggtaagctagttgaatttcaggatttcactaaacctgggaaacatttcttaattgatggtcataaaatggagaagctgataaaaaaaggagctgtggggtgtgtgttacaagtgaatgcgatgactgaagaagagaggaaggaggaggctgcagtgccagcagatgttcaggaagttttatcacagttcccaggagtgatgaaggagccaaaaggcttacctccaagaagagcttgtgaccatgtgataaacttgaaacctgggtcagaacctcccaaccagagaccctatagagtgccacattaccaaaaggaggccatggagaacataatatcagatctgatccagtcgaaggagattaggttcagtgacagcccttatgcctgtccagctgtaatggttagaaaaagggatggatcttggagaatgtgtgtagactaccgacagctgaatgcccaaacagtgaagaacaagtttcctatgccaattatagatgacttgttggatgagttacatggggctagaatattttctaagctggacttaaggtcgggatatcatcagattagaatggctgaggaagatattcctaaaactgccttcaaaacacacatgggtcactatgagtaccaagtaatgccatttgggttaactaatgcacctgccacttttcagtcactaatgaaccaagttctagcaccttttttaagaaagtttgttcttgtgttttttgatgacatcttgatttatagcaaaacaagggaggaacatatcaagcatatcaaggcagtattgcaagtcctggagaagaaccagttggtggtacggcttaagaagtgtgcttttggtctgagcagtgtggcttacttgggacatgtgatatcttcggatggagtggcaacagatcctagcaagatcagtgatatcatgaatcggaaggaacctaaaaatgtgactgaagtcagggaattcttggggatgactgggtattatagaagatttataaaagggtatgggttaatctgcagaccccttcacgacatgttgaagaaaggaggtttcaattgggggttagctcaatctgaagcatttacagagctaaaagggaagctgtgtactagtccagtgttagccttaccaaactttgagcagccgtttgtgattgaagcagatgcttgcgaagttggtattggagcagttttgatgcaggcaggaaggccaattgcttattatagcaaggctctagggccaaaagcagcagctcagtcaatttatgagaaagaggctatggctatactagaggctttaaagagatggaggcattatgttttgggtggagaattagtcatcaaaacagatcagcagagtcttaagtacatgatgaaccaaagactggtggaagggatacaacacaagttattgcttaaactgatggaatataattacactattgagtacaaggctggtagggagaacttagtagcagatgccctatctaggagcccgaaaaacaaggaagaagtgactgaactttgtgcagctattgctgtggtggtgcctgagtggatactggatattaaaagaagttatgaagaggatgttcaagctcataagttgctgagtttaattggcacagcaggggatccacaaggggagtataagtttgaggctggaattatgaaatataaaggaagaatatatgtgggggaaacaggagaaatcagagggcagttaatacaagcttttcatagttcgacttttggggggcactctggaattagagccacataccaaaggattaagaagctgttttattggccaggattgaagaagggagtggaaaatcacataagaaattgtccagtatgtcaggttactaaatctgaacatgtgcatataccaggtcttttaaaccctctagaggtaccagacatggcttggacacatatatccatggactttgtagaagggttaccaaagtccaaggggaaggatgtgattttggtagtggtggataggttaaccaaatatgcacatttcatagctttatcccacccatacacagtggaggaagtggtgcaggtgtttatggataatattcacaaactgcatgggatgccgatagctattgtgacagatagggacagagtttttactagcacattctttcaagaagtgttcaaatctcaaaaggtccaattgaggtttagcacagcttaccatccccagacagatgggcaaactgagagggtgaaccagtgtttagaatcttacttaaggtgcatgacatttcaagaaccacaaaattggtgctcttggatagctttagcagaatggtggtataacacaacataccacacagcaatacaaatgactccattcaaggccctttatggatacagtccacctcaaatcagtgaattttctgtcccatgtgatgtatctcaagaagcaagggtaaccctggaagagaaagaggctatagttcagaaactcaaagcaagcatggaagatgcacaaagaaggatgaagtattatgctgataggaatcgaacagagagaaagctggaggtgggagatatggtatatctgaaactacaaccctatagacaaaatgcttttgggatcagaggatcattaaagttaagaggcaaatactatgggccattcaaggtgctagagaaggtaggtgctgtagcttatagattgcagttacctgaagaagctgctctacatccggtcttccatgtgagccaacttaaaaagcacctgggtactcatgctgtaccaatgccaaatttaccggcagtgggaccagatggtcaaatcaaaacagagccagtagcagtgctgcaaaggagaatgattccaaggaacaatgttgctgtcactcaatggctaattctgtggagcaatttaactccggctgaagcaacctgggaggatgcttcttatattcagaaagtggttccgaattttcagccgtgaagtcgacggcaggctgaggatggcgacgagggcggcgaggccagtagcccctgccatatggatgtcgtctgcctaa

SEQ ID NO: 33871 - DNA, 3963 bp, Oryza sativa
  Clone ID: PAT_MRT4530_37941C.1
ctgcagctgcttcctcctcctgcacttcttcttcttcaacaaaggaccacttgtcagactcgtaagaagaatggaggaaatttcagaaagttcagagtttcggttaactgaagatgcaaaggagggagaaaacgtttcatcctggatggtgaccaagatgcgctcaaacgatgagattgtgggactggaggagatgaacgagtttcgctcagatgtggcatctctgaagaaggaagtagtagagcttaagggcttgaggtcagaggtgaaggagatcaagggccttctgctggagttgtgcaaacagaaggggaacgagggacaggagaatcctgtgggagatgctgcagcaaaagagaagagcacgggagaagcaggacccagtcgatctgtgcaggtaaccacgcctagtttgggagttcagttctctattgagccaaatactatgagcctatctgcacctatgggtcaagaagctagaccacaggggggagtcagtagtgttcagacagatttggggcaggtgactactgtattatcaactccttttcaaactcaaacaacagttgggggaagagtgcccaattcaaattttcaaacacaagggacagccactagctcaggcactgggcaacaaggggttcacatattagatcatagcagacctggtggtatggtttatcaaggagaaaatcaacattatgctgaagctgtaatcaagggacctcggttggaaataccactgttcacaggagaagatcccattgactggttgaagcaatgtgagaaattctacgagattactgggacaccatatgatcaatgggtcaatctggcaattgcacatctgcagggaagagcaatgaagtggtttagaggagtaggtattccttggcagttgattccttggccacaatggtgtcacatggtgagcactcgtttttcggctgcaaatgagcatgaggcagtggaactattccagaatgttaagcagtatggttcaactgtggaacaatatatagataaatttgaggagtatgtggatctagtcaggagggaccatccttacttacaggaacagtatctgaatagctgcttcatcggtgggcttagagaggatatcaagcatgatgtgtgtgggcaaaaaccacaaggtctgttggagtcctattggtatgcaaagaactatgagaaggcagctaatgcaaggaaggtggcactgaatttcagcagaaacagaaatcagaacaccaatttcaacaatcttggcaggaacgcaaataatagaccacaaaggggtgatggtgagaagaaagaagacagaaaatgctggttttgtaaggaaccatggtttcctagacaccaatgcaaggtgaagcaagctatcaatgctttactggtagagaatgaaccttgtactgaagaggaggaggatgaatcaaaagagaaggaacaagaggagctggccactgaccaaatagaggcacctaagcaggagggagcacatgaggagttaatgagtgtgtcatttagtgcagcttctggcacaactcggcctgatactttttcagtcctaatcatgatcaatgggaaacaagcagttggtctaattgatagtgggagtactgggactttcatgacccatgagtttgcagttaagtgcaagtgtcctatagcaacctcgactattaagaaggtgatagtagcaggaggaggagaattgaaatctaatcttgtagtcccagaagtggcatataaaaaagagaggaaggaggaggctgcagtgccagcagatgttcaggaagttttatcacaattcccaggagtgatgaaggagccaaaaggcttacctccaagaagagcttgtgaccatgtgataaacttgaaacctgggtcagaacctcccaaccagagaccctatagagtgccacattaccaaaaggaggccatggagaacataatatcagatctgatccagtctaaggagattaggttcagtgacagcccttatgcctgtccagctataatggttagaaaaagggatggatcttggagaatgtgtgtagactaccgacagctgaatgcccagacagtgaagaacaagtttcctatgccaattatagaggacttgttggatgagttacatggggctagaatattttctaagctggacttaaggtcgggatatcatcagattagaatggctgaggaagatattcctaaaactgccttcaaaacacacatgggtcactatgagtaccaagtaatgccttttgggttaactaatgcacctgccacttttcagtcactaatgaaccaagctctagcaccctttttaagaaagtttgttcttgtgtttttttatgacatcttgatttatagcaaaacaagggaggaacatatcaagcatatcaaggcagtattgcaagtcctggagaagaaccagttggtggtacggcttaagaagtgtgcttttggtctgagcagtgtggcttacttgggacatgtgatatcttctgatggagtggcaacagatcctagcaagatcagtgatatcatgaatcggaaggaacctaaaaatgtgactgaagttagggaattcttggggatgactgggtattatagaagatttataaaagggtatgggttaatctgcagaccccttcacgacatgttgaagaaaggaggtttcaattgggggttagctcaatctgaagcatttacagagctaaaagggaagctgtgtactagtccagtgttagccttaccaaactttgagcagccgtttgtgattgaagcagatgcttgcgaagttggtattggagcagttttgatgcaggcaggaaggccaattgcttattatagcaaggctctagggccaaaagcagcagctcagtcaatttatgagaaagaggctatggctatactagaggctttaaagagatggaggcattatgttttgggtggagaattagtcatcaaaacagatcagcagagtcttaagtacatgatgaaccaaagactggtggaagggatacaacacaagttattgcttaaactgatggaatataattacactattgagtacaaggctggtagggagaacttagtagcagatgccctatctaggagcccgaaaaacaaggaagaagtgactgaactttgtgcagctattgctgtggtggtgcctgagtggatactggatattaaaagaagttatgaagaggatgttcaagctcataagttgctgagtttaattggcacagcaggggatccagaaggggagtataagtttgaggctggaattatgaaatataaaggaagaatatatgtattagagccacataccaaaggattaagaagctgttttattggccaggattgaagaagggagtggaaaatcacataagaaattgtccagtatgtcaggttactaaatctgaacatgtgcatataccaggtcttttaaaccctctagaggtaccagacatggcttggacacatatatccatggactttgtagaagggttaccaaagtccaaggggaaggatgtgattttggtagtggtggataggttaaccaaatatgcacatttcatagctttatcccacccatacacagtggaggaagtggtgcaggtgtttatggataatattcacaaactgcatgggatgccgatagctattgtgacagatagggacagagtttttactagcacattctttcaagaagtgttcaaatctcaaaaggtccaattgaggtttagcacagcttaccatccccagacagatgggcaaactgagagggtgaaccagtgtttagaatcttacttaaggtgcatgacatttcaagaaccacaaaattggtgctcttggatagctttagcagaatggtggtataacacaacatatcacacagcaatacaaatgactccattcaaggccctttatggatacagtcca

SEQ ID NO: 33872 - DNA, 846 bp, Oryza sativa
  Clone ID: PAT_MRT4530_37942C.1
atggtgaccaagatgcgctcaaacgatgagattgtgggactggaggagatgaacgagtttcgctcagatgtggcatctctgaagaaggaagtagtagagcttaagggcttgaggtcagaggtgaaggagatcaagggccttctgctggagttgtgcaaacagaaggggaacgagggacaggagaatcctgtgggagatgctgcagcaaaagagaagagcacgggagaagcaggacccagtcgatctgtgcaggtaaccacgcctagtttgggagttcagttctctattgagccaaatactatgagcctatctgcacctatgggtcaagaagctagaccacaggggggagtcagtagtgttcagacagatttggggcaggtgactactgtattatcaaaacctccaccattcataccatttgccccatttccaaaccagagggtacctttcttaaactcagctccttttcaaactcaaacaacagttgggggaagagtgcccaattcaaattttcaaacacaagggacagccactagctcaggcactgggcaacaaggggttcacatattagatcatagcagacctggtggtatggtttatcaaggagaaaatcaacattatgctgaagctgtaatcaagggacctcggttggaaataccactgttcacaggagaagatcccattgactggttgaagcaatgtgagaaattctacgagattactgggacaccatatgatcaatgggtcaatctggcaattgcacatctgcagggaagagcaatgaagtggtttagaggagtaggtattccttggcagttgattccttggccacaatggtgtcacatg

SEQ ID NO: 33873 - DNA, 2331 bp, Oryza sativa
  Clone ID: PAT_MRT4530_37943C.1
cccacgcgtccgcccacgcgtccgcccacgcgtgggcgcgcgggtcgtcgccgtcgccgccgcccccgccgcatcgccgccgccgcgctcagatccagacccctgagacatggtctctcgccgagcgatgcgagcgccggagatgctccggtggctcgccgcggcggcggcgctcgtggctctgctcgccgccgcgccggccgccgggttctacctgcccggcgtcgcccccaccgacttcgggaagggtgattcacttcccgtgaaggtgaataagctgacatcagtaaaaactcaactaccctatgcatattactcccttcctttctgcaagccagaaactatcgttgacagtgctgaaaatctcggtgaggttcttcgtggtgatcgcattgagaactctccatatgtgtttcaaatgagagagcccaagatgtgccagattgtctgcaaattaactgttggtgagaaagaagcaaaggagctcaaggaaaagatagaggatgaatatcgtgtgaacatgattcttgacaatctcccgctagttgtttctgtgttaaggcaagataagaacattgcttaccaaggtggctatcatgttggtgtcaagggccagtacaccggaagcaaggaagagaagtacttcattcacaaccatttgtcatttttagtgaagtaccacaaggacgatgattcagaactttctagaatagtgggatttgaggtcaagccatacagcattaagcatcagcttgatgataaatgggatggcgtgaacactcgcctgagcacatgtgaccctcatgctaacaagcttgtaacaagttctgactctcctcaggaggtcgaagctggcaaagaaatcatattcacctatgatgttcactttgaggagagtgacatcaagtgggcttcccgttgggacacctatctgttgatgactgatgatcagattcactggttttctattgtcaactctctcatgatcgtgcttttcctgtctggtatggtcgcaatgataatgcttcgcactctatatagagatatctctagatacaaccaacttgaaactcaagaagaagcgcaagaggaaactggctggaagcttgttcatggagatgtgttccgccccccaaccaactctgatttactctgcgtttatgttggtactggtgtccaattcttcggcatgctgctggttacgatgatttttgcagttctgggtttcctttctccatcaaatcggggaggattgatgaccgcgatgcttcttgtctgggtcttgatggggttgcttgctggttatgcttcttcacgcctctacaagatgttcaagggttcagagtggaagagaataactatgcgcacagccttcttatttccagggattgcttttgttatcttcttcatattgaatgctcttatttggggggagaagtcatctggtgccgtccctttcaccactatgttcgccttggtcctcctttggtttggtatctcagtgcctcttgtgttcgttgggagctatcttggattcaaaaaacctgccctggaacctccagttaaaaccaacaagattccaaggcagatccccgagcaagcttggtacatgaatccaatcttcactattctaattggtggcattctaccatttggtgctgttttcattgagctattcttcatcctcacctctatctggcttcaccaattctactatatctttggcttcctcttcctcgtctttgttatcctcatcatcacctgtgccgagattacggtcgtgctctgctatttccaactgtgcagtgaggactacatgtggtggtggagatcttacctcacttcgggatcctcagcactttatctcttcttatatgctgctttctacttcttcacgaagctgcagattactaagctggtgtctggcatcttgtactttgggtacatgttgcttgcttcattagcgttctttgtgcttactggtactatcggtttctgcgcttgtttctggttcacgaggttgatttactcatctgtgaagattgattagttgcaacactacagagcacagcatatgtttttaagccttctgagtcatgggaattgtatgttcgaagtggggatcaatcccctgggtttttttaaagaaattttcagtgaagttacattttaggttttagtttatgaacaatttatgtttgttatggctaaacgatacatcttactgtagtaatttggagtacaagactacaaggatagaacacattgtgatggagttgttttttggtgaaatttttttaatggactggtataagaattcaattgattatg

SEQ ID NO: 33874 - DNA, 657 bp, Oryza sativa
  Clone ID: PAT_MRT4530_37944C.1
ggcgatgatagctggtcctggtcatggtcgggggtaggagcaccgagaccagcacggctcgggacatgaaccttattcaaaaacatcaatcggtgccaaataatttagtccctagaaaattgttaacacaaccctctgcattaggatattcagcacctttgcatagttttctatgtgaaagcaatatggaattgaaatgtcgcattcttagcattataaatactatagaagctatccaagtgaaaaccaaggacctcttcgttcataatggcactgtaatgtgaatgtacatgctaaaacaaggggcaagcatcacatagaaaataacagggtatcaaacatcacaatcccaaaataaacaagtacttaaaatgtttctctactatgaactagagaaataaaggtggggatcaaattcattagcaaatactggtttaataaaagattaacatgatcctgaagacagataccaaggtgtcacagtttccatgcctcaatcataaaccagaaatgattctaaaaccaggactgctcatcaaggtcccaggcatgtgagccatccataaatcaacagagaattggtgatgacataagcttgcaatgatggaagccacctttatgccaaataacagtaaacaagaaaccgagaacttgtgc

SEQ ID NO: 33875 - DNA, 3021 bp, Oryza sativa
  Clone ID: PAT_MRT4530_37945C.1
atggggaaggagaggggaagggaggagcaggtggcgacggtgcgcgcggtgctcggcgatgggacgccggagatggacatcatccgcgcgctccacatggccggcgacgaccccaccagggccatcaacatcctcctcgactttccccacgggccgccgccgccgccgccgccgtcaccgtcgccgtcgccttcgcctccggcgggtaaacccaccaaaccccaccccgaatcgaccccgccaaccaaaacccctgcccgttcgaagccggcggcggcggcggcagagaaacctaggcccagtgtcgcgcccgaatccaccaatggcggcggcggcggcgaacattggtggttggtggggagcgtggagatggcggggctgtccacgtgcaagggccggcgcgttgcctccggggatgccgtcactttctcgttccccaactccccggtcgccgccgccgccgggggcaagagccgttccggccgccccgccctcgtttcctgctcctccgagatcatgcgcttctccaccccgcgccatggggaggtcggtcgaatccccaatgaatgggcgaggtgcctgctcccccttctcaaggaggggaagataaaaatcgatggcgtatgcaaatccgctcccgaagtacttagcatcatggacactgtcctcttgtccgtaagtgtctacatcaacagctcaatgtttcatggccaaaagcaatcgacacccaaggctgctcgggctgctaccgaggattccacgtttcatccgctgcctgcacttttcaagttaactggtctttcgccctttaagaaggcagcatttactccagaagatctctattccagaaagcgtccgcttgaaacaaagagcagtgcacctgccacaaagttgactactgagaagttgagattatcgtctgatggaaacgaagatgatcatgctgaaagaattgtttcagattcagaattggatgatataattggaatctcagacagttctgctttggaggaaagggacccccctgatgctctgcagtgtgatttacgcccttatcagaagcaggcattttattggatgatgcagcttgagaaaggcagttcttctcaggatgcagctacaacgctgcacccttgttgggaggcatataaactcgaggacaagtatggcttggttatattgtttgagccgtttctctattacaatgattttttgaaattaacattaggacgtttatactgcattcatttcaggagggagcttgttttatacttgaatgtattttcaggcgatgccaccactgaatttcctagtacactgcaacttgcaagaggagggattctggcagatgcaatgggactggggaagactattatgacaatagctcttcttcttgccgactctagcaaaggatgcatcactactcagcattctactcacatatgtgaagaagctagtggactgggtgaattgccagttcagcctcatgatgatgtgaagaagctagctatccctttctcttttagtaagcttaggaaacctaaaaccccgcttattgcaggcggcaatctaattgtctgcccaatgacactacttggtcagtggaaggcagaaattgaagctcatgctacaccaggttctgtaagtatatatgttcattatgggcaaaacagaccaaaagaagcaaaccttattggtcagagtgatattgtcctgactacatatggtgttctgtcatcggaattttcaaacgagaattcaacagaaagtgggggtctgtactctatacattggtttagagttgtgctggatgaagcacacatgataaaatctcccaaaagtttaatatccctcgctgctgctgctcttacggctgatcggcgttggtgtcttactggtacacctattcagaacaacttggaggatatatacagccttttccggtttttgagggttgaaccgtggaggaactggtctttaccaatccttattttacccccagcaaatatcgaagtcaaatactgtgatttgtcagagactgagaaggatttctatgatgctctgtttcgacgatctaagagcttcaatgttggcagtcgtggagatacacaggagtttgctgacctaaacaaacttgcaaagcgtttcttgcatggtggtaatggtgctgtgaatggtgactcttctcttccctccagagcttacattgaggaagttgtccaggaactgcagaaaggtgaaggggagtgtcccatatgcctggaagcctttgaggatgctgtattgactccctgtgctcaccgtttatgccgagaatgtctcttgtctagttggcggagtgcatcagcaggcctttgtcctgtctgtagaaagtctatgagcaagcaggatcttattactgctccaactgacaatcgttttcaaattgatgtcgagaagaactgggttgagtcttccaagatttctttccttctacaggagctagaagttcttcgcacttctggtgcaaagagcatcatttttagccagtggactgcatttctggatctcttacaaattccactttccagggcaacagaaaattttgttgttccaaatcatggatactatgaaaattcgtgtatcagtaccagacataatttctcatttgctagactggatggaaccttgaatcttcagcagagagagaaagtaatcaaggagttttctgaggacaaaagcattttggttctgcttatgtccctgaaagctggtggtgttggaataaacctaactgctgcatctaatgcatttgtcatggatccttggtggaatcctgctgttgaagaacaagctatcatgcggatccatcgaattggtcaaacaaagagtgtttccatcaaaagattcatcgtcaagggcactgtcgaggaacgaatggaggctgtgcaggctcgtaagcagcgaatgatttctggagctttgacagatcaggaagtacgcagcgcacgtatagaagaactgaagatgcttttctcctga

SEQ ID NO: 33876 - DNA, 375 bp, Oryza sativa
  Clone ID: PAT_MRT4530_37946C.1
atggccggatttaaattggtacctcaaggtaccggtacctcgaggtacaatatgctggactggagcaatgctcttaaagtatacatgcaagcatggatggaagggcgaagacccaaagacctcctcgtacccctagtctacgcaatttctaagaagaggagagagtccctacaccaaggaaaggagaataatgtctgggtcggagatttagccttggagacaaacccacatatcacagtggccctcgtggagcagcttgtggcctttatggaccgcagtccgtgggtctgggcgccaggaaaatgcaaactacacgcctggttcatcatcctgaataaagtctggacctctgaccgacttgcgaccaggggatga

SEQ ID NO: 33877 - DNA, 396 bp, Oryza sativa
  Clone ID: PAT_MRT4530_37947C.1
gctaagaccctctttctaatgccctcctggtgcttcgaaaagccacccctgattgccgagtttctaacgacagtccgtcatgaccatccaactggggctaaatacagaggagtatcctccccaggaaagtaagttaggactatatacacgcgcggaggaatacctgtactgagctatcaccaatagcggcccacctcgcttccgcatcatataaccccaaataatgatatccagtaatctaaacaccacgcttaaattaccaaatactactctaatatcatcgtcatgacatagagccatcgtatacacgatcattatacccacgccattgcattacccagataagctagcattgtaaccaagataatttggatatacaataaagttggtattcat

SEQ ID NO: 33878 - DNA, 375 bp, Oryza sativa
  Clone ID: PAT_MRT4530_37948C.1
atgacacggagccacgagcccaggcgcgtggcggcgtgggccaccctcaaaccccccggaagagccacctcattggtgacggtgacaatgggtgcggcggcgggtgtggtggtggtgtcggagctgtcattgcaaatcaggcaaaaggcaggacaggatcctgtgtctactagccagccaaatgtcaagctgtctaccatcctcagccccacggaagcagagagcacaatattgggttttgtgaccggcacagtggtgctgatcggccagtgccaggatgttccccaccgtgcctacagcaatgtatctgcacaacctttcctcgcagatcagcttgagcctctgcagattgtaccgatctgccgcgacgagtag

SEQ ID NO: 33879 - DNA, 364 bp, Oryza sativa
  Clone ID: PAT_MRT4530_37949C.1
atgtcgcactctcgcagcggtggcagacggggttggtcttgccctctacaggccctcctccacatccaactcggggtagaaaccaaaggaaacccgaaacatgccttcccgagcaaggaaacctcgagacccgacgaaacacagtcggactcggacctgccggtcagaccggccacacaccgccggtctgaccggccttcaaccggcggtcggaccggccaacacacggcggtcagaccggcctactcggaggaaaccgacaagggcgtaagtgtgcgggatcgcgtggacgtcaatgattgcgcaagctgcgggaacgcaactggtcttgttgtgggagcaccccccaccccccgcatcttcg

SEQ ID NO: 33880 - DNA, 363 bp, Oryza sativa
  Clone ID: PAT_MRT4530_3794C.1
atggggggattggcgccgtccgcgccgtggcggtggagctggagcgtcgcccgcgccgtcttcttggcgtcgctgctcgtcctcgcctccgcgcagcagcagccgcgcccgccgcgggccccggagatgtccgccgtcgacgtcgacgcgatcctcgccagggtgtgcggcggcggctcgtccaggcaggcggcgcccgtgccgccgctgcccctgtgccacgagctcatgcgccaccgcggcggggtcaggcgccaccaccgcaggccggcgccgccgccgggacgcgacgaggaggtcgacctgcgctacggcgtcgccaagcggctcgtcccgacggggccgaacccgctgcacaactga

SEQ ID NO: 33881 - DNA, 233 bp, Oryza sativa
  Clone ID: PAT_MRT4530_37950C.1
ggattagtaaatcatgtactggtcattttgcaccatttccaatggggagcaaaaatctcatacaataaacatacaatatgctttactcaatccattttcaaatctatcatttacattaccttccttatcctttacttacctaaaattctgtcaaaattatttgttacaggctatcatctaatgtttttcatcccatttttacatttcttaaatcactgctatccttttatcta

SEQ ID NO: 33882 - DNA, 828 bp, Oryza sativa
  Clone ID: PAT_MRT4530_37951C.1
atggccgccgagggagatgtagccgccgatgctctcaaggtcgccggtgacgacggcggcgagaaacagtggccgtcacagtcgctgtccccagaggcacaacggaggatgaggttctacctgtcatgcgccatcatcgacctcaagttcgacctctgggacatcgtccagacccacttcgtcctcgaaccctcccgccgtgatctcgaggagaaccttgatcccgccgccgccggcgacggcgacggcgactcctccggcgccagtgccggcgagagaggtcgtagtagtagccaccgatcggacgtcaagttgggcgacgcagaggaagaagaagatgatgatgaggatgaagaagagaagtgccgcaggttcgctgagaagtgcatcgatccttacttcatcgtcctcggatcggcctcccgctatgatcccgagacgaatcttcatcccgccggcggcggcggcggcggcgactcctcctccgaccaccgtgattcctctaccacctgtggctgtcatcaccgaccggagtacgccgacgattcagatgatgatgatgatgatgaggaagatgcgatcaagaaagcagaggaggaggagtcgttggagcacaacgagctgtggcgcgagttcacggacaagtacatcatcgcgagcgggtacgacgatcggttcaaggagatggatgcgatcggggaggtctacttcgacaccaccctggacgaggagacccgcacggacatgatcgacaagctgtggcgccacatcgagaaggagctcagcgacagggccagggccgtctccacgggcaaattcaagttctga

SEQ ID NO: 33883 - DNA, 399 bp, Oryza sativa
  Clone ID: PAT_MRT4530_37952C.1
atgcggtggcggaggaggaagtggtcgacggtcaagggagaggccgcagtggccggatccgtgccccacaatcttgtcgaggccggatccggcggttggcggtgccgtggtggaggaggaagcggccgtcagtcgggggagaggtcgcggtggcgggatccgcggttgacggtgcggtggcggaggaggaagcggccggcggtcgggggagaggctacgatggccggatccggcggttggcgatgtggtggtggtggaggaggaagcggccaacgatcgggggagaggccgcggtggccggatccacgcctcgtaggccagatcctgcggccaacgatcgggaggcggggaggcgtcagcggccggcgcttgggaggggggccacagcctgatctgtga

SEQ ID NO: 33884 - DNA, 402 bp, Oryza sativa
  Clone ID: PAT_MRT4530_37953C.1
atggggatggaggggatcggcgaagggattggcacagcagcagatgaggaggacgtcggcgccggtggcggcggaaagtcagctccggccgtggcggatggggccgaggtcggaactggctgcggcggggaagaagcagcggctccggcggcggggatgcgacggcagtccacgcggggaagaagcaccggctccggcggcagggaagaatcagcagctctagcggcggcagtccacgcggggaggatctctagcgaggatgcggcggcacggcggcagaacatgcggggaggaggaggagcgagcgaggaggagaagcgaagtcttcgcgtgtggagcgatgtcttcgtggctggaggaggaggagcgaagtattcggcgcggatggacggtgcagattaa

SEQ ID NO: 33885 - DNA, 384 bp, Oryza sativa
  Clone ID: PAT_MRT4530_37954C.1
atggcgcctttcttgcgtgggacgccgtctcgggcagatctggcaacatctacccaccccaactatagcagcagggccacccaccgtacacagcggcagggccacccatcagcgaccgagctgcccgttcccgtcgaatgcgcgcataaggaagagggaaaaaagggggcgaggagggggcgaacatgggggcagcagaaagagcagcatgcagcaagaatggtgggagcccacaggacagaggcacatagaaaaaacggtgcagccccacaggacagagacacaaaaaatttaccgaacgacgtggatgcaagtgcaaacgaacacgctagtgcaaataccgcgcaaatcgctccgggaggtgcagatcgcccttacctttaa

SEQ ID NO: 33886 - DNA, 144 bp, Oryza sativa
  Clone ID: PAT_MRT4530_37955C.1
cccacgcgtccgcaaggagaaggagaaggttggctctagccatggcttcccagctctgcgccggcacatccgtgccgcagttccatggcctacggacctacttttgttctaggtgcatggtgactctgacataggtgaggatga

SEQ ID NO: 33887 - DNA, 398 bp, Oryza sativa
  Clone ID: PAT_MRT4530_37956C.1
cctgtgaaaacacattttttaaaaaagataggtactcgagttctttttttggcaaggaatggaaacgcgaaatccaaacatgctcagcccacttgggcaggttaaacaagagcggttttactggcctttaggaagcctggtgtatgataccttccaatacctcctcaagtcctgactccaatacttactcaagtactggctaaaaaggaactctgggcaaatacttctacaccattacaacaaatgcaagggccacagttagacttacaggaaaatgcagataagtacaggtgaccatggccgactatcatcaatggcagaaaaaggccaaaacagtattttataaaaagaatgagcaaattcaaatcaatgttgagagaatacctgaacatggggtt

SEQ ID NO: 33888 - DNA, 1406 bp, Oryza sativa
  Clone ID: PAT_MRT4530_37957C.1
ttttttttttttttttcatcaatggagcttgtacacaagcttcgaattgaaacggcaatgagtttatacataacagcacacgcaagaaaaaactattccagactcacctgctaggcacaaaaaagaggcaaaattcgcaggtcatatctgctaaaaagcctgagagactgtcctataaactaggtcgagtttccatactgaaaggtacgctatagctatacataactgtgcaaaagaaactggtggtgccagttttgagtttgacacttcaatggtttgtcacattcttgtgcctcttaagggtgaatggagaggccagctcttcctttgttgttacgcctgatggcttcaaggattgatacatcatcatgcatggtgaatggtgcaccgttgaagtcgaaccgtgcaaacttcgaatcttccgaaatctcaatttccacccttgcttttcgggatgtcttgatcaataagaacggaaggaggatgccattaacactttctgctggcctctgactagcctggttgcgtaatgtaatattctgaaggtcatcaaactgcttttcaatttcctggagaagcttcttcttattcttgatcctggtgatgagttctttgtgaacttcctccaacttctgtatcttttcgtatctataattagtaaggcccatccactttatctcctttttatcttttgcaataacacgaattgcaatgagcacattgaaagcatcatataccctccgcctaatattcttctcatcaaactccagaccgttctgcgtaatggacttcagctccgcaaaaatctcatcggcaactataagctctcctgagcttgtatagacttcatcgttggatgtttgaaccataatctcattatatgtggttcttcctttggcctcaactttcttagaaacaaagcaatccacaccagggttcaccataccgccggtaaccgcgcggttaccgcggttaccgggcttaccgccggggtacggtaatgtaaataccgcggtaacctccgcgcagtaactgtgcttaccgccggggcgcgataaccccggccctggcagtttggtaaaccctatcttgctgaactcacggagcccccacccggtgatcctctgcgccccggtcttctccttcttcccgttcctgttcgcaccgccctcctccctctctgccgcattgccgccgccgccgctgcgtaaagaaaccgattttttttgggggggaatatcgtccccttccctagagattggagcaaaggaatcagaagtacagggccggaatggcgggtaccgttcgggacgcgaagggaggccggcgccttcgcgaatgagcaggttggccaggccgggcgcggcggaggcagccgccgcggcatcgccgcagggaggcgccat

SEQ ID NO: 33889 - DNA, 1630 bp, Oryza sativa
  Clone ID: PAT_MRT4530_37958C.1
atgaacccggggcgcccggcgccggcgtcgttccgcgaccgcaccaacgagttccgcgccgccgtcgagagcgccgcgcgctacgcctcctcctccgcggcggcggcgcccagcagcagcagcggcggcggcgttggcggcccgctcgacgtgtcgcggggggcggcctcggcgcactcggagttcaaccgccgcgcctccaagatcgggctcgggatccaccagacctcgcagaagctcgcccgcctcgccaaactggcaaagaggacatctgtttttgatgaccctacggtagagatacaagagctgactgcagttatcaagaaagatatcactgctttgaattctgccgttgtagacctacaggttctctgcaattcacaaaatgagagcggcaacctttccaaggatacaacaaatcattccactacagttgtggacaatctaaaaaatcgcctgatgagcgcaacaaaagaatttaaggaagttcttaccatgcggacagagaacttgaaagttcatgagaatagaaggcaaatgttctcatcatcagctgcgaacaatgcatcaaatccatttgttcgtcaacgtccccttgttaccagggatggggggttgattatggtgggaggagggaggaggggcgccgcggcggaggaggtgaagctcagcaccggcaacgtgttcgccgcgctcgagacgctaaagaagtgctgagaaggagaggttaaaaccaaaactggtcatggagatgcacgaggaccttcagagagcaagagttccaagaagaagaaaaccaaggaagcaaaggaggctaaagaatcacaagaaccagctgatgggacagaggagactgccagtgcagaacctgatgaagacacaacctctgttgatgtgaaggagcgcttaaagaagatggcttcaatgaagaaaaagaaatcaggcaaagagtcagacacagctgcaaaaattgcagctgctgaggctgcagcaaggagcgctaggctcgcggcagccaagaagaaagagaagaaccattacaaccagcaacctgtgcggtaaatggccgccaaagttttgaaaaatgttctgagtttgaaaaatccccttgttcgtttttggactcacaataaacttttttgagttgtatttatgacctttgagcgcctttctgagattcatttcgaattcttgaaggcctttctggtctcaaaacggtcatgtaattgtgttttgaattgttgacccggtggaacttaatggacggcatggccagtgggggctaattgggtaaaaaaaaaagaaatacaagaagaagaaaaacaagaaagcaaaggaggctaaagaatcacaagaaccagctgatgggacagaggagactgccagtgcagaacctgatgaagacacaacctctgttgatgtgaaggagcgcttaaagaagatggcttcaatgaagaaaaagaaatcaggcaaagagtcagacacagctgcaaaaattgcagctgctgaggctgcagcaaggagcgctaggctcgcggcagccaagaagaaagagaagaaccattacaaccagcaacctaagctgtttaatggggatgttgctggaattggcgttgtgagccagaagtag

SEQ ID NO: 33890 - DNA, 248 bp, Oryza sativa
  Clone ID: PAT_MRT4530_37959C.1
agccccaaaaaaactaaatttgctatggtggccaagcccgtttgttggcccaattaaatcccacacgctattttcggcccaattaggcccactaaatcgcccgggttaacatcagcgtcaccccttattcacgttcgccggcgccgccggcctccggttcggaagccccgccgtcaaaaactgcgggggccgagtcaactttggagaggagggcctcgtatatttttttctttagccgctctatcgtt

SEQ ID NO: 33891 - DNA, 432 bp, Oryza sativa
  Clone ID: PAT_MRT4530_3795C.1
atggtgaggaccgggactatgctcaggaagaagcagaggtctagtgcggtcgggataccatgtgaaaaggtgactagagtcagaattcttggaggtcaacttcggtcaatggtgaggatcgggactaaacttagggaggagttgaggtccagacggtcaaggataccgggtgacaaaattggatacgagatggcatacggtggatggacatcgtgtgggagagatcttcacaacgggcttcacgagcatgcagcggctcggcttggtgatgcaagcagggcgtcggtctggcctgggcatgcggcaaggcaagccgagtctgactcggtgaattttatgtggccggctgtggctgcaggtttcggagagtttgttttgttcggatttgctgaaattctgatacagctgactttcgagggtgttttctcttaa

SEQ ID NO: 33892 - DNA, 1489 bp, Oryza sativa
  Clone ID: PAT_MRT4530_37960C.1
ctctcactaaacaaaccacacgcaacgcaagcacgcggcggcggcgtctcctctccacgaaaaccctagcccgcgccgcatccccaacctcctcctcctcctccccgccgccgccgcccgatcgccgcgtcctccgctccgcaccctcccccgcagatcggcggcggcctgtgcccgcgggggtcgcgcggggcccgcgtgtttcccagattcagatttccccggcggtgagcggattcgggaggttttttaggggggttgattatggtgggaggagggaggaggggcgccgcggcggaggaggtgaagctcagcaccggcaacgtgttcgccgcgctcgagacgctcaagaagaagaagaagggcggggacaaggccaagggcggctcgtcgtcgtcgtcggggaggaagagggagcagcagggggcgcagccgtcgtctcagcagcagcagcagcagcagaaggaggtcttctgggcgcccgcgcccctcaccaccaagtcctgggccgacgtcgaggacgacgacgacgacgactacttcgccaccaccgctccccctcgccccgtctggggcaccggccatggcgacgatggggccaaggaggaggatgaggaggacgacgacgatgccgtccacgccgcccttcaggaggaagtatagagtgaagattaggccctcgatgatgaggttgatgatggtgctgtggatgaacctgagcatgaagtggatgatacctctgctgaacctgctggtaagaaagctgcagttcctgttgcaccgcctaaagatacggagaggcagctgtccaaaaaggagttgaaaagaaggagctagccgaacttgatgctgttctggctgagttgggaatttctggtggttcaagcaatgctgcacaggatgaaaacaatgctgagaagaaaggttcaaaccaaactggtgatggagatgcaccagcaccttcagagagcaagagttccaagaagaagaaaaacaagaaagcaaaggaggctaaagaatcacaagaaccagctgatgggacagaggagactgccagtgcagaacctgatgaagacacaacctctgttgatgtgaaggagcgcttaaagaagatggcttcaatgaagaaaaagaaatcaggcaaagagtcagacacagctgcaaaaattgcagctgctgaggctgcagcaaggagcgctaggctcgcggcagccaagaagaaagagaagaaccattacaaccagcaacctgtgcggtaaatggccgccaaagttttgaaaaatgttctgagtttgaaaaatccccttgttcgtttttggactcacaataaacttttttgagttgtatttatgacctttgagcgcctttctgagattcatttcgaattcttgaaggcctttctggtctcaaaacggtcatgtaattgtgttttgaattgttgacccggtggaacttaatggacggcatggccagtgggggctaattgggt

SEQ ID NO: 33893 - DNA, 1222 bp, Oryza sativa
  Clone ID: PAT_MRT4530_37961C.1
ttataaagaaaactttttctgtgagtcttttatcatctcagttgttataggagagatcatatcatgatctacctttgaacatctccttatattttcagtcatcctgtgatccaatccacacccatccccctgcccttcgccgtctcccacctccacctcacctgcgagcagcggtgcctcctctcctcctctgctgcctccgccgcgcgcatcctcctcccatccatctcttctcggcctcggcgcccgtttcctcgctacttcgccgcctgcgccgatctccattaatccatccatcccgcgagggggagcagcggggtaggggtgccgtcgtcctgccgcttccgcctccggactagggatcatgtcaggaagagatcgtctgccacgtcgctttatagaggatggcaggggctaccctgacatccgtgtagttgatgaacgtaggggctatcctgacatccgtgtagttgaggatcgtaggggctaccatggtattcgtgccattgaggatcataggggctatcctgacatccatgaaggccttgtcatgagggttgcacctcgctctcacacggctatgccggaggaagaaattgagattcagggggccgaattcaggaggcttatggcagatcaccgtgctcttgctgaagaacgtttggccttacaccgggaattacaagctggaaaagatgaggtccgtcacttgaacacgatcattgcagacatcagtgccaagaaggaaacttatatcggtgagcttgttgacaaaaggaggaaacttgaagctgaacttagagcaaatgagtctttaagagatgagattgtgcagcttcggggtgaaattgataagcaccttgtagtcaggaaagagctctctgcgaagtctgcatctatcatgcatgaactaaccagggaacaatctaataaacagcagattcctatgttgaaagcagagattgatgcccttcgacaggaacttgttcatgcaaggtctgcatgtgaattagagcagaaaggaaattttcagttggttgaacagaagaaagcaatggagaagaatatgatttcgatggcacaagaaattgaacaaatgcgagcagaattagctaattccgaagggagaccatgggccccaggtgcgacatatgggatgaagctgggcagccctgaagtgaccttccctacttcatatggagataactacaatatccatgtg

SEQ ID NO: 33894 - DNA, 4104 bp, Oryza sativa
  Clone ID: PAT_MRT4530_37962C.1
tcaacagtggccgcaaagctcctggtgggcgacgagctccgacctcctctcgatcgtgtaccgcagctgctccttcacctgccgcagcgcgaggagcacggactgcacgtcgttgcgcggcctcgccgtcgccgcaggctccgccttgggctcgggttgcgggtccacgagcacgatcgcgagctcattcgcctcctccatttcgccgtctccctctctgggctcggcctgagccttccgtgcttggatatcgatacgcatatcgtcttcgttgcctgtttctgcattcggctgcgggtctaccagcaccagcgctagcctgccggcggcccccccgcgttggttatcttgggattttgatgagccgtagtcggatggcacatgaacaggttcatcatccctgctacatgggagcgttccatgtgttctctctgagtcatggtcaccagcctcctccccagagccgcagttcttagcatcttcagggtccaagccattctcctcctcctccttgcaatgaacagatggtgattgctcggacacaacagagcaccagctcccttcctgggaggagttcacctgagtgcatgaaccagccgaggagccaggattgttcacgtccgcctccgtctccggcgcgcggtgaccggagcagctattggaggagagtgacccgatggagctgtccgagagctccacatccaaaatcttgagggactccagcttctttatggccctcctgagcctcctctccgccttgttcctgatcttgacctcgtcggagagcttcttctccagctcatccagctgcgaccaaatcataaccaaccaccaaaaaaagctcaagaacagtatcacacacttcctatcaaggaggttgtaacagtagggaatgtggctaagagaagatacccttttggcgagtgaatcagcctcctccttggcagccttggatgctaccctctctgcaagcagcctccctctcaggcactccactgtcctcatgccaccgccaccgccgtcctcgctgcgctcacctcccctgcattgcatggctgtggcagccatttctcctagcttagcttcccttctctcgtcgacgtttctggtggtagtagtagtatccaagggaccaagatttggggtcagggatgggcgtacgatatgtgacggctgtggctgcttctgccgctgcatgcgcctctgcttttgggcttggggtgcagacggttgctgaattggagggaggtagtaggagtggaggcttgaagccgaaggcgtccgtctgatgtctgatggctgaggcgtgaggtgaggcgcctcatcacggtaaggggacgtgtactgaacattggaattcacatcaatgttgccactagtaatactatcccctgcttcatttggtcggtcagtgcatgtggagatcgctgcaaccttcagcttttgtatgctgctcttttggtgtttcatcaaacactgagatttaacttgtggaggcacttccttctccaatccaactccccacagcatgctccttatggtttcagcttcttcccatttgccagcatttgagtataaattagccataacaatgtaattacccgtattcttaggttcaatgacaaacaagcgatcaaatgcataacgcccgaactcaacgtcaccaactactgctgctccattaagcaatgcaccccagacctttgcatttggctcaaaaggcatcttgttgacgagcttaactgcttccttgagcatccctgcacgactgagtgcagaaaccatgcaagcatactgctcaatcactggagagataccaaaaacagcctgcattgagttaaaaaccttacgagcttcagctaccttgccagaatgggcacacgcactaagcacagtggtgaaagttacagtgtctggcttcgcaccagcagtaatcatctgattgaacaggctcaatgcttcaactgcttctccatgagctgcgacagccgatatgattgatgtccaaacaattgtgcttctatgttcagtcagtttaaacaccttcctggctgtatcaagaaatccagcctttgcatacgcatcaatcaatgcactgaccaatctgatgctctgatcatagtcatttctgatcgcataaccatgagcttgctttgctcccagtagtgttgagaaagaaggaactgaaggcatgacgattgaaagtgtggctgaattgggtagtactttagaggcaatcatttcttgcaacaaccgaagaacatctgactggcgcccattttgaactaagcccgcaatcactgaattccacatgctgatgccccgagcacttgcttgccggaaaagctgcattccctcttcaacatgcccgttattcatgtaccctgtgatcattgcactgtaactgattgaatccttcctagtcattccatccaacaactgtcgtgcatattgtaacctcccacatttggcataaaacccaattattgagttccatactgccatgtccatgtccagcccactctccgcagcaaatcggtgaacaccaatcccgaaatcaacaaccttgagctgcgcgcaagcatgcagaacacttgtcaccgtgacaccgttcggcccaacaccatcaccatcactgcaacgaacccgcacgaactcctggaacagatccaagcactctctataccagcctgcacgggcacacgcggatataagcgagttccaggacacgacgtcccttctcggcatttcatcgaacacagcgcgagcggagcgcatgtccccggcgttcgcatatgcggtgatgagcgcattggacacgaacaggtctgacccgaagccccgcaggaacgcgacggcgtggagctccccggtgacgagtggggagagcgccgggccggacgcggcgagggacctgaggagcgtggagagggtgatctcgtcgggggagacggcggaggaggcgaacaggcggacggccgcggaagggtccggcgagtggagggagagcgagatgaggatggcgttccaggcgaagaggctgggctgcgggatagagtcgaacaccctgcgggcgtcgcgcaggcggtcggcgcgggagtagagggagatgagcttggaggcgaggaagttggagggcgtcacggaggcggcgacgaggcgcgcgtggatctgccgggcagcggcgaggtggccggattccgcgcagagcactagggaccatatggcaagtccagctgatacataaagcaatgcgatgccggaagtaaccagagcatcttgtgcaggaagacttttgtctctgctcgcaaggaggatagtcaatgctgtcatctgcgttgcggtcttccacttccccaaattgttaactgccacagcctctctcccaataatagcaatggcaggaaccgttagaagccatggcccatctctgagcagtgaaatttccaaaggtttggtgcacagcaacactaatgttgcagctaccataagcttgtcagccacaggatcaagaaatgcaccaaaaggtgttcctaactgcatctttctcgcaatataaccatctagccaatcagtgactgcagcagcaaggaagatgccagttgtcgcagttgctgcccaaggcccctccatgtagaaagtgcttatcaggagcggcacggcggcgacgcggccaatggtgagcacggtgggcagcgtgagcagcttgggcggaggcggctgtggcgccccgtccttcgccaccccgttcaccgcaggcgccaccacccgcctcctcctcccgaccccttcagatcccataccctcaccaccaccaccgccaccgccagaatgcggcaaggagcacagacccctcacgggcgcctgcgcgggcgggggccaccggaaccagcggcacgcggcggtggcgctggtcgccgtcgccgccgccgtcgtcgtcgtcgtcggacggtagcggctgcctcctgcggccggcggcgcgggggcagacgggatccgcggcggcgccgcgcgtggggagaagaagggcttggggtggaggtgcgcggctgcggcggcggctttgaggaggagggatgcgtgggtggcgacggatgggggcat

SEQ ID NO: 33895 - DNA, 369 bp, Oryza sativa
  Clone ID: PAT_MRT4530_37963C.1
atgtcgtcggcggcgcgccaccattgctccggtctccgggagcggctaggctgcgtgcagtgcagcttctgcgccaccgtgttgctggtgagcgtgccgtgcagcagcgtgctcagggtggtggccgtgcagtgcggccactgctccggcatcctctccgccgtcaacctgccgccgtcgccggtgtcggcgtccatcgagctgactccacagatgaaacaggagctggacgctggtccgccgccgggggagtactcggatgagagcagcggagacgatagggagggaagagatgcagaggacgatgcacctgcacctgctgctgctgctgttgcaaacaagcgtacttgtcctgctgttttctcttga

SEQ ID NO: 33896 - DNA, 4361 bp, Oryza sativa
  Clone ID: PAT_MRT4530_37964C.1
tcaacagtggccgcaaagctcctggtgggcgacgagctccgacctcctctcgatcgtgtaccgcagctgctccttcacctgccgcagcgcgaggagcacggactgcacgtcgttgcgcggcctcgccgtcgccgcaggctccgccttgggctcgggttgcgggtccacgagcacgatcgcgagctcattcgcctcctccatttcgccgtctccctctctgggctcggcctgagccttccgtgcttggatatcgatacgcatatcgtcttcgttgcctgtttctgcattcggctgcgggtctaccagcaccagcgctagcctgtcgtcgtcctcgtcgcttccaaagaataatgttcgcttctgacatatcatatgggtaaacttacaatggtagaaactatagaaaccccagagtcacacactcaaacctcatggttttgtattcgtatacggttacaatcttctgcatttttcagttttgcagatcattacacccagtgtccaacactcgagccgtgataggctctgaaaatagctttcgaagaagtaatcacccgggcaacatactacttgctactatgttttttgtttctacggagatcttgcaggcacagcaacttagcaactaatccgccaaactgagacaatgcgtaagtagctgaggatctcaaccaattctaggtccatcaatcaactccgcagttcaaaaattgtatgctcttgaaatgtaatatcaccttgctggcttgctcctgttccttctattacactatgtgctacggctattttagaagtagcatcttcagggtccaagccattctcctcctcctccttgcaactgaacagatggtgattgctcggacacaacagagcaccagctcccttcctgggaggagttcacctgagtgcatgaaccagccgaggagccaggattgttcacgtccgcctccgtctccggcgcgcggtgaccggagcagctattggaggagagtgacccgatggagctgtccgagagctccacatccaaaatcttgagggactccagcttctttatggccctcctgagcctcctctccgccttgttcctgatcttgacctcgtcggagagcttcttctccagctcatccagccgctcggcgattgaatcagcctcctccttggcagccttggatgctaccctctctgcaagcagcctccctctcaggcactccactgtcctcatgccaccgccaccgccgtcctcgctgcgctcacctcccctgcattgcatggctgtggcagccatttctcctagcttagcttcccttctctcgtcgacgtttctggtggtagtagtagtatccaagggaccaagatttggggtcagggatgggcgtacgatatgtgacggctgtgcccgttcttcccccggcatgcgcctctgtagtagtatccaagggaccaagatttggggtcagggatgggcgtacgatatgtgacggctgtggctgcttctgccgctgcatgcgcctctgcttttgggcttggggtgcagacggttgctgaattggagggaggtagtaggagtggaggcttgaagccgaaggcgtccgtctgatgtctgatggctgaggcgtgaggtgaggcgcctcatcacggtaaggggacgtgtactgaacattggaattcacatcaatgttgccactagtaatactatcccctgcttcatttggtcggtcagtgcatgtggagatcgctgcaaccttcagcttttgtatgctgctcttttggtgtttcatcaaacactgagatttaacttgtggaggcacttccttctccaatccaactccccacagcatgctccttatggtttcagcttcttcccatttgccagcatttgagtataaattagccataacaatgtaattacccgtattcttaggttcaatgacaaacaagcgatcaaatgcataacgcccgaactcaacgtcaccaactactgctgctccattaagcaatgcaccccagacctttgcatttggctcaaaaggcatcttgttgacgagcttaactgcttccttgagcatccctgcacgactgagtgcagaaaccatgcaagcatactgctcaatcactggagagataccaaaaacagcctgcattgagttaaaaaccttacgagcttcagctaccttgccagaatgggcacacgcactaagcacagtggtgaaagttacagtgtctggcttcgcaccagcagtaatcatctgattgaacaggctcaatgcttcaactgcttctccatgagctgcgacagccgatatgattgatgtccaaacaattgtgcttctatgttcagtcagtttaaacaccttcctggctgtatcaagaaatccagcctttgcatacgcatcaatcaatgcactgaccaatctgatgctctgatcatagtcatttctgatcgcataaccatgagcttgctttgctcccagtagtgttgagaaagaaggaactgaaggcatgacgattgaaagtgtggctgaattgggtagtactttagaggcaatcatttcttgcaacaaccgaagaacatctgactggcgcccattttgaactaagcccgcaatcactgaattccacatgctgatgccccgagcacttgcttgccggaaaagctgcattccctcttcaacatgcccgttattcatgtaccctgtgatcattgcactgtaactgattgaatccttcctagtcattccatccaacaactgtcgtgcatattgtaacctcccacatttggcataaaacccaattattgagttccatactgccatgtccatgtccagcccactctccgcagcaaatcggtgaacaccaatcccgaaatcaacaaccttgagctgcgcgcaagcatgcagaacacttgtcaccgtgacaccgttcggcccaacaccatcaccatcactgcaacgaacccgcacgaactcctggaacagatccaagcactctctataccagcctgcacgggcacacgcggatataagcgagttccaggacacgacgtcccttctcggcatttcatcgaacacagcgcgagcggagcgcatgtccccggcgttcgcatatgcggtgatgagcgcattggacacgaacaggtctgacccgaagccccgcaggaacgcgacggcgtggagctccccggtgacgagtggggagagcgccgggccggacgcggcgagggacctgaggagcgtggagagggtgatctcgtcgggggagacggcggaggaggcgaacaggcggacggccgcggaagggtccggcgagtggagggagagcgagatgaggatggcgttccaggcgaagaggctgggctgcgggatagagtcgaacaccctgcgggcgtcgcgcaggcggtcggcgcgggagtagagggagatgagcttggaggcgaggaagttggagggcgtcacggaggcggcgacgaggcgcgcgtggatctgccgggcagcggcgaggtggccggattccgcgcagagcactagggaccatatggcaagtccagctgatacataaagcaatgcgatgccggaagtaaccagagcatcttgtgcaggaagacttttgtctctgctcgcaaggaggatagtcaatgctgtcatctgcgttgcggtcttccacttccccaaattgttaactgccacagcctctctcccaataatagcaatggcaggaaccgttagaagccatggcccatctctgagcagtgaaatttccaaaggtttggtgcacagcaacactaatgttgcagctaccataagctttctcgcaatataaccatctagccaatcagtgactgcagcagcaaggaagatgccagttgtcgcagttgctgcccaaggcccctccatgtagaaagtgcttatcaggagcggcacggcggcgacgcggccaatggtgagcacggtgggcagcgtgagcagcttgggcggaggcggctgtggcgccccgtccttcgccaccccgttcaccgcaggcgccaccacccgcctcctcctcccgaccccttcagatcccataccctcaccaccaccaccgccaccgccagaatgcggcaaggagcacagacccctcacgggcgcctgcgcgggcgggggccaccggaaccagcggcacgcggcggtggcgctggtcgccgtcgccgccgccgtcgtcgtcgtcgtcggacggtagcggctgcctcctgcggccggcggcgcgggggcagacgggatccgcggcggcgccgcgcgtggggagaagaagggcttggggtggaggtgcgcggctgcggcggcggctttgaggaggagggatgcgtgggtggcgacggatgggggcat

SEQ ID NO: 33897 - DNA, 915 bp, Oryza sativa
  Clone ID: PAT_MRT4530_37965C.1
gtggatcccccgggctgcagagtttagctacactctaccccaaagcaaaagggttagaacccaatgctagcttagccccaacaccctctgctagcttagctacacaaaccactgaatccggcggtctccgtccgctgcccctgtggcccgccccccaccctccccccggccctcacactctccacaacaccccaactctgaagctgcttgcttggagtctaggaccagcattcacaagcacaatgaagctcaacaccaccaccaccctggctctcctcctgctcctgctcttggcctcctcttccctccaagtttccatggctggatcagatttctgcgacggcaagtgcaaggtgaggtgctcgaaggcgagcaggcacgacgactgcctcaagtactgcggcgtgtgctgcgcctcctgcaactgcgtgccgtcggggacggccggcaacaaggacgagtgcccctgctaccgcgacatgaccaccggccatggcgctcgcaagaggcccaagtgcccatgatcatttttgcattatgcatgctacatgatgcttagccatcatccgtagttgctttgcatgcatgatgcatgctcatgatcgagatggagtagtagatatatgcatatgcttgccatgatcgatcgtatggaccatgcaaagtatgcttgtttgtgtgaggatcgactcgatcttgagtctttccatgttcttggttttctttttttactgctagttaattactatggagtacatgtgaatatgacatcggatatgtaatgtatacatgcatgcctggtgataataatggtgtgtgtgctgtaataaagtgttggcttaattggtgtagtaaaaaaaaaaaaaaaaaaaaaaaaaaaaaaaaaaaaaaaaaaaaaaaaaaaaaaaaaaaaaa

SEQ ID NO: 33898 - DNA, 264 bp, Oryza sativa
  Clone ID: PAT_MRT4530_37966C.1
cccacgcgtgcgggcgaattaaaaaaaatccgcacaggatcgagcaggctttatctaaacaaggtagatggtggactacccgtatgggccgtggcggatccacctggtcgtgcctgggccgttgaacatgaagcaccaggttatcaaggccatgaagccgatgaacaagaactacatgctcttcttcaagaccatccctaactaacacccttctatacgacggaaagccaatcttcaataccaccaccgtcacctgcttaatct

SEQ ID NO: 33899 - DNA, 399 bp, Oryza sativa
  Clone ID: PAT_MRT4530_37967C.1
atctggtcgatcgcccataaccgcgagcaaggctattcgaatagttttactctggccagaggtgcacaactgtacccacaagacacaatccaccggcatgtcaccatgcctgcgtagacacgtgaccatgtcgagtgattgtgacaagacccttcgcataactctcctctaaccatccacaccacgctgaggtttcacccccacccctaccccgagagtgggcagtccccccatgcaccgcggtaaatccagcagctggacaaccggacactcggccgacccaactccatcatgcccaccctcgccactgggtcatcaacagggtcgagctatactacagatcaagcaattacccactcccgcttgtggtaagcgttgtatgtcttccagggtttcccg

SEQ ID NO: 33900 - DNA, 1491 bp, Oryza sativa
  Clone ID: PAT_MRT4530_37968C.1
atggcaacgtgcgcggataccctcggcccgctgctgggcacggcggcggcgaacgcgacggactacctgtgcaaccagttcgcggacacgacgtcggccgtggactcgacgtacctgctcttctcggcgtacctcgtgttcgccatgcagctcggcttcgccatgctctgcgccgggtccgtccgcgccaagaacaccatgaacatcatgcttaccaacgtgctcgacgccgccgccggcgcgctcttctactacctcttcggcttcgccttcgccttcggggcgccgtccaacggcttcatcgggaagcacttcttcggcctcaagcaggtcccacaggtcggcttcgactacagcttcttcctcttccagtgggccttcgccatcgccgccgcgggcatcacgtccggctccatcgccgagcggacccagttcgtggcgtacctcatctactccgccttcctcaccggcttcgtctacccggtggtgtcccactggatctggtccgccgacgggtgggcctcggcttcccggacgtcggggtcgctgctcttcgggtccggcgtcatcgacttcgccgggtcaggggttgtccacatggtgggcggcgtggccggactctggggcgccctcatcgagggcccccgcattgggcggttcgaccacgccggccgctcggtggcgctgcgcggccacagcgcgtcgctcgtcgtgctcggcagcttccttctgtggttcgggtggtacgggtttaaccccggctcgttcctcaccatcctcaaatcctacggcccgcccggtagcatccacgggcagtggtcggcggtgggacgcaccgccgtgaccaccaccctcgccggcagcacggcggcgctcacgacgctcttcgggaagaggctccagacggggcactggaacgtgatcgacgtctgcaacggcctcctcggcggcttcgcggcgatcaccgccggttgctccgtcgtcgacccgtgggccgcgatcatctgcgggttcgtctcggcgtgggtgctcatcggcctcaacgcgctggcggcgaggctcaagttcgacgacccgctcgaggcggcgcagctgcacggcgggtgcggcgcgtggggggtcatcttcacggcgctgttcgcgcgcaaggagtacgtggaccagatcttcggccagcccgggcgcccgtacgggctgttcatgggcggcggcggccggctgctcggggcgcacatagtggtcatcctggtcatcgcggcgtgggtgagcttcaccatggcgccgctgttcctggtgctcaacaagctgggcttgctgcgcatctcggccgaggacgagatggccggcatggaccagacgcgccacggcgggttcgcgtacgcgtaccacgacgacgacgcgagcggcaagccggaccgcagcgtcggcgggttcatgctcaagtcggcgcacggcacgcaggtcgccgccgagatgggaggccatgtctag

SEQ ID NO: 33901 - DNA, 282 bp, Oryza sativa
  unsure (1)..(282): unsure at all n locations
  Clone ID: PAT_MRT4530_37969C.1
gtaggccgctgttccnccaatgttcaaagaatgttttcctgcatatatatattttgggttcgtttgatgtgtaaattttatanccgtacaacgattcattatcctctctcccngtttgtatttcttgtctactttcttgngttcttttgatgtgtacaatatgattgatttgcatgattgaataatcttgattgtctnnnatgtatgcnccgtnaatngatntaaaaananaaaaaaaaaaaaaaaaaaaaaaaaaaanaanaaaaaannnnnaaaaaaaaa

SEQ ID NO: 33902 - DNA, 1782 bp, Oryza sativa
  Clone ID: PAT_MRT4530_3796C.1
atggcggcggcggagcagaaggggaagaagccgaggaccgacggcgcggaggccgagcccgtcgacgccgccctgctgcagtccatcgagaagctccaggagatccaggacgagatcgagaaggttaatgaggaagcatgtgataaagttctggagttggaacagaaatacaacgaggttcgcagaccagtttatgttcgacggaataaaattatcaagcaaattcctgacttctggctgacagcgtttcttagccatcctatgcttggtgaactattaactgaagatgatcaaaagattttcaaacacttggagtctatcgacgtggatgactcagaagatatcaaatcaggctactccattactctcacattctcccccaatccatattttgaagatacaaagcttacaaaaacatattcctttagtgacgatgaagcagtcaaagtaaaggctacctccatcaggtggaagaaaggaatggatattgccaatgatcgtgcgtacacgaagaaaggggacaagcgaatcttaattgatgaaagtttctttacttggttcaatagtgaaaagaacagaagttttgctcatggagctatggatgaggtggcagatgtcatcaaggaagatctgtggcctaatcctttgaagtacttcaacaatgaatttgaagaagaattagagctactggatgacgatgacgagcaatatttttttgcgcttgactggtatctgatgatgacgatgaggaggaggatgatgaagaccaaggtgaaggagaggaggatggagaggagaactgagctctctgtcatgtcagattcttttggcctggacaacttatgtctgcagaaagcggagaccgggcctcctggagggctgaaacagcagggcgtccccttttgcggcgttgtggtgctcgacttagctggcagtttgaattcaggcggccgcgtgagatgggccgctcgcttcgccggcccgtccgggcctccgagcgtccccgctcgtcgcctcgtcccctgcctgcgccgcagtggagcaaccggcactaccgaaccgctcggcgtagcatccacgcagcgcaggggaaggaaagccgaagcgcggccgccgcgcgtgagatcgacgcgcggcgacttcgccaaccttccctataaagcgctgccccaatcgccaagcccaccgacctcctcctcctctccagaccggaggatgtccggcgagagatgcgccgggcggccgctgttcggcggcgccatctccagtaccttccccgtccggttccaggaggtgttcgttgacccggcccgcgacgagagcctcatcttcgagctgctcgacctcaagggcgaggtagaggacggcggcagcgcgctctggttcctgcgcgacatcgccaacgagcaggacgcgggggacaacttggtagttgagcattctgggacgatcgagctaggtggtctgcgatttggagatgctcctgcagtggctggaactgcggttggtcagctggctatctcaaaaggaaggcaaggcagagaagcacagaacattgttcgactttacttggccaatatacgcctcaagaatgcagctactgatgtagttattactgcatatgagccactgttgataaaccccttgagtgaaagcgccagtgcagttgcagccggtccagcagtaccagcagaacaagcaggatgcttagcaatgtctgagatcttcaagctcgccgtgatgaacttcaatgcaccaaggatcaggatgacgaacatgtga

SEQ ID NO: 33903 - DNA, 181 bp, Oryza sativa
  unsure (1)..(181): unsure at all n locations
  Clone ID: PAT_MRT4530_37970C.1
tcgacgagatgccaagcgtgctgtggaaggagttctgccrgccccaggatgatgcaggaccnctccggcgcncatcgtcgacggcaactggaaggcgtcgggaagctccttatccattgcgcggggvccaagggtcctgtttggtaacatacacgttcctgggcactttgtttcaggaccg

SEQ ID NO: 33904 - DNA, 1185 bp, Oryza sativa
  Clone ID: PAT_MRT4530_37971C.1
atggagtggacggcggcggagatggacgaggcgaggtcgatcatcgctaggctgaccaacgcttacgactccggcaccctcgttgccggcgccggcaacggcgacacgaggcacgaccgcattgtgagggagctgcaggcgtggctcccatggaggaccatggatcagctaatcgggctgtacattgagctcatggcggaggagcccgcggcggcgcagccgcagtacttcgacgccggcgccgtcgtcgaccctacgttcgacttcttcaacgaccacaacaacttcctcggcatgccgccgccgccggttcaacaagctgatgaccataacatgaacaacgtcgtcgccgacgccggcatgaactactactatggcggcggcggcgccggcggtgccatggtgtttggtggtgcacccatgggggagacggtggagcaggcagctccgccggtgccggtggtgccggtggtgatgaaccgcgacgacgacgaggtgaacaaccagggcggcggccgtcaccgtgctgcaccaacaaatactactaggaggttttggaccactgaagagcacaggcagtttctgagggggctgcgtgtgtacggacgtggtgagtggaagagcatctccatgaacttcgtcagaagcaagacgccggtgcaggtgtccagccacgcccagaagtacttccgccgcgtggagagcgccgccgccgacaagcagcgctacagcatcaacgacgtcggcctcaacgacgacaccgccgccatggacggcaccaacagctacagcaacaataacttcggtggctggcagagtctcgccttcgccggcggccacctcgagcccgtcagcggcggcggcgccgccaggcaagtcatcgctccggcgagctcctccgccgctgccatgaacagcgccgctcagttctgggctcctatgctgttcaacccccagattcagcagcagttcatgcagatgcaggcgcagacgcagcaggcgtggaatgatcagcatatgatgatggctgctgctccaatggagggagcaactgatactaactttgagcctgcaggtgcagttaattattattattatcaacagcagcaggaggaggaggagggaggtgcttatggtgttcctgcggatcagtggatgatgaaccagaacaacaacatgtgctga

SEQ ID NO: 33905 - DNA, 1104 bp, Oryza sativa
  Clone ID: PAT_MRT4530_37972C.1
atggcggaggagcccgcggcggcgcagccgcagtacttcgacgccggcgccgtcgtcgaccctacgttcgacttcttcatcgaccacaacaacttcctcggcatgccgccgccgccggtgcaacaagctgatgatcatgccatgaacaacgtcgtcgccgacgccagcatgaactacttctacggcggtggtgccatggtgtttggtggcggtgcacccatgggggagacggtggagcaggcagctccgccggtgccagcgccggtggcggtggcgccggtggtgatgaaccgcgacgacgacgaggtgaacaaccagggaggccgccgtcaccgtgctgcaccaacaaatactactaggaggttttggaccactgaagagcacagagcaactcttatatattcatcttacgactttgatgatccgttgatcaccaatttactgatcaccatgactcgcatgaaaaaaaatatgtacttcctttgtttcacaatgcagtttctgagggggctgcgtgtgtacggccgtggtgagtggaagagcatctccatgaacttcgtcagaagcaagacgccggtgcaggtgtccagccacgcccagaagtacttccgccgcgtggagagcgccgccgccgacaagcagcgctacagcatcaacgacgtcggcctcaacgacgacaccgccgccatggacggcaccaacagctacagcaacaataacttcggtggctggcagagtctcgccttcgccggcggccacctcgagcccgtcagcggcggcggcgccgccaggcaagtcatcgctccggcgagctcctccgccgctgccatgaacagcgccgctcagttctgggctcctatgctgttcaacccccagattcagcagcagttcatgcagatgcaggcgcagacgcagcaggcgtggaatgatcagcatatgatgatggctgctgctccaatggagggagcaactgatactaactttgagcctgcaggtgcagttaattattattattatcaacagcagcaggaggaggaggagggaggtgcttatggtgttcctgcggatcagtggatgatgaaccagaacaacaacatgttctga

SEQ ID NO: 33906 - DNA, 1853 bp, Oryza sativa
  Clone ID: PAT_MRT4530_37973C.1
atgattttcgttgccgccaccggctgctgctggtacgtgttcgccgcctacatcttcgccgccgccgaccacgccaaccgcaccggcgccgcgttcctccccgccgagcccgccgccgcgtgctccggcgccttcgccgccaggctgctctcctccggcctcgtgtcgccgtcgctcctcgcaaacaacgggtcgtgcgacctcaccggtgacccggggaagctcgcggcgggctcgcggccgtgccagctcgccaccatcgacgccgtgcgcgcgatggcgccgcgcgcgctgccgaacgcgacgcggctctgcgccgcgccgggcgcggcgcgcgcaccgggggtcgggcccggcgaccccggatgcgccgcgtgccgcggcgcggtgatcgcgaccacctacgagatgctggccagcgcgcgcaccaaggagttcgtgccgtgcgggatggccgccaccgtcgccgtctggtcccgcgcgccgccgccgctcgagcggttccgcgcctacgcgctttgcatgctccaggtgctcgagaacgtcaacagcctcggcaccagcgacctcgtcccctcgccgccgccgccgccggcgtcgccgaccaccgcatcgcgcccactcccaagctcctcctcgagaaggaacaccgtcgccatcgccgtcggctcggcgtccgcggttgtggtggccgtcgtggcggtcgcctccgccgcgctggcaatcgtaacaatccgtcgccggcgtaggtcgacgacgacggcaggtgacgtcagcgacgacgagtcggtggcgtcgctgccgccgctgccgcgcgagggcctgtacatcttcaccaagtcggagactgaagcaggccaccaatggctacgacgagaagcttctgctgggcagcggcggcgccggcaaggtgtacctgggggcggctcccgtcggggcagcgagtggccatcaagaagatctacaggtcgaagaaggtgtcggagttctacgcggaggtggccgtgctcgccaagctccggcaccggaacctgacgacgctggtgggctactgcctcggcggcgaccaccacgcgctggtgtacgagtacctcggcggcggcaacctgtggcgcgcgctgttccagggcgagctggcgtggcggcggcggctggaggtggcggtggacgtcgcggaggggctggcctacctgcacgggttccgggagggcgccgtggtgcaccgcgacgtgaagccgacgaacgtgctgctgtcggagtccggcgcggcgaagctgtcggacttcggggtgtcgcggatcgtgcccgagggcgggacgcacgtgtcgacggaggtgcgcggcacgcgcgggtacgtcgacccggagagcttctcggcggggcacgtctcggaggccggcgacgtctacagcttcggcgtcgtgctgctcgagctcgccacggggatgcgcgccgtcgtgcccacgccgtcgggcggcgccgagtccatcgtgcacgccgcgcactgggccgtcgcccaggccggcggcgaggccggcgccgccgcggagtccatggtggacgagcgcctcggcgccgactgggacaggcccaccgtgcgcgccgtgttcgcgctcgcgtgccggtgcgtgcgcccatacaagcacgagcgccccgcgatgggcgaggtgctcgccgagctcaaggccatgctcgccgactataccgcacgaggcggcggcgccgaccgatcagaggcctcgacgtcatcatccaccgccaccccggacctggcgtcgctcccatcgacatcgaaacataataggcgagagaaggggcgcggcgacgccgctgccgctcaccaccactctgcc

SEQ ID NO: 33907 - DNA, 367 bp, Oryza sativa
  unsure (1)..(367): unsure at all n locations
  Clone ID: PAT_MRT4530_37974C.1
gngggaaaaaaaaccttaacaaagttgctttggcccccttttaaacaaacaacaaaatttttttttttttttccccaaatttggcccctaacctttttaaaatcctttggttcaaaataccagggggaaccccttaccttgttttttccctaatttttgacgggggaatgggcacccttgccctttaggggaagtttttacccccagagtttttttttaaaaaagaaaaagacctttttttcccctttttaacattgcccttctccccatatttcacccttggcctttgtccgccttttccagggctttaaccccctttctcggggggtccttaataagggccttccaaccaaattgtttttttttt

SEQ ID NO: 33908 - DNA, 208 bp, Oryza sativa
  Clone ID: PAT_MRT4530_37975C.1
cggagccggctgcagccgcaacccacgcgatcgcgccgcttccgcatcgtgccgctccacgtcaccgccgtcggtgccagatctggcgacggcggtgccagatctgccgctacctagcttggaggcctcgccgccgtcactccccgacgccggcaaacgtcacttccccacgcgctgtggaaaggcctgccggctcattcctgggtga

SEQ ID NO: 33909 - DNA, 1321 bp, Oryza sativa
  Clone ID: PAT_MRT4530_37976C.1
atggcttttttttcctttcccccttctctttttcatcctcttcttttatcttcttcctccgctagagccacctcgagctcctccacgccaactgccaccgacgccaagtgtcactgctgtaagaggaagaggctaaagggcatgatgcctaattggtggtggattggaggggcgaagttgcggccaggacgcagagcgcagcggcaaagccatctatggtggcggcttagcacgatggtagctagggtgtcggcaatgcacggccagagatcggcggtgggcggcggagcctgtgctcgtggtggaggtagggttacggtggtggattgggggagcggagcggcgaccacggtagccctcagagcagtggtgccggcggtggaagtggggaggtgggcgacgaccgcgtcccccgcacgtgtggatgaggcgggaaggcgcgaggacaatggcgtcgtggggagcgacatgcgcatgaggggtggccatggcggttgccgatcagaggagaaagaaagccctgacagagatgtagaagagaaagcagagaggttgggtatgaagttgaacttgactcggagatgggttcacgatgcaaggaggattcgaccacggcttaaggagttcatctcagatcagacttacacatgtgggtcgagtcggatcgatgaggccagaatctgtgtcgccttgaaacgtgaggaccaataccgagaagacttaacaacaacaggaagactcaagctttggaagacacatctcggcaggggtgtactgcagcttgtgttcgacaggagatcatatttacctggagtccagaacttgatgattggtgcaaagcgttggtttggcggcgtggctcacaggcacaagacgggaggcatggtgcagctttgtggtgatcaaggtgatgtggttagtatacggctcgggagaaggtgcgcgaggttatctgggcatggattagatcaagtcaaatttaagatggaagatggaggtgaacatggtcttcagggagtcaatgatgtgacagctaggaagaaatccaatttcgcttggcaagacgactgtggtgatatgagagaaggtggagcactgttgcaggtggagtcaagaggaagaacttgcagggatagcgggagtctcttgttacggtgagcctggtgaaggttcgtcggggcagctcggcgtgagcggcgaaaaaggatcaactcaagtcctgatgcaaaagccatcaaattttagtgagcctgagtacacagtaatgattgttcattgtgagcatgacttcatcgtagcagattacttacagcttacctag

SEQ ID NO: 33910 - DNA, 1267 bp, Oryza sativa
  Clone ID: PAT_MRT4530_37977C.1
atgaagatgcagatttacgatggcagccaggtgtgggacgcaggtttgacagttgaggcccttgtggctactgaccttgtcaaagagcttggaccaactcttaaacgagcgcattccttccttaagaattcgcagttgcttgacaattgcccccgagatttcaaccgctggtatcgccatatatccaaaggtggatggacatttacaacagctgatgatggctggcaagtttcagattgcacggcgacagcactgaaggcatgtctattgttatcaaggatatctcctgaaatcgttggtgaaccactggaaattgatgcacaatacgatgctgttaattgtctgatgtctttgatgaatgataatggtggcttttcagcatttgaactcgtaaggtctaatacatggctggagtgtctagcattattcaaaaaacttcacccagggcaccgcaaggaagaggtggaaaattgtatcagcaaaggtgctaatttcattgagagttctcagagaagcgatggttcatggtatggttcttgggggatttgtttcacctatgccacatggtttgcagtgacaggattagtttctgcaggcaggacacttgggaatagcgctacagttagaaaggcatgtgactttctcttgtcaaaacagcttccttcgggtggctggggcgagagctatttgtcatgtcatgacgaggtttacacaaatcttaaaggcaaccgacctcacggtacgcacactgcgtgggccatgattgcactaattgatgcagggcaggctgaaagagatccagtgcctctgcatcgagcagccaaggctttgctcaacttgcaattagaggatggagaatttccacagcaagcttttaactcgaaccgttgacaaactgccatggccagttattcccagttcaggaacatcttccctataatggctctcacagggtatcgccgccgagtactgcttgcaggcaacatataggagcatgattttaagttatgccagctcttggcatgttggtttgccaataaagttacatttcacctcccctagcagcagtactctctactgttctagcgtttgtattttgtattttctaagaaaaaaatgttttaccgcatttacttagttccctttgtttgtaataaaacatggaacattatagtactgcttccttgtagttacacgtccgttctaataaagaaaccttattatatctaaaaaaaaaaaaaaaaaaaaaaaaaaaaaaaaaaaaaaa

SEQ ID NO: 33911 - DNA, 506 bp, Oryza sativa
  Clone ID: PAT_MRT4530_37979C.1
aggaaaaagactgggaaaaattttaggggggaaaactgccgccacaaaatttccttccctaaagggaacaacaatatcccccttattattggggggaaaagcaaacccccaactggttatccagggaagtataaccaaccctccttttccaaacaacgggcaaaccgcctaccacgggggggagggctgggccatttttttccctttttttggaacaaaaaaaaaagctagggggcccctacaaaaaaagcagtttgcccagcgcccctaatccgaaccaaagggaaacaaaactaaaacaaaaaaggggtgggcctaggaggggggcgctaattacaaaatctgacaaaaaaagaccccccattcgttcggggaccctttttgaaattatttgagcccaaaaagcccgaagaaggcccccactttttcagcatcccccgggaaaagaacatccttggcgtcaacgttgtcggggttggcgggcttcaactgggttttcggaaaaa

SEQ ID NO: 33912 - DNA, 1261 bp, Oryza sativa
  Clone ID: PAT_MRT4530_3797C.1
ccggccggcaccatcccctaacccctgaccacccccccgcctccgcacccgcctccggttgcctcctcccctctcggcgggcggcggcagcagcggcggcagagtcagcagacctcgccgggaagctaaagccctaaagctcgcggaagggtttatcgcaacgggcgatggcggcggcggagcagaaggggaagaagccgaggaccgacggcgcggaggccgagcccgtcgacgccgccctgctgcagtccatcgagaagctccaggagatccaggacgagatcgagagggttaatgaggaagcatgtgataaagttctggagttggaacagaaatacaacgaggttcgcagaccagtttatgttcgacggaataaaattatcaagcaaattcctgacttctggctgacagcgtttcttagccatcctatgcttggtgaactattaactgaagatgatcaaaagattttcaaacacttggagtctatcgacgtggatgactcagaagatatcaaatcaggctactccattactctcacattctcccccaatccatattttgaagatacaaagcttacaaaaacatattcctttagtgacgatgaagcagtcaaagtaaaggctacctccatcaggtggaagaaaggaatggatattgccaatgatcgtgcgtacacgaagaaaggggacaagcgaatcttaattgatgaaagtttctttacttggttcaatagtgaaaagaacagaagttttgctcatggagctatggatgaggtggcagatgtcatcaaggaagatctgtggcctaatcctttgaagtacttcaacaatgaatttgaagaagaattagagctactggatgacgatgacgaggtatctgatgatgacgatgaggaggaggatgatgaagaccaaggtgaaggagaggaggatggagaggagaactgagctctctgtcatgtcagattcttttggcctggacaacttatgtctgcagaaagcggagaccgggcctcctggagggctgaaacagcagggcgtccccttttgcggcgttgtggtgctcgacttagctggcagtgtagggacttgctccgaaaaactttgttctatggagaaataactcgagttcaatagatgattttgttgcatgcgcgatcgaaatgttgcgtgttgtttggaagtgttatttaccttgccgttggattagtgtttataacgctattatatatagagcatgatcaattaaaaaaaaaaaaaaa

SEQ ID NO: 33913 - DNA, 1275 bp, Oryza sativa
  Clone ID: PAT_MRT4530_37980C.1
aattcgtggaattgaactgttagtgttgggtgccataaacatactatacagatacagtgatacagctttgacaacatacacctctgaattgtccactgttcaattcaagcgattcgctccgcacatcactaagatgtgaagtgttgccctattcgtaagcctggaaccccaggcgcgcctgtcaatactattatctacaaacagtttatatagtggtacaagaatttctgaactatgacgtgcattttaatcaaacggatcaattcgagggtcgtgctcacttgccattgccatccccgtgcagagacatgttggacacatcacctttcctgcgcctgaacaatttgggcacctcgctgtccgcggcaaacacgtagcatagtagattttgagattagctgcactcaggggaggcaagaatggaatgaatgatggaaaatcaggaagttccccttcaggcacatcaactgagatcccaagttcaacattctttattctttgttgtattctcaacctgcgaatctcctccatatgcaagaagatcttgttccggcggctcctaatattatcctgaatctcctgcaagtccagcttttcaaaatcctggactgtctcaggcccttcaatgatacaaaaccccggggagccggcggcctgctcatcaccagagccgaacgacgctgctgcaggcgtcggaggcggcgaggacgacgacgacgacgacggcaggtcgggggatccgcccgacgcggcggcggaggacgcgacccgccacctgcgcgccggcagcggcggccgcagccggtcagcgtaggcccccggccgcggcgacggccggagccgccccccggggccgccgaggccgctgcaggccagcatgcgggccgagcagagcatcgcctgcgccctgcggatatgccctggcgtagataaaggctgatcaccatcgctgaatgttgaaaccggttcagtaagcaccagagttccggtacttgaacagcgagcacagggcaggtatccagttcctaaacaatattcgcaccgcttatgctcctgctgtttgacattgttgatctcaacaaccattagagcggagataactccaactgctccacctgagaacgatgccacaataggatctacctgactcagttgcatcggcaaatggacactgcggatgaagtctgcataagatgttcctcccacaccgagtttaagttccagaattggtgcaagaaatccaccctcgcccttatcccagcctgcagcccgggg

SEQ ID NO: 33914 - DNA, 1110 bp, Oryza sativa
  Clone ID: PAT_MRT4530_37981C.1
atgctctgctcggcccgcatgctggcctgcagcggcctcggcggccccggggggcggctccggccgtcgccgcggccgggggcctacgctgaccggctgcggccgccgctgccggcgcgcaggtggcgggtcgcgtcctccgccgccgcgtcgggcggatcccccgacctgccgtcgtcgtcgtcgtcgtcctcgccgcctccgacgcctgcagcagcgtcgttcggctctggtgatgagcaggccgccggctccccggggttttgtatcattgaagggcctgagacagtccaggattttgaaaagctggacttgcaggagattcaggataatattaggagccgccggaacaagatcttcttgcatatggaggagcttgcgccgttgttagttaatctttattctagatattgtgatattaaacagattcgcaggttgagaatacaacaaagaataaagaatgttgaacttgggatctcagttgatgtgcctgaaggggaacttcctgattttccatcattcattccattcttgcctcccctgagtgcagctaatctcaaaatctactatgctacgtgtttcactttgattgctgggataatggttttcggtggatttcttgcaccaattctggaacttaaactcggtgtgggaggaacatcttatgcagacttcatccgcagtgtccatttgccgatgcaactgagtcaggtagatcctattgtggcatcgttctcaggtggagcagttggagttatctccgctctaatggttgttgagatcaacaatgtcaaacagcaggagcataagcggtgcaaatattgtttaggaactggatacctggcctgtgctcgctgttcaagtaccggaactctggtgcttactgaaccggtttcaacattcagcgatggtgatcagcctttatctacgccaagaacagagaggtgcccaaattgttcaggcgcaggaaaggtgatgtgtccaacatgtctctgcacggggatggcaatggcaaataatagtattgacaggcgcgcctggggttccaggcttacgaatagggcaacacttcacatcttagtgatgtgcggagcgaatcgcttgaattga

SEQ ID NO: 33915 - DNA, 531 bp, Oryza sativa
  Clone ID: PAT_MRT4530_37982C.1
aaacgcagataattaattcgtggaattgaactgttagtgttgggtgccataaacatactatacagatacagtgatacagctttgacaacatacacctctgaattgtccactgttcaattcaagcgattcgctccgcacatcactaagatgtgaagtgttgccctattcgtaagcctggaaccccaggcgcgcctgtcaatactattatctacaaacagtttatatagtggtacaagaatttctgaactatgacgtgcattttaatcaaacggatcaattcgagggtcgtgctcacttgccattgccatccccgtgcagagacatgttggacacatcacctttcctgcgcctgaacaatttgggcacctctctgttcttggcgtagataaaggctgatcaccatcgctgaatgttgaaaccggttcagtaagcaccagagttccggtacttgaacagcgagcacaggccaggtatccagttcctaaacaatatttgcaccgcttatgctcctgctgtttgacatcggacgcg

SEQ ID NO: 33916 - DNA, 1675 bp, Oryza sativa
  unsure (1)..(1675): unsure at all n locations
  Clone ID: PAT_MRT4530_37983C.1
tcgttactagaactaggccgccctttttttttttttttttttgtttttttttttttttgtggggaagcaaatcaatttccctggcaaattttaaaacgtcaggtcgtttacggtttcggtccactaccgtctaccgtgcttggaagctgaatcagtgcatanctcccaatacccatnggcaatgngatgtncnnaancgaatagttggnaacccagnttncccantcncacgtgtaaaaccacgccaattaatttnatcgnccccnatgggcnaatnggttctttttttttttttttttgttcgaactgatacgcagactagtactattgtttgtaaattagtgcacaataacgtctcatcgaaataggaattcttatacagctatcttttgacgctacacggaagttcgacgctgggaaagtttgactacaaatggactcaacatatgacaacacaacatagcaagttttaacaaacttggcgcattccagcaagtaggatctctcagccatggttgaaggactggtaaaccggaacctgagaaatcatatgcccaagattgtcatagcaatgggggtatatcattgctggagttggccactgtgggtagacagcagttccagaagaggagcccatagataaatcgggttggccaaagtacacagaaggttggtttcttgacatattagcagactgcataaaaccaacaccatactgcataaactgtggcacaacaaaattgaagccaccaggactcacattgaagtcgtgcactgggcccctaacatacctcttgtagttacgatcatagtcaggatcactacgatccttttcagtgtccttaaaaacagcaactctggaacggctgttcattgtgttcaccttattctcatcaacaggaggctcaacattaattggttcatctctcgcaacagataaagctcccaaatcacttgtgccttcaatatcagaaatggaaccgttgaaaatgcgtgctcgtgctttgttgtattcctctatcctctcttcaacagttcttgctgcattgttcttggcaccggcatcacctgcaccattttggaaagccttgggccttggacaaataacaaacttaagcttctctgcagcttcatgctcatttcttgcttgtttgctgggaacttctgacaatgcaataactggaagtttgctttcagatgttttctttgcaactatcttgctaactgaaccatctactaagctatctgctactgtagtctctaaaccatagtgttgtgcaacacgatgagcagcacagcggagataagaagttggaaaatgctggaattcgaattcatgcagttgaggattctgcataaatttctgtatatccattgccatacgcaaaaccatgaggcggtggcgagggttgtcgagcgcctcgacgaggaagggatccacgtgcgaggtgaccctcccgtcctccgcggcggcgggcggcggcggcgggggcgaggcggcgccggagctcatcgtgcggcggcggcgggtggtggtggtggtaggggggagggggggcggcggagagagagagagagagggagggggggaagctgcgcggccgggtcgcctgcctctctcccttccttcccctctcctccgcttcccgatcccgaagcggctgcggcctccaac

SEQ ID NO: 33917 - DNA, 210 bp, Oryza sativa
  Clone ID: PAT_MRT4530_37984C.1
atgactgtaaagcctccgtccctcgccgcctctcacttctttctccccatccacaccgtgtcgaacacctgcctcgccttcgcgccgcaatgccaatccaccatggcgtggcaccgtatgaatggcgtgtcacctcgccggctcgccgcaagcagccgccactgcgcccacgcagtgcacggtcacccgcttgccatgcgctgtccctag

SEQ ID NO: 33918 - DNA, 485 bp, Oryza sativa
  Clone ID: PAT_MRT4530_37985C.1
tcgttaatgttcaccgtggaattcatgttctcagtgcaaaggctaccgatgcatatgagagtgcaagaacaaaagttgcaaattttgtcaatgcagctaatagtagagagattgtttttacacgtaatgctactgaagctatcaatttagtagcatattcgtggggcatgtccaacttaaaacaaggagatgagattgttcttacgattgcagagcatcatagcgctattgttccttggcaatttgtttcccagaagactggtgctactttaaagtatgttgggctaaccaaagaaggggttccagacattgagcagttgaaaggtcttctgtcaaacaagacgaagattgttgttgttcatcatgtctcaaatgtactcggttcaatgcttcctattgaggatattgtaacatggtcaaacagaattggtgctaaagttcttgtcgatgcttgtaaagtgtttcttatatgcctgtcgatgttc

SEQ ID NO: 33919 - DNA, 284 bp, Oryza sativa
  Clone ID: PAT_MRT4530_37986C.1
accacgcgttcgttaattccttacttagtcgctggctgactacaacatctcagaaggagtctaccctccacctgttgcatgggactccgtggtgatatgcactatcttcgtgaaagaccttcggctggtaagaccatctcttctggatgttgagaggctctgacaccattgataatgtgatggccaagattcaggacagggaagggattcccccggaccatcagcgtctgatcttcagttacaagcaccttgtaagatgaacacaccctcgccgactacaacat

SEQ ID NO: 33920 - DNA, 1251 bp, Oryza sativa
  Clone ID: PAT_MRT4530_37987C.1
ttttgcggccgcttttttttttttttttttcttattttttttttttttttttgggcaagtttcccaactgcattcaggtaaagttcccaacttaaatgggcaagtttcccaactacattcaggtaaatttcccaactttcatgggcaacagggcaagtttcccaactacattcaggtaaatcacgcaaagaggagtcacatagatgatagatcaacaactagtagctaataacttactacaaccttcatccataggaacacatggatccctcagaagacgcatcggtatgccacacgcttcccagtaagttcaccgtcatatataactttaaccacggttcccttgtcaaagccatagtagcgagcaacagcatcagtctctagcatgcgtggcaactgtgagtcttccacattgtattccttgaggagcttggccttttgatctgcactcaacacttcatgcttgggtttcaggacatgcttagtaatgtttaccagtaaatctgtggcctggaatatgtccactttaaatttaaagatctccttgatagcctctctagctctagataatattttgctctgcagtatcagaacaagcctggacaagttctcttcttttgtttggagatatatctctcggatagttgcgattttgacaggctctggtggacagaatacaagttgtaccttcttggaggggtcggagacgagggtggtggtgaaggcgaggcgttcgatcccgggcttctcagcccaccaggcgcggaactcagggagggtgcgggcgatctcggcctccggcacgctgtacccgcggtcgcggagcatctccatcgccgtccggcgcgccaggaacaggcggtggctctccacgctgccgcggtcgatcatcgatgctatgcattcggggacctcatgcacgtcgacgtcgtcgacttccatctccgccgccatggcgacggcgggagggggagcgtcgcgcgcagcagcggggacgacggcaggaggaggggcggagacagcggcgggaggggaaacgtcgtgtgcggcggagggaggggaaacgtcgcgggcaggaggaggggaaacgtcgcgtgcggcggaggcggcggcgggaggggaaacgtcgcgggcggcgggggcggcggcgggaggaggggaaacgtcgcgggcggcggtggtgctctcggcggtttctattgaggtggcggcggtcgcgctctcagccgattctattgtcgtgaaggataa

SEQ ID NO: 33921 - DNA, 211 bp, Oryza sativa
  unsure (1)..(211): unsure at all n locations
  Clone ID: PAT_MRT4530_37988C.1
aaaaacgccctcacgganatgcatgccaccaaagtatgcgccgtgngagactccagaccacagacacacttgcctgacactttgtagcgacaaatactcttatccaaatttagtatagcctttgtatacatctggtttcttcatgtaaggatcttgtaacactagtatgcccancaaaataaaaaataaatagcagaaaaaaaaaaaaaaa

SEQ ID NO: 33922 - DNA, 378 bp, Oryza sativa
  Clone ID: PAT_MRT4530_37989C.1
atgacgactgagcttgaaggtagcggatccgccaccctagccccgggaggggtgacgacgatagctggcagcgatgcttgcggtggtgggaaaaacactataagtgttggttttagctgttctagcacctatagtgccgatctgtatatgccttttagtactagtgtgcggcttgcactccccactggtcctttgcaacgaatgtgggagacaacagtattgtcatgcatggatgtggaggagaaagagaagagctcgacgacacatatgcctatcggcttgcttattaggccgaatgctgatcagccatcggtagtgtgccccagccatgccaacacccatctacggccacataggcaggacattacacctatttag

SEQ ID NO: 33923 - DNA, 519 bp, Oryza sativa
  unsure (1)..(519): unsure at all n locations
  Clone ID: PAT_MRT4530_3798C.1
gcgcgtgagatcgacgcgcggcgacttcgccaaccttccctataaagcgctgccccaatcgccaagcccaccgacctcctcctcctctccagtctccaccaccgacttcttcgtttgatctcgggctccggaggaccggaggatgtccggcgagagatgcgccgggcggccgctgttcggcggcgccatctccagtaccttccccgtccggttccaggaggtgttcgttgacccggcccgcgacgagagcctcatcttcgagctgctcgacctcaagggcgaggtagaggacggcggcagcgcgctctggttcctgcgcgacatcgccaacgagcaggacgcgggggacaacttggtagttgagcattctgggacgatcgagctaggtggtctgcgatttggagatgctcctgcagtggctggaactgcggttggtcagctggctatctcaaaaggaaggcaaggcagagaagcacagaacattgttcgactntacttggccaatatacgcctcaagaa

SEQ ID NO: 33924 - DNA, 135 bp, Oryza sativa
  Clone ID: PAT_MRT4530_37990C.1
gttatctttatacagatgcgttcctaaaatcccggccggagtgccacttttacgcgcggattctagctccatgccgccggtgagggttgtaagatgcagacagacgcctcccgtacagtagaattgtataggcag

SEQ ID NO: 33925 - DNA, 829 bp, Oryza sativa
  Clone ID: PAT_MRT4530_37991C.1
ccggccggtagcacaaagcagtcaagcaactaggtatctagctaagcagtggtgtgatcagtaggaagttgcaggtgggggatatatcaccaatggctccggtcagcatctccgacgagcgcgccgtctcggtgtcggcggagcgggtgtggaaggtcttctccgacgcgcccgccatgcccaaggtttgtgccggcttcatcgacgccattgaggtcgagggggatggcggggcgggcactgtcaccaccatgaagctcaaccctgctgtggatgatggggggtcattcaaaacacgtgtggtggcacgtgacaacgcagctcacattatcaagtcagaggttctggatgtgccggccggaagtaaggtgggcaagctcaagtcgcacgtgacagagacgaagatcgaggccgccggtgccggctcttgcttggccaagataaacgtggagtatgagctcgaggacggcggctcactgtcgccggagaaggagaagctcatcctcgacggctacttcggcatgctcaagatgatcgaggactacctcgtcgctcaccctaccgagtatgcttaaaaattgtcataaaccaaaataatatacatccatctccgtattgctgcttcctgataattaaataatgtgagccacgacaaatccaatcttttgtggtgtttgattttgtgagagtgatttgtgtttgaggttatgtaagaaataaatcataattgtgatcgtgttctaaaaaaaaaaaaaaaaaaaaatttgctgctgggaaaaaaaaaaaaaaaaaaaaaaaaaaaaaaaaaaaaaaaaaaaaaaaaaaaaaa

SEQ ID NO: 33926 - DNA, 1488 bp, Oryza sativa
  Clone ID: PAT_MRT4530_37992C.1
cccccctcgagtttttttttttttttttttttttttttttttttttttttttggccagtgacaagaacattagtatagattcagttttaacttctaaaacatgccacggggaaacactatactactactactactactactactaggtgggaaatactcagaatgatgctacgaggccaagtttccagagtaaagatgccacggcaccaaagaggttaaccagacttagtttcactagacatcaggagctgctgatacgggacgataccatcctgtcctactagtataccaaaaaaagggatcgtcatcatcgaatcatcgccatcaggagggggggcatcagggcttgagaaccagcgacagtccaaccttggaggccttgtcgatcgccttggtgtcgacctcggcggagagcgttaagaaagacttgggtctccactcgtgctggatgagggcgctgaccatgccgtggttgttgtagcgcgccttcacggtagtgagagggtccagggcgtgctgcatcccgaagctgagggtgttctccttggtcgagaagctgtgggtcagctccgctccagcagccgtacctgactctttgttcaccagatggtagtaggacgcagtgaggctgtcccctttgttgttcagcgtcagatcagcagcaagatctgaattgttgatggtcagtccagcatcgtacttggtgaagtccccagtagaagtatcaactgcaacatcagcaccgacagcaacagatttgttgccgaacacaccagaaaggttaaccaaaggctttgaggtcaggccaacaccgaggctgataccagcgtagtcatgcaggtactggagttcagccttcccagctgtctggtatggaaaaggaagtgatacgatttgcttcaagcctgatacaccaaggtcttcagttgtgattgtagttaacacatccagcatcacattattgctcttcagcttggtctggatctcgctaaagatagcttcatctttcattgtgcttgcagcagtgattaccacccatggaccgaacaaataaacccagtcaattcttcgatcaccaaaccgaaacctgacagatttaccaaccatccaacgaacaaaaaacccagtggaaacatcgtaacaaacatcaacctgacagattgaccacacacaaacaatcgaaagcaagcgagccaagatgtccacaagaaaggaaccagtaaaaagcatgcggaaatcggtaatgctcacaactccattgttggtgtaggtggtcagggtaaacttctggtccgtgtggaagtccttgtacagaagatctctggccttcttgccgatctcgaagtagaggccgggacccggcgccgcaacggcaggaggggcgtccttcttgctgacgtcggagttgaggccgggagccggatcctccacgggaatgccggtctcggagtagacgccggggaccttgcactccgtctccgcctccat

SEQ ID NO: 33927 - DNA, 428 bp, Oryza sativa
  unsure (1)..(428): unsure at all n locations
  Clone ID: PAT_MRT4530_37993C.1
gacggaagagctcgattatattacaattacagatgctcgtccattgttccaccacccaaataaaacgacattcagagatagataatcaccagaaaaactgctgcttgtcgtctctcaagtaagtcgatcgaggcaggcattaatgatggaaaatcgtcaataataaacagaaaaaaaatgaaagaaggggaatactaaatcatagcaagccttactgccgcataatagggggccggcgcattgaaaaaggaaaaaagaaactgaaaaaacaaagtgcatacatcattttacccacggncnngaagaccgnnnagccgtcatccaagattacttactnnctcagagatagnncagatcagtcggagtagagttctggtaagcgaggggaaagcacccgggagaaaggcctctgtttggatgatggatga

SEQ ID NO: 33928 - DNA, 191 bp, Oryza sativa
  Clone ID: PAT_MRT4530_37994C.1
catcgactatctaggtgataacccatgatgacgctcatggtagaatacatgtcttagagctgaacactggtgtaagccagtaggcgtcctcctgagctggtcatcgaatggttgttacccgacggcgcagggagacggtggctcgtgcgataatacattactacgcgcaaggagagatggaattgcacttc

SEQ ID NO: 33929 - DNA, 2245 bp, Oryza sativa
  Clone ID: PAT_MRT4530_37995C.1
ctagactatatatatgtggtcatcctgtggactggagctgatcccctccacctccggctcgatgcccttgaacaaccgcgcgaacacgatgaacacgacgaggtccacggcggacagcacggcgagggtgatgaaggagcggtcgaggtggccgcggtcgagctcggccaggatccaccccgccgtccctccgccggtccgccgccgcgaggcgacgccgctgatggcgctcaccatcaccatgctggcgtagttccccagcgagatggacgccatgcacagcgagctccccaggctcttcaccccctccggcgactgcacgttgaagaactccagctgccccacgtacacgaacacctccgacgcgcccatcaccgcgtactgcggcgcctgccacagcacgctcatggcgcggccgccggcgccggatcggcggcggcggtggacctcgacgaccgccgcggcgaccatgccgagcagcgcgatcacgaggcccgcgcccatgcgcttgagctcgccgacgccgcgcgggttcttggtcagcctcgccgccgcgggcaccaggacgtagtgggagaaggcgagcgtggcgagcacgccggcgacgtcgaacaccgacatgcacgcggccggcgcgttgaacaggcccaggatgtcggtgttcatggtggtgccttgctccacgaacaaggacgacatctgggtgaactccaccgagtagacgatgctgcagatccagatgggcaccatgctcaccacgcacttcacttcctccacctgcgtcaccgtgcacagcctccacgggtcctgggtgttcccggcgtggtagtcctcctcggtcgccgtcgccgccttgtcaagaaacctgagctggtcgctgtgggcgagcttgcggacgccacggatcgccgagccctcgccatcgacctcgtggaggtggtcgccgggcggcggcacgatgtgccgcttgcggtacgcggcgacgaacacctgggcgatgcgggtgagcgggttgccggcaggtcggacccggcggtagcgcggcgtgccgaggagaaagagcgcgagcgcgagcgcggcggcggcggtggagacccagaagccggcgacccaccggcccctgtcctcgaagaacaccaggacggagttgtagaagagggagccgacgttgagcgagaggtagaagaggcagaagaaggcctgcttgcgccgccgctcgccggggtcggcgtcgtcgaactggtcggcgccgaacgtcgccaccgacggctggtacccgccgttcccgaacgccgccatgtagatggacaggtagaacaccgcgacgccacgccgggacggcgccgcgcactgcctgagcccgccgccgtcgccgcaccccggcggctccaccagcaagaaccacgacaacagcgacaggagcatcaaccccacgatgaagatgaattggaacatgatgcaagtgatgtagcgccccatataggagtcactcaggaaagcacagaagagggagaagatgtagacggtgcccatccacatgctgacgctattggcggcctcggcgttctcctggtggagcacctgcctgaggaacaccaccaggcccacggcgacgccaaaaaatgcaaagttggccaacacatagctcacaagaagtagtgccattgtcatctttcctcttgaagtcttcagttctgggcttccctggaaatgttgggtctgatcttcagtgtgcacaaatgactcattgtatatcatggaattgcatggagagcatgatcccacagattcaacatcttccattggcattttagaaatacctcgccataccggagatatcgacctggtgatgttcttccggcgggtgccccaccaagagaacgccgtggccaccaacaacatcagcatatggatgggcaccatcttcatctttgccctctttagtgctttccgtagaaaaagtacactgaaggtccctcaacttgtcatcgagttacaaaatgtcccccaactacaaaaccagatatccggcgtccctcaagcggcggcggtggcagcatggcggcggagaagcggcgcgtgggcggctggggagcagacgagggaagaggtggtgcgcgtcctcctcattgaacccgtcgtcgtcgtcttcagcagcgttgacagccgcggctgtgggaagcagatagggaagtgggagcggcgacggcggcgggagtggagctcggtggaggaggcacgatga

SEQ ID NO: 33930 - DNA, 511 bp, Oryza sativa
  Clone ID: PAT_MRT4530_37996C.1
ccggccggatctaatctcgatctctccaccagtttcccccaaaaccacgcggcgccagcatcccaccttcccccatgggatcagaggcggagagatccggcctccgatcgatgacggccacgcgccaaggcgaccgtcaaccccgacgcgacgctcctcatgccctcctccgtccacgacgacgacgattacacggccaagtgggagaacatcacctacgaccaccatctgcatctgcaacctgtgggtggactacaacctctacatcgaccagatggactactaccatccccctgagtacccctatgtggacaaccacaacctcgagctgccttgtcgcaccacgacggcctatatgacaacgagcacgatcgacctactgatatcgaccacacatcataaactcatcgaatagcttaacgaaaactctctgcgtgctccagagtagatgtgttgctcaagaaacctattctgctggctaccaaggaataagaatgacaaaactcttgtg

SEQ ID NO: 33931 - DNA, 240 bp, Oryza sativa
  Clone ID: PAT_MRT4530_37997C.1
atggcggcggtggggccaaatcgcggcgacagccggaagacggagtgggcgcgacgggcggcacgggtgtgggcggtgggctacagcaggaggtcggtgatggtgcgacgcctgaagaccagcgagggccgggcgacaatgggagaggacaacggcatgtgcggcaaggctagggagataagtgtggtggtggtgtgtggccgtggagacgacgcggcacacggtggaggtgctcgttag

SEQ ID NO: 33932 - DNA, 500 bp, Oryza sativa
  unsure (1)..(500): unsure at all n locations
  Clone ID: PAT_MRT4530_37998C.1
gatgccgcttnggtnancctggattgccatacntggatgtcatccgtcttcttngggacaattcngcattgccnatcgctgcatatcaggtctcnggagagtnctccntgatcnaagctggaggancactgaacntgatcgacnaaaaaaaagtgatgatggantcnctcntgtnccngangcganccggcgcngacatcctcctgacgtntttcgcgcgtcnggncgcccacgtgctgtgcggcatgcgatccnactagcaagtcnactctgaatctgaaaaaancngaacanctnaaacccngccctctctgaaacttttgcntgtcccccngtcntcnnccngtnaggntcgttttgcactccatananancntttgtgttgtccgtnattagtgccanctttgcnaatatccttctgggaataatgttttttgtttgacngtgccncnnattggtgtgttatttgcggtgaagaaataatataatctgccantctg

SEQ ID NO: 33933 - DNA, 297 bp, Oryza sativa
  Clone ID: PAT_MRT4530_37999C.1
atgggagacgccgaggccgtccgatcttatggacgatcccgattgattccaacatggaaaaaaattcggcagcccaaccctaaccctaaaatcatttccccgatccccttcctcttcctcgcgaaaagcaatggcggcggcggtgattcgggcggagtgatggtggcggcgacgattccggcgaagcgacagcgtttccaacaagcagcaacaggttgcatttaccgcggtaaaccgcgcggttaccgcgcttaccgcgggggtacggttaatgacatctatggtcaactatgctga

SEQ ID NO: 33934 - DNA, 626 bp, Oryza sativa
  Clone ID: PAT_MRT4530_3799C.1
ggtgaacgcatcgtcgccaccacgcctcttagcccacgccgcctttgccgaacggcccttaaggtgggtaacgacaggtttctcccggtcgggcccggtggaatggaccgcatcggatcgagatcgaagaacagggggaaggaaggaaggggtggaattgaagaagatggggacgatgaggagggtggtgaaggagaagaggttctgggtcgcctccttcctcctcgtctgggctgccgcgctccaggggcacatgatgtggatgcagcgccaggacgccttcaagcaaaagttcccctccaactccaaccacgacgacgacctcgccggcgccgactcctagctaggcagctactccttccattccatcccatctagggcttactgtactaccccagtagtggagctcctcccctctacagtagtacttactttcttcttcatcacttgatgggtagtagtactccgtagtagctaatgatcgttgaaaacgagtactacgtgtttgatgaatcgcctgcctgcctaattgaattgcttcttacaaaaaaaaaaaaaaaaaaaaaaaaaaaaaaaactctccaaaaaaaaaaaaaaaaaaaaaaaaaaaaaaaaaaaaaaaaaaa

SEQ ID NO: 33935 - DNA, 192 bp, Oryza sativa
  Clone ID: PAT_MRT4530_379C.1
ctcgggacgcccatgaataccactatccgatagttctcgcgctatttgtgctcgaggtcgcgacttgctagggacgcctggaggggcgcttggtacaccgcggaaggagatcagaccgatctcaaatctttcacagtagtcgagccagctgacccttcctattgcccttgctgcaggggatgagagctttag

SEQ ID NO: 33936 - DNA, 1275 bp, Oryza sativa
  Clone ID: PAT_MRT4530_37C.1
atgaaggcctgcacaatgcatccaaaaatccacgacttcattgctacagatgtaagcagcttcatggacacatgcctgcctcttgatctggctcaccggttttccatcaacagtggggtgacactagaagggccatctcgttccagtgatatcctgtctctccttgattccctgcctggatctgatcaatggcagctgctcaaggtgctcgatctcgaaggctgcacaggcctgaagaacaagcatctgaagaacatttgcaagatactgctgctcaagtacctgagcctcaggaacaaaggtgtcactcaacttcccaagaaaatcgagaagctgcagtacctggagacattggacatcaggcaaaccaagatcagggcatttgccaagaaatcattttttcttccaatgctaaagcatttgcttgccggcaataagggctctccaagccgaaacgacaataactcgcatgggtttgaggagtcccctgcgaccgtggagcttcccagtggcacccggagaatggaaaggctggagatattgtcccatgttgatgcttccaacaatgttaatgacttaatcgacattgggcagctcctgcaactgaggaaactgggtgtgattctcgatggcaagaaagccggtaatttggcacttctgttcaaacatattgaggaactgcacggctgcctcctcaccctgtcgatccagatcaaccatccggcaacaagtgagggcactgtgcctgaaacagataaactggctaccttggtatcccctccaaaacttcttcagagccttaacatcagcggcatcacaagtgggcttccagactggatcactgagctcgaccaactcaccaagatcacactgagcaatacttacttgggagaagatgcaatccgagtattcggaaaacttagaattctacgctgcctgaggcttcggcacaagtcttacactggaaccaagctcacctttaacacggaagaattccaccatctcaagtctctgcttgttgatggctgcgacatcaccaacattgactttgtcaacatcggggcggctcctaagctcgagatgattatctggtcttttgactccattgatgcccttccactctcagggattgaacacctccccaagctgaagaagctagagctcaatggagacggagacatggctgcgatgagacgaatcagggatgcacatcccaactgtccagttttcaagcacaattcaagccatcaacgcgaagaagctggaactgactga

SEQ ID NO: 33937 - DNA, 1757 bp, Oryza sativa
  unsure (1)..(1757): unsure at all n locations
  Clone ID: PAT_MRT4530_38000C.1
atgacgatggagcaagacaccgatgatgccacaaaagaaagagcggagcgaaggagggaagagtgcaaggcaaggagctcaccggagcccaataacctcggcgccttgggaaaggaaggggatgaaagagacgggaggagaaatgaagaagaagggcaagatggtcattttatccttagattgggtgacttggcgccttgcgggctcaaaaatagcacacgaaacggagaaatctcaaacggtggtttatctccggcgccgccgccgccgccgccgccatggctctcgctctccgagctctcccccgccgcctccttcgccatcctctcctccactccatgcccctctcctcctcgcctcccgacccccgcgagctcctccgcatcgagcgcatcctctccacccccacctcctcctccaccccacccccgcaacgccaagaaggcccacgacccgccgccacctccagcctccacgagaccgccggccccaccgccgcggagtccgcctccctcctccgccgcggcctccccaccagctcgaagctgccgcaccaccaccaccaccaccgccaccgccaactccgcgacgagctccgcggcctgcgcctcggggagcgcgagatcagggccgccctcgcgtccgacgcggagggcctcctcctctccatgtcccccggggagccgacccgcctcgtggggctcgtccgcgacgagctccggtgccgggccgccgtcagggaccgggtcctcgcgggcggcgcgctcgccgccgccgtggcggcgcggcggcgggtggagctcctgcacgcgcgcgggctgacacggcgcgacgcgctgcgcgtcctcgccgccgagccgcgggcgatcctgtacggcctggaggatgtggagaggaaggtggatttcttggtgagcaggatggggttcgagattgggtggctggtggagttcccggagttcttgggggtgaacctcgagcggcggatcgtcccgcggcacaatgtggtggagcacctgcggtcaatcggcgggctcggtgacccaattgagatgaagcattatgtgaggttcagtcgccagaggttctacaatatgtttgtgaagccgtatccggagtgcgagaggattttcgggggaattgttagggagaaggggaaggaggtgaggcggtggcggcatcctgttgggctgtggaagctgtttaagccggtgaagtatgagagtacggaggaggatgtcaataatatgaaaatgcagcttcaggataagaaatacccttttttttccctcaaaggtctaagagtgctacaggaaagcaaagcaactccaacctctgatgcaacgactgaggctatcgattttgaagaatcggaattcacccgtagtggaagtatggggtttgagctcaatgattaccctggttctggtgcaaacaaccgccattcgccacactctgagggcaatagatgaagggacaaacagctgaacatggatttgtgatcaacgttataatttgccagtctctccagtctccagtctccagttcacatgttcttgcatggaaagcataagaaaacttgaacacgatgactgagatgacaaaggaagagtgccatactgccaaggttgtagtgccataatgccatttatagatcgaaaataatttgggagtactccctaacttgtatagacatcatctgacgtgagtaataatncacccagggtgcaatttttttaaaaaaaaaaaaaaaaaaa

SEQ ID NO: 33938 - DNA, 203 bp, Oryza sativa
  Clone ID: PAT_MRT4530_38001C.1
aattcggcacgaggcttctagaagctccggtggggaagccacctcgagcgacacgcggcggcgggcagagctggagaggtggggcatggcggccgcgtagaccccgcgacggagacgacagccatgacccggcgacgacctcgcgatggagacgacggcgatgacctgcgacggcggcgacggscgcccccgaccagttctgg

SEQ ID NO: 33939 - DNA, 1046 bp, Oryza sativa
  Clone ID: PAT_MRT4530_38002C.1
gtttcattacccgcaccgcctaattaagcgctcgcatctgaagccatttcgagggacgtcatggcgcggagtgccttcttcttccactgcgtcgccgccgtcgcggcgtgcatcgccgcgacggccgcggcgctcagtggcacggccacgttctacggcgggagcgacgcctccggcacaatgggcggcgcgtgcgggtacggcaacctgtactcgacggggtacgggacgaacacggcggcgctgagctcggcgctgttcaacgacggcgcggcgtgcggcgagtgctaccagatcacgtgcgaccagtccaactcgaagtggtgcaaggcgggcacgtcggtgaccatcaccgcgaccaacctctgcccaccggactactccaagccgagcaacgacggcggctggtgcaacccgccgcgccagcacttcgacatggcgcaacccgcctgggaacagatcggcgtctaccgcggcggcatcgtccccgtcaatttccagagggtgtcgtgcacgaggaaaggaggggtgaggttcaccatcaacgggaacagctacttcgagctggtgctgatcaccaacgtgggcgggccggggtcgatcaagtcggtgcagatcaagggaacaaagacggggtgggtgaccatgtcccggaactggggcgccaactggcaagccaacaactacctcaacaaccaggccatctccttctcggtcacctccaccgccggcaagacgctcgtcttcgaggacgtcgcgccgtccaactggcagttcggccagacattcaccagcggcgtgcagttctactagctagcggctcgcgcgcgcgcgcggcggcgcatgagccgccgacgccgtcgcgcgcttgcccaacggcgagcggcgcatgccacctgccgccatttccgttcaatttttgcatttggaaaacttgtcaaaaagaccagcttatttagcatcattctgattgggaaaaaaaaaaaaaaaaaaaaaaaaaaaaaaaaaaaaaaaaaaaaaaaaaaaaaaaaaaaaaaaaaaaaaaa

SEQ ID NO: 33940 - DNA, 1447 bp, Oryza sativa
  Clone ID: PAT_MRT4530_38003C.1
caccatccagccgttgaagaagcaaccaatggctggattaaggtcatagcgcttccaatcctcctcctccttcctccgctcgccgtcttctcgacgacgacccgcggccaccgccgcgccgccctcctcgccgccgccgccgccgccgtctccgaaatctgatcgatggcgccgtcgtcgacgtcgtcggagggtgcctccgacgagtggttgccacccagccggcggccggagctggcggacgtggtccccgtgacgcaggacgacgggccccaccccgtggtggccatcgcctaccgggacgagttccgcgaggtcatggactacttccgcgccctctacttcgccggcgagcgcagcgtccgcgccctccacctcaccgccgaggtcatcgaccttaatcccggcaactacacggtgtggcattttaggcgtcttgttctagaggcactggatgctgatctgcgtgaggaaatggattttgtggaccgaattgctgaatgtaacccaaaaaattatcaaatctggcatcacaagagatggcttgcggagaaattaggaccagatattgcaaataaagagcacgaatttacaaggaagatactttctatggatgctaaaaattaccatgcttggtctcataggcagtgggttcttcaagcactgggtggatgggagactgaactacagtattgcaaccagctgcttgaggaagacgtcttcaataattcagcttggaatcagagataccttgtaataacaagttcaccacttcttggaggccttgcagcaatgcgtgactcggaagtggattacacagttggggctattctggctaaccctcagaatgaaagcccctggagatacctcaaaggcctgtacaagggtgaaaataacttgctgatggctgatgagcgcatctctgatgtttgtctcaaggtcctgaaacatgattcgacctgcgtatttgctttgagcttgctgctcgatcttcttcaaattggtttacaaccttcagatgaactcaaaggaactatcgaagcaataaagaactctgatcctgaagcagatgaagcagtagatgctgatcttgcgactgcaatctgctcaatattgcagagatgtgatcccctgcggataaattactggtcctggtacaggaccactatttcttctcaaacctgaagcatgcagtggcctccatgaggtcataatggagatatcttctatcttcgtgtgattctgggcgttgaggtgcctagctacatttgttatgaactttccttgggcataactgatcactgatattactccaatattgtgttcttgtgcatcgtatgttattccagatattatattgggttgcaattccttgtgatgtaaaaaaaaaaactctcctcgtgccgaattcggcacgagggacactggccacaccacccaccaactg

SEQ ID NO: 33941 - DNA, 492 bp, Oryza sativa
  Clone ID: PAT_MRT4530_38004C.1
gttgacttcaagattcgcacgatcgagatggacgggaagaccatcaagctgcagatcgtgagtgtctctcgccgatcccctgaaacctcttcgcgattagcttccgagcagagcagcgcgcggcggcggcggcctatctcgcaccgatctcttcgtcggtaatcgccggccgccgccgacccggggccgtcggagagagagagtggattctcgccggattgtctcgtagatggccggcgatgctgccgcgtgcgtgtggggccgaagccgagggaggttgtgcccgcgtggctcgccggagctccgccgccccgccgcgtggcggggtggcgccgtggcggtgcgagggacacaggaggatggtgagacgagtatggccttgtttgaatgggcctcaacgcggcccatgatatcggtgggctcgtattgaggcccatctaaaagaggcctaagcgagggccttttccgcataaaacctgatgccctccatct

SEQ ID NO: 33942 - DNA, 2010 bp, Oryza sativa
  Clone ID: PAT_MRT4530_38005C.1
atgctgcgtgcagaaagcatccgacccaacgcacgccgcttgacaggacaggacgccgccgccacgggagacgaccgccaggacaccgccgacgtgggggcatcagcacacaccgtcgcctgccgcctggggagggatgccgccggagatgggggtggcggcgaggacgacggcgcggtggagaggcagggagcgacggcgctcgcagaggagaccggtgcggtggagaggcgaggggcggcggcgcggcgcggcctggcttatggcgcggcggctggatgtggccggatgcgaccggaggccaggacgacaccgcccgcagccatcaagcccctacccgccgcacatctctcccaccggtcgagctcgccgccgccgtctgcgccctgcatgtcgagctgctcatcgtcactgtctcaatgccgcgcgaacgacgactaccaggggctccgcggccgcgcgcacgatgatgatgtgggcggtggtggcacggcgcagcggtcggcgttccacactatctgccgcgtgcttcactacttgaagcgcttcctggtaatgaacccggagcagccggactcggctagaccggcggtggactacctcgacatggatgcgcagctgctggggaggttcccagagtgggaggggaacggtgtcgccgacgtgccattcgagatgtacgcgtacagggtgatggagagggacaagagcaacgcgtgtagggacaggagctctgactccggcagcgacgacaactcattgtgtggagatgacagcgtcagcggcgggtccagcacgacgacgacggtgacgaacgcgtcggcgtcggcgtcgagccggccaatacttgaccggagaggtagcacgaggtcgtcagcgccgcggcgcaaggtggccatcgccgccaccaaggcaggcaagtgtcgcagcgccactgctgccatgggcgagcccgtggtccccccgcgcgcccccgcggcccacgccgcggtcgcggcgccgaagccgccgggagatgcggtggcggcggagggcgaggctagggcgccgccgcggccgccgcctgcagtggcggcgggtgcgggggcgggggcgagcgggggagggaggcgggtgttctccgtggagctacggcccggggagaccaccattgtgtcgtggaggaagatgctcaaggaggctgacctcggagctgccttgccgcccccgccgccggcggcggcggcacagccggcggtcgcccccctccctggaccatctggtgcggcaaatcaaggaaaaataccagaacatgagctgatcaatcgcctcatgggcatagttggccaccttgtgcaccgtaggacactgaagggtgctgaacataaggttgaatctatagatggctttcaggatcctgttactcatgatgacagaatggccttgagaggaaaatctgtcatggatgctgtattggaggacaggatctgcgacctgtatgatctgtatgttgaggtccgcaatgaccagaggatgaagaggagaaggctggctgctgctgccaagttgcgtgacagcgaccctgccgccccacaatctgcacagtccctgcaaaatatgacaagcacccataccatgtatcctgtggttaacaatggaaatagtcagagtagcagaagtgtcgacaaagttaatgaaatgagcgtcggtgcaggatcggatggcaacaggagttctaccagcatgaagaaacgaaaaatagactctgaagataggcaagttaacccaccgaaggctactgctgaacttcatcatcatggtattgaaatacagaagccggcaaagcgtgcagatgaggcaacaaagagcgccgcggccactggcgacttgcaatggagcatcagctttcggggaaattggggaggaggacagccatcgccgaagcgttcgtggccatacttcttctggggccattcccaacccaaccacaacgcggcaaagaggcagcctgtgggggaggcgaaggcatga

SEQ ID NO: 33943 - DNA, 292 bp, Oryza sativa
  Clone ID: PAT_MRT4530_38006C.1
tagtccctggcgatctcgttgctgggatttggctcgtttccgttatcttcacgatttggctcgttgctgggtgtgtcgcctccggcagtcatgaacccggtggtggatgacctgacaaccgagttcaggatgtcttcgatcctcctctcgacggcgaccatggttgggcgcacatcccggctgctattgacacactgctgcaccagccgtatgaactcccagaacccatcggtgcttgtggcgtcccggatcgctcaagatcaaccgcatcacagcgttcggcagcccatcg

SEQ ID NO: 33944 - DNA, 663 bp, Oryza sativa
  unsure (1)..(663): unsure at all n locations
  Clone ID: PAT_MRT4530_38007C.1
cggacgcgtgggcggacgcgtgggagaaaccgacccgtctccgcctcatccaccgctccgccacgatgctcgcgaccgccgccccgcgcctccgcgccgccgcgtggggcagcctctcgccgccggcgccagtgcgggcgcagttcgtgagtctcccgctcagtctccccggccgctacgcctcgctgcgcctgcgcgcctcggcggcggcggcggcgaaggaaggggcggaggagatggggttcgaggagatggcggccgggacgcggaggcgctactacatgctcggcgggaagggcggggtcgggaagacgagctgcgcggcgtcgctggccgtgcgcttcgccaacaacgggcaccccaccctcgtcgtctccaccgaccccgcgcactccctcagcgactccttcgcgcaggatttgagcggcggggcgctcgtgccggtcgaggggcctgaggcgccattgtttgcgcttgagataaatcctgagaaagcccgagaagagtttcgtgcagcaagtcagaagaatggagggactggggtaaaggacttcatggatggcatgggactggggagtgcttgctgagcagctgggggagttaaaactggggggagttatttggacacaccaccaccaggattggatgaagcnatagcgattt

SEQ ID NO: 33945 - DNA, 246 bp, Oryza sativa
  Clone ID: PAT_MRT4530_38008C.1
atgcctccgcgcggttccgccggccaaagggcacgcacggacgcggtggtcgcaaagcccagcgccccgcgcgcggctggcgtctcgacagctcacgatctcacgctgcctttccatccaaccatcgtcctctggccggccggccggtgcagaggcgggtacgagctagttacctacctacctaggcatgcatgcacggttccatggcggaggaggagggagaatgggagagacaaggttgcaggc

SEQ ID NO: 33946 - DNA, 1172 bp, Oryza sativa
  Clone ID: PAT_MRT4530_38009C.1
gccttttccactgttccgccacgatgctcgcgaccgccgccccgcgcctccgcgccgccgcgtggggcagcctctcgccgccggcgccagtgcgggcgcagttcgtgagtctcccgctcagtctccccggccgctacgcctcgctgcgcctgcgcgcctcggcggcggcggcggcgaaggaaggggcggaggagatggggttcgaggagatggcggccgggacgcggaggcgctactacatgctcggcgggaagggcggggtcgggaagacgagctgcgcggcgtcgctggccgtgcgcttcgccaacaacgggcaccccaccctcgtcgtctccaccgaccccgcgcactccctcagcgactccttcgcgcaggtcgcctcccccgtcgagcacctgctgtctcggttcgaggatttgagcggcggggcgctcgtgccggtcgaggggcctgaggcgccattgtttgcgcttgagataaatcctgagaaagcccgagaagagtttcgtgcagcaagtcagaagaatggagggactggggtaaaggacttcatggatggcatgggactgggagtgcttgctgagcagctgggggagttaaaactgggggagttattggacacaccaccaccaggattggatgaagcaatagcgatttcaaaggttatgcaattccttgaagcacaagagtatagcatgtttagacgcattgtttttgacactgctccaacgggccatacactccgtttattatccttgccagatttcctggatgcatctattgggaagatcttgaagcttaggagcaagatcgcttctgcaacatcagctattaaatcagtttttggacaagaagttcaacagcaggatgcagtgatggcaataagtgaatcagcaagactacattcttccctaagaaatgaaagtgttcccgttaagagactcattgttaaccaaattctaccaccttcgtcatcagactgtaaattctgtgctataaaaagaaagggccatttaccatcttctttcatccaggatcaaacacgtgctttggatatgataaggaatgatccagagctaatggggctgaacttaatccaagcacctcttgtcgacatggaaataagaggcgttcctgctctgaagtttttgggcgatatagtatggaagtaa

SEQ ID NO: 33947 - DNA, 1356 bp, Oryza sativa
  Clone ID: PAT_MRT4530_3800C.1
atggcgcaggcggtggtgccggcgatgcagtgccaggtcggggccgtgcgggcgaggccggcggcggctgcggcggcggcgggggggagggtgtggggagtcaggaggaccgggcgcggcacgtcggggttcagggtgatggccgtgagcacggagaccaccggggtggtgacgcggatggagcagctgctcaacatggacaccacccccttcaccgacaagatcatcgccgagtacatctgggttggaggaactggaattgacctcagaagcaaatcaaggacaatatcaaaaccagtggaggacccctcggagctaccaaaatggaactacgatggatcaagcacagggcaagctccaggagaagatagtgaagtcatcttatacccacaggctatattcaaggacccatttcgaggtggcaacaacatattggttatgtgtgatacctacacaccagctggggaacccatccctactaacaaacgtaacagggctgcacaagtattcagtgatccaaaggttgtcagccaagtgccatggtttggaatagaacaggagtacactttgctccagagagacgtaaactggcctcttggctggcccgttggaggctaccctgggccccagggtccatactactgcgctgtaggatcggacaaatcgtttggccgtgacatatcagatgctcactacaaggcatgtctttatgctggaattaacattagtggaacaaatggagaggtcatgcctggtcagtgggagtaccaggttggacctagtgtcggtattgaagctggagaccacatatggatttcaagatatattcttgagagaataacggagcaggctggtgtagtgcttacccttgaccccaaaccaattcaggcggattctgtaatttgttttgttattagactacgtttaatacttcaaatcaccaagagtatgcgtgaagatggaggatttgaggtgatcaagaaggcaatcctaaacctatcacttcgccatgacttgcatataagtgcatatggtgaaggaaatgaaaggaggttgacaggtttacacgagacagctagcattgacaatttctcatggggtgtggcaaaccgtggatgctctattcgggtggggcgagacaccgaggcgaagggaaaaggctacttggaagaccgtcgcccggcatcaaacatggacccgtacgtcgtgacagcgctattggctgaaaccacaattctttgggagccaaccctcgaagcggaggttcttgctgctaagaagttggccctgaagtttctagaaaaccacgccaccttccattcgccagttaacattttggttgaacaccacacttga

SEQ ID NO: 33948 - DNA, 3155 bp, Oryza sativa
  Clone ID: PAT_MRT4530_38010C.1
cccgggcggtgggtttttggcgtcactcgcttctctctctcccctacgcgccgccggcgagatgcggagcctcgccgtcgcgagccccctcccgcccgccgccgcggttcgccgccggccacgcgcatccgcctccggaagggaagtgatttcacaatgttggaagtgtgagataaatcaggaccaacctttggggaactccctaaggataggtcactcacaaggtagtttgcaaagacatggttccaggaatttgctcgcagctgctgcggctatttcaattgaacaagctgaagtcagtacttatcttccaaaaggtgacatgtggtctgtgcacaagtttggtggcacctgtatgggaacaccccagagaattcagaatgttgctgatattgttcttggtgactcttctgagaggaagctgatcattgtttctgcaatgtccaaagtcactgacatgatgttcaaccttgtgcataaagctcagtcaagggataattcttatgtgactgcactggatgaagtttttaataagcatatggctgcagcaaaggaacttcttgatggagaagacctagcaagattcttggctcagttgcattctgacatcagtaacctgagagcgatgcttcgtgctatttttatagctggacatgcaacagaatcgttctctgatttcgttgttgggcatggagagttgtggtcagctcaaatgttgtcgtatgctataaaaaagtctggggtgccttgcagttggatggatacaagagaagttctagtagtgaaacctagtggttctaatcaggtcgatcctgactatttggaatctgagaagcgactccagaaatggttttcacgacaaccagcagagataataatcgctactgggtttattgccagtacagccgaaaacattcctactacgcttaaaagggatggaagcgacttctcagcatcaataattggatcccttgttagggcatgtcaggtcactatctggactgatgttgatggggtatttagtgcagagcctagaaaagttagtgaggctgtgatcttaagcacattatcttatcaggaggcctgggaaatgtcatattttggtgcaaatgttttgcatccccgcaccattatacctgtgatgaaagacaatattcctattgtcattaggaatatgttcaatctatctgcccctggaacaacaatttgcaagcagcctgctaatgaaaatgctgatttagatgcttgtgtcaaatcatttgctactatagacaaattggcccttgttaatgtggaaggaactggaatggctggtgttccaggtacagcaagtgccatatttagtgctgccaaggatgttggagctaatgttatcatgatatctcaggctagcagcgaacactcggtatgctttgctgttccagaaaaggaagttgcagcagtctctgcagccttgcatgttaggtttcgtgaggcattatctgcatggaaggctatctaaggtcgaagtcattcatgattgcagcatccttgctgctgttggcctgaagatggcaagtactcctggggtcagtgcaaccctttttgatgcacttgcaaaggcaaatattaatgtaagggcaatagctcaaggttgtagtgaatacaacatcactgttgtattgaagcaagaggactgcgtaagggctctgagagctgttcactcaaggttcttcctctccaaaaccacacttgctgtcggaattattggacctgggttgattggtcgtactctccttaaccagctgaaggatcaggctgcagttcttaaggaaaatatgaacattgatctgcgtgtcatgggaatcactggttcgaggacaatggttttgagtgatacaggaatagatttggcccattggaaagagcagctacaaactgaagcagaaccagccaaccttgacaagtttgttgatcatttgtccgagaatcaattattccctaacagggttttggtggactgcacagcagatacatgtgtagcatgccactattatgactggttgaagaagggtatccatgtcatcacgccaaataagaaagcaaattctggtccgcttgatcggtatctgaaattaaggactctgcagcgtgcatcgtatactcattacttttatgaagcaactggtggtgctggccttccaatcattagcaccctacgaggtcttctagagacaggtgacaagatattgcgtattgagggcattttcagtgggactttgagttatattttcaacaattttgaaggtacacgaacttttagtaatgttgttgctgaagcaaaagaagctggatatacagagccagatccaagagatgatctatcaggaactgatgttgccagaaaggttattatccttgcaagggagtctggtctgaggctcgagctttccgatattcccgtaaagagccttgtgccagaggcactgaggtcatgttcgtcagcagatgaattcatgcagaagctaccgtcctttgatcaggactgggacaggcaacgcgatgaagctgaagctgcaggagaagtgctgcggtatgtgggcgtggtggacgtggcgaacaggaagggccgggtagagctgcagaggtacaagagagaccaccccttcgcgcagctgtccggctccgacaacatcatcgccttcaccacgtcgaggtacaaggagcagccgctgatcgtgcgaggccccggcgccggcgcggaggtcaccgccggtggcgtcttctgcgacatcctgcggctggcgtcctacctgggagcaccctcctaggctttaaccttgagcgtcctgccttcctcgacaaaaattgtctggaggaagatgaggcgtattgattgtgcccgactggttattacatcatatatgggactggtagtatgcagtatgtatgttgtttctgaataagtgcgaggaaataaggtcttagaggtgctagatggtccttggatcaggtgttgtttttgccacacaatccagagccgcttgctatcgaactgccacattgtattggtgatttggagtgatctaataataatggcttaaatttctttttgctgagatttggagtgatctaataataactggcttaaatttcttttaaaaaaaaaaaaaaaa

SEQ ID NO: 33949 - DNA, 366 bp, Oryza sativa
  Clone ID: PAT_MRT4530_38011C.1
atgacggtgctgttgacgattggggagaaggagaaggtggaggcagaggggaaatgggagtggagggcgaacttcataataccccgcgaccagtggttggtttctgcttctgcttcttcttctagcttcctcccctcccagttagcagcggcggacgtcgacaacggcgggcagcgaggccatgaacggcgcggcggctcgccgacacatcttcctcggagtggtgctggcgttcttgctcttcttactgatgtacaaaacgctggtcccgagagcgtggccctttcgtacggcaactacgacaagaggccaccggagatgaggaagaagagctacgtcatcttcaccaatgggcagggtcgctag

SEQ ID NO: 33950 - DNA, 207 bp, Oryza sativa
  unsure (1)..(207): unsure at all n locations
  Clone ID: PAT_MRT4530_38012C.1
ggcgaaatgtacgcgatgncgaacgactccctctgtcgtcgtcgtcacggagggnacaaggcgncgtgcgagatccaacgtgtggctccgcgtgnggtcntacagntccgtccgtgacctcgnacgncgngcggnccaanccccattntcccgngcacggnnggatccggatttcttctgnttgnggccaacgggaagtccgtcaaa

SEQ ID NO: 33951 - DNA, 613 bp, Oryza sativa
  unsure (1)..(613): unsure at all n locations
  Clone ID: PAT_MRT4530_38013C.1
tttaaaataaattttttttttttttaaatatnaaaaacaactttttttctatttatatcacccaaagtttcacatttcacatatnatnatatctnaccttatttttaacttcccaaccactatacttttttttctcattacaggggtgcgccaannttnttttttgggctttttttaccatannncctagggttgataccatatctaaatggcaccttcaaagccaacagagctttagcttgagccagattccaatcaaagtngagatcaccaaactgctggagttgtagcttctgccctatggcctgaacaatgttaatgtcctgatagttttttttttgcgccccccgcccgaactgttgcccgacttggttgtttctcaattgaaaccccncttattgcaaaaaggggcttgccgctttgccctactgcttccttaccaactcattttatgggcttaacacccgntgctggancaggacaagcgactgcanctgatattgcctttaactttgacctaaaactnaaactgcccaaaagcncctcttccncaatncccagggggcaaaaccaaaagatcttatttctgcgggacactaactttttatttgct

SEQ ID NO: 33952 - DNA, 171 bp, Oryza sativa
  Clone ID: PAT_MRT4530_38014C.1
atggagcggggcgggccctacgacggcctctgccgcttccagattcacctaggcacgagaggggactgcccgctgccttgcgaggagtggggccaggccatggaactgcctgccatttccgtggaatctggccatctgggcctatctatgtgggctgatgacagttcgtga

SEQ ID NO: 33953 - DNA, 886 bp, Oryza sativa
  Clone ID: PAT_MRT4530_38015C.1
gcacgaggcccgcttccctcctcatcaagataaggcgggaaaccccgcggcggctgcggttgcgtggatggttcgggaggcggccgatggaggcaagatcgatggacaggctgagcgtgcaccacaacggcggcggcatctcgaagccgtgccacggcggcgggaagggcggcggcggcggcgggaaggggagcaggggaggcggcgggaaggggatcaaggtggtgtacatctcgagccccatgaagctcaccgccagcgccgaggagttccgcgccgtggtgcaggagctcaccggccgcgactccaacgtcgccgaccacgacctcgaccatcaccaccaccaccaccagcagcagcgctaccactccttctcctcctcctcgttcggccgcgcgtcgatgatgatgccggcggctgcggcaggcggcgtcgtcccccgctccagcatgccgcccacgatggcgaccgcgaacgccgccggcgcggggcggatgatgatggcgacggcggatgccaccggtggtggcgccgccggcgtcatggccacggcggcgcccatgccgttccagagcgtgtacgaccatgggagcttgctatacggtcaagactactggtaggctggtagctagctacatcgatcggagctccgtttccttctacatgccacaccaccatggatacgagtatatataccgtatatatactgctttctgctgtgcatgtacgcttgcttctgccttagttattggttcgatcatcttgtacttcccttgtacgatcatactaatatgttgttaatatagaggagaggtttgtaattatgcgttcgctgtctcaacttttaactgatcaactggatatttttcttcgtcttaaaaaaaaa

SEQ ID NO: 33954 - DNA, 1628 bp, Oryza sativa
  Clone ID: PAT_MRT4530_38016C.1
atggattatgatgagctcgacagcatggagcgggagacgacagcgacaccaatggcacggtcactcttcctcccctcgcatcacgtcgcggtcactccctacaagctccctgacgcggccacctctaccctcatcacagcggtgcctcgaaccgagcccggcacgaggaaaacgaaagcagcaaaagtcacacacacactctctctgctactcctactactactcttctactgctccactctgctctgctctccgctcccattccctgcggattctatctctctcttctccaattcgcgcgggctcgggcgccgcattggcgcgatctccggattgtgagggggtttgttgtcgaattgtggggggaattgtgggtgctggttgggccgatctcgtcgctggagcaggaggggtttcaagatcggtgcggttctgtgtggttattggggattgttgtgatcgagattcggcttcttgcggtatggcgaggatgggcgaattgagggggaattggagcgaatcttgggtccccaatgcttgatctctgattcttgggaagtacattctccagattggtgcgatcccggcgtgaattttggggaatttctcggatcaagaatttggccaattgtccctgcaagaaacaggggaaattgggggccaatctggtgccaattggggagtaatttggaggtggaggcgatcgatccggccggggagatgattgcggcggtcggccggggaccggagggatggggggaggacgagatgtccgtgctaccgcggcataccaaggtggtggtcaccggcaacaaccgcaccaagtcggtgctcgttggcctccatggcgtcgtcaagaaggccgtcgggctcgggggatggcattggctggtgcttaccaatggcatagaggtaaagctgcaaaggaatgctttaagtgtgattgaacctccaactggcaatgaggatgatgataagtttgactgtgagaacatgcagtggaatagttcagatctggcatccgatgacgcacaatcaccaaagccacagaggtcaaggagcaggcagcatagagggttccagaccaaatccttcagccgctccatgtcttgtgattcccactccaaggcgtcattttcttcctcctcaagggctcacacgaaagttgacctgagcaagctggaaatgactgcattatggagatattggcgtcacttcaatctcgatgctagccctaacccatccagggagcagttagtggatgctgtccagaggcactttgtgtcgcagacgtagctgcaaagaggctgaagacaaacgtgaaagtggcctgatggagagaactggttgtcttcaactaacagattcaagataggatgcaacatgtttggtcaatgttggccatgctatgtaatatatgtgcatgaggctgcttagatttggatggctagattaatgcccaactagaactctcttggttcatcgtctttatgttagctccctgtgatgtagatatgcagtatgctggcaaaggatcttgcaacctctagctcagttatctcctgctgactggatgtgaattgacatgacaaattataaatcagcttctcatatttacccaaaaacaa

SEQ ID NO: 33955 - DNA, 643 bp, Oryza sativa
  Clone ID: PAT_MRT4530_38017C.1
cccacgcgtccgcaaagccacagaggtcaaggagcaggcagcatagagggttccagaccaaatccttcagccgctccatgtcttgtgattcccactccaaggcgtcattttcttcctcctcaagggctcacacgaaagttgacctgagcaagctggaaatgactgcattatggagatattggcgtcacttcaatctcgatgctagccctaacccatccagggagcagttagtggatgctgtccagaggcactttgtgtcgcagcaattggatgagttgcaggtcatcgttggtttcgtgcaggctgcaaagaggctgaagacaaacgtgaaagtggcctgatggagagaactggttgtcttcaactaacagattcaagataggatgcaacatgtttggtcaatgttggccatgctatgtaatatatgtgcatgaggctgcttagatttggatggctagattaatgcacaactagaactctcttggttcatcgtctttatgttagctccctgtgatgtagatatgcagtatgctggcaaaggatcttgcaacctctagctcagttatctcctgctgactggatgtgaattgacatgacaaattataaatcagcttctcatatttacccaaaaaacaaacacaag

SEQ ID NO: 33956 - DNA, 978 bp, Oryza sativa
  Clone ID: PAT_MRT4530_38018C.1
atggtggcgcacggtgttctcccggcgaaggaaatcatcggctggcgtccggcgtacggtgaagccttcccaacccctgacacacatgaggtcgttgtattctcccacttcttctatggtttccaactccggggcactttgagccaaaaatactttttcatgccttttgaaacatccaacaagggttggcatgcaaattggttctatgtccaaaaccttgaaccggcgcttcccgagtactcatgtcttcccccaaagtatcaagaaacatggaattcacttccaatgggagatgaggctactcaagctctcactctgctgaatcgtctgctgaagctcaaggagcaaggtatgcaaggggagcaaatcactcggcattttatcaaaagccggctggcgcccatcaaagagagatctcgtactggctttgaatttgatggtaaaaatgatcccaatcgtaaagatcctgagtccctcgaattcaagattaagaaggagatgatgaagccatcagacattgatccatatgggaaggactttgattcggctgtaaattccgagacagctgctaaagaagctggttctgctactgctgctaaggccgaaccttctagagaagaccgccggaatgaggccagtacttttgacaaggtagaggggcctgctcgtccaccgccgaagatcataacaggacaaagtcctcatcttcaacctccagcagcccgatggactgggagcttggccatggctttggcgagctcgtcggcgacgattgatggctcgattgggaatgaggaaggcatgcacgagggttgtgaggtcaaggagatggtgtatgcgctaggaatcgaacaatggctcaccgaggcagcggtaatcaacgatgacggcggaggcgatcctagatcggcgctgggaagaaaagatgtgttctccgtgatcttgatgtttccggctggggttcttgaggcgtcttga

SEQ ID NO: 33957 - DNA, 507 bp, Oryza sativa
  Clone ID: PAT_MRT4530_38019C.1
tctcagtgctagggctagcttgcttgtcgccgtcgccgccgtcgtcgccgccgcaatggatctcgtgtcgccgtccgagcacctgtgctacgtgcgctgcacctactgcaacaccgtgctcgcggtaaactcctcgagaaaccggagcagcggcttagcttcgcatgcagagaacgatcgatatatgctgctgctagctgcagctgcaccatggccttcgttctttggttatcttttgaattggacaagagagcaaagaacaaagtgttggttctgtctcgtgatctcctgctgctgcagattgcagagagggctctcactttggtttggtccaatcctttggcttgcttaatgtgcatcatggcatatgcttactctcacacaggacacagtgagagagagctagctagatagctgggaccaaatccagcttcttgcttgctctctctgtgtcctgaggagctagctgctcagctagtggaaacttccactgggattgttcatgac

SEQ ID NO: 33958 - DNA, 237 bp, Oryza sativa
  Clone ID: PAT_MRT4530_3801C.1
atgggcttaccacggcgcagcgcggatccccccggcggcggcggaggaggaggaggagatgttggaattggattcgtggaggtggctggtggccacggcggaggggaggggagcgtgtggtccggtgcactgggccactggggtgatcatcgatatgctggtgcaccagcaaaggaatacagggaggagaccggcgcaccaggcacgttaggccttgtagaagaaacaggcatctga

SEQ ID NO: 33959 - DNA, 513 bp, Oryza sativa
  Clone ID: PAT_MRT4530_38020C.1
atggcggccggcggctatggcgaacgggcgcgattaaagtacagggaagcacctaaggactatgaggaggttttgggcggaggcggtccgaggtggcatggcgacgagctcccgaggcggaggtcctatgagcctgatggcgcgaggaatcgagaggaaactcaccgaggcgacggctcggtgtgggttcggcggcggcactctgtttggccggcggggggcgcgacggtcgcgctgccattcccggcgaaccagagggtttcggtcttcggctttgggtgtggaggcggtggtcggcggggaacacagcttgtagcaggcgccggctttgcgcagggatatcagagggggtgcagggttagtcagagggagccaggggcggtcggtctcgccttgtcgctttgggcgtcggctttggcagggggcggcggcattgggttggccacggcggctgcggtggtcggcgcctgggcgcggcagggaagtggcagggacggcgtcggctttgtgtag

SEQ ID NO: 33960 - DNA, 303 bp, Oryza sativa
  Clone ID: PAT_MRT4530_38021C.1
gggcaccaaacatggcccgcctggaatataagtcacaacgacgttgaaaactaacttacagcttcaaccctgttgcactactattaaaaaaaggaatgccaggatgtttaccttgacttctgttgtatagaaggcgcaaacctaattagcggaagatcaaatctcggcctctaaaaccactatggctttcctaagcccagacccctgggccgtaccgggggtacatccgggaattacagtccggctcctgctgggggtccaacttgaaatctttagaggcggattcaagcctggcttaatcat

SEQ ID NO: 33961 - DNA, 289 bp, Oryza sativa
  Clone ID: PAT_MRT4530_38022C.1
gtgtgagagccttagtggctctccatgcccttcactccagcacttggaaagctccatcaatacctatccctctcctcgctgacattgtaaaatatcacatgcacatgtccactaaatattcaaataacaaatatctaccttcaaagcactattcattatttccttcaaaaccaacaaacagcactaaacaaacattgaatcttttcactcctacatcaacgaacatgctttcaacaacattacacacctactccaaaatcttaacattatactctaaacaactctcaat

SEQ ID NO: 33962 - DNA, 1464 bp, Oryza sativa
  Clone ID: PAT_MRT4530_38023C.1
atgctggtagctctactaaccatcctcgccaccgccgccgccgccgccgccgccgccgccgtggcgtcgtcgtcgctgcgccgccgcaagaatcagcctccgggctccctgggcctccccgtcgtcggccacaccctcgccctgctccgcgccctccgctccaacgccgccgaggactggctccgccgccgtgccgccgcctacggccccgtctccacgatctccctcttcggccgccccacggcgttcctcgccggcgcctcctgcaacaagctcctcttctccagcgacaagctcgccgccatgagcagcgcctccttcctccgcatggtcggccgccgcaacatccgcgaggtggccggcgacgaccaccgccgcgtcagggccatgatggcccgcttcctcaggctcgacgccgtcaagaactacgtctcggccatggacgacgaggtccgccgccacctccgcgccgagtggggcggccgcgccgccgtcgcggggatgccgtcgatgaagtcgctgacgttcgacgtcatgtgcaccgtgctgttcgggctggagaggcggggcgaccacgccgccgtgaggcgtgagctctcgtcggagttccagcagctggtccgggggatctgggccgtcccggtgaacctccccttcaccaccttcggcaagtgcctccccgcgagccggcgcgggcggcgccccgtggcgtggatcgtggaggagaggcggcgagcgatgccgcgtggcggcggcggcggcggcagcgcgggcgacctggtgacgcacatgctggccgaggggatggacgaggaggagatcatcgacaacgtcgtgttcctgatggtggcggcgcacgacaccaccgccgtgctcctcaccttcctcctccgccacctcgacggcaaccgggcggcctacgagcgggtcgcggcggagcaggaggcgatcgcggcgcagcggcggcgcaggggaggctccggctccgccctgacgtgggacgacctcgccgggatgaggtacacgtgggcggcggccatggagacgctgcggatggtgccgccgacgttcgcgaacatgaggaaggcggtggccgacgtcgaggtcggcggctacgtgatacccaagtggtggcaggtgataaccgcggcgacgatgacgcacctggacccgaccatcttcccggaccccggcaggttcgagccggcgaggttcgaggcggcggcggcgaagtcggcgcccccgccgttcagctacgtgccgttcggcggcggcgcgcgcgcgtgccccgggaacgagttcgcgagggcggagacgctggtggccatgcactacatcgtcaccgggttcaggtggaggctcgccgccggctgcgacggcggcttctccaggcacccgctgccgtgtccaaaccagggcctcctcctcgacatcgagcccaaagaatacaatgaattgtgctga

SEQ ID NO: 33963 - DNA, 463 bp, Oryza sativa
  Clone ID: PAT_MRT4530_38024C.1
tggaatagcggagttagttctgtatgaagctacgattgtttatctctgtttcaagaagctttaaggaacaatgagctcaagtataatgggaagacaattgcactgccattcaatatgtcagtcttcaagtgggccactgagacccgccgaattcttgaggatgctgaattaccagatactgtgagcttttataatatatatgggacatcttacgatactccatatgatgtttgttacggctctgaaagctccccaattggagatctgtcagaagtgtgccacacaatgccagtgtacacttatgtggatggagatggcacagttactattgagtcaactatggctgatggatttgcagccaaggaaagagttggcatcgaggccgaccaccgagggctgctttgcgacgagaatgtgtttgagcttctgaagaaatggcttcgcgtgaagggaagaaagcaca

SEQ ID NO: 33964 - DNA, 497 bp, Oryza sativa
  Clone ID: PAT_MRT4530_38025C.1
ggcggcgagcttggcgcgcgtcgcggcggtgctacgaggcacgagagaggacggaagagggggcaaacggaagaggagaacaaggggaagctttatatggcattggatcgaagagatcgaactccaaacgagaggaatcgattcgggaagaaatcaaactcggttttagggataaaatcaaaacgaattcgattcggagagaatactcaacgattcgttttgattcttgggggaaaagaaagaggagaacgagaggaacaaaacccctaaatcaatcggactcgaggagaccggattggagcggatttggagggggaaaacggcggctcgggcggcttgcgcgacggcggccggaggttgaagacggccctgacatgtgggccccacatgtcagcggctggaggaggagggggcgggcggctcggcttgggccggcatgggccggttcggccgcgcggagagagagagagtattgggccgaattcggcccaatgacc

SEQ ID NO: 33965 - DNA, 1608 bp, Oryza sativa
  unsure (1)..(1608): unsure at all n locations
  Clone ID: PAT_MRT4530_38026C.1
atgcccgccgccgccggagacgtcaactcgacgtggacgctggccatccgcgccgccgcggaccaaggccgcccacgccgcgccgtcgcgctctacctctcgtccctccgctcgggccgccgcccctgccccttcgcgctcgccgccgttctcaagtccgtgttccgccttcttctccccgccgcgcacccgctcctcgccgcgggcgcggccttgatccacgcgcaccttctacgcctcgggcttcttgcccacccctacccgcgcgcggggcttgcccacctttacgcgcgccttcccgatcccttccgngcgcacaggctggttgacgaaacgccgccccggcccccgcgggggcgggcgggggcgcactccttcctcgtctcacgaaactcgctcctcgcctccctgctccgttccggggacctcgccgcggcgcgcgcgctgttcgaccggatgcccgtgcgggacgtcgtgtcctggaactccatggtcgccggcctcgccaaggccggccacctagacgcggccatcgagctcttcgacaaaatgcccgagaggaacgccgcctcctggaacgcggtcatgtgcggctacatcgcccagggcgacctggcccaggcgagggagctgttcgagcaaatgcccgtgaggagcaacgtctcgtggatcacgatgatatccggctacgccaactccggcgatgttcacgctgccggcgaattattcgagcggatggagaacaagaaagatctttacgcgtggaacgcgatgatcgcctgctacgcaaagaatggctgtgcaagggaggctcttgctgttttcaatcgtatgttgaagcctcatgtgtgggtgatgcccaatgagaagaccttctcgtcagtcatctcggcttgctcgcagcttggagacttgaggtttggcttgtgggctgagagtttcatggggtctgtggggattgagctggatgatcatttgcgcaccgctctggtggatttgcataccaagagtgggcggatcgacagagcttttgatctgttcagaggtttggggatgcgagatgtggtgtcttacagtgcgattatcgtgggctgtgggatgaatggcaagttcaatgaagctgttagtttgttcaaggagatgtccgatgcaaagattagtcccaatgcagtgacctttgtggggttgttgtctgcttatagtaatgccgggctaatggaagaagcccgtgcttgctttgcttccatgacagaaaaatataagattagcccttcaatggaacactacaccatcatggtagatcttcttggacgtagtggaaaattggatgaagcatatcaactgatcatgcagatgccaatgaagccagatgctagcatttggggtgctctacttcttgcttgcaggttgcacaacaatgttgagcttggggaaattgttgcttccaagtgctttgaacttgagccaggagagagtggatattatattcttttgggtaacatatattcagaagcaaacaaatgggagaaagttaagaggctaagaaagataatggcagaaagaggcttaaacaaaatgcctgggagtagttgggttcaggcttcttaa

SEQ ID NO: 33966 - DNA, 676 bp, Oryza sativa
  Clone ID: PAT_MRT4530_38027C.1
atgacgacgactatagcgactgacggggcggcggcagcctgcccgcctgctttggtgccgagctcctatgcatcggccatcaagctcccatgcggcgtcggctctttcttggatttccgtggcaattgtatcgtctacgtcggcgtcgttcaaggctgcatcagtacattcgacctcttggattactctggagctaagcagatctcccagaccggtgtgttcgattttttcatcaacaccagcccccgtccccgcccccgcattggtcaccacgtggaaaacctcccccgcccctgcagggagcccggcggtgtccaagctagtatcgtggtgtacaacatcgatgaagcaggtgatccagtggtatggccatctattgaagaggccaaaaacatgtggagcaaactcatggacatgtcagaggctacccagaagaagtggatgcaagactccaagaccctactccagcaacaaattatgaagctcaacaaaaagctagacaatctgaaggctgagaactacaaacgtgagatcaccaacataatttctcagataggaggtggacaccgcaagaacttaaatgatttatctcccgagatggtcaaaaatgtcaagcgggaggtggccaagctccgggaggccattagaaaccgcatcatcaagctccacgcacaag

SEQ ID NO: 33967 - DNA, 670 bp, Oryza sativa
  Clone ID: PAT_MRT4530_38028C.1
cgcacgaggccactattatacagcaatggaggtcctatcatcatggtgcagattgaaaatgaatttggttcatttggagatgacaagaattatcttcattaccttgttgaagttgccagaagatatcttgggaatgacattatgctgtatacagtttctcaactataattttcacaatgcaaatatgtgcaattttattttagtattggctgctatgcctgttttataactggctttacagattctatatgtagtcattgccgtttatcaccacaaattgcatacttagggtaggaaacagtagaaggtttggtacaacaacaacgatattgccatacaggcattggtattgttatgtgaaggttgcatgcatgactaagtttaactgcatctatgacatgccttattggcgcagtgccattatgaaatattgaaaatattcatccaagtatcactgttaaattgttgacagaatcatccatatgatgtcatgcgattaaagttaattttctgttcttttaatttaaatgatggttcagagcgaagcttacgtgcagatatcaacatcaatacacttctttttatgtcaacagtgatattcaaattcaatgttgtgattatgaattctccagttcccctaaataatctttcaggtatacaactgatggtg

SEQ ID NO: 33968 - DNA, 570 bp, Oryza sativa
  Clone ID: PAT_MRT4530_38029C.1
atggagtcgccggcgtcggcatcaccgtctctcccggagggcgaggtgctcgccgatttcttggtgtttcttgatgacgccgccgcggcggcggcggcggcggagccgtacgaggtagagatggaggaggaggaggaggaggagccgcaggaggtggagttcgccgccgatgacggcagcgacgacgacgtcggcggcgatctcgtgggcaatggcggcctcatggaagatgaggtggactacgccgtcgacgagcttgtggacgccgactccgaggacggcagcttggacataatggccgacgacggcgacgacgaggcggcgacggaggaggagcacgccacacgagccgcagagccaccggcggcgacggcgcgcaacgcaaggatgagcgtgaagcccgtgaagcagttcggcggggactacgaagccatcaacgagatgatccgcgagtacctgcaggcggacaagaagcggcggcgcgctcgcagggtcgccgcggcgatgctgcgcctccgtcgccagcggcggcggccggcggaggacggcggtgcaccgacgtggccgtag

SEQ ID NO: 33969 - DNA, 582 bp, Oryza sativa
  Clone ID: PAT_MRT4530_3802C.1
atggcggccggacctcccgcgcctattccttccccgccggccgctctctcccccttccaaccctatttaaaccctccccgcacctcctccgtccgtttccgcctctcgccgcccttcctcctcgccggaatcgagctcgcgccgtcgctctctctctcctccctcgccgacgacctccggccggccttctccgctcgccgggaccgtctcccgcccctgcgtcgcctcctccggcttcgccacaccgccgtcgaccccgtccaccccctcgccgagcccgcggaccgccggaacaccgtcgaccccgtcgacccgagccgcgctgccgctttactccgctccggccgcctttttcgttgtcgccttcgacctagggtgagccgaggaccgccgcctcgtttccccctttccctcccctctctcggccgccgctccgatgtgcccatggccgccgccagtgaccataggggcgcgggcgcgccgcctcctgccggccgcgccgacgtggccgccttcgggcgcaccgagcggctgctgcgtggggcccggccgtcagccgcccgcgccctcgggtgcggctga

SEQ ID NO: 33970 - DNA, 1672 bp, Oryza sativa
  Clone ID: PAT_MRT4530_38030C.1
atggcagagaaggggaacccggcgaacaaggtggccatcgtggcggtgccgttcccggcgcagggtcacctcaaccaggtgctgcacctgtcgctccagctcgcgtcgtcgtcgcacgggctcgcggtccactacgctgcgccggcgccgcagctccgccaggcgcgggcgcgcgtgcacggctgggacgacaaggccctcctctccgtccagttccacgacctcggcatctccacgtacgtctctccgcctcccgaccccaccgccgacacgcccttcccctcccacctcatgcccctctgggaggcgtacaccgcggacgcgcgcgccccgctctcggcgctccttgacgagctatccgcttcccaccgtcgggtcgtcgtcgtgtgcgacaccatcaattccttcgctgtcgaggaggcggcgcggctgcccaacggtgaggcgttcccggtgagctgcgtagccgtgtcggccctcgcccttcacatagacaccgggcatcggctcctgcgtgagaacggcctcaatcatgcccccttggaaacctacatgacgcaggagttcctggactacgcgagcgaacgtgcccgagcgtcggaatcgattttgtccggcgccggcatcctcgcgaacgcgagccgagcactcgagggcgatttcatcgacgatttggctgagactctggctgccggcggcaagaagctcttcgcaatcggtccgttgaacccactgctcaacacgggctcgtcggagcagggcaggcggcgacacgagtgccttgactggctcgacaggcagcccccggattctgtgctctacgtgtcgttcggcacgacgtgctctcttcgagttgagcaggtcgcggagctcgcagcgacactgcgcggcagcaagcagcggttcatctgggtcatgcgcgacgccgaccgcggcaacatattcacggacaccggcgagggcgagacccggcacgccaagcttctgtccgagttctccaagcaaaccgaaggcacggggatggtgatcactgggtgggcgccgcagctggagatcctggcgcacggcgccacggcggcgttcatgagccactgcggctggaactcgaccatggagagcatgagccacgggaagccgattctggcgtggcccatgcactccgaccagccgtgggacgcggagctggtgtgcaaatacttcaaggcaggtctcctagtgaggccatgggagaagcacggcgaggttttgccggcggccactatacaggaggtgatcaagaagatgatggcctccgatgaaggattggcggtgcggcagcgcgcgaaggcgctcggtgatgccgtccgttcatcgcgcaatgatctggaggacttcattgctcacatcacaaggttgttcaaacatgacaaagacaagaaggaatatgaagaaactgtcaatgtgtggtccttttcgttgattcctagagcacatagacccaaacacgtccagctccactcacccaagagctgattgagttaagcagggtctagtaaaatagttttcagtcctacaaatcaagtgactctatggttgaatcaaataaacatatggtggtgtaaacttggggatatcagatatccactatttccacttgagtaattttatcatccttaaaaaaaaaaaaaaaaaa

SEQ ID NO: 33971 - DNA, 246 bp, Oryza sativa
  Clone ID: PAT_MRT4530_38031C.1
atggaggaagatcaaggcgagaaccctgatacagaccccgacgtggaaaatgatcatgagaagcaaacctatgtcaacctcaaggattgggtgttcactcaaacgcgagcatacgacccagaccagctcatcaaaactgggggctcgctgccttcttcctccatggagatccagtgggtaggaggtgctgaagacccccagacctcaggctggatctgccacctcgtctgcgaggatcagaagtag

SEQ ID NO: 33972 - DNA, 2404 bp, Oryza sativa
  Clone ID: PAT_MRT4530_38032C.1
tcatgtagctgaggcgcttgtcacgtatgatacgataactgtgatatcgtccagcttcccaccaaagtatcggtacccagcttcttgagcagcagctgcaaagggtgattgcctgttcctatccattgccttttgctgggcaagggcagcgattttctttgctgtggcttcaggttctagcccagtcctgagagcctcaacaactatagcactgatctcattgctgtacaaattgtcgaaaagcccatctgtgccagcaataataacgtcgccaggagcaactggaaagtggaatgtctgagcagaactaggaagatcactgccacccccactctctagctgataagtgaaattaaaatcatgctgttgtacaggtgatctgagaacagttcgaccatctctgactatgatgaagccactatctccaaggtttacagcatggataccccttgatggatcaatggtcccttgtggttcatccttgatggcactcattgagttactcattagctccttagcatatagtccagcatcaacaccatgatctgcccagccaccaacaccatctgccacgccaattgcctgttcatcgacgcaaataaaatggccatcttcaccgccagttgcctccttagcagggtgaggcagatagcaagaacctgagaccagcttcagcggtccaggagcacgtggttttccatcaggcccgactgtggagttgtccatctgcttatcctgtactgcctcatcaagtgacaactgatgctctgtggctccagcagagtatggcgccacacaagacgtgctgaaatcccgaagccatggttcaaccgagaagctcaacttgtaacttggcccaatcgcattggtccaaaatgctctgctaggtccccacggctcgcggcacttcaagctcacgccgaccttcttgcagtactccacccctctatgcctaaacgagacctctggcctcggcgtgctgccagccgaccccatggccacgacgcatgagattcgggtccctacagatgaatccttctcaggttggcgcttggcggcgcccagctcagctcgtcgaaacgcatagccgcaggcagccataacaatgcccctctgcagcaagctctgccccgtgcagtgcgtgcgcacgcagggagtccggttgatggctgcgaagaaggcggcgggggcgcggcggtccgctgtgtggaggaggcgcgccgggtaggtggagaggaggaaccaggtgttgccgaacaggaagctccggccgccgcgtccgaggagggggtccttgtacttgtaggaggcgaggttgaagccgccgccgccgccgctaactctccttgataatttgaatgccgagaactggtgcgcagcctggctttctgtgataacagcgcagctttcttctcgctttgagatacgttggcgagccaaatgttcttctatttcctcatcatcagagtgctcataagtatcattatcatctgtgaacattctcgcaatcatttgttttgctttttcagaattctggcgcacgacattagttggagtcaaatcatatgacatttcattttctgattcatcttcacagtcttcagcatcatcctcatcttgatccattacttttttttgctcctggtgaccaaatttcagcttttgcataaatttatttgtttcagcagcatcttgctgctgaagccacttttggtggagcgcattgcgtttctcatgatctatttctccttcttcatacccagcttctataagatcattgaatacttcattttcatcacttccatcatcttcttcattgtccttaaacctcatcatgtcatcgtcactgtcatcctcttcctcagcttcaacatccagaaaatctttcaagatagcatcatctgggcatgaatcccctgctaaagctctttggagtggttcatgaacattcacatcatctttcggagtgctaggagcaatgttctccttatcattgtattcttcatcttctgatgaaatgtcatcggtactctcagtagggcttgaagaggggggtgattgaatttcatctgcagcattattgggattgtcacttgattgggccttgtcctcaagattatcttgagaattttccaagagttccttatctagatctttgctaccacaattatcaagatccttatcacaattcaaagcatccttgttctcaggtacactgtcacactggttcacgtcaccgctattcattccaccctcattctcgatatcgtcaatcttcggatctttgccttctgcatccacctccttaacctgaggtgcacctaaatcgccagcggtaccactcacaggatctgaagagacatcatcttcttcttcgtcatcatcatcattaggagtagctgac

SEQ ID NO: 33973 - DNA, 750 bp, Oryza sativa
  unsure (1)..(750): unsure at all n locations
  Clone ID: PAT_MRT4530_38033C.1
atcgtcactgtcatcctcttcctcagcttcaacatccagaaaatctttcaagatagcatcatctgggcatgaatcccctgctaaagctctttggagtggttcatgaacattcacatcatctttcggagtgctaggagcaatgttctccttatcattgtattcttcatcttctgatgaaatgtcatcggtactctcagtagggcttgaagaggggggtgattgaatttcatctgcagcattattgggattgtcacttgattgggccttgtcctcaagattatcttgagaattttccaagagttccttatctagatctttgctaccacaattatcaagatccttatcacaattcaaagcatccttgttctcaggtacactgtcacactggttcacgtcaccgctattcattccaccctcattctcgatatcgtcaatcttcggatctttgccttctgcatccacctccttaacctgaggtgcacctaaatcgccagcggtaccactcacaggatctgaagagacatcatcttcttcttcgtcatcatcatcattaggagtagctgacttctttagaatctctagtttccgaaggcggatcttctcaaggactgatgagatgggcttgtacactggctgcgcactcggcttaaatgatacgctcctcgtctctcgcagcagcctctgcgactcggcgtggatcgaatcaagctgcaccctcctctcccggacgcgtgggtcgacnccgggaat

SEQ ID NO: 33974 - DNA, 668 bp, Oryza sativa
  Clone ID: PAT_MRT4530_38034C.1
tttttttttttttttggttctttttttttttttttttttttttttttttttttttttttttgcaagaaaaggaatggcatttctttgcagttaagtttcagagttcgtggtggtcgctgtcttcatcatgaaacaaaatttcacagcatgttaatacttcctggttgctactatggacaaaacacctctacacacaccacgcaaaaataaaaataaagtggagatcatcggatttacagtcccataagattatctctctctcatgagtaggaatagcccatttgggattttgcaagtctccaagtagaatgcatcttgcagtgttcactacaaacttaaatgagtgaatatggccggcaccaggtcgaccactgaccatgcaagggctggcgtactgaacgaaccttatgccggtgtccacatcgtacgccttctgtggaaagagggagaacaccttctggagataaccgccctgcttcgcgtcggacttgaccttgcacttttcggaagccttcagcgctggaacatagcaggttgatacaataggaatgcccaggggtgttgcacatcaccggtagaagccatttcgagagagctttactgcagaatttcacaactaggatggttgggatccccacgagaaccctcccgacaaatacaataagcgg

SEQ ID NO: 33975 - DNA, 1844 bp, Oryza sativa
  Clone ID: PAT_MRT4530_38035C.1
tggatccccgggctgcaggaatcggcacgacgcaatcaacctcaccttgtcctcctctcctagtctcctcccctccccgttccccaacaagcaaccctaatccatccatggcggttaatacttcgcgcgcatagatactaatcccatccgcgcgcggcctcaacatctcaacctccggccagcctcgcaatcctgctgctatctcggcggcggggaggaggtgatgagatcttcgggagcgcgtctcgcccggtcctaagatgcttgccggcggaggaagcagagttagcggcggcggcggcggcttcaacctcgcctcctacaagtacaaggaccccctcctcggacgcggcggccggagcttcctgttcggcaacacctggttcctcctctccacctacccggcgcgcctcctccacacagcggaccgccgcgcccccgccgccttcttcgcagccatcaaccggactccctgcgtgcgcacgcactgcacggggcagagcttgctgcagaggggcattgttatggctgcctgcggctatgcgtttcgacgagctgagctgggcgccgccaagcgccaacctgagaaggattcatctgtagggacccgaatctcatgcgtcgtggccatggggtcggctggcagcacgccgaggccagaggtctcgtttaggcatagaggggtggagtactgcaagaaggtcggcgtgagcttgaagtgccgcgagccgtggggacctagcagagcattttggaccaatgcgattgggccaagttacaagttgagcttctcggttgaaccatggcttcgggatttcagcacgtcttgtgtggcgccatactctgctggagccacagagcatcagttgtcacttgatgaggcagtacaggataagcagatcccgcggggacccggacggccggagccggtccccggcccctgccccctgccccccccggccgcggcggcaggaggcggaggcggaggcggctgcggaagcggcgccgacccgggcactggcgtggccgccggcgaaggcgggcgggccgccgctggcgccgacggaggccaccgaggaggggggggagggggaggcggaaggcgggccggcccggctgaggagctggcggggggggggctcaaggggggggtgcgcagggagatttccgagtacaatgagatcagtgctatagttgttgaggctctcaggactgggctagaacctgaagcgacagcaaagaaaatcgctgcccttgcccagcaaaaggcaatggatcaaaggaacaggcaatcaccctttgcagctgctgctcaagaagctgggtaccgatactttggtgggaagctggacgatatcacagttatcgtatcatacgtgacaagcgcctcagctacatgatgcgagagcctttcctttttgatgtaatgtacataaccttgtcccagattaatggagctcgtatgcaccaggagtggatggctagagtgagctggcttgctggatggtgggcaatctcctgataccagactacttcctgtaactagatgagtaccaatccagagtaccgttgcattttagattctgaattggtggtggaaaaccatgcatatttttttcctcatgtagtactacaagtaaaagataattcttcgagaccatggtggttttctttggtaagaagaatcaccacttggtcgaaaacgagttttgttgtaagcactatgcaatgttgaatcctagttaacgtcgttcttgtcttcttgttcatatctatcctttgaagcaaaactcaataatattataattaagttacttgaattgaaacttaaaaaaaaaaaaaaa

SEQ ID NO: 33976 - DNA, 434 bp, Oryza sativa
  unsure (1)..(434): unsure at all n locations
  Clone ID: PAT_MRT4530_38036C.1
acggaggttaccaccgcccacacgcccccgctgctgctcctctcctgcaccacctgcgctgcttgcgctccacgccggcgccgcgccgcccaaaccctagcccagcccagccaactcccccccatgccgaacgcctctcccctccaccacctcgcctccctcctcctccttgccctcgccctcgcgccgcgccccgccgcgcccgcggccacggaccgcgcggcgctgctggccttccgcgcgtccctcccgccgccctcccgcgcggcgctcgcgtcgtggcgcggcccgctctcggagtcctggcgcggcgtttcgctccacccgccggccgccgncggcgcccccgacccggacccgtcgccctacgtntacgggctcgcgctgcgggggctcaacctgtcggggcagctcccggcggcgccgctcgcgct

SEQ ID NO: 33977 - DNA, 1473 bp, Oryza sativa
  Clone ID: PAT_MRT4530_38037C.1
atggagagttccagctctggttcttgtcctcagggtacagtgtatcattggtttgtcttgtttgcggtttggctttgtggcagccagcatgttctttcgcagaaaacaccacttgaaccaaaagataaattccttctatctgatccgccaattggtctctttgatccaatagagatttcaccatctgttcttccacacaatgctaacccagttgagccactgtcaccgatgtatccaaactacacatcatatgatccggtcttgactggaaaatgccatgtaaatttctcagcgctttcttatatgatggataaaacagcatctgattgttccattcctttagcaccactagttgctgatgtgatatgctgcccccaagttaatagcttgatgaatattttccaagctacatatggtgctggaaacaatacactagttctgaaccaggcttcagcaaatgcttgtttctctgatgttatgagcattctggcaagcaaaggagcaaacactaacatccctgagttatgtactctaaggccatcaaatcttacggatgcttcttgccctgtgaaggatattagcacatttgagaaaatagttaatgtaagcaagcttctagacgcatgcagcgatgttgacccactgaaagagtgttgtagacctgtttgccagcctgcaatagtggaagcagcagttcacatatcctctggaggagcaaacatgtttggaagttctagcatatctggaagtgatgctgggatcaacgtcgttagtgactgcaaaggggtagttcactcctggttatctatgaagctttcatcagaagaatcaaacactgcttttagagtattatctggctgcaaggtgaacaaagtttgtccgttggagtttgatgatccttcttccgttgttaaggcatgtggcaaggcatcttcttcaacgccctcatgctgtggggcattgcactcttacattgcaactcgccagaagcaaatatttgtaacaaatttgcaagcaattaactgtgcaaccatgttcggatcaatgctacagaaagctggtgtatcaaatgatatttatgagctttgtgatattgatttaaaagatttcagcctgcaagcattcagctgtctacttcgcagcttacctacagacattgtatttgacaatgctacgggcattagttttacatgtgatttgagtgacaacattgcagcgccatggccatcatcatcatctgttcaatccttgtcactttgtgctccagaaatgtcattgcctgcattgcctgtcgcgccaacatctggaagctcagtggaaacaaacgggacctatgtttatatcccttctgtttttcaaatatatgaccgtctaaaaaatgcatgtgacttccactggttgcaagaaacagcatgagcttacctacacacattgtatttgacaatgctacgggcattagttttacctgtgtgc

SEQ ID NO: 33978 - DNA, 2186 bp, Oryza sativa
  unsure (1)..(2186): unsure at all n locations
  Clone ID: PAT_MRT4530_38038C.1
gttcgccgccttcaaaaatactaataaaaaagaaaaaaaacgcaaaaagaaaagggagggtaggagagaaaaaaaaaagagaaaaaaacctcccgaattccccatcctcctccgcgccgcctcgccggaattcgcctcgaggtccggctaatcgaagcggcggttgatttctaggtcggatcgggggggcgtcgggagaatggacgagttcgagctggaggataacctagagttactcctccagagcatccaggagctcatcgaggaccagggggagaacaaccccttcggcgcggccaaccacgacgagctcatcgctagcctcctccacaacaaccaggagaatccgctgactgatgtgtccgtggaggacgttagggatgggaaggacatgcaggggatcccctgggagaagattgtgttccggagggatcagtatcgggagatgaagatgaagaattacaggaattatcagaacctgagttatgcccgggaggaagctctgaaggactgcaagaaagttgaaaaggatagtccttactacgatttccagtacaatacaaggcgtgctcgcccatcaattgtacattttcagttaaggaatctggtctgggcaacaaccaagcatgatgtttacacggtgcacaaccaatcagtgacacattggtcatcattggaccagacaagtactgagctaatcaatgcggatgactgcattataccaaaacagagagggcatggttcacagtccgttgcaatggtccaggtcacaactatggctgtagatgatagtttattggtaattggtggttttcagggggagcttatatgcaagcgcctggaagatgatggagttcttttcagcacaagagttacagatgatgagaatgctattaccaactctttggagatatatcaggatcccactggatctagacggttggtggctgctaacaatgactgctctgtcagaatttttgacattgagtactttgatttgctgaagcactatgtcttcccatggtctgtgaatattttagttttcaatcagagcgtttcggtgagcccaaaagggggactgtttgctgtccttggggaccatgaggatggcttggtagtggatcccaagtgtggcaaggcaatcggtgcacttaagggtcacttggattactctttcgcatctgcctggcatcctgatggcaatatcttggctaccggcagtcaagatacaacctgtcggctgtgggacattagaaacctatcagagtctgtggctgtacttggcggaaggatgggctcgatacgttgcatcaagttctcttcagacgggcggttcttggctactgcagaacctgtggatttcgtccatatctacgattcatatgcagactatggcagatctcacgagattgacttgtttggagagattgctggattgtcattcagcccagacgccgaggccttgtacgttggcatagcagatccaacatacggtggcctcatagagttcaacaggaggcaccaacatcattatttgaactgcatgtggtgatgccatttgttaagcgaaatgtgcgtctttgctgagcttagcagtcctccgattatgtgctgcataacttgcacaacttgtggaaggcgcactaatagtgaaaagctcattaaagaaattttgctgctttagtttttagctgcagcacctgaagctcatgaatggccccgaactgtaaaattctgtcccttttgtctaaaatgtcacttaggaactgatggaggtagatatatatgtatagccgtcctatttcatttttctccaaatcgatgtacatatagttgtggtatcccggttctttgcaacgcaacgagcattggcaacaaaatagcaaggataaattatgccagaagtggatggttcggcacatccggaagaagattttagctcaaggatcatatgtgttccactcggttgttcggctctcgtttatacaagaacagggaatttcccagcagcgaccttttcagtccttgggacacgtagaaattgctngtcggtggctcggagccgttctctctttatcaaaccgaacatgcttggaattctctattatcataattttgcaatatccatttatagatattgaaatcaaaaaaaaaaaaaaaaaaaaaaaaaaaaaaaaaaaaaaaaa

SEQ ID NO: 33979 - DNA, 312 bp, Oryza sativa
  Clone ID: PAT_MRT4530_38039C.1
tgatactcgtataccggatgattagggtattagggtatgttagaatgatgatctacgtaatacgacatcaagcaaacagaagacaagaattatactggttcaggccccttatcaggattgatgattgaaaaccgcatatttcaatgggagtagaaaaattcgacgataccggcaagatcgtagttgatgtattcgacgagatctcccggtgacttggctccgtgtattccggcttcgtaaactatggtgggggtctcttttataccgtgaatcatcttgatctctatgtaagactcggaaacatcggatccc

SEQ ID NO: 33980 - DNA, 1892 bp, Oryza sativa
  unsure (1)..(1892): unsure at all n locations
  Clone ID: PAT_MRT4530_3803C.1
cccacgcctcctcctcctcgtcgctgcattccggttgagtgagttggtgattatctgtagggggtgaaaatggcgcaggcggtggtgccggcgatgcagtgccaggtcggggccgtgcggccggcggcggctgcggcggcggcgggggggagggtgtggggagtcaggaggaccgggcgcggcacgtcggggttcagggtgatggccgtgagcacggagaccaccggggtggtgacgcggatggagcagctgctcaacatggacaccacccccttcaccgacaagatcatcgccgagtacatctgggttggaggaactggaattgacctcagaagcaaagcaaatcaaggacaataaccagtggaggacccctcggagctaccaaaatggaactacgatggatcaagcacacgcgcaagctccaggaagaagatagtgaagtcatcttatacccacaggctataattcaaggacccatttcgaggtggcaacaacatattggttatgtgtgatacctacacaccagctggggaacccatccctactaacaaacgtaacagggctgcacaagtattcagtgatccaaaggttgtcagccaagtgccatggtttggaatagaacaggagtacactttgctccagagagacgtaaactggcctcttggctggcccgttggaggctaccctgggccccagggtccatactactgcgctgtaggatcggacaaatcgtttggccgtgacatatcagatgctcactacaaggcatgtctttatgctggaattaacattagtggaacaaatggagaggtcatgcctggtcagtgggagtaccaggttggacctagtgtcggtattgaagctggagaccacatatggatttcaagatatattcttgagagaataacggagcaggctggtgtagtgcttacccttgaccccaaaccaattcagggagactggaatggagctgggtgccacacaaactacagcaccaagagtatgcgtgaagatggaggatttgaggtgatcaagaaggcaatcctaaacctatcacttcgccatgacttgcatataagtgcatatggtgaaggaaatgaaaggaggttgacaggtttacacgagacagctagcattgacaatttctcatggggtgtggcaaaccgtggatgctctattcgggtggggcgagacaccgaggcgaagggaaaaggctacttggaagaccgtcgcccggcatcaaacatggacccgtacgtcgtgacagcgctattggctgaaaccacaattctttgggagccaaccctcgaagcggaggttcttgctgctaagaagttggccctgaaggtatgaagaacttggacgatgaatcggggcaaataaatcccagcaaaatttgtttgctgcccaccagtcttgatcttgtatttcttctgtctggggattggtctgtacaaatctgcagtttctagaaaaccacgccaccttccattcgccagttaacattttggttgaacaccacacttgatctgggtctgtattttgagtccatttgtgagtgacagaacggatgatgaaacacatcagggacacttttaagtttcttcagtcctgcgtccttccctcgaaataaaaatgtttccttgttttttaaaaaaaaaaaaaaaaaaaattgcgatgaaaacgtcactattggagacttggagaatataatttgacagttgacactcgaccaaaaaaaaaaacaaaacaaagaaaaaaaaaaaaaaaaaaaaccaaagtactaaacctattgttccataaatcgtatattaccgaaaaaaccaaaaaggctaaaacccagtgttaaataaannnaaaaaaaaaaaaaaaaaaaaaaggggcgccctttt

SEQ ID NO: 33981 - DNA, 369 bp, Oryza sativa
  Clone ID: PAT_MRT4530_38040C.1
attggttggtttttattttttttttttttttttttttttttttttttttgggaccctttacaacttatatagccataggaattgtccaattttattaacattataaacagggggaattaatccatggcgatccggccatgggggactagcagttcaatacaaaggatttgcatggatggatcggatcaaaaaaaaggtggggccaaaaccaggaatttaatttaaatttttccccgtgggcccggcgtctgtggcaattttgggccctttttgattggaaacaagttttgggaccccgaccctcttaccttggccaccaacgatccccccccgagcaggaagaactttaacaggaacccccttttggtg

SEQ ID NO: 33982 - DNA, 728 bp, Oryza sativa
  Clone ID: PAT_MRT4530_38041C.1
tgtgggccaaccatggcgatgcaataagcactcagtactctggaactcctgccttgaagggagactttgtgcggtacggaaagcgaactacacagggaattttaaatgatctgtggaatgcaatggctagatattacctgaacaactttgcagatggtactaaacagcatggtcatgcaacatgtcgaggccaccgctaccggacgccgaacaccataggcgaccgcggaggcggcgcagctgccggagccacttgcactcgcaccaccgtggtggccgtgccccggccagacgaccacgtgagggatgccagtgccgtcgtgttctccatcagggaacacaccttggacaatgctgatggctggctcaccgaggctgctgacttcggccgcgtgttcgtcaccggtgactcggacggcagcaccatagcgcaccacctcaccatgcacgccggcttggcgatgcccaatctcactggcgcctgtggcatgatgtgcaaccgcgccatcgactgcaccgagcggttgttcacaatggacaagccaatggagctcactgcgagtgagcgtcggaagaagactatgagaagggagaagaagataagggcaaaactgccattttatgcctacaaccttctcagggatcaagtgttcgctcatacgcgagcatacgacccggagctgcttgctaaaataggtgcaatcaagaggaagaagttacagggatag

SEQ ID NO: 33983 - DNA, 282 bp, Oryza sativa
  Clone ID: PAT_MRT4530_38042C.1
gtggtcggtggcgggtgtgctcggcgcgtgctcggggacggcagccgacgcggcgacgggctcgggacggcaggggacggcgtggaggatggcggccggcttggggatggcacggagaaggtcggtggaggacagcgggctcaggcacgacaggggtcatcgatgcggcatcggcaagcgagggatgtcgtggaggtggtcgacggcggccaacgcgggctcggggacggcggccgacggcggcggcctcaagttggagctcgtcacggatgacattcatcg

SEQ ID NO: 33984 - DNA, 338 bp, Oryza sativa
  Clone ID: PAT_MRT4530_38043C.1
atacacgacttaattcataataatataagaaaccaatcggaatatacagggggcacacaactttttctaaggtctcactggattcgaatagggggcaccgacccagaccaattttttgacgggtaaaacagggacaaggaaacgaaagaaaagggggggaaaaagaaaaagaaaaaggagaagacgagggaaacgaactttgaaaaatcccgggttgggcagagcatcgggagggggcggaggggagctcatcaccttgcaactttacacgtacactatgacccaggtgctgtggtcccattaagcacaggaattacatggcaaaagctggtagaagg

SEQ ID NO: 33985 - DNA, 304 bp, Oryza sativa
  Clone ID: PAT_MRT4530_38044C.1
gggcttggggcgttatgggctccaccaaggcctacaaaatttgcatcttgaagttgttaagaagagtatcgagatctacaagatctacatcttcaaggagcggtcactagtgggtaccactgtctcgtccaaggacatgcccatcatgaactccttcatcgacatctttgaaaatttcgtccaatacaacaatgaaatttacttccggcaatgggagcactctaaagtgtccgggagcattaatgacgccttgaatgctatatcacaagttcacaacattagggagtccattgactatctatga

SEQ ID NO: 33986 - DNA, 1362 bp, Oryza sativa
  Clone ID: PAT_MRT4530_38045C.1
atgatgaaagctgcaggcatttgcagtgggcttgcctacaaagcaagacacggacaaacaaaaacaaacgctctcatttgggagttcatgtctttggtgcaaaggaaacacacgcatgagttgagcttgtcaggtgttcgttcttggggatcgatgacgctgggcagcggcggcatggcggcggaggagggcggcggcaatggcgaggcggcggcgaggggggagaggtgcgtggtggtggcggtggaggagacgtgctgcgcgtgcgcgcagctcgtggtcgggccgccgaacccgatgatggcgaggtacgtgtacgccttcgtgttcctggcgaccaacctgctcgcctggacgctccgcgacttcggccaccccgtcctcgccgagctccggcgactccgcggcagctgccagggcgccggctactgcctcggcgccgagggcgtcctccgcgtcagcctcggctgcttcgtatcctctttgcaattcaattcagatttcagtctcagattcagcttgcattttgtgagggaagatcgcgcatttcggagcaggggcgtttctggtgatccagctcgtcagtgtcacccggttcatcacctggctgaacgactgctgccggtcagagaccaacctgaagagatggtgcaggtggtgtcgatcgcggcgtacgtgggctccatcctgggcgtggtgctcatgtacgtgtggtacgcgccgcggccgtcctgcaagctcaacatcctcttcatcaccgtcaccctcgtcctcgtccagatcatgaccggcgtctcgctcagctccaaggtgaaggctggctacctggcgcctgggctgatgggggtctacatcgtgttcctctgctggacagcgatcaggagtgagcctcacacagagatttgcaacaagaaagccgaggttgcaacgagtgcagattgggttaacatcgcgagcttcgtgatcgcggtgatcgtcatcgtcacggcgacattcgctacggggatcgattccaagtgcctccagttcaagaaggccgagagcgagcagcccgaggacgacgacatcccgtacgggttcggcttcttccacttcgtgttcgccatgggcgccatgtacttcgctatgctcttcgtcggctggaacgccaatcaaaccatggagaagtggacgatcgatgtcgggtgggcgagcacctgggtccgggttgtcaacgaatggctcgcggcgatcgtgtatatttcctctcctgttactggagagggcaatgcatcgaatcagcaaagcatattgtcaaatgacaaactgctgctgaacatgcaaaaggggcagcaacccttggaatatacgcagacttcctga

SEQ ID NO: 33987 - DNA, 343 bp, Oryza sativa
  Clone ID: PAT_MRT4530_38046C.1
ggggccgaaaatccgggggaaatatatatgaccaccgctttcccataattaaaccaacggggcccccccccagaaagtttttgggcgggggattggaatacccaagggggggaattaattaaattaaaaaagggacccttttagggccccacagtaggaaaccaagggcacaagggggttgcaaaaaggaggggaggcctaatggttcccaagggggagtcctttgccccaaaacgttaggcccccttgggggcctccaggaaacttttgacgggttgccttaaaaacccatccccctgctccacccgcatcgtaattttaactcttaccccctggcaaaact

SEQ ID NO: 33988 - DNA, 2280 bp, Oryza sativa
  Clone ID: PAT_MRT4530_38047C.1
gttattaaaactaagagaccctctcaaaatataaagtatttggctaaagacgagtcttaacgcaactccatttctgctgttgtccctcctgatgaaattggagtgaaatttgatgatattggggcacttgaggatgttaagaggacgctggatgagcttgttactcttccaatgaggagacctgaacttttctcccatgggaatttgttaaggccctgcaaaggtgttttgctctttgggcctcctggaacaggaaaaacactcctggcaaaggcacttgcaacagaagctggagcaaatttcatcagcataactggttctacactcacatcaaagtggtttggagatgctgagaagttgacaaaggcccttttctcctttatggcggcggaggagggcggcggcaatggcgaggcggcggcgaggggggagaggtgcgtggtggtggcggtggaggagacgtgctgcgcgtgcgcgcagctcgtggtcgggccgccgaacccgatgatggcgaggtacgtgtacgccttcgtgttcctggcgaccaacctgctcgcctggacgctccgcgacttcggccaccccgtcctcgccgagctccggcgactccgcggcagctgccagggcgccggctactgcctcggcgccgagggcgtcctccgcgtcagcctcggctgcttcgtatcctctttgcaattcaattcagatttcagtctcagattcagcttgcattttgtgagggatgaattgagttttcctgcattttgtgaatttgatgtccttgacgacggcgatcaccagctgttcttcttcgtgatgttcttgtcgacggtgaggacgaggaagacgcacgatcgccggaattcatggcactccgagtggtggccggcgaagatcgtgctgtggatgggcttcaccgtcgtccccttcttcctcccctcgcctctcatccagctctacgggaagatcgcgcatttcggagcaggggcgtttctggtgatccagctcgtcagtgtcacccggttcatcacctggctgaacgactgctgccggtcagagaccaacctgaagagatgccatatgcaggtgcaggtggtgtcgatcgcggcgtacgtgggctccatcctgggcgtggtgctcatgtacgtgtggtacgcgccgcggccgtcctgcaagctcaacatcctcttcatcaccgtcaccctcgtcctcgtccagatcatgaccggcgtctcgctcagctccaaggtgaaggctggctacctggcgcctgggctgatgggggtctacatcgtgttcctctgctggacagcgatcaggagtgagcctcacacagagatttgcaacaagaaagccgaggttgcaacgagtgcagattgggttaacatcgcgagcttcgtgatcgcggtgatcgtcatcgtcacggcgacattcgctacggggatcgattccaagtgcctccagttcaagaaggccgagagcgagcagcccgaggacgacgacatcccgtacgggttcggcttcttccacttcgtgttcgccatgggcgccatgtacttcgctatgctcttcgtcggctggaacgccaatcaaaccatggagaagtggacgatcgatgtcgggtgggcgagcacctgggtccgggttgtcaacgaatggctcgcggcgatcgtgtataagtgtcatttccttgcttgttctatcaatgtcgccgatgtggagcagccgctggttgttgctattggcccagtcgagccgaagcaaacgccgcccgcttccgagttccgagtcggcgcggcggacgaaatacggacagtagagcaggatgggaagaccatcaagcttcaaatctgggatactgctggacaagaacgtttcaggacgattacaagcagctattaccggggagctcatggaataattattgtatacgatgtgacagaccaagaaagcttcaacaatgtgaagcagtggttgaatgaaattgatcgttatgcaagtgacaatgtaaacaagctccttgttgggaacaagagcgacctaactgccaacaaagttgtgtcatctgaaacagctaaggcgtttgctgatgagatgggcatccccttcatggagacaagtgccaagaacgccactaatgtggagcaggccttcatggctatggccgcatccatcaaggacaggatggctagccaaccggccgcttcaaatgcaaggccaccgaccgtgcagatccgcgggcaacctgtcaaccagaagacgtcgtgctgctcgtcctaa

SEQ ID NO: 33989 - DNA, 4102 bp, Oryza sativa
  Clone ID: PAT_MRT4530_38048C.1
tgacgggtaaaccccacccacgtcttcctctctctcccccgtcttcgcctcgcgctcgcgtctccctccctccctccctccgtccagatccgcgtgggctcgaagaagcggcgggcgatccacggcgagcgtcccgcggtcactcccccccgtctccgtccggcatgaatcccgagtacgactaccttttcaaacttctcctcattggtgattctggtgttgggaaatcgtgcttgcttctcagatttgcggatgattcatacctggacagctacatcagcacaattggagttgattttaaaatacggacagtagagcaggatgggaagaccatcaagcttcaaatctgggatactgctggacaagaacgtttcaggacaattacaagcagctattaccggggagctcatggaattattattgtatatgatgtgacagaccaagaaagcttcaacaatgtgaagcagtggttgaatgaaattgatcgttatgcaagtgacaatgttaacaagctcctcgttgggaacaagagcgacctaactgccaacaaagttgtgtcatctgaaacagctaaggcgtttgctgatgagatgggcatcccattcatggagacaagtgccaagaacgccactaatgtggagcaggcctttatggctatggctgcatccatcaaggacaggatggcgagccaaccggccgctgcaaatgcaaggccaccgacggtgcagatccgcgggcaacctgtcaaccagaagacgtcgtgctgctcgtcctaaagataacgaagtacttccttctatgtaaaattcgacgtatgttactactgtttgctcactacaacgtatttgtaatattcatttgaacgccctcgatagcatcttttctttaatcagatggttagggagctgcaaatatatatgtaactttgctgtgttgctctttgctcacgaatcaagaggagcaagcagaaccagtgtatttgattcattttacgcttacattttgtccaaaaaaaaaaaaaaaatgagattcaataaaaaaagctaaaaccggcgctttgatccccttcagcgatttatattgatgatcaaacacactctaggaaaatatccactttccaatccttcctttcaaaataggagccgataacatatacttgacaacatcggccttgcatatgacagttcattcattgaatagtaaataatgcccttaccttttacatgcaaagtataaacaccccaggggagcatatgtggtctctgcatccaagagccgacggcttaaatagaacacaaccctctcctttccttcgagcttctgaatcaagaccgagccgattgacttgtcaccggccgacaaatataaccgaaaaggtattcctttccattcaaataagccgattgcaccaggacatctaaaagccgtcttatgaatatcttcctcagccataaagatctgattatatctcgcatttccatccataaaacttaatatcttatgtcctaaagcagcatcaaccaactgatcggccactggcattggatattcgtcctttggggtagctttattcaaatctctaaaatcaatacataccctcaccttgtcgttcttcttgataacaggaacatccatctcccaaagagctaaatcggcactggcaacattgactgtcctgttggccggcaggacctcctacttttacgacacctccccaccccccgtctccttctccctcgtctccagatccgtgggtcgaagcagcggcggcgcccgatccacggcggtcactccctccgccatgaatcccgagtacgactaccttttcaaacttctcctcattggtgattctggtgttgggaaatcgtgcttgcttctcagatttgcggatgactcatacctggacagctatatcagcacaattggagttgattttaaaatacggacagtagagcaggatgggaagaccatcaagcttcaaatctgggatactgctggacaagaacgtttcaggacgattacaagcagctattaccggggagctcatggaataattattgtatacgatgtgacagaccaagaaagcttcaacaatgtgaagcagtggttgaatgaaattgatcgttatgcaagtgacaatgtaaacaagctccttgttgggaacaagagcgacctaactgccaacaaagttgtgtcatctgaaacagctaaggcgtttgctgatgagatgggcatccccttcatggagacaagtgccaagaacgccactaatgtggagcaggccttcatggctatggccgcatccatcaaggacaggatggctagccaaccggccgcttcaaatgcaaggccaccgaccgtgcagatccgcgggcaacctgtcaaccagaagacgtcgtgctgctcgtcctaaagataaccaagtctttccttccatgtaaaattcgacgtatgttactactgtttgctcactacaacgtatttgtgatattcatttgaacgcccttgataccatcttttctttaatcagatggttaggcagctgcaaatatatatgtaaccttgctttgttgctctttgctcacgaatcgagaggagcaagcagaaccagtgtatttgattcttttcacgcttacatttttcccatttcaaagcataaaagaaatctgtgttgacgttcagttagacctgatgaacccctcattacaaaaacttttgaaattgcaacaccaaatggaaccaaattttggtttcgccatatggaccaaaacaaaagaaggttaatccggtactatactgaagcacccagccgtaccaaattctcagagaatacacagccgatgcttaaccaaactaaactagaattcgtcttatgtcaacataattttacacgccatcttatccggagaattttgaaaaatctagaactttgatccgtttttgaagcggttttcactcaaccaacatagggtaaggttgaaaatacaagttgcaattatcttttggtttaagcccgaacaaatcactaattacgtcagcaatcacatcggcccacggcagtatttttagttctcacattgtatcatctgcaacatgagcgagctccaactttagccataggaagccagcaataggcgcttctttctctgatgtgcccgcctccttggaaggaggttgatattgatagttcaaattgccccctggtatccttttcacctagaccctatttcagagttatgtgaaccctgtatcaatagagaaacacctaatcacaccaaattttcctgagcctttttgtacaagtgctccgtcctcctgttgtaatttatagcctactgtcttgatggcgtttgttgaattggctatacaatctgctgccttggtggcgtttgttgaactggctgcacaacctgttgctgaactggctgtacaacctgttggatcgggggtgtttgttgaatcggctgctgctggatgtcgcagagtacattggacgagcctgctgggcgccatgttcgaggagtcgtagcgcgacctcgtcgacgcggggttgatcgacggcgggagcatggacagcttcaacatcccgtcgtacgccgcgacgctggaggagttcagggaggccgtcaaagctgacggttcgtttgccgtcaaccagctggagcacgtgatgggaagccgtctagccatggacgatgacccccatgaccgccgcgcggtcgggcgcagggtggcgaacaaccagcgatcaatcttccggccgctcgtcgaagtgcacatcggcagggcgctcgccgatgagctgtttgtccggatggagaggcgcgcaggagagctcgccgaggagctcggggacgagatgggggtccacttccacatcgtggttaatgggaggtacatgaccaacgcagaggatttgcctagaattgaacatcgaacaagctttgacgatgaaggcattaaaaatgtgcagcgggacctctgccacttcatccacaacgagtgctgtcatatccaaggacggttcttcgacccagaaggcaccctagcgacaagcgatgaatacaagtctcttcgggagtggaacaacgcgatgccataa

SEQ ID NO: 33990 - DNA, 450 bp, Oryza sativa
  Clone ID: PAT_MRT4530_38049C.1
atggacgtcattgccatcgtggagatgaagagtgggagggggagaagggtcgttgccgccatcattagatccaccccggccagggccacgtccgacaaatccgccgccaccatcaccgttggatccatcctggccggttccacggccaacggatctgccaccatcaactatgtagtgttctttagccctccgccgtttgtcgttgtcaccctccgcctcccatcgctatcgctgttggatccaccccacccggatccgtcgcctcgctctactgctggatctgccccgattgggcccgtggccgatggatctgccatcgacaactctgcggtgctcctaggcctcctccgtcatcgtggttgccctctgccccgccactccatactcctttgctcgccagtggcagcggatcccatgcccgtcgtctcctcatctcacgccgggcattag

SEQ ID NO: 33991 - DNA, 570 bp, Oryza sativa
  Clone ID: PAT_MRT4530_3804C.1
atggtggccgacctcccgcgccggtttccttcctttcccggccgccctctctcgtcctggctctatttaaaccctccccgcacctcctccgtccgtttccgcctctcgccgcccttcctcctcgccggaatcgagctcacgccgtcgccctctctctccgctgtcgccgccgagctccagtccgccgccgtcgtcgccccggaccccctcccacctcggcgccgcctcctgcggcttcgccgcatccttgccgacctcgtccacccctccgtttcgctcgccgaccgccggaactccgtcgaccccgtcgacccgagccgcgccgccgccttcctccgctccagccgcctttttcgtcgtcgccgtcgacctagggtgagccgtggaccgccgcctcttttcccccttcccttcccctctctcggccaccactccgacgtgcctatggccgccgccagcgaccataggggccagggcgccgcctcccaccggctgcgcctgcttggccgccctcgggcgcgccgagtggctgccgcgtggggcccggccgtcagccgcccgcgcctttag

SEQ ID NO: 33992 - DNA, 1023 bp, Oryza sativa
  Clone ID: PAT_MRT4530_38050C.1
acgcctaactttgttttcaacaaaatatgcaaatctgtagtggtatccccaatttgttctgttcattctattcagacgatagatattttgcagtcttttgtacaaccacttgagctgctgttaagccatccaagtgcattcttgttcattagtgccttgcaggatacagttatttcgcatagaaataaaaaattctaacgatactaaaaaatagggggttccatcgattatatggttcccttttaaacggcgaggcccatgtatccgtgctccaggatagagggttcatgtggcactgctatagagatttcaaagcacagtcccaagatttgcttgtcatcaaagttttactgtgaacaagttgcctagtagattctgaatccttcaagtcaattcatactctggctcctagattctgaggttgatatgcaaaaacaaacatataagcattggccatgatttcccagaagaatctttgctaagctgtaagtgcaacgtgaaagatgcagacacctcagattgcattttatcactttatgcctgctgtggacgggttgtatgctgccctttctctcgccgcccacgcgctcttgcctggtgcgacgtcagctggcggggaagtgctacatctgggtgcctcctggcctcagtcatgctttagggcacttcagagctccagggatccatgtatatcttttcgctgtcttaagcatcaaaggcatgaaaagccccatatgatgttagcggcgtcatgttgcccccgcgcaaatcatgtcattgaatatacccgccacgggggaatccaaaaaccatgcttccccatcatgcaaagtattgtgttggcatcggccatccgcccagaattcacatatgccttatacatgatccaaaaggttttctttgttcggtcaaacacagaaaaaactccatctcatccaaaacaccaatgcatctctggcaaccaggtgttgcttcccatacatcaccatcttgcagtggtataagctccgacaaagcctgcag

SEQ ID NO: 33993 - DNA, 375 bp, Oryza sativa
  Clone ID: PAT_MRT4530_38051C.1
ctaggtagaatgggcgggcctgattccaccattggcctccttgtggatgatagccattgttccccatgaactttgcttcttcacaggtcctgggacaatcatttgccgaatgccagcgttcccgcagacctcgcaagtgatgtgcaagtctaatgccttgaccatggcgggtggcgggtgcaccgtggaccaagtccacgcgcgcaccggctcgcggtgcaccacgtggcagacacgtggcggccacgacgaacggctgagcggaggtggcgccgacgtggtgccacgagggcacccacacgaggtggcatagggaggccacgtggatggcccagatcggctagggcggccgattgggcgaccacgggcaggcat

SEQ ID NO: 33994 - DNA, 441 bp, Oryza sativa
  Clone ID: PAT_MRT4530_38052C.1
atttgacacaaggacaaagttttcttgtcttacaagatctagtatctacccatggatataaatatgtacacccggggtcattgtaagagctttccacgatcaacacaattcggcacatcgccacctttttatcttttctactttttatcatccggcggaacttggcacctaacgcggggctgcatcggctttcgatctccggcgaaggggtaagccctacgttccgtcggcgcaggcaattgtattggctatattggcgtcgttcaatgctgcatcagtacattcgacctcttggatttctctggtttggttgatatatttacctacctatttatcatatatcttagttaatctagtttagaatcttaatttacttgtatcagctgagatttgttttagggtttatgctggtgtcggctaaattatcttgctagattagat

SEQ ID NO: 33995 - DNA, 225 bp, Oryza sativa
  Clone ID: PAT_MRT4530_38053C.1
atggcgctgggttatcacacatggatgggcatgagatgccagctgctgtcacgacggtcacgactttcctcccccttgcctccgccgctcgctccttcacactgtttaaccgacagccaccgctcccgggcatcggtcgtcggatcctctgcggccactgctggtgttggtggtagcaaagcacacctgcacatgaacgatcgcatctggatcgagcagcagtag

SEQ ID NO: 33996 - DNA, 433 bp, Oryza sativa
  Clone ID: PAT_MRT4530_38054C.1
ccaccttaagggggggcaataaaacccagggaagcgggaaaacaaaaacatttgactcaaaaaaaaagcagttccatgtttactttaaaaaaaaaaaagttttttgctacaaaaaaaaacttttttgccgaaaaacagaaaaaaaaaaagctttgcttgggggattacaaaggggggggcccaaacctaacataatttttttcccccggttttgggaaacattttacccccattattttttacccattttttttttggggtttccatctaacaggggggggcatatacacccagcccttgtagttttggaccttccaagcgggggttcttttaaaagttgcttaagggaatggccccaaagggccctgatgtaaaaattgttccacaaaaatcattgtttgaaacatcaacaactttaaaactaaattttccg

SEQ ID NO: 33997 - DNA, 108 bp, Oryza sativa
  Clone ID: PAT_MRT4530_38055C.1
gcacgaggattataacataactcctgaaaatttaaagtgaagtttactgactatattatcgtacagctggaagtcagataaatctgtattaaactagccaacatagat

SEQ ID NO: 33998 - DNA, 297 bp, Oryza sativa
  Clone ID: PAT_MRT4530_38056C.1
gcactggcccctgcgtgtgcccctcgctcggagacgcacagcccctggccacctggccaccgcgcagtcggactggagcaccctagccgtcggtctgctcccggatcatgcgcaggtacgcctccgcctgcgccgggtccacggacaaggccgccgacgacgacgcgtcccgccgccgcacgagcgcgcggaggcggtggttgagctgcgcgatgtcgtcgggtgccacggacgccgcgccgcgtctagaggagtccaagcgtacgacgcgggcagtcgacggtagagcgtgttaaa

SEQ ID NO: 33999 - DNA, 396 bp, Oryza sativa
  Clone ID: PAT_MRT4530_38057C.1
atggcggcagtcgtcgtcgtcgcgtcggtggagaggagggaggagggagtcgacggcaaggaggggagtcgacgacaaggaggggagtcggcggcgaaggtggggaggaggggagccgaggcggggaggagggaggagggaggaggggagctggtggatccgcagcttcacggcgtcgcgaaggtcgtccgtcacgcccgaggggagctggcggcgtcgcggtcgtcatcatcgtcgaggagggagctagcggcggaggcggggaggagggagccgacggcgaaggagggatggaggcggaggattttctgccaagcggacggtgagcttcaccctagtttacattttcctaggtggccattttgcttcgagggtcatatccggctggaaaattaa

SEQ ID NO: 34000 - DNA, 170 bp, Oryza sativa
  unsure (1)..(170): unsure at all n locations
  Clone ID: PAT_MRT4530_38058C.1
tgtgattcgacgacggggtatcgtatgtacgtacgtatataccgatgtattattgatgccacggggtgtagggtttggggtgntaacatggtaaatttgtggctccccactggatttgcaccgcactggtcgccactggatcgatttgctaaaaaaaaaaaaaaaaaaaa

SEQ ID NO: 34001 - DNA, 2320 bp, Oryza sativa
  Clone ID: PAT_MRT4530_38059C.1
ccgggctgcaggaatcggctcgtggtttttgtatctcaacaaccaaccaaccaatcaagcatctattgtaatatataagtttgtatgattttctacaaataggctcccaaaaacagttacaaaaccagctcaaggagggtacatctagtaatttggcacattgttctgttgtaaatttgtaatgtagttacattgtcagttcagtttcttctcggtatattgtatcatgaccgtctgataaaaaaaatattgctgtgtgccgttttgggttgtatacagagtgggatcagttgaatcatagcctatcttccaccgaaaagacggtataattttatgtcctcgaagatgatttgtgaaatccagtctcaaccacaagtgaacatttgcaaattttttcgaacagcccaatctcaaaataaaaattccttaagtagcactttgtttactatcgatttttttctcattgacgctaatcaattctggcaccttatcaagtaatctgttcatctcttctgaaaattcaagcttggctcgatttgtctttcctccgatgactactgtacttccgtcttgcaatgcccatatctgagaatgtgaaagataactaatgcaggtcgttaacatgagtgcaccaaatccagcatacacaataggaattcctggatcagtcttaagatcgagaccggtgctaccgatggcatcttcaataactatttcgttaccatctatttcaatcggtagttttgagcttggccgacgaacccccacaaacttaccctcttgatcatacaacacaatagactgcagatctcgagcaagcatcgatattcctttgacattggaagaaccggagttttcaagtggcaacaatgttccaaataacttcttatcaccattcaatttcaagggggccatggccaaattgaaaggaccttcaccatttttctttacttgcaatgctgaaaatccccaatcggtttggtagattgtgaccccaccatacctcaaggggtcgttcactttgatagtcttcctcatgacctctttgccatcaaggtcgaaaagtgaaagatcgctatagaattgtgaaacctctccactatcatagtactccatgtagaaccgattgacatggacttcagtattaaaaacatcaggcacaaaagagagaactcctttaggtttcatcacatctccgattacaaagttcaacccttggggtacatccaccgatcctttaaagctccctgttgcgctaagcgtggcacctgccatgatgaaaatcatagctatgtgcacaccgataggcgcaaaccgaccagccagtcctttgaaagcatacagagatggacccttagtgaatacctcatatccataacccatcaatataactcctaaatcctggatggatgcgcggggaagtgactccgcaaattcttgcttccggatgcttcctgctgaatgcatgaacgaccatcttctggcaaccttgacaatggggatttgagtggtgtaagtgcaggccatgagcgacgccgcgagcagcgcgaggaggccgaggaacaccggcgaggagaacatgtgatcgaacccgggagtgaggatccacctccacgtgatgaacccgaacaccgggttgtcctcggggaacttctcgaagtagtagctcggcgcctccccttgatcaatcaccgtgcctaaggccatgagcgcggcaatggcgaacatctcggagatggcgagcgggaggttggagagcagcgacagcgtcctcttcgtcaacctcctaaccaaccccaacgcggcgttctccttcctcctcgccaccttcccctccccctccccctccccctccccctccccgccgccgccgccgccccgctgcgagaccggtggcgcggcgtcgaagaacacgacctgcttcttggccttgccggttccagcaggtatggcctcgcgcttcaccccaccgccaccgccaccgccgcccgtcctccgcgcgtcgcaggagacatggacccgcctgcgcggcggcgcggcggcggggagggggaggcggggacggtggtgggacctggaggcgcctgcctctgcctggcaccgccccgccgcacccaccctgccgcctgcgggctaccggcggccgttagcccgctcccctcctcgaggccgccctgcgcggcagcgccgccgccacaccgcacggctgccggctgccgcttccctccgcgaccgcgagcaagcccgccgcgccgccgcacgccggcgcgcccgctcccctcagcgccgtgacgccgttgaatttcaccgatttgactag

SEQ ID NO: 34002 - DNA, 1614 bp, Oryza sativa
  Clone ID: PAT_MRT4530_3805C.1
atggcgaatttctttcccatggccctgaagggacaggcacggggttggctaatgaacttgccacccgcgtcggtccactcctgggaggatctgtgccagcagttcaccatgaactttcaaggcacctatccacgcccaggtgaagaagcggacttgcacgcagtacagcgaggggatgatgaatcccttcgctcgtacattcagcgtttctgccaagtccgcaatactataccttgcatccctgcacacgcggtgatctacgcgttcagggggggtgtgcggcacaaccgcatgctcgaaaagattgcctccaaagagccccagactaccgcagagctttttcagctcgcggaccgagtggctcgtaaggaggaggcctggacctggaacccctccggttccggtgtggcagcttcggccgcccccggatccgccgctcagacagggcggcgtgacaggaggaggaagaaaaggtcggcccattccggcgacgaggggcacgtcctcgccgtcgagggcgctccgcgggccacccgaaaggggaggcctgcgagcgacaaaaagaaagaggctggtactcccagccgggagcgcccagccagcaagtggtgctccgtccacaacacctccctccacggtctcgcggactgtcgcgcagtcaaaaatttggctgagcgaacgaggaagtgggaggaggacaggaggcaggaacgccgtgagggcaagtccgcggcagttccctccgttaaacggcgaagtgaggccagacaaaaggcccccgccgttgaccccgatgacggtgatgatgacctaggtttccaagaacctggggccaccattgccactgtcgacgggggagcgtgtgctcacgtttctcgccggagcttcaaggctatgaagcgagagcttctggccgcggcccctactcatgaggcgacgcgtcgggcgcggtggtcggaggtggccctcacctttgaccagaccgaccacccaccgtgcgttgcccggggagggcagattgcgatggtggtttcccccaccatctgcaatgtgaagttggggcgtgtcctcatagatggaggagcggctctcaacatcctttcccctgcggcctttgatgctatcaaggccccggggatggtgctccagccgtctcaaccgatcgtcggtgtgacgccggggcacacatggccgttaggtcacatcgacctaccggtcaccttcggtggatcagccaacttccgcacggagcgggtgaacttcgatgtggcggacctcggtctgccctacaacgcggtcctggggaggcccgcgttggtgaagtttatggcggcggtccactacgcctacctccagatgaagatgccgggccccggtggccccatctctgtccgtggcgaccttaaagtcgcgctcgcttgcatggagcagcgcgcggaccacctcgctgctgcgaccaagcccgagggtggtgacgagaggcttggcacctccgcccccaccgccccgaggcagcggattgccacatacgacgaggtcccggtcaaggaggttgccttgggcgacggcccatccaagaccacacggatcggtggtcttctggatggcaaatag

SEQ ID NO: 34003 - DNA, 450 bp, Oryza sativa
  Clone ID: PAT_MRT4530_38060C.1
ttaggaggctgtgaagataaggcagcgtgcagccatggagtgaggcggcatggtgcggctggaggaaaggcgtgaacaaccatgaaggtggcgcagcatgcggctggcttggtgggctggggtactgcggcgcccttccttgggtggcagcgtgacatatggtgcttgggggtggccggcaatgatgacccccgaggtggaggccctagccggattatcccgtgtcggtgccgctcgtcgtcgtcgttgccgcgcccgatgccgcgagaaccacgccgccgctgcccgagctcgccgctccggtcggatccgcgccggcgccgcccggtcgtcgtcgcgcccgccgccgccgcccgggctcgccgctcctggatccggggcggcggcgcctcctcgtcgtcgtcgtagcgcccgctgccgcgtctcgtcgtcggcgtcgcgcctcgtcat

SEQ ID NO: 34004 - DNA, 568 bp, Oryza sativa
  Clone ID: PAT_MRT4530_38061C.1
gtcaaagaagttatttaataatggaaatccacagtaccgtttttatctcctataaatatagcatgtcatctgactacatttttctgcaaacaaagccagggaagggcctgcaggaattaatgaagatgaaggccgctcttttgatgatactagtggtggccgtttctttcaatttgtgcacttgcaatattccagggaacatggaagaagaacatggtatgtacaaggatgtgcatgctgggaaggacatgcgcaagctgatcgatattgatggaaggactgcccctacaggccatgactatgaccatgtctgtccacgtggtatctatccttgctgacgcgtccggtcctagttctcaataggaccagaagctattggagccaactagtaattaatagcatcatctggaataattgtagaacaaatatttggatgtaagatttgtgtatgtttgaatccccacggggctattggtgtgagtgcaatatatctagtttatatggtttgtaacgtgtaattcttaaaatagtatatatatgctataaaaatactttagtgttccattgc

SEQ ID NO: 34005 - DNA, 327 bp, Oryza sativa
  Clone ID: PAT_MRT4530_38062C.1
cgcgaaggactaaaaatgggccctgggggtcggcccgttatttgggccctggtacctgatggataatccagttttctttatagggagcatttttaacaactggtgaattaaaggttaagcttgttttcttggtgaaatttttttcttataaaaatttgccaaaatttggaacccggacctttaaaatttaaaccctgggggcctttttaagggaaggtcatatacttttttcgggaggctgctccgaccgtttttgaggaggaaaacttttgcgcccccttgtttttataaatggctcatggctgggggagggggggttttgttttt

SEQ ID NO: 34006 - DNA, 149 bp, Oryza sativa
  Clone ID: PAT_MRT4530_38063C.1
atacagaccttacttcttatgcggtccttccgttcaaggacagctataacaccatctagtgcataaagcatactccaccatgctgggcatagatattataatcgatgagtctacccgactaacacaactacatttactagagcgatcaa

SEQ ID NO: 34007 - DNA, 204 bp, Oryza sativa
  Clone ID: PAT_MRT4530_38064C.1
atggtggcgtcgtggtcgtcgactcgaacgctaggcatggacgagagtgggccgaaatatcaagcagaattactcgatgagcggcgggcaacagggcaaggcatcgccgccaccaggctcaacgagctgctagctcggtggcggagaatcgccagtagaggcgtggggttcgaccgcttgcgcatgcccggccatccatcttga

SEQ ID NO: 34008 - DNA, 510 bp, Oryza sativa
  Clone ID: PAT_MRT4530_38065C.1
atgattgcattgcgcagtgcacaaacggcatattatttccagccagttcatccacagattgtgccggatccatcttcatttgaaaaaggaccattttatgctctaattcgatctaaagtgaaaaggttaattgcaagcagaggaatcaagaaacggcaacagagttctcctacaatggtgtccatgtcagaaagtccagaaccagaagaagctagtgcccaacaccaggagtcggcactggtcgcattaaccgctcggctctgccgccgctcgccgagaatcccctcggcctcggcggcggcggcggcgccagacggctaccctgagctccaagccgccctcgaagtgcatcacctcatcaccgcctcgctcctccgccgccagcataagcttccgcccttcgcaccgcgagcagcggagcaggagcacgacgaggaacgcggcgaggcacgcctccgcgaacctagtgacaccgtagccgcccatggtttggatggtcgagctgcttga

SEQ ID NO: 34009 - DNA, 348 bp, Oryza sativa
  Clone ID: PAT_MRT4530_38066C.1
atgacagaaggcatgacaagcagcaggacaggtatcttgaagaagatgatggtggttttgatccgtattgggattaagagaagggtccagaggattagaaatagggagcgttttcaggaggtacaacaagagatcaaccatcggctgaagaagacaaagaccaagcaggagtggcgcgttaagagcaaagtgctgtcagccgatgagattgaggccgacaaagcaaagaggctagccagaggaaaagctattgcatcttcatcggtaaacatggtgttcgtcctgccagtagaatatgaagctaatcaagccgatgtgaatgatgtggaagaagcttctgctgattaa

SEQ ID NO: 34010 - DNA, 248 bp, Oryza sativa
  Clone ID: PAT_MRT4530_38067C.1
taaaatttcccctttttccccaaaggggttaacaacatttaatttactttccactgattcatcccactactgttctgtaacgcaaaaaccttcaaaaaagcagcacttgtgcatgaaatcccttggaattgcaatatggatgcaaaactgcatctttagatgctagcatatctgacatagtgcggcaaacagtttagtaccagagcgctgaccagtagcaatgtcgctgagacagaatgaccgaggct

SEQ ID NO: 34011 - DNA, 302 bp, Oryza sativa
  Clone ID: PAT_MRT4530_38068C.1
agaggaggagctccggtctgcgctgccgagggagagcgaggccgcccgagtcgccttctccaacggcaccttctccctctctaaccggatcgtcgagaggcggtcggttccgttttacccattggtgcgagaggagcttggctgcgtattgcttaccggaaagaagctctcgttctccggcaaggagtgctacaaggcgctcctctggattagccaagggaaggttaatcgccccatgcttcaatggcttaaggaaaggagcggtgggccttttcctatccactcacccaagatcccattgg

SEQ ID NO: 34012 - DNA, 1885 bp, Oryza sativa
  Clone ID: PAT_MRT4530_38069C.1
cgctccgcttcgatcgcttcctccgttgccgccgatcccgccggcgagcggcatgtggccgtcgctccggcgagcagcagccgccgccggcggcgccaggttcaagaatgtttctcatttgcttcctacatgttctggattaatggataataacctgaatggtggttctttgaggggtctgggagaaattggctgccaggtgtcttgtcaagaactcccatttggttattcaggaactggtttcccctcgattcgaagactttcctcagagcctgcagaaaggccattcagaaacaaaaatgatagtgagatattgggggacgatgcgtctgatcaactaccagatgacaacttggaatgtgatgacgaacttgatcaacataatgttatgattgatgcgagtgagacgaaggctaagaatctaaggtcccagtttcctgcaatagatcgtagtggtgacacaaaactgcaaaataaaacctacaggtcttatcttttccaaattgtgttggatgctccctcaaattctctcaggcatgtgctcgataagtggattgaagatggtaaccagcttgaaagaaacgacgctatgctggttttgtttcacctcaagaaacaacatatgtatcggaaggctttgcagttcgtggagtggatggaaagaggaaagttactcaattttgaaaaacgtgactatgcttgtcatcttgatttgattgcacggagccatggtattgaaactgctcaaaagtatattaagagggttccactacctttcaggaatgaggtactctatgaaactctaattgtgaactgtgtgttggcgggcgatatccagaaagcagaagaagtcttcaaggaaataaaagacctatgtttgcgtttaactgtcaccctctgcaaccaaatgatactgctatacaagaggattgctcctggaaaggtagctagcgtactcatgctgatggaaaaggaaaatgtcaagccttctgcctttacatacagactgctgattgacttgaaagggcggtcaaatgacctggcaggcattgaggtggtcttaaatgagatgaaggcttatggcattgagccatctacttcaactcaaacaatggttgctaggttctacatccatggtgggctcacagagaaagcggaagcagttgtgaaggagatggaagcgcagctctcgaattcaaaggacggacggcatgtcatcaaatctcttcttcacctctatgctgccctcaacaagccaaatgatgtggccagaatatgggaaatgtgcacagaacctatgctggaggatttcttgtctgcaatcaaggcatggggtgaactcgggcttattgaaaaagcagaggagacctttgaggcgatggcgaacgcaccagaaaagctatcttccaagtactacaatgcgatgctgaatgtgtacgcgcagaataaacttctttctaagggcaaacagtttgtggaaaggatgtgccgtgatgggtgcccgaacggtcctctaacctgggatgcactcatcaatctctatgtgaattcaggtgaggtggagaaagccgactcattcctcctgaatgtggcagaagaaaatcctgacagaaagccgcttttcacctcgtacttcttcttgatgaagggatatgcgaaaaggggtgatatccataacactgagaagatatttgataggctgaagaatgtcgggtacgcaccaaggccactacattatgctgttcttcttgaagcgtatgtcaatgccaaagttccagcccatgggttcttggagaggatgagaggtgacaatgtgcgcccaacaaagaaaatcgttacatctcttgacaccttacagaaaggatggattgcaggcttagactga

SEQ ID NO: 34013 - DNA, 694 bp, Oryza sativa
  Clone ID: PAT_MRT4530_3806C.1
atgtcatggcacagggccggtgtcctgctgctaggggctcagtcctgcctacctgtcccgggggttccggccgtaggtgggattgggtcggtactcttgtctatggctaggatgggttggaaactatgtcacgtcttccgtccgtataccgtgatggcaggtatcaacataagtgcctacaagtatcaacacctcagcttaggaggtatcaccactagcaactacattgctatttgtgataccatcacaaaaactctaatgatacctatacctatatggccccagacatagcagagtcctccggtctcatcataagtgcctacaagtatcatcacctcagcttaggaggtatcaccgctagcaactgcattgctatttgcgataccatcacaaaaactctagtgatacctggtacctatatggtatcagataagacccggtacgatggtacctgcgtttcgcgctcatcgggggatatgagcaggcaaggtggtgctgcatgctgaaaatcgggaatcaggatggagaactagttcttgtgcaatttgacattggtggtgtcaccatcttctcgctgatgtctccgttgaggaagggacagatcgatggggacgtcaaggttgacgctgagcacgttggtgttgatagccacgacgtccaggacagccaggctggtgatgagcgggcagcatag

SEQ ID NO: 34014 - DNA, 303 bp, Oryza sativa
  Clone ID: PAT_MRT4530_38070C.1
atgaagccaccgcacgcccccttcatcaaggggtgggcaagatcggactactttgtaacggctaggcaatcattgagcccactcaacctggccgctctagcggctttggatcgccaagacgagacctccttcaaaattaggatgagcggtcagaccgccatgggatgggaggaggccaatgtggtgaccccggaccagataaaaaggaggcccagcggcccgaacctgtctacgtcgcccgtgtcttgtgcatttcctctctcgctgacgttcctcagatcgagggcgaagaacctcacttag

SEQ ID NO: 34015 - DNA, 357 bp, Oryza sativa
  Clone ID: PAT_MRT4530_38071C.1
atgaagccaccgcacgcccccttcatcaaggggtgggcaagatcggactactttgtaacggctaggcaatcattgagcccactcaacctggccgctctagcggctttggatcgccaagacgagacctccttcaaaattaggatgagcggtcagaccgccatgggatgggaggttgaagtgggcgtccccgggaaaagcgggcgagcggggcaggaggccaaggaggccaaatgtggtgaccccaggaccaagataaaaaggaggcccagcggcccgaacctgtctacgtcgcccgtgtcttgtgcatttcctctctcgctgacgttcctcagatcgagggcgaagaacctcacttag

SEQ ID NO: 34016 - DNA, 486 bp, Oryza sativa
  Clone ID: PAT_MRT4530_38072C.1
aaaaaaagctctcctcgttcgtctcctcctcctccccttctcattcccaaaatccaccaaatcccggcagcaaggcgcgatctctggcgcttccgcggttcgcgcgatccccgatcggtccgcgccaggggcgctggtttcatggattggagttgctgggacggctcttcgtgggaaccctcgtgctgacctgattcgtttgggcgtggttgatttgggtcttagtttttggtggactttgagtccctttgcgggtggttcttgtttgtaggctgtgattggggaatcctgggaggttgtaggaatgggattatctagattgctgtaaatagaggtgaagacaattcttttaggtactaatttggtgcacataaggtgagaattttggttaggactaggtggagatcaggattattgttagggaaggggatgggtggcctctgctcaaaggtttcagcggtagacaagtccccgagcgacaccacg

SEQ ID NO: 34017 - DNA, 105 bp, Oryza sativa
  Clone ID: PAT_MRT4530_38073C.1
acttcaaaatattacgattgagcaacaaagcagtgaaatgcacacagtgcattttgtaagcaccggccttattgcgatatactatacaggtagagaactcatcat

SEQ ID NO: 34018 - DNA, 381 bp, Oryza sativa
  Clone ID: PAT_MRT4530_38074C.1
atggcgtcaaggatggtggcggcgacggcacccaagacctcccatcgtggatgcgatcgaggacagagatggcggtggcggctcccgagccctcccacgcggatggcgtcaaggatagcggcggctgcatgttccgagccctcccgcgtggatggcgttgaggacggctgctcccgagcctcctgctacagatggcagcggcggcgacggctcccaagcctcctgccgtggatagggccgatgatatcggcgacggctgtggctcccgaggccttcacggaggtggtcgatgacggcggcagtgacagtggtggtcgacgacagtgctacctcagcgccaaccgcttcggcgctgaggtgcccaacctcagtgccaagtaa

SEQ ID NO: 34019 - DNA, 197 bp, Oryza sativa
  unsure (1)..(197): unsure at all n locations
  Clone ID: PAT_MRT4530_38075C.1
cacgcgtccggctcctgcctcggagatacatcgaagctgctacantcttcttccagctcaatcgtatcgacgcttgcatctctnttgctcagagtgatcgtcgttnttcacagcttgcaggannaaaaggcaaganagactgagagcagcagaagaggaagatgatgatgaccgaggtcgccattcacagcaaaagg

SEQ ID NO: 34020 - DNA, 3158 bp, Oryza sativa
  Clone ID: PAT_MRT4530_38076C.1
gccgcaccgcaccgttcgacgaccggctggatggcggaccaagggagtttccggccggcgttcccgccggttgataagagacgatgatcaatgattcaccccaaccagccgctggcgctgtccgcggcgaagaacgcgagcaccgtcgtcgtcggctcgccgctcctcgcggggtcgccggcctcctcccccgcggcggcgtgctgtagcagccagctgcagcagcggcgagccgccgggcccgggaggaggggcgccggtaggctcgcggcgccgaggtgcagcaccatcgagcaggccgccggcgtgtcgtcggccgtgacggtggacaggacgctgacggtgaccgccacggtgaccgtgcagccgcccatcggcgtcgtctacgccgcccggcggcatcgacgacctacaccgacctcatcggcaagacgctaccttcctcggagctcgtcagctccgagctcgacccaaggacggggaaggagaaggagacggtgagcgcgttcgcgcacaggacgatgaagcaggacacgtacgaggcggagttcgccgtgccggcgacgttcgggccggtgggcgccgtgctggtggagaacgagcaccaccgcgagatgttcgtcaaggagatctgcctcgtcaccggcgccgacgactcctccgccgtcaccttcgactgcaactcctgggtccactccaagttcgacaaccccgaccgccgcatcttcttcaccgtcaagtcgtacctgccggcgcagacgcccaaggggatcgaggcgctgaggaagaaggagctggagacgctgcgcggcgacggcaccggcgagcgcaagttcttcgaccgcgtctacgactacgacgtctacaacgacctcggcgaccccgacttcaagatcgagcacctccgccccgtcctcggcggcgacgaacacccctaccctcgccgctgccgcaccggccgcccccacaccgagatcgatccgcggacggagaagaggagggggccggtgtacgtgcctcgggacgagcagttctcggacgtgaaggggatgacgttcagcgcgacgacgctgaggtcggggctgcacgcgatgctgccggcgctggagccgctgctggcgaaccaggagctgaggttcccgcacttcccggccatcgacggcctctacagcgtcggcatcccgctgccggcgcagctcgccgccgccggcgccgccactgccacggccggcggcgccgcggcctcctcctccacctccaccaacatcgtcggcggcgtcatcccccgcctcgtccgcatgatcgaggacaccaccgaccacgtcctccgcttcgacgtccccgagatgttcgagcgagataggttctcgtggttcagagacgaggagttcgcgaggcaggtgctggctggcgtcaaccccatctgcatccagctcctaacggagtttcccatcgtgagcaagctggacccggaggtgtacgggccaccggagtcggcgctgacgaaggagttgctggagagccagatcgtggagtcggtgacggtggaggaggcgatggcgcagcggcggctcttcatcctggactaccacgacgtgttcctcccctacgtgcaccgcgtccgcgagcggccggagacgacgctctacggctcccgcacggtgttcttcctcaccggcgccggcacgctgtcgccgctcgccatcgagctggcgcggccgcagtcgccgacgaggccgcagtggaggcgcgccttcgtccacgggcccgacgccacggcgtcgtggctgtggaagctcgccaaggcgcacgtcctctcccacgacaccggctaccaccagctcgtcagccactggctccgcacccactgctgcgtcgagccgtacatcatcgccgccaaccggcagctcagccggatgcacccggtgcaccgcctcctccacccacacttccgctacaccatggagatcaatgccctggccagggagagcctcatcaatgccgacggcatcatcgaggagtccttctggcccgggaggtacgccatggagctcagctccgtcgcctacgccgccacgtggcgcttcgacgccgaggccctgcccgaggacctggtgcgccgcgggctcgccgttcgacaggaggacggcgagctcgagctcaccatcaaggactacccgtacgccaacgacgggctgctggtctggaacgccatcaagcagtgggcgtcggattacatcgacttctactacaagtccgacgaggaggtcgcctgcgacgaggaggtgcgggcgtggtgggaggaggtgcgcaccaaggggcacgccgacaagaaggacgagccgtggtggccggcggtggacacccgggacgggctcatcggcgtcttgaccaccatcatgtgggtgacctccggccaccacgccgccgtcaacttcgggcagtaccactacggcggctacttcccgaaccggccgacggtgatgaggaagaaaatgccggtggaggagaacaaggaggaggagatgaagaagttcatggagatgccggagcacgtgctgctggacaccatgccgtccaagatgcaggccatcacgatcatggcgacgctggacatcctgtcgtcgcactcccccgacgaggagtacatgggggagcacgccgagccggcgtggctggcggagccgagggtcaaggcggcgttcgagaggttcgcagggaggatgaaggagatcgagggcatcgtcgacgagcggaacaacgacccggagctcaggaacaggtgcggcgccggcatcgtgccgtacgagctgctcaagccgttctccacgcccggggtcaccgggaggggcatcccaaacagcatctccatctgagtttcgctagctaagatagctagctgcatttgggacaagattggagatggttaagatttgtacactaagatcatgtaccaacactaatagctcccgtgtatgcctgcctgccacgggagaggcatttgctagtgtgtttgagttactagaatgccacaaattagtaaagaggttattgaactaaagctcagttcgctgagttttctagaaattggcagtatgtcatgcggacggatgggatctgctggattcagcacatatcacccaagaaaaattactcac

SEQ ID NO: 34021 - DNA, 3186 bp, Oryza sativa
  Clone ID: PAT_MRT4530_38077C.1
atgccgcccgccagccttgtctcctcccctcccctcgcgtgctgccttcagctccatcgactcctccgccccgccgccctactcccctcgccaccacgcctccgcctccgcctccgccccctccgagccgattcctccccctcgccagacgccttcgctggctggtcggatggggacgaacaagacgaacaagacaagtcccctgggccatttcgagggcttctaggacctggccttgctggactcttctttcttgctggcctcaccttcgctgcaatttctttcagaagcaacgccgcaaatggacctaaggcacaaatcgatacctcgtctacaaacagtcaggaggcaccttactccactgataatacctgtaaagaggatggtctcaaggatgctcaagtttcgttaccaagtgatagcaaaggtgaaacaagcttggatgatgaagcacatagtagcactgacccactgcctgtacaagtaaatgccactgcggagggatcaactgaacatgagacacagcatcccttgcaaaacagtgagctagttcctcctgacaaatatgttcctagtgaggatgcaggtcaagcgcacaatctcgttgcttctgatggggctgaaagcctggtgtctcctttgtcaaactccacggaaccttccatcgctgcttatgactcgcctgacaaactttacggtgtaggtccctctgagggaactccttatgtagaagatacattaaactgcgaaattactttgccagaaaaccagcatctgggtgaaaccttaacgtcagatacaatgctaggttcaggtgatgcttcgcttatccaggaaatctctgacactgcagcttcatctgatgcaaaggacaaagatactgagcagaatcctgaacttcatagaaaaaatgggatttcaccatcaagaatgcctgattatacagaatatggacatgctgatcagttgctttcatttggttcaaatgatgtgtccacagaagcaaataagccaggaaatggctgatcagttgctttcatttggttcaaatgatgtgtccacagaagcaaataagccaggaaatggggtggagactttagcatccaatcaaaatgaaggagcagacgaattagaaaaccaaaacagtttatacgagtctacaacacccgacaaatcttttgcctcttctggaaggcactgctcccacactgctctctgcagctttacaggtgcgtactggacagattatggttccagcggcagttgacccagcccaggcaagcgcattgcctgaactacaggtcctaaaagtgcttgactgtgaagccctagctggtgcctgatgtccctgacgagattatggtcgaaagttattggtcgcaagcaattgtctatccaggaacacttcctccaaagtgtatccagcaatgtatattgagaatgtgactgaacttgcctttgatgatatcacacctgaagattttgattttccatttatacaaggcttggcagaagctgggttgatttccagcaagctttcgagatctgatatgaacgttcacttagatgtttacaatttctccaatttgttttctccggaatgtcctgtgtcacagttggaagatggctttggataaaaggcaattacctgaagtggacaaaacttctatgtacaaagcttctggatatatggacgttgataaaataaatgcagctgcttggcccgctttggtggctgacttggatgctggagaccagagcattacagctcttgcatttggttttacaaggctggttttacaaggctcttccagccggataaacccgtgacgaaaggacaagtggctcttgcactttcaactggtgattctgctgatgtggttatggaggagcttgctcgtattgaagcagagaaagtagctgaagatgctgaaaatgcacatgatgaactcattgctctgattgagaaagtatctggatggcattcatgagagagagcttaaaaaggaaggataaaaaattgagatgaagaaactaggtttgaattggacaagttgagagcagaaacagtggaagaaaataatgctctgatgaggggcatagtttgagtagaatctgagatggtagttctctcaaaatggaagagttcactaaatggacagcggcaaagagtgctgagcaagaaggtggagatctcgaataagaagaataggatatcaaaagaacaaacggaaatagagaatgacagacaggctgtggtgcagagtcaatatgaagttgaagttgagaggaaggctttatcaatggcccgggcttgggcagaggatgaagcaaagaaggccagggagcatgccagggcccttgaggaagcccggaaccaatgggagcgtcatggaatcaaggttgttgttgaaggagggcttgaagatgatgcatcagctggagtcacatgggccaatgctggcaaagaacatcaagttgacgaagcaattaaccgagctgggtctttgctggagaagctgaagtcaatgtctgctgagataaaagtccggtcttgccattccctggagagagtaatacagcatgtgaggtctttcatctcaattctaaagcagggagcagaagaagcaacgcagcgatttacagatctaggggctgctgcagctttgaaggcaaagaagttgtcatccgaagcacaggacaatgtctacgtgtttggttcaaccattggggataagtcgaagagggtggtggaggactgcaaagagggcctggagaagtttgtacacagattcaagacagactagccagtaactattagtgtctacaccaacagttgatagttcctgtcaaacttgagaaagaggaaccgtattagtttcttggaataaattcctccatgagtgctgctgctcaggtgtggtggactggtggtgttgtaaagtattgaaactgaaactagcacagaaggttccatagaataagccttgttctgtaatgtaatggaatccaaaaagagcaaggcagacagtgagtctccttgaatgttacttagacacaaatgcgatcactcttcggattccgaacgatcctcgttttttttctgagcaggaaagaaatgctttaagcttgtaagttcccaattaaaaagcttcgcgtctttttgagcaatgcacccgttgctgt

SEQ ID NO: 34022 - DNA, 464 bp, Oryza sativa
  Clone ID: PAT_MRT4530_38078C.1
caaatggcatggcagtgctcctggatttccaggatctcaggttggcttgatgaggactccataattatctgcaattgatggggatgtttgaatgttgcactttgctcgtgccgtttagaatattcttacatttggatgttctagagctaaacataatcacgagaattgtgatgcttctatggaattgatcctgcatccaataggataacactgtaaatgaatcgatcagactggcagcaagtcatagaaaagggtgaattccttattgtacccaaattttcatttggttgctgttgtcttgtgcattaatgtaattttcacaatcttgtaaggaagtgaggtgagtgtggactatgaggaattgttgatgtaaacagcgaagcataatccttgtgaactgtgattatcattggttgcactaaatagcagatttaggcatgccttcaaaaaaaaaaaaaaaaaaa

SEQ ID NO: 34023 - DNA, 187 bp, Oryza sativa
  Clone ID: PAT_MRT4530_38079C.1
cccacgcgtccgcccacgcgtccgcccacgcgtccgggcctgagccgagacggctcggcgcgcagcggaaaaagcggcggcgctccgccagggtctcaccgccggcgatggcgaggcgcgacggccaccatacgcacgacgcgacggactggtgcgtcgtggcggacaggtttgaggtggatccatg

SEQ ID NO: 34024 - DNA, 722 bp, Oryza sativa
  Clone ID: PAT_MRT4530_3807C.1
ggaaaagatggtttattgcgtcagcggctagggtttcggtggaccgggcgcacgggcgacggttcacgcgaacggacggccgagatcaaaccaatccaagatggacggccgagatcgatcgggtccacggcggctcacggaggacgaacttgatggcgtcagcgatgacgtcaccccggcggcggcggctcgggcagctgggacggctcgggcggcgcatgctcgccggcgaacgacggcgcgaggacgcaaacggaaggcaccaggacgaagcgggcggcacggcgaactcaccggcgaccaaaacgacggcggaagatcaacggatggcgacggcgacgaggaggaagcggcgaagctcttcgggtcgacggcggcgatgacgctccggcggtcttcggcgacggcgaaggggcggacgaggacggcgacgcgacggcgaacacgacggcggccttcccgagcgatggcgacggctggaacaacggcggcgcacggctggagcggcggcggcggcggcgaagctagggcacacggcgctagggcgactccggcgacgagaggcgaaggcgagggtggcggcgggtagaggagaccacggggaaccttttaaaggggctcggaggcgaaggcgaaggcccacggcgaccggcgacgaggaaggaaggttcgggaaagacgaatccgagacgaactcgaatccctcgatttccaaaccgatt

SEQ ID NO: 34025 - DNA, 2955 bp, Oryza sativa
  Clone ID: PAT_MRT4530_38080C.1
atgttgctggaccttcatgtgaatgtgctgcatagtgataccgtgctgcttttccgtgttttgaagcatagtagattgaaggactccaagtgatgggaggtcaatcttgatgggccgttatgaggttgggaagcaattaggacaaggaacatttgcaaaggtgtattatgcacgaaatcttactaccggccaagctgttgccataaagatgatcaacaaggataaggtcatgaaagttgggctaatggagcaaataaagagggagatttcaattatgagattggtgaaacatccaaatgttcttcagttatttgaggttatggctagcaagagcaagatttattttgttctggagtatgctaaaggtggtgagcttttcaacaaaattgctaaggagggaaagctcagtgaggattctgcgaggagatatttccaccaattgatcaatgcagttgactattgccatagtcgaggtgtttatcatcgtgacttaaagcctgaaaatctgctcctggatgagaatgaaaaccttaaagtctcagattttggtttaagtgccctggctgagtccaagaggcaagatggtctcctgcatactacatgtggaactccagcttatgttgctcctgaagttcttagcaggaaaggctatgatggtgcaaaggcagatgtatggtcttgtggagtaattttgtttgtgcttgtggctggttaccttcctttccatgatccaaatttgatagagatgtacagaaagatttgcagagcagacttcagatgccctcgttacttttctgctgagctgaaggatcttatacataaaatccttgattcagatccaagtactaggatttctatcccaaggataaagagaagtacttggtacagaaaaccagttgaaataaatgctaaaaacagtgaggcagccacaacaaacagcatctcttcaggtgtagctacaacctcaggttctgcagagtgcagcacttctgaggaaaatcaagggtccttaagcctcccaaacctgaatgcatttgacataatttctctctcaacagggtttaatctatctgggttttttgaggatacgcatggtcaccaggaagaacggtttaccactaggcagcctgtgacaacagtacttggaaagctgaaggaattggccaaacgcctgaaactaaaagttaagaagaaggataatggagttttgagattggcagcaccaaaggaaggaaagaagggctttcttgaacttgatgcagagatttttgaggtcaccccttcattcctcttagttgagttgaaaaagaccaacggggatactatggagtatcgaaagctggtcaaagaagatataaggccagcactcaaggatattgtttgggtgtggcaaggtgatgagcacctgaactcacaatctatcctgcaaggagagcagcagcagtccccattgccaccagagctaccacaggatcagttgcaaccatcattgccacaacaggagaagcaggacatgcctgaaccaccgttgttgccacaagtcaacgcctcaacggggaatcacaatgaccattggttggtccattggttgatgatgaaacctttcaggtttcctcccccagattctgtaccaagtacaggaagagacgaggaagaagggtcgtcgcaccatggaaatggctcaggcgcagccagagagaacccagagaacccattgccggacctggcgctggcgaaatccgagtcagaccggataaaagccttttaccagacggtcctctcggccattgtcgtgttcatcgtggcggcgctgtcaggatacaaggacatgaagccgctctactcgaccacaaatcacaagaaagttcacctcagcaacctccttgtcatcgaggggttctgcatgattgctaccttcatatgcgcggctgttttgatgatgtacgagttctacacgtgcagggacctcaccgtcctcatcgcggtcgccggagcgatgctggttgcgacggacacgatcctcgtcgtcatcgccaacagggacaacgcggtgttcgccgttcttttcgtgccggtgctgctgttagtcggcatggctgtgtacaccggagcatcgatggaggagcagccgccgaactcgccgcacgacggcgggtacgatgaggcaaccaaaagcacctttgatctggccaccgttagtacaatggctgcattgggtttgcaggggaccatcgtcttcggctacctgaaaacgcccgagaagaagagcgaacatgatgaccctccactggacctcgccgtctgctacatcgcctcgacggtctgcctgaccgtcatggcgttcttggacggcttcgtcgtgctctccgtctggccggaggccgtcgcgctggtgctgtactacgcggcacagctctgctcggggcggcagcccgggggaggagtcgggagccggccatggatcgaatttgtcttccggattgtcgccaccgccgggttcacgctcatggccgggctgtacgcggcgttcctcgggaccaaccactacagcgtgtacctcaaggccgccatgctcgtgctcctgatggcagttctctcgagcctcagccgtctggcgaacccggtttacatgcccgagatcgacggagctctccttgagttctgcgtcgccggcgtggcgctcgccttccccgccgtgtcgcttctggttgcttgtcccttggtgcttaaggtcttcgttgacctatatattcatcatagttctctttgaaccaaggaggtgggtggaaccatggtactccctccagcccataatataaaggattttgagtttttgtttgaactgtttgaccgctcgtcttattcaaaaaattttagatttattatttattttttgtgacttactttattatccagagtattttaagcacaatttttcgggttttatatttacat

SEQ ID NO: 34026 - DNA, 392 bp, Oryza sativa
  Clone ID: PAT_MRT4530_38081C.1
gacggttactcctcccactcccagatccccacctcgctctcactcccccactcttcccccctcgccgcgggggtcagatccggacggcgaaatgctgggccgggcgggggcgctgtccgcggcgcggagagacggatatgctcttaccgccaccattgttaggatcgagatgctcgcctgcttagccgggctggtattatttggtgatttgacactccaccagctagtgaatctcttaatgcccttaagatggagctggctcccgctgcattgcctcttttgaagggaatggtcggaacagctgatgttctggaggcctgcactgttgtgaatgttgcggctatggcgggtgggttccccatgaaagatggaatggaaaggaaggaagttat

SEQ ID NO: 34027 - DNA, 751 bp, Oryza sativa
  unsure (1)..(751): unsure at all n locations
  Clone ID: PAT_MRT4530_38082C.1
agacggccgcgcactacctgcctgcctcctagtagtgggggagcgcgcggcgcgccgtcgtataacctcgcgctgagagcggagcggaatcggaagatcccgaggggtcaagccacaaaagttcggcgccaaccgtgaggaagaaatctgagagcgccgggcaggcggagcagcataaactagaacggaggaagctcccgcggcggagaggaagcggcgtccatttgctgtccgcgaggtcgtgcctgatcggttcagatgggttcgtctgcggttcgctgcccgtcttcgtccagttcctgatcagctcttaacaggcagaggacttgggaatgcagaaagatgtgcttgcacgacaggaagttaatatttcgtgcaaacaagatcccagcttggatcaagccgatgttgctggaccttcatgtgaatgtgctgcatagtgataccgtgctgcttttccgtgttttgaagcatagtagattgaaggactccaagtttgttgatcatcacattgacgacgacggataacatctgctgcattcattacctatactttgtagatacttctataaagtgggtgtgggggggtgtttgctcattttgttgtgttccaatacttgatatgatgggatgggaggtcaatcttgatgggncggttatgaggttgngaagcaattaggacaagaacttttgcaaaggtgtattatgcacgaaatcttactaccggncaagctgntgccataaagatgat

SEQ ID NO: 34028 - DNA, 422 bp, Oryza sativa
  Clone ID: PAT_MRT4530_38083C.1
cgccaccgcccaaccatctcccctctcgccggagtactcgccgccgccttgctccaaccagcggaagctccgaggatgatctccgcgatatcgtgggtgcccaggggcgccgccaagctcgtccccgtcgaggcggagccgcccacgcaggaggagatcgacgaggccatcaaggccatcgcccagcacacggaaggtgggagcgacgccgacgaggacgccgacgacggcgaggagaatggcaacatggaggtcgatgccgccgccgatgaggaggaggaggaggtagacgaggtcgcgcaggcaaaggccgcggccaaggcgctcgctaagggcgctgtcgatgacgtcgccgacgagctcaaggagctcaacatggacaactacgacgaggaggaggaaggtctcgagattttcagctc

SEQ ID NO: 34029 - DNA, 455 bp, Oryza sativa
  unsure (1)..(455): unsure at all n locations
  Clone ID: PAT_MRT4530_38084C.1
gccgctctactcgaccacaaatcacaagaaagttcacctcagcaacctccttgtcatcgaggggttctgcatgatagctaccttcatatgcgcggctgttttgatgatgtacgagttctacacgtaccaccatgagatcgcccgcgaggtcgtcgcaggtgcagggacctcaccgtcctcatcgcggtcgccggagcgatgctggttgcgacggacacgatcctcgtcgtcatcgccaacagggacaacgcggtgttcgccgttcttttcgtgccggtgctgctgttagtcggcatggctgtgtatctttgtnncatcgatggaggagcagccgccgaactcgccgcacgacnncnnttaccatgaggcaaccaaaagcacctttgatctggccaccgttagtacaatggctgcattgggtttgcaggggaccatcgtcttcggctacctgaaaa

SEQ ID NO: 34030 - DNA, 418 bp, Oryza sativa
  Clone ID: PAT_MRT4530_38085C.1
ttttgcgacccccgctccctcctcctcttcctgtgccacaacggcgcacggcagcgactcccccgcccactcctgtcctcccactggcggcgcacagcagcgactcctccactgccttctcttctaccggtgagacaaatctagcgccctctccccccccccccatacaccgttggcgtcacttgggagaagacgtggtggcggtggccgtgggaacctctcccctcgctctctcacctcctaactcggttaccccgagccctcgcagtggcgacgacctccctgagcgcccctaccctcctcggcaagcttctccaagccttatcaacatcaaccggtatttgcctattccccgccccccccccccccaaaaaagtggggtccacatgcaatatctgcgcgttaaaaggtcttttcc

SEQ ID NO: 34031 - DNA, 352 bp, Oryza sativa
  Clone ID: PAT_MRT4530_38086C.1
gcgaacatttttatgtactaacacagtttgcttgagtgggctgacgctatttcgaatgatgttcagtgttcttacagatttcattgctgtttacattttgtatttttcttctatcaaaccagatcaagctgtagaagaaacaaagtaacacagatttttttttcagcaacctacaatgtcgatacaaagttgtctttgcagaaactttttttgttctcgttggtaatgtactccgtatgaacaaaatataaagaatggacatagttgtttttgttaaaaaaaaaaaaaaaaaaaaaaaaaaaaaaaaaaaaaaaaaaaaaaaggggaggaagtatagggggtcctagtttac

SEQ ID NO: 34032 - DNA, 260 bp, Oryza sativa
  unsure (1)..(260): unsure at all n locations
  Clone ID: PAT_MRT4530_38087C.1
gttggatgataatgtacaccgacgcccgataaaccggacatgcgagaatctgagcgcgtcgaacaacatcatgcatgcggtgcttgcagcttatcgacgcgatcaagcacgccgtggaagcagcgtgttcgggcgtcgcgtcgtgcgctaatatcatagcgttggcagggcgtgatgccacatactttctgagcggcgggacggtatactttgacatgactncgggccgatgggatgggtccttctgcaaagactcaagc

SEQ ID NO: 34033 - DNA, 1170 bp, Oryza sativa
  Clone ID: PAT_MRT4530_38088C.1
atgccggccaccgattcctcgtcggcggccgcgccgctcacctccttcggccgctccttcctctcccaccgccgcgaccagatccctcctcccccacccgaccaccactcccactcccacacccaacacccctcttcctccgacctcgagatcgacgccttccaccgccacgccgccgacctcctccacgacctcctctccgactccaactccgacccctccgccccggacctcctctccctcgcttggacgcgccgcctcctcgactccttcctcatctgcctcgaggagttccgcgctatcctcttcgccctcgctgactcccagcccctctcccgccccccgctcgaccgcctcctcctcgacttcctcgaccgcgccgtcaaggccctcgacctctgcaacgccctccgcgacggcctcgacctcatccgccagtggcgcaagcacctcgccatcgccgccgccgctctcgccaccgcccccgccgcgcagcgaggagaggcccagatccgccgcgcccgcaaggccctcaccgatctcaccatcctcatgctcgacgacaaggacgctgggggagtcgtcggacagcgcaaccgctcattcggcagcgccagtactactcggactcccttccccacggccacagccaccaccgccggagcagcagcggcgggagctccgggtccggctctggctcccatctcaggcctcgcctccgccgtctacgccatgggcgccgtgctgttcgtcgtcacctgggcgctcgtggcagcaatcccatgccaggaccgcggcctccaggcgcacctcacagcggtgcccaggaccttcccctgggctggccccctcatcacactcttcgaccgcatcctcgacgagtccaagaagaaggaccgcaagcactcatgcggcctgctcaaggagatccaccagattgagcgctgctcgcggcagctcatggaggtcactgatgctgcggagttccccttggccgacgacaaggattccgaggtgcaggaggccacgcaggagctggtgcaagtttgcgggtcactcaaggatgggctggaccctcttgagcgccaggtgcgggagatgttccacagggttgtgcgcacccggacagaaatcctcgactacctcagtaggccgcacaacgccgggtga

SEQ ID NO: 34034 - DNA, 1530 bp, Oryza sativa
  Clone ID: PAT_MRT4530_38089C.1
atgccggccaccgattcctcgtcggcggccgcgccgctcacctccttcggccgctccttcctctcccaccgccgcgaccagatccctcctcccccacccgaccaccactcccactcccacacccaacacccctcttcctccgacctcgagatcgacgccttccaccgccacgccgccgacctcctccacgacctcctctccgactccaactccgacccctccgccccggacctcctctccctcgcttggacgcgccgcctcctcgactccttcctcatctgcctcgaggagttccgcgctatcctcttcgccctcgccgactcccagcccctctcccgccccccgctcgaccgcctcctcctcgacttcctcgaccgcgccgtcaaggccctcgatctctgcaacgccctccgcgacggcctcgacctcatccgccagtggcgcaagcacctcgccatcgccgccgccgctctcgcccccgcccccgccgcgcagcgaggagaggcccagatccgccgcgcccgcaaggccctcaccgatctcaccatcctcatgctcgacgacaaggacgctgggggagtcgtcggacagcgcaaccgctccttcggccgcgccggtactactcgggactcccttccccacggccacggccaccaccgccggagcagcagcggcgggagctccgggtccggctctggctcccatctcaggtcactctcctggagcgtctcccgcacatggtccgccgcgcgccagctgcaggccatcgggggaggcctcacggtgccccgcgcgaacgacatcgccgccaccggaggcctcgcctccgccgtctacgccatgggcgccgtgctgttcgtcgtcacctgggcgctcgtggcagcaatcccatgccaggaccgcggcctccaggcgcacctcacagcggtgcccaggaccttcccctgggctggccccctcatcacactcttcgaccgcatcctcgacgagtccaagaagaaggaccgcaagcactcatgcggcctgctcaaggagatccaccagattgagcgctgctcgcggcagctcatggaggtcactgatgctgcggagttccccttggccgacgacaaggattccgaggtgcaggaggccacgcaggagctggtgcaagtttgcgggtcactcaaggatgggctggaccctcttgagcgccaggtgcgggagatgttccacagggttgtgcgcacccggacagaaatcctcgactacctcagtaggccgcacaacgccgggtgaggactcattgcttgatccaactttgtgtgaaatgcagccgctccaccgaggtagcttctctgtaaaagttagcatctacatatacatgtctctgcatgaagaaggcctggccttagttatgatacatttgagttatttctttcattttttttctctccttttgtagcttgtgaatccttacttgagcagttcttcgtactaatggtctaatatcatttatttcattcaaaaaaaaaaaaaaaaaaaaaaaaa

SEQ ID NO: 34035 - DNA, 152 bp, Oryza sativa
  Clone ID: PAT_MRT4530_3808C.1
gaaacaagtgcgggtttctgttatattatacatttatactccatacaactttggccacaaatttatgctatattatacatttataattacaaactatttaaagttaaattacttgtcttggcacttaaacacatccctttttcaccagaaag

SEQ ID NO: 34036 - DNA, 583 bp, Oryza sativa
  Clone ID: PAT_MRT4530_38090C.1
gcagagggatctccctcaccggtgccccactggccaaacccccgcgccaccaacttcgcctcggcgaggcaaacccatttccccacttccccttcctttcccccttcgaaataagccaccaccgccacttctccttgccgccggagataagcttttcccctagccgttccggcctcctcccttctttccttcgctagacgacagcttccctggagtgcgtgttgctcgggaacacgcgtggccgccgacgtcgtcgtctcccggccaccagggcaccggcgccccttctctccttctcctgtgttggctggaaggaaaagaaaagaagagaacacgggaagaagaagaagaagaagaagagaaagaaaaagaagagaagatactgacaggtgggcccctgtacagtaacttttatattttctagatttaattcaaatcccaatctttagaagcccatatctcctaaaccatagatccgattccgatgaaacttggacctaaattcatataaattcaaaagctatattttgatatcaaatttgctattttaccatttgaaattccttaatgccatttgaatcta

SEQ ID NO: 34037 - DNA, 844 bp, Oryza sativa
  Clone ID: PAT_MRT4530_38091C.1
tttccagcatctcgctcgccgctcgcgccgcctccctcgccgccgccgccatccccatctccgccgcaaccaaggcttgaggctactggccgtggagggggaacccaagagcgagccgcgggcggggaagagaggagggatctaggcgagagagatggggtggaaggctgccgagaagctcatcaggcactggaagatcctccgcggtgacaacgtgatgatcataagaggcaaggacaagggggagagcgggctcatcaagcgggtcattcggtcgcagaaccgtgtcatcgtcgagggaaagaatttggttaagaaacatattaagcaaggagaaggacatacaggtgggattttctcaattgaagctccacttcatgtttcaaatgttcaagtacttgatccagtcactgggaaaccatgtaagattggatacaagtatttggaagatggaactaaagtcaggtttgctagaggaatgaatgcatctggtgctgtgatacccaggccagaaattttgaaggagcgaagaaagccaagacctacatcacctggcccaaaggatacacgaattgaacatgtgctggagaaaacctatgatgccaaggctggaattgggatgcctgatctataggctagtgctgtctgggttgctactcagggagagttcattgtatgtgtgacaacaccccagttcagatagcaggaagtctgtcctcaactttgcacctgtattgctctcgaaataattttgtaatggtcactgaaaaagcatcacccgcatgtttttagtctctgttttggttagattctttatccccctggaaatgcccccacatttggc

SEQ ID NO: 34038 - DNA, 302 bp, Oryza sativa
  Clone ID: PAT_MRT4530_38092C.1
ctgacttaatgcatattttggtcgatactcaggttagctcgatcatgagtcatttgcatcagtggatgatgcaagttcaattattcagcagattgtgtcctttgaggtttgattgttattctgtatgacacattaatgggaacttcattttattgcttgtctggatatgtaaattgatagtttctgatacaattctggaccaaaacttaatatcaattattgaagtgctgaattattcgttgaatgacatcatcagtggttaatattcattgttcttgtcccaaaaaaaaaaaaaaaaaaaa

SEQ ID NO: 34039 - DNA, 954 bp, Oryza sativa
  Clone ID: PAT_MRT4530_38093C.1
atgtcagctctcatatctctcttcttttctctctctatcttcctccttccatgtcagctctcgggcatcaactacgaccgtgtcggcaacaacctgcctcggcgaatggccatgtcgtcgatgctgtcgtcgctcaaggtcggtcgagtctggctctacgacgccgacccggccaacactggggtggagctcgtcgtcggtgtccccgacgaatgccttgccgcagtgtcaactccctgcggcgctgcatcgtggtgcctccacgaagcactcgcgcagctcggactcgacaagcaggtggtcatcaccaccacacacaacctcggtgtgctcgccacgtcgtacccgccatcgtcggcctacttccacaaggacctcctcccattgctctgccccatcctcgacttccacgcccgcaccggctcgcttttcctcgtctatgcctacccttcacctatgccaaggaccccaccggcgtcgagctcgagtacgcgctgctcgagccgacctacgtgcggcgtttttcgtcatcgtccagccctccgccgacgtccgcaagctgctagccatcgtcaccgcctgggtaggctgctacgtgcgcaccgcgtcccactcgaggaggggatcgacctcgccgccgccgtcgtgcgcgagggctccggctgctacgtcgtcgccgtcccccgccgtgaacaccgcggcggccgctcccgccgtcattgctgtcctccgctgcgggagtggccgcagttggtgatgaaggcgcggctctcctccccgctgtcctctgctactcccgccgtcctcgccatctcctccaccgcgacgagctcgagccttggcaatcgatgccgcccggtgcctcttcgccaccacaaccaccccgccttccacctccatgccctctccactcccgccaagggagggctggacgatgacgaagacgacgggtag

SEQ ID NO: 34040 - DNA, 996 bp, Oryza sativa
  Clone ID: PAT_MRT4530_38094C.1
atgacaagaagattctggtcctcacatcatgggagcactaagctatgtcactgtcactattctggaaatttctcaaggtatttgatagctatcgcgatttctgtaggccttccagactctgttggaggagttttatggggacccgtgtcaaatttggcaacaaggtggggattaagtgatcttcactgtaagggtatggttccaattgatgaggatgaaactcacgaaggcataaagacaattaggattcagaaagcctgtgaattcaccaccagttcagttctttgcgtctgcattatcacctggaacatgaacggcaagatgtctgtggaggatgtaacaaagttagtgagctccaacaggaagtttgatttgctagttttcgggttgcaagaggtaccaaaatgtgatgttgcacaggttctgcaagaaaccatggctgagacacacattctattatgccagaaaaccatgcagtctcttcagatgtttctttttggagcaaagagttcagagaaatacatcagagagttgaaggtggacaaacatgcagttggaggttgtggagacataacggtgtggcttggtgacttgaattacagactacagggaataagctcaataccagcaaggaagttgattgaagagaatcgtcaaagtaagctaagaggcaaagaccagcttctgcaagaagctgaaaagggtgaagtattcaatgggtactgcgaagggaccttgttgtttaagccaacgtacaagtataacatagggagtagcaactacgatacaagttataagatcagagttccttcttggacagataggatattattcaaggttgaccacacttctggcttggatgcggtcttaaactcatacgaagcacttgattgcattaggagttctgatcacaagcctgtgagagcccatctttgtctgaaagtacatggtgacagtgcatagatagacatttccagattaaaaaaaaaaaaaaaa

SEQ ID NO: 34041 - DNA, 399 bp, Oryza sativa
  Clone ID: PAT_MRT4530_38095C.1
atgctgggtgacaagattggacacaaggttgcacacggtggacggacaccatgtgaggaggtcttcgcaacggagttcgcaagggaggccaagccaatccagcccttcttcgtggctcaagatgatggatggatcagctggcagggaggccaggccgagcaggcccaagacaagacgacggcccatggcatcgacaccatgcatgggcaagcgcgggaaatcgcgcgaggcatgcgcgcgcagtggacacgcggcggcaaggaattcgatcacggggcccacgttgaggagcacgcgggcacgcacatgggaggaatttggtgcagactctttgtgaaaagaggatcccgatgtggcaagcgacgtggcttcaatccaggctacttccttaggatgtaa

SEQ ID NO: 34042 - DNA, 496 bp, Oryza sativa
  Clone ID: PAT_MRT4530_38096C.1
actgatccttaacgccgcctttttttttttttgtataacgtatatttatcgatgtaccatccggccatttggcttgcatcggcatgaaaaacggcaaatttggggctttattgcattcaatagacaataggaattgttgtcgaaagcaatccaacggaaaaatctaccggggatttgctaagtgatcttgatttcactaaattgttacatcagaagcttttttgaattaatgacggtgttagagaagaggggttctttagatggctgttccattatcttccggaaggttgaagcaaggcaagtgcaggacagtgagtgctgaacttacagtggcctaatggagctttcttaaagacataagtttgagcaggcatacaggtcggatcagtgaatatacccttaagcagcataacgccattactattttgacctctatgtgcctgaaagaattcaaggatcccacaaaaccaaaggtcaattgtgctgatctgcgacg

SEQ ID NO: 34043 - DNA, 288 bp, Oryza sativa
  Clone ID: PAT_MRT4530_38097C.1
atgagggcgacggggagaggtgctgcggccacggggagacacgggaggaggctaaaacgagagaacggaaggagagggttccattttatagcagaggggaatgaacgggccacgggagaggcgtggaacggtggcggaaatggcgcccggcggccatggaaggtggccaggaatggcgcgggcgttccgggcaatggagggtgccattcaagggggaaattgggggaaatcaaagaggatggaagggggattaattccccccaatcaattttggaatccaatgcttga

SEQ ID NO: 34044 - DNA, 505 bp, Oryza sativa
  Clone ID: PAT_MRT4530_38098C.1
agaatagcttctattaatgagcaacttcttgccatgaattaattaagttctacgaaaattagggatcaacttgaggtacaaagagaactcctgtacctaaaaagcaagtactaacatagttatgataggtactagtaggagtacgatctaataaatataagtataacatttcctatcacgctacaagtacgagcttcgcatgcaagggttcgtcatctcgttgcgtcctgaaggattacaccatctcaactccggacgagttgacggcgggggcaccgccgttggcagaagcttcctcgtcgtcggcctcgccggacatctcctccagcgacttccctttcgattccggcacgagcatccatgtcatgaggaacccaacgaggttgcacccggcgagcacgaagagcgcgttccgcacgccaatcccaggtttggagccggcgtcgacatgcgccttgtcctgtggctgcgccgcggtgaggaaaccgaatgctccgatgatcgc

SEQ ID NO: 34045 - DNA, 442 bp, Oryza sativa
  Clone ID: PAT_MRT4530_38099C.1
aataaaaaaaaagaacaaaaaagcagacgagaatagtagtagtactactagcgcgtaggaaaggaaagtgcagctttcccgcgagcccatgaccactcgtttcccagttcccacatccacttccacggtcgacggggatacccgtagaccggatatagatgatagtggggtccattgatacgaggatctacgtaatacgacatcaagcaaacagaatacaaggattatactggttcaggcaccttggaaggtaatagccctaatccagttggtatgggattatatgatagaaaccacagattacaaagggaatagcagaactcgatgatactgacgagagcgtagttgagttggttcaactagatctcttggcgacaatattcgatgccttaggtcctgtccagggggtcccttatataccgcgggtcagttgatctccaag

SEQ ID NO: 34046 - DNA, 1167 bp, Oryza sativa
  Clone ID: PAT_MRT4530_3809C.1
atgacccgtaaagcaaagatctactgtatgggcggcaacgatttatacaaaaaagcgccaaacgggatacttctcaaatgcgtctccaccgacgacggcagacaactcctcctcgacatacatgaaggcatatgcgggtcacacgccgccggtcggacattggtcggcaaagcctttcgacaagggtttttctggccaaccgaccttaaagatgcatgcgacatagtccagcgatgtgaagcctgtcaattccacagcaagcacacaaagctacctgcacaagcactccagacaatccctctgacttggccgttctcgtgctgggggctagacatacttgggccattcccacgaggacagggcggctacagattcctatttgtagcaatcgacaaattcaccaaatggatcgaagcagtacccactggggaaatcaaggccgataacgccatcaagttcatcagaggtatattatgcagatacggactaccgcaccgcatcataactaacaacggccctcaattcatcagcgccgatttccaggattactgcatcggcttgggagtcaaaatatgtttcgcctcggtctctcaccctcaaagcaatggacaagtcgaaagggcaaacggcatagtactacaagggataaaaacccgcgtctacgacagactcatgtcacacgacaaaaaatgggttgaagaactcccatcagtactatgggccatgcacaccacactgacaacatccaataaggaaacacccttcttcctcgtgtacggctctgaagccatgttccccggcgagttacgacatcaaagtacacgagtacagaagcattccgacgagaaccaggagaaacagcgagacatcgatgtaaaccttctcgaggagcatcgtgagcgagttgccgttcgagcagctagctatcaacaagccctccgccgttatcacgagaagcgcatccgagcatgcatactttcgatcggcgactatgtcctcagacgagttcaaacccaagcagggcaaaacaaactctcaccaaaatgggaaggaccctacacgatcacacaagtcttgcggccaggcgcattcaaaatcgcagacggcgacgatcgcgaactagcaaattcgtggaacattgaccaactacgtaaattctatgtatga

SEQ ID NO: 34047 - DNA, 501 bp, Oryza sativa
  unsure (1)..(501): unsure at all n locations
  Clone ID: PAT_MRT4530_380C.1
tttctgccttcttattttcttttttgttgtgctttcttttgttacattatttgtttatatgtgtcagcatacattgctagggttttctgactgtcggcaataaacacaattttcgcttgcactaacaagtaccttatattttactaatgagttgagtagttcaaatccttagctatattttgtaggtctaccaaggaaatacctatctcatttatattgttagatgcgactcttgtcatcaacaaaacttgaaagcatggattacttaacactggagactactaaatgatactacaatacaacatgacagtaattctttcttgaataatcatgttttgtcttgtgccacatttgtttgcatgcccttgtccgtcagtcacacaatatcgttgatctttaaactaaatcttgcttgaatggcattagggggaggcaagtgacagtgggagcatacaacagatttnggaaaagtggtcaaccgatggcacagaaaagcaagta

SEQ ID NO: 34048 - DNA, 309 bp, Oryza sativa
  Clone ID: PAT_MRT4530_38100C.1
atggggcttctactcgaagttaccgaagcacaggataacatgggccccatgtggttgcaggaggatgtgacggggcactggttaacctttcccattattggccgtcttcagtttccgaggcttcagattctagaggtgtaccagctacagatgatgcacctcgactttgtgcatttctacgacatgttcgtcagcatctcgtcatcaatggaactattctactggtacttcaccgtgtggcacgcgcgggatgcgtctacttccacggccgccacgtcatggacttcctcccacattgttgaagcataa

SEQ ID NO: 34049 - DNA, 816 bp, Oryza sativa
  unsure (1)..(816): unsure at all n locations
  Clone ID: PAT_MRT4530_38101C.1
ccacgcgtccggatggaagttccagatgttttgatcgtagttcacttgaaaggatttctcccagggactctctttctcttgccagcacaagtgcacgtatagatgaattggatgattgtgtcgagggattgtcattgcttcatctagcatgccgtgttgcagatgtgggtatggtcgaacttctcttgcaatatggtgccaacgtaaattctgcagactctagaggtcgaacgcctcttcatcacagcatcttgaaaggacgacatatgtttgcaaagttgttgctatccaggggcgctgattcacaagccacggaccgagatggtagaacagcattacagtatgctattgacagtggaactattgacgacgaagagattcttgttttgttagaagacccaagtagataatccattagctaccaataccccttcagttcagcagagcaaagctttgtgtgctcagttgcctccatgacagagtcaaccggcacagcaagctccaagtttgtgtcgccgatgatcacaatctgtgacgagaacagtattggtgttctggagctgcattgtgccctcctcgttttccgggtctcgtcttagcgtgacgaatgaccagaccccaatttccttctggttgcagtttgcaaagctcttttggtctttctttttcccctgtttgctgatgatgcactgtgagttntgtacattgcaattggccccaactccccaacatgaagntgctgcccttctgatgacagatgatgatgtacatatagtgatcccatgtaccactatgatttttcctgcaagctttact

SEQ ID NO: 34050 - DNA, 2773 bp, Oryza sativa
  Clone ID: PAT_MRT4530_38102C.1
ttctcggcggcggcgggcggcggcggagatgtttttcaccaggctggatgactcgcccatgttcaggaagcagatacaatcccttgaagaaggttctgaattgctgagagagagatgtttgaggtttcataaaggttgccgcaaatacactgaaggactaggggaagcatatgatggagatattgcatttgcaagttcactggaagcatttggaggggggcataatgatccaatcagtgttgcttttggaggacccgtcatgaccaaatttacaattgccctgagagaaattggaacttacaaggaagtattgcgctcacaggttgagaatatgctaaatgacaagttgctgcaatttgtggacattgatttgcatgatgtgaaggatgccaggaagcgttttgacaaggctagccttctctatgaccaggctcgtgagaggtatttatccttgaagaaaggcacacggacagatgtagcaactgcggtggaggatgtgactgcactttcaaatatcgaggccaagaaaagatttgaatttttagaggctgtcagtgggacaatggatgcacatctgcgctatttcaaacaagttcttgcttatgcacagcaatcaagggaacggtctaactatgagcaagctgctcttgtagagaggatgcaagagtttaaaaggcaaattgatcgggaaagtcgttggtcaccaaatggcataaacgattcccctaatggtgatggaatacaagcaattggtagaagttcacacaaaatgattgaggcggtgatgcaatcagcttcaaagggcaaggctcacatttcagcatggaaattcatgtcatattttaaaagtggttatactaaccaaagaagtagcgctccgtcagagcatggttctgggttgcttagcagatggttctcttctcattatcatggtggagtacacgatgagaaatctgtagcaaggcataccgtgaacttgctaacatcaaccattaaagctgatgctgaccaatcggatctgcggttctgcttcagaataatttctcccacaaaaaactacactttgcagcgtcttctgtcgagcccaaagggtagcggccataatcgaactgccagcgaaagtagttcctttagtagctcgacagaacttgaccattccattagtgaagactgcatgctggaaaggaactctggaagtgggtattttgaccactctggcagagccatccagcatcaccgaaccagcatgaaacctgacaagccaattgacttgcttaggaaagtggtcggcaataatatttgtgctgattgtggtgcagcagagcctgactgggcatccctaaaccttggaattcttctatgcatcgaatgctctggggtacacagaaatctcggtgtgcatatatctaaggtaagatcactgacacttgatgtcagggtctgggagccatctgtaatcaatctcttccagtcattaggaaacacatttgccaacactatctgggaagatatgttaccttcatcaagcagtgttgatcatggtgataattcaagggctgatggactagaaaacacatcacataacttaattttcagcaagcctaaacactcggatcatattgctgtgaaggagaaatttattcatgcaaagtatgccgagcgagattatgtgcgaaagcttaatatggatgatagcctggtagctcaacagatgtgggaaaatgttagttcaaacaacaagaagggggtttacagtctgattgtggggtcaaatgccgatgtaaatttaacttatgggcagacatcatttaattcggccctaacccttggaaaagctctacttttacaagagcagccaacttcaccatcagatggaagttccagatgttttgatcgtagttcacttgaaaggatttctcccagggactctctttctcttgccagcacaagtgcacgtatagatgaattggatgattgtgtcgagggattgtcattgcttcatctagcatgccgtgttgcagatgtgggtatggtcgaacttctcttgcaatatggtgccaacgtaaattctgcagactctagaggtcgaacgcctcttcatcacagcatcttgaaaggacgacatatgtttgcaaagttgttgctatccagggaatgtgtcaatattatcaaattaggaattgtacctggagagatgatcagtggtagttggttcctacaatgtggttcttggggcgctgattcacaagccacggaccgagatggtagaacagcattacagtatgctattgacagtggaactattgacgacgaagagattcttgttttgttagaagacccaagtagataatccattagctaccaataccccttcagttcagcagagcaaagctttgtgtgctcagttgcctccatgacagagtcaaccggcacagcaagctccaagtttgtgtcgccgatgatcacaatctgtgacgagaacagtattggtgttctggagctgcattgtgccctcctcgttttccgggtctcgtcttagcgtgacgaatgaccagaccccaatttccttctggttgcagtttgcaaagctcttttggtctttctttttcccctgtttgctgatgatgcactgtgagttttgtacattgcaattggccccaactccccaacatgaagttgctgcccttctgatgacagatgatgatgtacatatagtgatcccatgtaccactatgatttttcctgcaagcattactagtttggtgaacatgac

SEQ ID NO: 34051 - DNA, 186 bp, Oryza sativa
  Clone ID: PAT_MRT4530_38103C.1
atggagatggaacggcaacacagccggtggaagttcgagggcgcggcggtgatggacaatagcatgtggacaagcccgaaggccgtgcggatctgggagaccattgcggtgggggtaagaagcaaattagctgagatctgggagtcgacaatagaggaggtgctggctttgatggttccggagtga

SEQ ID NO: 34052 - DNA, 369 bp, Oryza sativa
  Clone ID: PAT_MRT4530_38104C.1
ggaccctaaaacaaactgaacaccttttatttttgaggggggcttttacaaataacagagccccctttttgacaaataataacaagatgcccccttcgtgctggcccttaatcaaaaaaaatcaaattcccccttaaaattttcccttcaaaaataggtgataacaaggagcttaaaagctttcaggcccttagcaggaggaggagaaactttcctccagcccccaggagcagcaaaaaatggcccaccctcctttgaggaacccaaggcagcattcttcgtcgggggggccatgggggggggggcccgggggggaatggcccccgggggggggggggggaccatgggggggggggggatcatccgggg

SEQ ID NO: 34053 - DNA, 392 bp, Oryza sativa
  Clone ID: PAT_MRT4530_38105C.1
ggcccggggaaaaatttactgccccctgggaattttcctttttattttgaaatactttggacaagccaacttacccattaacatgccaacttaatgtaagcaattaaattggggaaaaattaaacaccccattagattggttcgttaaaactacaaagctggaaagcccaacagggggggggagagcttttacaattttacaacaacaattgtcttttttagatgtcccaaagaccatgttagttttttgttgaggcttgggcaagctgaaatgcttctttgtttgaaaagaagcttttgagccgtgggggacacttgtaatagattgtttcgggagagttataagtttttggattggtgaacattttttttatgtgagtttcaaacatttt

SEQ ID NO: 34054 - DNA, 692 bp, Oryza sativa
  Clone ID: PAT_MRT4530_38106C.1
ctcagcattttctccaagggcaatgtctccagaatccactggcggtccggtgcaccctcctgtcgcacaagcaccacagaagaccatatcgtcctcattcgccatccccatctccccttccacaaggttgtactgataactgctctgatccaatgactacaacaccgattggctccccctgtggttgtgtgctgcctatttgtgttattgtggatctggatgtagctccatatttgctattcatgcgcatagcagaactagaagttgaagttgcagctgggacgtttcttaaacaaagccaggtgaagatcatggctgcaattccaagtatccaggatgaccagaagaccagggttaccatttatttggtgccactaagagaacagtttgatggctatactgcctccctgatatctgataggttctggaataataagattcagatcaattcatctatttttggagattatgaagttataaatgttacctatccaggcttgcgatctccgccaccatctctgcctgagacatctcatggatctgatccaacaggaaccggagaagatccaataaccgctgatgtgcaccatgggaagaacaagaaattagattcatggatcattgtggtagttgcagggtcttctatcacacttatagcagcatgcattgggcttggggttttactattaaaa

SEQ ID NO: 34055 - DNA, 1210 bp, Oryza sativa
  Clone ID: PAT_MRT4530_38107C.1
ccacgcgtccggcgcgatcggatcgggagaggacgcgacgcgaggcgggctgcgttgtgagggagagaagggatgctggcggtgttcgatcgggcggtggcgccgagccctgaggggctccggcatcccggggcggcgggggacggcgcggcggggctcgccgagaggttccgcgacgcgcgccccggcgccgtcaccgtcgccctcggccccggcggcgccaactccctcgcctactcctcccacggccagagccccctcctccccaggttgttcgcggcgacggacgagatattctgcctgttccaaggcacgatcgagaacatcgcggtgctgaagcagcagtacgggttgcacaacaagggctccaccgagatcaacatcatcatcgaggcttacaggacattgagagacaggggaccttaccctgcggatcaagtcgtcagagacatcaacggcaagttcgcgttcgtgctctacgattgctccaacaactccgtcttcatggccaccgatgctgatggtagcgttccattttattggggagttgatcctgacagccgtcttgtggtttctgatgatgacgaaattgtgaataaggcttgtggaaaatcctctgcaccattccctaaaggtttcttcttcaccacatccggaggactgcagagctacgaacaccctatgaatgaggtgaaaccagtgccgaggctcgacagcaagggggaggtatgcggcacaacgtacacggtcgacgcgaaggcgaagaaggatagcagcattcctagagttggcagcgctgcggattggtcctcgcaatactaaaaccgtataaatcgtcagaagcatatggtatgatgacctagaaacctttgctgcaattacatggagagcactaggcttccgggttgtccacggttacaagtgggcatttgccatctgaaatgttcatctggatggtcagccttgtgctgtgctgctgtctgaaatttctgtcctgtccaccattactgaagaatgagagcgtgtgggtcttgaatttccaataaaacgcaatgccttacagatgtgtaaatagatgtttttgcttactacaatattttctgaacaatcagcatatctataactgtggctagaatgaatcatctctaacgatgtgtgttctgttacttctgtatgtgaaaaaaaaaaaagtgatcttcccttctgcttg

SEQ ID NO: 34056 - DNA, 554 bp, Oryza sativa
  Clone ID: PAT_MRT4530_38108C.1
gggggaggaaaccaattttttttttgtcaatctggctgtcccgttggggggatttgcaattataacactgttgcagcaaattttttatttactttacatgtgggggtccccccccccctggccaggaaatttttatacaatccgggcaaaatactggacagatttaagccggggcccttgaacaaaatgcaagacgatctttacaaattcccaagttgttcttcccattgggtaggttgatgccccctcgccctaaaagggcccttgttttttttttagttgaagcaattacctcctccttattaaaattcacgatttttttttcccttataatccatcgaccgttgcacattacaaattaaattttttttgttttcatgcagtaaacttttttggcaatgcagtcttgccctgggaccatggaccatttaaggggttttacaaaaaccattttcgctttttttccaaccttcagggaaccttttttattgtcccacaaaactggttttggcccattaatagtagccatttttaatacagttttttgaggaaaa

SEQ ID NO: 34057 - DNA, 1972 bp, Oryza sativa
  unsure (1)..(1972): unsure at all n locations
  Clone ID: PAT_MRT4530_38109C.1
tcacgccgagtgatagaacactgcataggccctgacatccacttcatagcactctataatacggccttctgaaactgtgtggaatcttggatcatctgagtctctgggcacccggaactgatcatgatggcgaagaatggtgtattgagtgggattcctcaagttgagcacaaactgaatggaaggatcaagaggtccctcatcatcctcgccatcatcgttaccatcatcattttcttcttcctcagcccccttaacctcttcttcttcctctttctcactctgagcgtattgttccgcatccttaagctcattgttctcaacaacaagtgaggcatcacaaatagaatcacaagagctagagttaggcatatccataagatcatcacaagaagtagagatgctagatgatgcaacatgagtaatatgacaggtagtactatcatcaagcaagtcacaagatatgccaacatcaatatgagctccatgttgagtaatggaaaggagggtgtcatgagcttccttaatcttctcctgagaaatggtgagtctctcatgtgaagtctttagctcctcatacaagacctcgaaagaagcatgatccttctttagagccttgaacttgacaatctctttctcactacgcatgatcatactcacaagcttaaaagaaccctttgccatgaggtaaagtgaagcgaagagtgatggagcttccttgatagcaactacggccatcttcttcttcttggagcttgcatcatcatcactatcttctgcttcgaacccggatgaagcggagctctcttcatttgagtcccattgcccaatgaatgccttaatcttctttctctccttctgaagcttgttcatgagcttgtagcctccactcttcttcttggatgacttgtctccatcatcatcctttgaaggacacttggaagcaaagtgtcccttctcaccacactcaaagcatctaaagttggagaaagtcttgttgggtctcctatttcttcttctattggagttagagccctttcctctctcatttcttcctaatagatcattgaacattctagcaagaagagcaatctcttctggtgtcatccttgacatgtcggagttgatgacgaaggtgactaagtgctcatacttgtccgatagagcccatagcatcttttgagccaccttaatgtcggagtagattgcctcaagccccttgagatcattgactatcgcattcaacatcatggcaaacgcctcatattggatcttgaggaaatgaagctttgcatccttgtactcactagtgccctcatgaatctcactcaacttgttccatatctcatatgcggtctcaaggttgttcactctatcaaactcctcttggctcaaagagttgaacaatgcattcatggcttgagcattgagttggaggttgtggtgatcagcttccgttaaggggctaccggtgatggcaaaacctttgagagcaatcaaggttcgaagccgagacaaggcagatgctcgattcatatgctgtgatctatcctccacagcctgggcgatgatgccagtggggcggtggcggaggcggacggcggactcgcgcttgttgcggtgctggccgccggggccggacgccttgaacgtgcccatctcgcactgccccatcagctcgtcgtcgctcatccccaggtagtcatcccacccgccgccgccgccgcccttctcaccgggaccatccgagctattcgcggtcgccgcagcagaggaggatggggccgaggaagatgagagggagaggaagcggaagcggagaggaggcgcggcgccgcggtggtggagcggcggcgggaggcgtggggacggggagagcgggcaatagctgcgggttattcggaggagggctcgagccatggcgccgcgccgcgccgncnagtgcgctgccaccgcacggagccgactgcgg

SEQ ID NO: 34058 - DNA, 594 bp, Oryza sativa
  Clone ID: PAT_MRT4530_3810C.1
atggggcggcggaacatgagcgagaggggcgtacgagcttgtggccacaccggcgacacgggtgtacgggcgattcagaaacgcgcacacccggcgtactgcgaccggagccggaatcacggcgaccggaggccattggagccgaggggagggggcgcgcagaccgggtccacgggagtggggtccacgcggcagactcacggtccacggtggaccggccactcggcgcgcccgagggcggccaagccggcgcggctggcgggaggcggcgcccgcgcccctatggtcgccggtggcggccataggcacggcggagcggcggccgagagagaggaagggaagggggaaaagaagcggcggtccacggctcaccctaggtcgacggcgacgacgaaaaaggcggccagagcggaggaaggcggcggcgcggctcgggtggacggggtcgacggcgttccggcggtcggcgaccgaaacggaggggtggacgaggtcggcgaggatgcggcgaagccgaaggaggcggcgccgaggtgggaggtgggcggcgagaggcggaaacggacggaggaggagcggggagggtttaaatag

SEQ ID NO: 34059 - DNA, 1777 bp, Oryza sativa
  Clone ID: PAT_MRT4530_38110C.1
tggtgagaagggacactttgcttccaagtgtccttcaaaggatgatgatggagacaagtcatccaagaagaagagtaaaagaagatcaagctctacccaaacttgtttgggtccttggaggttagagaccaaagccttggacacccaaatgacattctttttaccaccaagtatagggaaaccaacatatctagcaacaatactaccatcatgatccttcctaagcatataatgagaatcaaacatgcaagtctaagaaggcttagaccggggtaatcattcagcctaacctcacggcacttggagcaatacttaccattgctcttgacaaaacgagtggcacggtgaaaaggtttcttacccttctttggaatgaatccaagcccctccttgttaaggatgcactcttactcacttaaaatcttgtcaatagtgttcttacccataaagcatctctccaaactcttgttgagcttggccacttgctctttaagctcattgttctcaacaacaagtgaggcatcacaaatagaatcacaagagctagagttaggcatatccataagatcatcacaagaagtagagatgctagatgatgcaacatgagtaatataacaaatagcataatcatcaagctaagtcacaagatatgccaacatcaatatgagctccatgttgagtaatggaaaggagggtgtcatgagcttccttaatcttctcctgagaaatggtgagtctctcatgtgaagtttttagctcctcatacaagacctcaaaagaagcatgatccttctttagagccttgaacttgacaatctccttctcactacgtatgatcatactcacaagctatcataggaagcatcatcatgatcatcatcactttcactatcactaagagatgttaccttaaaagaaccctttgccatgaggtaaagtgaagcgaagagtgatggagcctccttgatagcaactacggccatcttcttcttctattggagttagagccatttcctctctcatttcttcttcctaatagatcattgaacattctagcaagaagagcaatctcttcctgctagtcatcatttgcttcattcaccttgctcttgcccttgtcttccacttcggcttggagagcaatgcacttcttggatggggaggcttcctccatcttcttcttcaacttgtatacgtcatcggtcttgatcttccccaagaggcttgctggtgtcatccttgacatgtcggagttgatgacgaaggtgactaagtgctcatacttgtccgatagagcccatagcatcttttgagccacctcaatgtcggagtagattgcctcaagccccttgagatcattgattatcgcattcaacatcctatacatgtcattgacactctaatgaggcaacatggcaaacgtctcatattggatcttgaggaaatgaagctttgcatccttgtactcactagtgccctcatgaatctcactcaacttgttacatatctcatatgcggtctcaaggttgttcactctatcaaactcctcttggctcaaagagttgaacaatgcattcatggcttgagcgttgagttggaggttgcggtgatcagcttccgttaaggggctaccggtgatggcaaaacctacatccacaatactccaaatatggaagctcatagccttaaggtgagtagacattttaattttccaagtggagtaatttgtgccattgaacatgggagccttccctacatggttcacctcgttcgacat

SEQ ID NO: 34060 - DNA, 1063 bp, Oryza sativa
  Clone ID: PAT_MRT4530_38111C.1
atgggggcggggaatggtgaagtgcggtacggcggcggcggtgccggcgccggcgaggcggcggtgatggcggacgacgggaccacggtgttccgggggacggcgcagccgccggtgcgcaccacggttgcgctggcgctgtggctgggggccatccacttcaacgccttcctcctcctcgcctcgctcttcctcttcccccgccgcgtcgccgccatggtgctcgccacgcagctcttcttcatgttcgcgccggtcaatgatatgagcaggttggggcgcaagatcgccaggttcatcagcaagtgcgtgattgggtacttccccgtcacattacatgtcgaggactacaaggcttttgatcccaatagagcttacgtgtttggttatgagccgcattctgttttgcccattgcccttggggtccttttggagcttgttggattcatgccattaccaaagataaaggttcttgcaagcagtgcggtgttctataccccattcttgaggcaaatatggacatggttggggttggttcctgcatccaggaagaatttctactcctaccttaaagctggttatagctgcgtcatagtgccaggaggggtgcaggagatgcttcacatggatcatgattcagaggttgcttttcttaaatcaagaaaaggtttcgttaagatagctatggaaacaggttcccctttagtccctgttttcgctttcggacagagctatgtttataagtggtggagaccaggtggcaaattaattgtcaaaattgctagagcaattaaatttactccaattatgttctggggaaaatttgggactcccattccgtttgcgacacccatgcacgtggttgttggaagaccaattgaggttaagaaaaatgctcagcctacctttgatgagataaatgaagtccatgaacaatttgttgtcgcactacaagaactgttcgagaagtacaagactaaagctggatatcccaacctccatttaagagttctatgatggcttctgtaagttccagcagtaagctctaatgatctggatttac

SEQ ID NO: 34061 - DNA, 408 bp, Oryza sativa
  Clone ID: PAT_MRT4530_38112C.1
atggcagcagggatcagtggcggcgaggagcagcttggcgtggaaggcatcggcagcgacctgacgacaaaagggcttccggcggggggatcggtggagggcgagccttcagcggggatcggtggcggtgaggaacagatcggcgcggagggcatcggcggcgacagcagtttctgtgtcatcacgtgcgggagagggatcggggatgcggcgcaggtgcgaatgggaatgcggcgggtgcagtggaacagcgagagagggggcatgcggcgattgagggagatggacgtgccgacgcagaacgtgttcgacaacgcctactaccccaaagcaagtggcggcacgcacggaggggatcagcggaagcacgggcttgtggaggaagggaacggcggcggcaaggcgtga

SEQ ID NO: 34062 - DNA, 915 bp, Oryza sativa
  Clone ID: PAT_MRT4530_38113C.1
gtggacgtgcggcggcggcaccctaggagagagcagagatggcagtaatggaatgcccccgaaaagacttggatgggggactaggacaccatgcgactacacgaacatactcctatttgtggcgacaaccataatatccctagggaacgaatccatagctcgtttctgggactccgcatggctaccaagaagaaggccgaaagacttggcaccacaggtatacacaacatccacaaggaaaaaagaacgcttaagaaagcattcgaaggtgagacatgcatacaaaaccttgacctctcagtcaatggtgacatgctagttgagctcctagaccaactagtctccctatagaacatagtccaagatgtgcaactcgttgacgccgaactagatcaaatcacacggaaactcacaacccatggagagtacataacgatgtctgcatacaaagtgtggttccttagatccaaagcagaaactacacaacaatcatatggaagtcctgggcaccgagaaaatgcaagttctttgtatagcttatcatctaaaacagagtatggacgtcagatcgcctcgagacccgctgatggcagaacaacatccactctgctagcataccctagagatggctatgcacctcacggcggaatgtaggtacacgaagagaatttggggattgatatcaacttgaatctcccacgagtaaattaagccagcaaattggaacaaccatgcgacaggccatgagtggtggatgggtctagcctccaatcctggggtgccaaagaaaggcttgcgtagccttatccttctagtatcatgggagatttggaaggagcaaaattagcaatttttagacgcaaagaaccgtcagcaacatgtctggtcgcaaagaacaaataggagccaaagact

SEQ ID NO: 34063 - DNA, 592 bp, Oryza sativa
  unsure (1)..(592): unsure at all n locations
  Clone ID: PAT_MRT4530_38114C.1
gtcactttctattttatttatgccagtgaagtggtacatgatgaaataatatatagtcactttctttttataatttttacatatgtttgaatgacatgcaaaggatagtaaatagaacttagaagaatatgcattttacaagtgaagtagacaacatacatcataacatactaattgtgatttttatcataaataacacaatggtccaaatagataaaaaagaatgaacgcatgattttaaaacttaaaaattatgacgatttaaaatatattgttacaaataaatatataatttagaagttgtgtttctttaaaaattattgttgcaaatattttcataaagagaaaaagggatcaaaagtaataagaagaggaggtacgtgtgtacctgaagcgacaaacttcctactaacactcttcagccaccacataataccctataaacacttcttgaccaccatgtagcgctctaataaattatataaatagtagggaaaaagcanaacatccaaccatcggttctcatttaatctggtggacacattattttcaaccattacatctatcttataaattaccaattaaattcata

SEQ ID NO: 34064 - DNA, 646 bp, Oryza sativa
  Clone ID: PAT_MRT4530_38115C.1
ggcagtaatacggtgtatatactcatctctatttatgtaaaattcgtgtagggtcaaggtgagttctcttatataaagagatttgctcaagcatacatacctcgcaagagcctatacatggggataatatatgcacactcagtacacacacgcacgcactcacacactcatgtactcttcttcgctttcagttgatggggaagacgtggagattgattcagcaccacatagggctgctctgctcgcaaacgcgagcaacacagacgcacgcacctaaaacacctgcctgcttgcttgcctgccttcttgtctgcacagagttgaggcatcagcatcggctgcctagaatagctggaaaaagaggctcgttgagccatcaccgaacgaccggaggtctgctggtttcaccaacgctctgcatagcgggcatgtccgctccctctcgaaccattcagagacacaatcctcgcaaaagatatgcttacagcgcaaaagaatgggagtatgcatcttttcctggcatatagcacacatatctccagtagcactaacctgttcactagttgcgtatgaaccgtaatggaagtctttatgagataacgctctcaatgctgtcaaaaatgattgaaccttttccaccactgat

SEQ ID NO: 34065 - DNA, 730 bp, Oryza sativa
  unsure (1)..(730): unsure at all n locations
  Clone ID: PAT_MRT4530_38116C.1
cttcctggctgcgcgctttccgtggctccgctccaggtgaatccagngttaatttcgctgcgcattgtgatgggatttggccgcaggtggcgagggtttgtttcggcggcgggggtcggcgccaggctgggttggtgtttgatccttttggtttgagaggttttgccgctgccagattgatcgagcgaggaaggagaacacgcggaactaggataatttagtggtcaaagttttgcccttttttgtgagaaaggtagtaagttgtggtggagtttggcgactgacgttaatcgtctagctccaaaccatggagttcggttccttgcttctttttttactctgatcggtttaaggcttttgcgtgctcctttttttgtcaatttttggtggccatgctgattttctggtaaaattaaatctttgattttacgagtggggatacttgaccggttgggtttgaggcagtatcataatactggcagaacttctgatctttaaacacatcttactaaaaaccctcttttctgtgcgcgaccatgtcgaactttttaattctgcagaaaaccatagattttactggtggttatatgatttcagctgatcttttacagccattcgtgtcctgaacctttggtgtctgctctgatgctttcaggctttagctgaagacacaataaaggaacaccaaaaaaatgggtaagaaaggaaattggttcagtgctgtcaagaa

SEQ ID NO: 34066 - DNA, 1938 bp, Oryza sativa
  Clone ID: PAT_MRT4530_38117C.1
atggctgctcctcctctctcgtcgtggccatgggcaagcctcggctcatgggtgcagtatgtgttgtacggggcggtggtgtggaaggtggcggaggagtggaggcagcaaggggcggcgccggtggggtcgtggtggctccacctgctgctgctgttcgccgcccgcgggctcacctaccagttctggttctcctacggcaacatgctcttcttcacccgccgccgccgcgtcgtccccgactccgtcgacttccgccaggtcgacgccgaatgggactgggataactttctgctgctgcagacgctgataggggcaacgttggtggggagcccggcggtggcgcggcagcagctgctgctcccaagcctgaagcaagcgtgggacccacgcgggtgggccatcgcactgctgctgcatgtgttggtcgctgagccgctcttttactgggcccaccgggccctgcaccgggccccactcttcagccgctaccacgccgctcaccaccacgcctcggtcaccacacccttgacagctggatttgggacgccactggagagcctgctgctgacggtggtgataggggtcccactcgcaggggcctttctgatgggggtagggtccgtgggcctggtctatggacacgtccttttgtttgacttcttgaggtccatgggctacagtaacgtggaggtgatatcccctagggtcttccaggctgttcctcttctcagatacctcatctacacccctacgtacctgagcctgcaccacagggagaaggactcaaacttctgcctgttcatgcctatttttgatctcctggggggcaccctcaaccacaagtcatgggagctgcaaaaggaggtctacttaggcaagaacgatcaggcgccggacttcgtgttcctggcacacgtggtggacatcatggcgtcgatgcacgtgccgttcgtgctccggtcgtgcagctcgacgccgttcgccaaccacttcgtcctcctcccgttttggccggtcgccttcggcttcatgctgctcatgtggtgctgctccaagaccttcctcgtcagctcctaccgcctccgcggcaacctccaccagatgtggactgtcccccgatatgggtttcagtacttcataccggcggcgaagaaaggcatcaacgagcagatcgagctggccatcctgcgtgcagatcggatgggcgtcaaggtgctcagcctcgccgctctcaataagaacgaggcactgaatggaggtggcacgctgttcgtgaacaagcacccggagctgagggtgagggtggtgcacggcaacaccctgacggcggccgtgatcctcaacgagatccccagcaacgtcaaggacgtcttcctcaccggcgccacctccaagctcggcagagccatcgccctctacctctgcagaaaaaagatcagagtcctgatgttgacattgtcgtcggagaggtttctgaagattcagagggaagcaccggcagagttccagcagtacctcgtgcaggtcaccaagtaccagcctgcacaaaactgcaagacgtggctggtggggaagtggctgtcgccgagggagcagaggtgggcgccggcggggacacacttccaccagttcgtggtgccgccgatcatcgggttccggcgagactgcacctacggcaagctcgccgccatgaggctccccaaggacgtccagggcctcggctactgcgagttcgctgacatggtcggccggcgatcgccgggaaacatatgtgtgcagtacacgatggaacgcggggtggtgcacgcgtgccacgccggcggcgtggtgcacttcctggaagggtgggagcaccacgaggtgggcgccatcgacgtcgaccggatcgacgtcgtctggaaggcggcgctcaagcacggcctcacgccggcgtga

SEQ ID NO: 34067 - DNA, 524 bp, Oryza sativa
  Clone ID: PAT_MRT4530_38118C.1
tgatattctaaaagacttcatgtcaggatcatgtttcctaaatttgccttaatctttatgtaactcagccctttctgttcctcaccaactaacatgtgctacatgtacctttggtcatatttgataggaaaatgtgagaagtgccactgtgaagtagtatgttgtatcatgaaatggttgagattttctttggtgtagaagagtgctcaaatattatgctttcctttattgatgctttctagcgctaaataaaactaaacccgtatcccgtatgccatattgaattttaagtgcttcgtatttcaggaaagttatctcagctggaatactgtgtacatgatacaaagctgagattttaaacagtatactaccttaagactagtttatcacaaagataagcaccagagtagccaaaaggtgcctttttttatcgttttgtagcttagctctaactttggtctaactactgcttttccatgtaagttgtatatattaagataagcttgaaatacatcaacatgctt

SEQ ID NO: 34068 - DNA, 412 bp, Oryza sativa
  Clone ID: PAT_MRT4530_38119C.1
gtgcaacattgattagtggcaggattatttcttcagctgatgctaccacgacaatagatcgaaactgtgttgcaaatctgcttctagctatagacaaattattgaagatggaagaaagtcaaaatacagatgaaactgagagtgcattggaggccttaggcctgattggtacaacatctgctggagcatgtttgatgctcacagattcatcaaatgctgccagacatgtggtagaggcatcctttggtcggcaggctagaggtaaacagctggctgctttgcatgcatttggaagcatatctggtgttgatcggtcggaagaccaaataaaactggataatcaagcggaagaacccctgaagcgttttgtctataccacagtaagaatacagccaaaactgacaccttatga

SEQ ID NO: 34069 - DNA, 741 bp, Oryza sativa
  Clone ID: PAT_MRT4530_3811C.1
ctcctcctcctctccgccctcctctccctccacctcttccgccgcctacgccaccgccaccattcccactcccacccaaacgctcgctcgccctcatcccgttccggagccaccaaccaccaccacgatgacgacggagacggcgatgaggagggacgccgcctcaagccgccgccaatgcccacctcctcctccaaccccagcaccgagttcctctacctcggcaccctcgccgccccgccgcaacagccgcccccgaccacctcccatctccgtccgggatcgccagagctccgccctctcccgccgctcccacgcgtcggcccaccttccggcgagttcgcatcccggagctccgcctccgaccccagcaccgcgccacccgccgccgccgaggcctcctcctcctcgctatccccttcctcgccgtcggcctcctcccccacgctcggctccagccctgtccatctccgcccgccctccatcccgcagccgcgtggccgagcccccaatccatcgccccccaagcggaggccgcagcctccggagccaatggcagcgcacgcctggaaccccttcgtccccatgccgcctcaagcacctccttcggaagaggaggaggaacactcgccgtccgagaagagcatgcgcaagtcgcggcctttgcactcggataagctaaagcccgggtctttgcacatgaaggatgagatgatccacctatatctgaacaactccatg

SEQ ID NO: 34070 - DNA, 446 bp, Oryza sativa
  Clone ID: PAT_MRT4530_38120C.1
accacccatggcgtccaggctctccttgctcctgctcctcgccctcgtcctcccggcttccggcgatgacgccgcggcggcggaggcggcgccgccgccggcgccggcgggcggcgcgtcgttcaacgtgacggagatcctcggccggttcccggagttcgggctgttcagctacctgatcagcaagacgcacgtcgaccgcgacatcaacagccgcaacacggtgaccgtgctggtgccggacaactccgccgtggactggctcctccgccgcagcgccaggctgccgcgggcggcgctcgtcgagctcctctccgtccacgtcgtgctcgactacttcgacgccgcgaagatcgccgcgctgacggcggtgaagcccaccgtgtccaccaccctgatccagaccaccgggaacgcgcgctgacgaccaggttccttgacatacc

SEQ ID NO: 34071 - DNA, 1059 bp, Oryza sativa
  Clone ID: PAT_MRT4530_38121C.1
atgaagcaaactaaatctcacatctgctcttctgacaatgataagcctggaactttggtaccaaagagttctgatctaaactccatctctgttaagaatttgactagagaaagtgcacctgcagaggaaaatgctgcagaatcatccagttttcagatattgggtaagagaaagctctatgttacctctgacagcagccatggtatgaactccaatattaagaggcaaaggaagtatatttgtccatccgattctgattcgagtaatgagcagatatgtaatgatgatgttgctgttcctgataatcaatctactggacagaatgttcccatcgaagtggacagtgaagaggaaggaaatgcaagacatggaggcaaccaacaaacttgtcagaaaaatgttaatgatactgctgctcagaagtatctcaattcagtgattgcctacccttatccagactttgattttggcaaatccagagatactgaagaaactgatgaatccataaaacagtatggctgggctggtgacatggaaggtaaaggcctggtgacaagaagtgacagagttcaattttcagaaattagccaagctaaatctcatgtgcctcctgctgacaatgatatgcccggaactttggtaccaaggagtcctgatccaaactccatcgctgtgcagaatttgactggagaaagtgtatcagcagggacaaatgctccaggatcatccagtcttcagatattgggtcggagaaagctctgtgatagctctgacagcagccgtgctatgaactctaatattgagaggaaaaggaagtataattctccatctgatgctgattggagtaatgagcaaatatgtaatgatgatgttgctgttactgagaatcaatttgccaaacaacatgtccccatcgaagtggacagtgaagaggaaggaaatgaaaaacatggagacaatcaacaaagtcataggaaagatgatactgatacttcttctcagaattctgccaatccttttttttttgggaatacgcttctagcgtatttttgcatttag

SEQ ID NO: 34072 - DNA, 708 bp, Oryza sativa
  Clone ID: PAT_MRT4530_38122C.1
atggagtcggggacggggagggcaaggatggcctccctcgtctccctcgcgcgggaggagtgtggtcgggaggatgccgaacacgagctggccacggcgtatggttacacggaaccgagacgatcccgcgctaccatttcgcgggacgggcgatcccgcaacccagccgtgcggcaccgcctttctcccgcagcccgggagagcggtatcgtgatggcacgcgggggacgcaaccaccgcgtcggtcctgcgggcggcaccgtgcgtgaccagggcggcaccgcgcgcgcaggcctgcgtgaccgcgccggacgcgcgtcgccgcagcgcgcgaccgggctgatgggcgcgggagcgggggcgtcccgcgagggagcgacggtcccgcgtcctcattccgcgggagcgagcgatcccgcgtcccgggagagccttctgcccagtttgtcccatcgacgccggtcaccatctcctgtaattgcacccaaatttgtgtcactctcaattgccgccgccgccgccgacctacacggctgcgccgctgcctcgccgctgctagtggcggcgccgtgcgacgccgacgagtaccaggtggtggtgttcttgcatggatacctcgccagtaattccttcgagtcgcagctgttcgagcatgttgcgtctcacggcttcgtcgtcgttggcccccggtttctcactccatattag

SEQ ID NO: 34073 - DNA, 2229 bp, Oryza sativa
  Clone ID: PAT_MRT4530_38123C.1
atgtcggctagtaaaagaattcattgggacgagattggaatcggccaagcacttgaccttaccatagccaactcagctaaggatgaacccctaatggcagctgcctcttatttttggtccaacaccatcaacgcctttttgttcaaccaatggccgatgaccccaactctcatagatatcatcatgatcacgggtctggatgtcacctcatcggctaaccctatgaacctaaacacaaagaaccaatacgacttcaagaccaagagcataggcggctggtcagtctatgtagcagcatacatgggccaaggtcctgttacccctcgagaacacgtggctttcttgctaatgtggctagagaaattcctcttttgtggatcaagctgtggccctacaaccaattggcagtttgtagctgaagccttggaaacaaagagacaatttcctttaggcaaaatcctcctcggctacttgtaccacatgctaaataatgcatcggctaagttagttgtcggctcagtagtcggagcggtcatgaagtttgtcaatcggccatctgtaacagaagctgaatttccaagactggagccgattgtagacagtgacggagaagaacgcatccatcggagatgcacatcctatggagaatatgcctccacaccaaccgatgcaggagcaaagctatcggccaagctgctcaaagattggttttgtagcttttatgaaggattccaaaaagaagcccgagtctggttcctctatgaagattcaacacttctagaaaatcctttagacttcagattcgaagacatcaaccatgatagatatcagaaacccagagaaattttctcaactgcaatcagcccatgtatccttcctgtcggcattcatcaaggaagaaacttccaagtctcctatgaattttatcatccaatgagctctgctaggcagtttggaatgggccaacttccaatcggcttattctttgccgataagatccaatgccgaggggaaatctcatcaaccttaatgatggatcagctgcttaatctccaaggacctcctctaggcagcattgacaatatagagttggcaaccttcaggggcaaagcatttgacagatggtggggcgagtggaaactgcatacaacagagtcctctcctcctcgccaaagcaacagtggaagggatatcaaatatgccccaggattaattcctaatggaggtgggccatctccacccgttattggctataatgcccccaagacttcagctcttcttcaagggcttatcagagaaccagccgacgctggcaagaagaggaaaaccagatcatcggctgtagatattttatcaccagctccaaagaagaagaccaagacaaagaaagcaaagccagctgatgatctgcctgccctagatccatccattgaacaagctctggatgaagaggaaatcgaagaagatgttgaccaagctgcagccgaaaaaaagaaaactgctgtgaagaagaaatcggctgcaataacatctaaaccagttccaccagctttagccgatctattttcatttgatatcaaagattactttgatgagatagaggaagaaaccactagcaaagctctggcccccttggatgacactgtcaagaagacacttggagacatatcccttcggctaaattcttcactggattatctggtggctgactgtggttcgatccgggcaagattcactgaaatccaagccctaattccggatgacctagcaaacatcattactccagctgtgtaccttgaacaacaccaattcaagctggagaaggccaaacaacggatagccaatcgacgagagcggaaggacatcgaagctactatccaagccaatcggcagctcgtgcatgaagagaagtccaaacatgaccagctgtctgaaggcccgatcaagtctaatattgatcggctcgaagctcagaaaattgagctattggcacagcttcaagaatgcaatgccaagctggacatagaacataagaagctagccgatctcccaaaatctgttgaagagcagaaggcaagactaaaatcggccattagaaatgttgccgatctgaccaagtctctaaaagtcatccctggaaccgatgctcaagacgcccaagccatagaagaagtagaacaaattaggcagaaggctatatcggctatccagcgctatttgtcccagtga

SEQ ID NO: 34074 - DNA, 1617 bp, Oryza sativa
  Clone ID: PAT_MRT4530_38124C.1
atggctctcgccgccgccgccgccgcccaccacctcgtcgcgcccgccgccgtgtcgccgtactactcggctcgcgtgtcgccggggttcctccgcctccacgacttcccccgatccgtcggcctggccgccaccgcggccccgagggggcgcaaagttgaggaccctgacacattggaaaagatacggctaacagttattaacaaccttctgcagtatcatcctgaatcaagtgagaatttagccatgggtgaattttttggaataaaagctcctgagaagaaggttgatgttgatgttgtaacacatgtaattgttgaagatgatggacctaaaagaagcatgctgtacatagagacagctgatcggcctggtctacttctggaaatagtgaagatcatcactgacgtgaacgttgatgtggaatcagctgagatagatactgaaggcttggttgcaaaggacaaattccatgtgagttacagagaggagagcccgttcgcgtcgctgctcgcgtctgatcccccaccacccgaggcgctccgagaggtgctcgccgctggcgacgtccacgccgcgctccgcggcctcccgggcctcgcgcgccagctgttccggtgggcggaggccaccccgcgcggcttcccgcgctgcgcctccgcgtacgccgccgtcctcgtcccgctcgccgaggccaagcacctccacgccgcccaccccgtctccgtccgcgccatccacctcggccttctcctcccccttgtctccctcctcctctcctttcctaccaccgtctccctccactacctcctcaacctcctcctgcgcctgtccaccaagttcaatacccgagctcgcaaccctgcgccctccacctgttcgacgctatgccttgccgctttccgtgagatggcgcaccacggagttccccctttcatcaaggaatgcaacctcgtgctccgtgcgctgcgtgatgaagccaggtgggatgacatgcgctcggtgtatgcagagatgcttcagcttggaatcgagccgagcattgtcacatacaacacgttgttggattctttcttcagggagggtagggtggatcaggctgccaagttgctcagagagatggaggcccggcctggtggatgcttgccgagtgatgtcacatacaatgtggtgattaatgggttggccaggaaaggtgagctggagaaggcagctcagctggttgacagaatgcggatgtccaagaaggcgtcagctttcacgtttaatccacttattactgggtattttgcaaggggttctgttgaaaaggctggagcattgcagttggagatggagaatgagggcattgtacccacggtggtgacatataacacaattattcatggaatgtttagaagtggtaatgtggaggcagctcggatgaaattaggtgatttagaggaagctaggagattcaagcaggaaatggtagagcagggctgtcagcctgatgtttctacatacacgattctcatgaatgggtctcgtaaggtgaggaatcttgcgatgggatttgatgaaggccagtcaaaacatgcaattcagtacatggagaatgttgttttgggtgcatag

SEQ ID NO: 34075 - DNA, 354 bp, Oryza sativa
  Clone ID: PAT_MRT4530_38125C.1
ccggccggggtgctctctttgaggtgggttggcttctcctccccatctttaccttttcctcctcggatcggttccgagagaaggctacggaagagcgaggagagagggcagcgaagaccagcccagccgcacagggtcgacggcgaggacccccacaacgctccgtccggcttccccaagatcgtgacagccgagcactacgagcccggcgtatacaagaaggccatcatggtctccaacacggtccgcaacatgctcacaacccccagcggcttctccgagacgagcgaggtcgaggtcaggagcccctacatcagcacccgcatccatccagcaagatctagcagaagctct

SEQ ID NO: 34076 - DNA, 1337 bp, Oryza sativa
  Clone ID: PAT_MRT4530_38126C.1
ccccacgcgtccggaaaagacacacacagagagaaaccgcctcacctcacctcgcctcgccgcagtgcgcgcagcgagtgtcaccaccaaccagccatggctctcgccgccgccgccgccgcccaccacctcgtcgcgcccgccgccgtgtcgccgtactactcggctcgcgtgtcgccggggttcctccgcctccacgacttcccccgatccgtcggcctggccgccaccgcggccccgaggattttttgccaatctatcaactcggctgatgtcttgggtgcttcttcaacgacatctgatgatgcaattccacagccagttgttctgatagatcaagactcagaccgtgatgcaaccatagtgcagctgagttttggagaccgtctgggggcactacttgacacgatgaaggcactcaaggacctgggccttgatgtgacgaaaggaagtgtgtcaactgaatcagctgtcacacaaacaaagttccacatcatgcgatcggggcgcaaagttgaggaccctgacacattggaaaagatacggctaacagttattaacaaccttctgcagtatcatcctgaatcaagtgagaatttagccatgggtgaattttttggaataaaagctcctgagaagaaggttgatgttgatgttgtaacacatgtaattgttgaagatgatggacctaaaagaagcatgctgtacatagagacagctgatcggcctggtctacttctggaaatagtgaagatcatcactgacgtgaacgttgatgtggaatcagctgagatagatactgaaggcttggttgcaaaggacaaattccatgtgagttacagaggtgcaaaattgaacagctcattatctcaggtgctcgtgaattgcttgcgttattatctccggaggcccgagacagatgaagacagctactgattcttatgaaaacccgggctttgagttcctttctgcaagcccattgtgctgatttttcggttgtagtgaacaaaaaacgtggtacatttgtcctcaaaatgcatccgtatattatgctttacgtaggatgcatttaaaatcgggccagatccgggagattcagctcaatatggcccgttatcatcaccattggttcctacagtagtagaggaatcacattgggactgggaggccatcacctgatggatgctgtctgtaatttcctataattcgcttgaacctgtcgaaatcacaaggatatgcatacattacatggctttgtgggttcgtggttttagtcttggtccatgccagattgcgattgaaagctggaaactacggctcaaaaaaaaaaaaaaaaa

SEQ ID NO: 34077 - DNA, 168 bp, Oryza sativa
  Clone ID: PAT_MRT4530_38127C.1
cgacgaccatggtatctgtggcgactccgccccgcagacgacgcgaagctctgggatcccgcttacgaggaggggaaaaggaagagtgaaaacacggccttagagcatcctgttctttttgcatgtgaccaggtagaggggcgggtggggatctagaatgagatgcac

SEQ ID NO: 34078 - DNA, 616 bp, Oryza sativa
  Clone ID: PAT_MRT4530_38128C.1
atggcagctcgcggcggccgggagaggagggaggcggcgcacggcggcccggcgaggagggaggcacgctcggcggcccggcgaggagaggcggtgcgcggcggccgggcgaggagaggcgacacgcggcggccgggcgaggagggaggcggcgctcagcggcccgccgaggagggaggtggcgctcggcggccgggcgaggagaggcggcgcgcggcgtccgggctgagggagacgacgcgcggcggcccagcgaggagggaggaggagggaggcggtgctcggcagcccagcgaggagaggtggcgcgcggcggccgggcgaggagaagcggcgctcggcgaccgggcgacgaagggcagctccaacccggatgtgaccattgaggacgtcggcggaggtggccgggcgaggagggaggcggtgcgtgcgactaccgagcgaggaggggtcgtgccgtccggctgggcatcacgggcggagcggccgggcagcctccttgctccgatccggccgccccgctccaccggccgccgccgctccacccgcgtccgccctgctccggtccggccaccccgctccaccgacctctggtcgccgccgccccactccaccg

SEQ ID NO: 34079 - DNA, 115 bp, Oryza sativa
  unsure (1)..(115): unsure at all n locations
  Clone ID: PAT_MRT4530_38129C.1
tgaagctccttgaataggaagagacccagattgtgtancagcagttgtacacaactatatagttttagccatccatcaaacactgatcaaatcacaacagcttatgagattacca

SEQ ID NO: 34080 - DNA, 327 bp, Oryza sativa
  Clone ID: PAT_MRT4530_3812C.1
atggaggaggtgaagcccatgacggtgaagtacatcgtgaccaggttcgtcgaggccgacgccgcggagttcaagtccgtcgtgcagagcctcaccgggaaggactccacggcggcgacggcctcgccggaggaggagggaagccggcggcggcgaacaggccatcatcgccacgtcgtgccgccgccggcgccgagacggtggctaaggcggaacgtcgacgacggcggtttcctggacgcgggcatcataatgcagccgccagcaaagaccgttattgttggcggctgctttataacgaccaccagcgaaaatgaccttcgctag

SEQ ID NO: 34081 - DNA, 921 bp, Oryza sativa
  Clone ID: PAT_MRT4530_38130C.1
atgggtgtagtgacaagggccatgaagaggaggctggatgaggaatccagcaacccagaattggcgcccagaggaggagaagacctgataagccgcctcccggacgatatcttcaccagcatcatcactatcctccccggcaaggatgctgcccgcacacagatgctctcacggcagtggcgaccgctctggcaatcggcgcctctcaatcttgaggccatggtcgatagtaggacgggaaagctggaggaagtaattatcgagaatgccccactcctagaaaggcttaccccaccatgtatacggaatgaaggctttgttatttgggttactcaagcaccgaaaatgaaaacattgggctatctaagccataaaatttccacaattgagcttggaaccatggttttccagaaactggttcctgttagtctgtcaaatgtgatgtgcactgtgaagatcttagctcttgacagagctcctgatctggatgttgttattgacttcttaaaatgctttccgtgcgtggagaagctatacgttgtggcgttcattcaggggaacttcaagaatgcactgcgatatgtttcacttgagtgccttgatctacatcttaggatggtggaatttattaactatcagggtaatatgttagatttgaacttcatcaggttctttgtattaaatgctcgagttctagaatgtgtgaagcttgtagccgctcatgacaaatatggcagaaaatggatggaaaaacaacagcaaaagctacagctttatggcagagcttcacgaggcatcacatttgattttcaagctgattacgggtcaaatggttcagtacacatgaagcacatcagtgatttgactacagatgatccctttgatagttcattttgtagatgccgtgatgaggaattatga

SEQ ID NO: 34082 - DNA, 354 bp, Oryza sativa
  Clone ID: PAT_MRT4530_38131C.1
agaaattcttcttgtggataatgtcttgccagaaacaacgtaccgagcgaaaaaatttatccatctcctgggccttgagatacagaaaatttacgctgacgaaataattggatcctttactggggtgattatgcggatttggaccaatgtccagtatgcgaggcttctcggtataagtgtggagacattggaagtaatggtacaatgaataagaaaagagtcctggtgatggttgtatggtattttctaatcattcttcatttggaacgtatgttagcaaacaagaagattgctaagttgatgcgatggctgttggaagaacgcgaggtagacgcgatagtggggtgcgcgggg

SEQ ID NO: 34083 - DNA, 950 bp, Oryza sativa
  Clone ID: PAT_MRT4530_38132C.1
ttctcatgcgggcttgttaagaggcccacctgcaaaaagtccagccggtctccctccaccttaaaaatctatacgggccttctcccctactcgtctcctctcctccattctctctcccccactcatttccttcgatctccaactcctctcctctcaacacacacacacacactctctctctctctctcatacaaaaatagcgattttcacatatcctttggtgtgtgcggctagttctaccacacgcgaaaacccctctcaggccatatgtaaaaatccttttttactagtactctataaatatcattcggtttttaagagtgaaatatagaaaaaccaaagaaaaattttcttttctacatgttgtagagagaaaacataggaaaattttcatctactccagcctcttgaaaaattcctatgaattaggaggcgcagagcatgcgaggtgtagtggcatactggttgttgtgtttcctaactccaagtcagagccgaaggggctatctactaatgaattgctgaatactctgagggaactcagagttgactccattctacttgctagctactcgaaacttatacctgttgagctagttcaggcgtatccgagatctatatggaatatccacccttcattactccctgcatttggaggcaagggttattatggtttaaaggtgcataaagcagtcgttgcatctagagctagatactcaggtccaactgtgcactttgtggatgagcactatgacataggaaggactttagcccaaagagttgtgtctatgttagcaaatgatatattagagcaattggctacaagagtccttcatgaggagcatcaagtttatgttgatgtagttactgccttgtgtgatgaccgaattgtgtggagggaagatggtgtcccaattattagaagccgaacaaacccggatgagtacacc

SEQ ID NO: 34084 - DNA, 162 bp, Oryza sativa
  Clone ID: PAT_MRT4530_38133C.1
atggcggtggagcggtgtatgctacattacactgtacgtgagcttcttgaggcttatgaaatctactccggagtccggaatgttccagtggcggaggccatcgtggccgtcggcgacctccccaacagcctcggctggtcggtccacatggtggcgccgtga

SEQ ID NO: 34085 - DNA, 180 bp, Oryza sativa
  Clone ID: PAT_MRT4530_38134C.1
ctatagttggccatatgggccgcccagcatggcatggcccaagcacgatcgggcctgggctgaggtcagtcgggctggcacggcccaacgaacaagccgtgccagcccacgggctacggccacagcccaggcacggccctagtagcctcgggccgtgccgggctagcccgacggcccggc

SEQ ID NO: 34086 - DNA, 388 bp, Oryza sativa
  Clone ID: PAT_MRT4530_38135C.1
gggcgggcggatcatcaagaattaaagggggggacatcgggggtcatcatttattcaccacacaaatgcctccaaacaaaggggaaaccctaatttttttaggaacccccccccatacatgcccagctagccggacccggggggggcccccgggattcccgccggggtcccggagggggccccgctggccctacagggggccctattagaggggggggtaaacatgggcataggcggggcctggggggaattggggggcgatcacgtttctccccaacatacgcacccggaagcctaaacgggaaaacccggggggcctcatggggggggtaacggaggttaattgcgatgggggtacgggccggtttccaggccggaaaaccggggg

SEQ ID NO: 34087 - DNA, 667 bp, Oryza sativa
  Clone ID: PAT_MRT4530_38136C.1
ttatctccatcgtggcaatcctcgtgaagcactttgatcgactctagaaacatccttgaaaccatcgtcatcggaatcggctgcatcacctctatcggctgtatcggctgtcctctgtccgatccatctcagccgatgcagactccagccgatgccttcgcagccgatgcaaactctgttcttcgaatcaatctctttaccgaatccgcctcgattccaatggcgaccctggttcgtcggcgccgacctcagcatgctcgcgtccctctccgaactcgacctcagcttcaatgccctccgcgatgacctccccgtgctgccgtagctgctcggcggcctccgcgccctcgacctccgctccaactccttcttcaccatcaccgacggcttcttcgccgctatgggggagatcacgccggagttcgggaagaacaacaagacccccgtgcgctgcgcccgcagccgccgccgtagtcacctccgcttggacgttgccgcgacgccgccgtccgccgcccgcccccgtgctccgcgcccgcagccgccgttcgctacccgtccccgtgcgctgcgcctgcagccgccaccgcagtcgcctccgctcggccatcgccgcgacaccgccgtccgctgcccgccccgtgcgccgcgccgtgcccccgtatga

SEQ ID NO: 34088 - DNA, 1937 bp, Oryza sativa
  Clone ID: PAT_MRT4530_38137C.1
aaacaataagacgtgtgataaactaatgcaacactccacactagacaatgcattgctctgcggccaaaataacagagcacaaactaaaacgcaacactacacaaacacgtcaataaataatcactttaagttacttacaatttccacactttctcagacagcaattgcatcgaaatgcacacacgacgcgtgacccagagggcaaatatcttgacaaccttgatacaggatatgacatctaaaaaaagactaacacacagcatctaagagcacaataggagcaaacaagagcatgtacagggggcttaaaacgttgtttaaggtcatagccgctggagtaccaggccgaccctttatttagccagccagcctccagtacttcgggtcagcaggctgccataacactccagcattctcatccatctcaggatagggggagcaagtcgaaaatatctcctcacttccccttttatacccaagagatcaaacgattacgcataagatcccaacaatattagtagtggatcctatcgttggcatcaaaatttaggccttggatgcctcttatagtggactcatagttcttgttagctgcatgcctgccagatgacgaatgcctggggtcagaatagtcgagcatctgtgagctcctacgtggaggagcacttctttggaatgtcccaggacttgcatctggtgtgcggctacgtgatggttcagcttcgctgctttgcagttctcggctactagaaacaacaggtcgccttaaggatccgcttgaccgacccaacattgtcgaactagagaacaaagcatcttttgaagtggacatgtctggcctaaccggggacttctgttttgataacgctgccagcatttattcctgtaggtggaacctgacgtcgtgtaggatcatctgaccacccgcttcttcttccctcttcagtggctgatagcctattattatttgctattggagacattccagagctttgccctgctgctgcagcctcaattgatgtagcaatcttccgttcgctaattttctcgtacttctgttttttggtcccagcttttagaccctgccatggaagacttcctcttaagaagtacatgagtacatatccaagagattcaaggtcatcccttctgctttgttcgattccaagatgggtgtttacactagcatatcgagctgtcccagtcaaatttttgttctctctgtatggaatgtgctggtgtgttgaagtgtcccggtatttctttgccagtccaaaatcaatcatgtatacctggtttgccctctttccaaggcccatgagaaaattgtctggcttaatatctcgatgcaagaaagactttgagtgtacaaattcaactcgatttatcatttgatcagcaagcattagaacagtttttagagacaattttctgttgcaaaagctaaagagatcctcaaggcttgggcccaataagtccataaccaaaacattgtaatcaccctcaacaccaaaccacttgacatttggaatcccagttccaccctgaagtatcctgtacagctttgactcgtacagcaattgtggatgctttgttttcacattctccagcttaatcgcgacctcctcgttggtctgcacgttagtaccgaggtagatctccccgaacgagccgctcccgagcttccgcccgaggcggtacttgttgcccacgcgcggctccatcgaccccccccctcctcttcgccggtcgccggcgcgcgctctctcaccccaccaccgccggtgaaccgcaggggcctaggccgcgtcgggcgggcgcatccggcgaatcgcgtgggggattggtggtggggagggggggagctagggtttgagagagggggggatcggaggggcggagtgtgttttggattggggatttttttttcctttttc

SEQ ID NO: 34089 - DNA, 984 bp, Oryza sativa
  Clone ID: PAT_MRT4530_38138C.1
ggccttgtctacaccgacctcacctccggcgtgcggggcgacttgaaccgcttcgggggcaacctcccggcgttccaccaggtgctggtgttcgtctgcgtcaagtcggtgccggtgccgtacgtgttccccgccgagcgctacctcatcggccgcgtcggcccgccgggccaccgctcctaccggtgcatcgtgcgctacggctaccgcgacgtgcaccaggacgtggactcgttcgagacggagctcgtcgagagcctcgccaccttcatcaagctcgacgcctcgtaccggtgcagcgacgcgagcggcggcggcggcgatcacgaaccggaggaggagcggggggcgcggctcgccgtgatcgggagcagccacgccagctacgacatccaggacagcgtccagcactcgtcggcggcgtccgtggagactacgacgactcgccgacgaagcggcggcggcgacgacgacgggagccccggcggcggcggcgggcgggcgaagcaggtgcggttcttcatcgacagccacgtggcgagcccggaggcggcggacaacaagcaggtggcggaggagctggaggcgctggcggcggcgagggacgccggcacggccttcatcctgggccactcccacgtgcagtgcaagcccgggtcgtcgctgctcaagaggctcgccgtcgacgtcggctacaacttcctccgccgcaactgccgcggccccgacgtcgccctccgcgtcccgccggcgtcgctgctcgaggtcggcatggtctacgtgctatgatatggtcacccaaaacaacgtgtttaattacttccttttcttttcttttcttttccttttttttcctcgtctgaattgtgtgatacagaagtacagtaggtgctcaactcaaagctgctgtgtaggtttacatgtttggtcatccttttgctgtaaattcgaccgcatccgacgagaaagtgctcaatttttgcc

SEQ ID NO: 34090 - DNA, 702 bp, Oryza sativa
  unsure (1)..(702): unsure at all n locations
  Clone ID: PAT_MRT4530_38139C.1
tttgaagtggacatgtctggcctaaccggggacttctgttttgataagctgccagcatntattcctgtaggtggaacctgacgtcgtgtaggatcatctgaccacccgcttcttcttccctcttcagtggctgatagcctattattatttgctattggagacattccagagctttgccctgctgctgcagcaatagcacgtggtggaacactggttatctgtgactgctggtacttaagaatggtccagtcaaaaacgtaatcaaactgaaatccctctcgaatgaaaaggtctctgaacaatctcttcaggtattgatagtctggcaaatcttcaaaacgtagtgaacggcagtaatggaagtaggattgaaactcacaagggtatccgcgacagagagcctcaattgatgtagcaatcttccgttcgctaattttctcgtacttctgttttttggtcccagcttttagaccctgccatggaagacttcctcttaagaagtacatgagtacatatccaagagattcaaggtcatcccttctgctttgttcgattccaagatgggtgtttacactagcatatcgagctgtcccagtcaaatttttgttctctctgtatggaatgtgctggtgtgttgaagtgtcccggtatttctttgccagtccaaaatcaatcatgtatacctggtttgccctctatcca

SEQ ID NO: 34091 - DNA, 164 bp, Oryza sativa
  Clone ID: PAT_MRT4530_3813C.1
atgcctctgctctgcgccatctcggccgcgtcgccgccgggtccccacgccaccgcccccgtgtcggccccgatccgcagcctcttgcagggatcggacccgttgttgccgaccgcggtcagctcctccttcttggcaagcatggcgtgcagcacgacgcccag

SEQ ID NO: 34092 - DNA, 549 bp, Oryza sativa
  Clone ID: PAT_MRT4530_38140C.1
tgtgtttattgtgtttctcgaaaaacatctcttatagcgagcagtaagagatatgtttctgaggtctatatttgggcatccacgagtacacttggtcgctagctctggcaaaactggatcctccgttctgtgttccttcacatcaaattcacaagctaagtttctttcataaatgctaaaacaaatcataaagtagctctaattcatccgtcttatgctcctctagtcaagaagcagaggcattgcctcaatggaagacccggccatattaattgggatatttcatctctcgttcccacaccgatttcgctaaagcgagaaagacatccaatgaaggaaaagtgatgcaaggagggtcggagattaaaactccgacccccatgaatcagtatgagctagccacgtgatcttccgccgtgtcaaaaacactcaaaacatgtcataaactaactctaattcatccgccgtgtgctcctccagtcaagaggcagaggcatcgcctcaaaggaaggcccggccatattattgggatatttcatctctcgtttt

SEQ ID NO: 34093 - DNA, 607 bp, Oryza sativa
  unsure (1)..(607): unsure at all n locations
  Clone ID: PAT_MRT4530_38141C.1
ggggagaaatcctactagctcagtagtatcaggtcatcaantgcacacagatgtaccaatctaatcaggttgacagatataaatacaagagctacaggccttacttagactcaaaaactacattctacaagtggaatatagccgtaagaaatgccgagaagagcagcacttaggtgtattacaagtttccaccatatgaatgttgcaagaatttcccgacaacagtatcgcgcctagagctaaacaaatggaggctacaagtttgtatctggcagcaacacagcatcaatcagtctggacataatacagcagcgaccgatgcgcgcccttcgtgtagtgtacaacaatagaatgaaaaactccctttggatggccccaagtatcaaacaagcaatctgttacatttgaagctcttttcaccacaacctcgggtggaacctcgcctctttgtcactggtaaatcgatgtaacagcaatcatctaaaactgttcagatattgctgtgtcatcttactagtggaccattcatctatggcaagtggggccagacttcacgcagttacaccttgggtccaagcaggcctactaaactcgatgtattacaaaa

SEQ ID NO: 34094 - DNA, 537 bp, Oryza sativa
  unsure (1)..(537): unsure at all n locations
  Clone ID: PAT_MRT4530_38142C.1
gnaattgtaatacgactcactatagggcgaattgggtaccgggccccccctcgagtttntttttnttttttttnttaaacaaancgaaagctagctctcatcgatcaagaactgtttatcaacaaggggggcggacnccattaacacnnatgancacancacgntcatgcactntgttnntatatcnaacnncanataannatcgattgatcgatgggcatnccatcatgcatgacngatttncngattnanatanataccatntctagtntngggtgatngaagagnaagctactgattgattgattgattattgactgatccatcngacnaatcagnatgatgccgctgggtgtgcatgtnatcangtgtncnccgcccgggnactacgncgctagggtacctcgtctaaacangtttcttgctnngngantcgggcantccgtcgtcnctacangnagcgaattcctcactcggggaggcntcggtcncacngactccgggaaatcttgaaatactgtaaccgggatcctannc

SEQ ID NO: 34095 - DNA, 890 bp, Oryza sativa
  Clone ID: PAT_MRT4530_38143C.1
aattagtagcactgaacagtgaacaccagtgcagtttaagccacagctagctgaagaagaagacgaagaaggaagaggaggagaggagggttgagctagctctagatcagcaatggcgaagccgcagcaggaggtctacttcgtgttcatgaacttcgaccctgtctatgagcgcctcagagctgaccggtccaaggaggggtcggccacgctggacgcctacctgagccacaagcacgacaagctcctcgccaagctcctgcagccggacacctaccggaagaagtcgtctctcgccatcgtcgacggcttcgccgtcgagataaccgatgctcaggcgagcatactgaggttggcgaaggaagtgagggtggtggagaagaaccaggagcttgcttgatcgatatgaccggtcaaattgatagagattattacacatatatataatacatatgtgtgtgccaatcaatcaactactagatgcttaatttaatttggcatcagctatatatggctatatatgtagctatatatatagcagtaaatggttgcagttaattactaattaattaagctaaattgaaggagttgatcgatcgagtcaattgcctttgctgcatgtgtcggtgtgtgtgtgacagtgtgagctcccatatatatattatggatttgttgactccattgtcaagcatagctgctagtatgtgtatattaatactgcttagcagtgataataataaattaatatatgtagttcttaggttctaattattgtcagaggacgacgacttctagctatgtccaacctagcaatgtaatggttaattctgcatggttttgttcaaaacctatttgtattagtagtataaattatagctaaaaaaaaaaaa

SEQ ID NO: 34096 - DNA, 246 bp, Oryza sativa
  Clone ID: PAT_MRT4530_38144C.1
tgttttacttacagcagcccgggacacatgggtcggcatatctcgctacagtcctcgaggacccatctaccccactatagtggatatcaccatatactagcacagtaactgaagctgatcgaataggtgactgatttgggatgacgacgccgagctctgacaggaaccaggtgaagggacagatcgagagcatctgtgtgaggagacaaggcaattccacaccttctgaaccttgagagacaaact

SEQ ID NO: 34097 - DNA, 5241 bp, Oryza sativa
  Clone ID: PAT_MRT4530_38145C.1
tcaaggcaagagaactcgtgtcctagaatgttgtcctagcacaatttctacatcaatggcatttttctgaaatcctcgcaccaccaaccttgtgccattacaaagtccattagctgggtcgatattcctgagcaatatgataggacaattaattttgagctttagcatgtgtggaggcagtccatatggggtaagagtgttaaggaattttgggggatagtagttatgaggatcatcttccgcactatcaaagctgtgatacaccatctcctccccttgaaagcggtcaatcattttcagatttatgttgtccacacagtcgttccgtgtggataaaatagctcttgatgtgatgtaatttggatcagctaggcaatcattgagcgttggataaacactctccatcaatttatctaggtcactgtcatcccctgtgtatggcacacatatattgtcaggaagatgtatatcaccattatcgttgatctcttcagtgccattaccgatccgtagtagatattctacaaaccaaggatcgttttgtgccctcatgttgcgtaccaattgcaagtgacgcatgcaaccccataagttggacctccgcaatgatgcatctaatatctgaccccttgacccatgtcgtacaatggggagaacttgtctaaaatcacctccaaacacaactgttttcccaccgaatggaaggtttggcttgtccattatgtctcgcatactattatccagtgcctccaccgcttgcctcttagtcatagaggcttcgtcccaaatgatcaacgatgccatttgtagcaacttggctgttccactttgttttgtgaaagtacaaatagccccatcatctatccttagtggtatcttgaatcgagagtgtgcagtccttcctccgggcattatggaagcggcaacaccagaggtagctgtcgcgatagcaatctttccttgttcacgaactgttgcgagcaatgccctgtatagaaaagtttttcctgtgcctcctgggccatctatgaagaataggcctccttcgttgtgatcaactgtagctagaatctcatcgtaggcggccctttgctcggtgttgagggagttgcacaaagctgtgtcctcagggtccaccttgatcatggattcctcaatgatctccttagggacaccatttgtcgtgtcgtgtagcatatcgaccccaggaagaggaaacgaccgtatatctttgcccatggaccgcaacatatccttgatatttattaaaaccatttgttgaaccacgtgtggacactgacaattgcgacgatagtcttcggacatagcctcgaggtgattgttccagagaacacggacgtcgctaggctcacaaaacaccagaattgttgcaaagagtcttcgtagtgaagatggcatttgtaataactcagcttccgtcaagcattcttctagtgtattgtctgcttcgattaaacctcttctctctgcggcttcacggaaggatggtagtatttttccatccactgttcgtaggtcttcataacaggtggcacctgtcacatggttcaagagaaccctgagatagtatcgttccccttcggttggatgggctaggaccattcttccaacttgaaggatggcagatcttttccttttttgccaaaatttcttctttttgcctgtctgccaagtatgatgttctggaaaatcttggtacaacatgccatctgcttctttatttaacctatttgcttcaaagtatgctgttagcattgtcttttcagcaccatcttgattgagcacctcctggatgtcctgtttgcctcgatacttaaccatgtgcatatttgggagatgaagctgtagttgcatcacagatggatgtaccttgctcaaatcgaatccatatattctccatagtgcttccagaggtgtcacccaccgtgcatccctatactgcctgatctcatcaatgtcatcttctttacctaccccatttacaggcacagattctctctcatgccccttgtaattgtgtttgaataggtacttcacggcctttatacttgagcatacctccacatttatgtggcagttgaacatctgtaggaggtaagggttataaggaactacccacctattgtctagtggacatttttggactatcactgtgcagccgtcgtcgcgtctcctatacactgggtaagagtccttttcttgaatggtagtagcgttgaaaggcttaggataactgttcttgcatgatgagcgattcttcatgcatgggcaatagtgattcaactcaccgcaaggaccatgcatcatatgtttgatgaccattgtatataactctgggtacttactttggttcggaagctctgcggagattactctgtcgtattgctttgaatgtgtgtacttgtactttttagtcatgatcaacaagaagtgagcatgcggtagacccctcttttggaattctacaacataggtataggcctgaactataccaagaattcccttttcgaacagttgtttcttcatctcctctaattttgccttaaaaacacgaacgatgagatctgggcgatcttgaggcgtttgtccaaacttgagctcatgaatgatctcttcccagttggggttgcaggtcattgtgaggaagatatctggctttccatattttcgtactaaagtcattgcatccatgtatcgacgtaatttatctcgaggccctccaataaatgacgaagcaaggactgttcgtttgccaattgcactccctttgttttctccagtattaacgctatccaataggctttggtacaaatctgcccttatctccttttgatgattccatatatagtccaaccgtgagctctcaatcttattgtatgtgtcaactgcaaactgctggagaagacgtccgccatgcaatattgggttaaatatgccaggtctcatttggaacttgtagcagtagtagtctctgacggaaacacacagtctactacctgaatctgggtcctcatcactgttgttgcgattctggcgagccttcattatatcttccaccttaacaccaaactttggtatatcggcatgccaccctaattcagctttgggaaagaacagaggatatgacaacggatcatagcatccatagtatgaccggatgccttgtatatcattgttattcccatgtaggattacactcttttcaaatgtctttcgtcgttcgtttccctcgacccacaccgcagccacctctgaacttattggcacattgtacgtcctctgatccaacctttggtcaaggttcagcatcacacggcagtcttcaagattctcgatttgccccaaactcctaaattgctcagcgtatggattaccacgcagaacgttggttaggatgttgactacttcttgatcttgttcatataactcctgtcggcaacggcggtaccgatgttctaggcttggatcatcatcatagaagtataactcgagatgcttagggtctgaaccattcgtaccaaatgaacttatattatggtacatttggccatgagctcgaaacgtgtagaaaccagttttcctcatgtcacttgtttctctgtcaagatgacagtaaagagaagtgaatgagaaatgcccattgaaaaaccttatgttgttgcgaaaatgttgggcgtaggaatcattgctcgtccagagcctcatgagttcaggaggtgtgtcttgatgagctagtctggtttgtccatttctgcagcagaagccctttgtctcatgctcaaacttctttgcgttgcagaattgacaattttccactggttttagcatatgagtgcactgtggtatgttgctatacacgagctcacagggatcagggacgctagagcactcgggtatggcttctacaacctctttgatttctacgtccttgtgtgtctcccaatcttgaccatcaaacatgtcactctcctcattggtgtcatcgtcaaatatgtcttcatcaccggtatttgttatgctttgctgcttaggagggtctatgctgtccgctgtttgagtgcatatcgaaggatcttctcctactgacacagaagtccttgtgtcccatctaattgtgaagctttcattttgacgagataccaatgcttgtctttcgtcatgtgctatatgtttcctatgtaatctagtcggaacttgaggtgacgtatctagcgcaatatacgtaggactctccattgcaatggaatacttgcttggagtgttgcgtcgcaatgcacggttagcaatgacctgttctatcttagctttcttttggtctggtcccatatttctgtatttcatccttgcaagtgcctttttttcttgttttggaattgaacccttatcctggcttgcaatttcttgttctgcttgcccggaatgtgtagcatgcaatggctcctccacattggcaagggcatttaaatctttgttgcgcttataggcttcacgacgcttttttagtttctcctctttctcttggagagtcatttgcgcatatcgctcccgatctctctgtcttcttcgtatatttggatccaaaagtggagatggcgatccaaatgatgtggtaccagcatcaagcatggaagatggagcttgaccatcaaacatatcactctcattggtgtcatcgtcaaatatatcttcatcaccggtatttgttatgcttggctccttaggagggtctatgctgttggatgtttgtgtgcatatcgaaggatcttctcctagtgacacagaagttctcgtgtcccatctaattgtgaagctttcattttgacgatataccagtgcttgtctttcttcatgtgctacatttttcctatgtaatctagtcaggacttgaggtgatgtatctagtgcaatatacgtaggactctccatttcaatggaatatttgcttggagtgttgcgtcgtaatgcacgattagcattgacctgttctctcttagctttcttttggtctggtcccatatttctgtatttcatccttgtaggggcgtttttttcttggtttggaattgaatccttgtcctggcttgcaatttcttgttctgcttgcccggaatgtgtagcatgcaatggctcctccacattggcaagggcatttaaatcttttttgcgcttataggcttgacggcgcttttttaatttctcctctttctcttggggagtcat

SEQ ID NO: 34098 - DNA, 265 bp, Oryza sativa
  Clone ID: PAT_MRT4530_38146C.1
atggcgtggggccgccgagccccggccaaccggcgcgccggtacgtgccaaagcgacggtggagtgcgccgcttttggccgcgaaaacgacccgacaggatcgcagcgcccggccgcgcgcgcggcccctgctgctgacctgcttgccgttgccgggcgccgggcgccgcgcgcgtggtggctgcggatcacggattcacgggggggatttcgatcgctgcaggagcgatacgtgcgcgggcgcggcgcacggggagtgcaatgc

SEQ ID NO: 34099 - DNA, 712 bp, Oryza sativa
  Clone ID: PAT_MRT4530_38147C.1
aaaaaaaaaaaaaaaaaaaaaaaaaaaggacctccaatactgcactgcataagttcagaaaactagagcagatcgagaatggcatccaagaacctcctcctctcggccgccgtgcttctgtccgtgctcgccatcgccgcggcggcggctacggccagcgcggcgacgacgtcctgccagccgggcatggcgatcccgcacgacccgctccgcggctgccgccggtacgtgctccggcgcgcgtgcggcctcgccgccggcgggcggctgtacgactggtcgctgaaggagcgttgctgccaggagctcgccgccgtgccggcctactgccggtgcgccgcgctggcctacttcatggacggcgcgtccgagggccgcctcctggaggacctccccggatgcccgagggagacgcagaggggtctcgccgccatgctcaccacgcccggcgagtgcaacctcgagaccatccatggcggaccgtactgcctcgagctcaccgacagggagatgcccaaatattgaattgaagtgatggattaattagtagtgtgttcaccgtgaataagtgttgctaatcgcatcaatctatggtccatggatcatcacatgaatgcatgcttgagtgcatcatcagtgatgtgtgttgaataacaagcatatatacaatgcttttttttcccttttcaaaaaaaaaaaaaaaaaaaaggaa

SEQ ID NO: 34100 - DNA, 2355 bp, Oryza sativa
  unsure (1)..(2355): unsure at all n locations
  Clone ID: PAT_MRT4530_38148C.1
atggatctgcggcaagacgcgacggcgaggcggtggcttaattctctcagggacgttgcttacgacgcggaggacctcatcgagagcgcggtgctgcagcagcagggtgacaggtactctgccgtgaactcggttctccatccgattagtcgttacaggtctgcccagaaggtggaggagatcaggtggcggagttcatcttaccacataggcaacaataccatctttggtcttgaacaagacactgatatgatcatggaaaggctgctccaacctactgaacatcgagaggtgattgtgatagttggcatgggagggataggcaagacaacccttgcatctcttgttttcaacaaggctcgtggagttgaagaaaggaacacttggtctggccaagctccacccaaagcaacagatccaggaagcagcagcaaaagaagtcattttgacgtctgtgcttgggttccagttggtcaggatcctgatactctccacctcttcagtaccatatctattcagattggagctaatttggatctatcacgtgatgtggctgaaataaaacatcatatgttcacctttctgcttgataagaggtacctgattgttctggacgacgtctggagagaagaaacatggcatgaattggttgacgctttccccatgtcgacaaatgggagcaaaatcctgatgacaactcgctccaaggtaatagccatttctgccgaccctgcttcatatccacatgagctgaatcccttgagtgatgaggtgagctttcacctcttcctatccaaagttttcccaaatagcaaccttaatcaagcaatgtcgtatccaccactgatggaggatttggggcgccaactcagcaagaaatgtggtggtttacctcttgcacttgtggttctaggaggcctactatcagccaaggaaaagaaacacgatgtatggagcagcatactgaatagcatgaactggaacgacaatgaagctgagaaacagtgcctgaaaatattggccttaagctacgacgacttgccctatcgtatgaaactgtgttttctttatctaggagctttcagagaagaatctgaaatcagtatctctaaattgacaaagctatggattggagacgatcttatacctcagcaaagtggaagaagaagaaaagaggacacggccactgactatttaaatgagctcattcaaaggtgtctcgtgcaacctgttcttctgaaacataagcagcgatcaacgagggttatcagaccattctttccgctaatttttagatggtgtagaatcaactggcaaacagtttggagcatgccttatataagagttattgaagtcgaaggattgatgatgccaacggatgctctgagatccatccagagtagcctaattcatttaaggtacttgtgcctaagaaacacccagttggttgcgttcccgttcaatgagagcaagttcccatctctacaaacactagatataagagagacatcagtcaagaagctacctgataccatttgggctcttaagacacttcgtcatctgtacctgaacggaatggaacctccaagtataagatgcctcaccaatctacaaacgttttgtggggtcttagtttccaatgatcagattgccatggaatttttaacattaaaagatctgaggaaattacaaattgaactcaaagcatggaatggataccctctactggtaaaatctctgaagctgctgctggctctcacctcattcaagttgtcttccacagaaatctcttcagaagtgattaacaaaatagcacaccattcaccgctgcgcaagctgcatctccaaggcatgctacatcctcctgtcctgactctaagcgaatatttttcagattacatcacgagcatcacattgtcagcctcgagaattggcactgatcaattaaaaacacttggcagtctgacatgtctatgggaactcaagctaaaagatgatgcactcttgccatgtccacagcacagctttcctcagctgggatatttaaagatcagtagcctaaccaacctggaggcattccgaatcgagcgcggtgctttttccaacctcgtccgcttttcagtacactattgcagtaagtttcgtagcatcatcgatgtcctggagcatactacgagcctgcaggtcctgaagctcaagggaatggaacttctaccggatattactgattcttgtagaaacaaaaatgtttctgttatcactatggcttattagctagagtgctaatttggtaaaatttctgcgtccataattngggcaagatcagcgttgatttggactctctggatgtcaaag

SEQ ID NO: 34101 - DNA, 483 bp, Oryza sativa
  unsure (1)..(483): unsure at all n locations
  Clone ID: PAT_MRT4530_38149C.1
cggaatttctccggggttcgacccacgcgtgccgaatatgatgggtggtgcatttgcaatgcacaagttgtggagggatacaggtggatcctggtgtgtgcaagttgcctcggtggggatgcacaatgttagcgattgagccaaaatgtgttgggatagattaatggttgggcggtgccngacatgacttcccctgatggataatgttgatgactgtggcccattgttggctgttatgggccgcctgttggtgtgctgcatgctgttgggctgatgtgccatgaaaatttgctgcaactgtgtgcagaaaccgttntagaaagcacatgggcatgagcagcacgacnaatatggtattttttccatcaaagcctcctagagctacggatgtactatatgctaccaatgggttgtacaagttgcttcacaaacatttaatatagtaagcataccatcattacattgttgcaaaaaaaaaaaaaa

SEQ ID NO: 34102 - DNA, 378 bp, Oryza sativa
  Clone ID: PAT_MRT4530_3814C.1
atggagccgagatctccgcggccgtttcctccctctccggccgcgctctccccctctcggcgctataaaatcgtcccccgtgcttcgctcttccgtttccgccgctcgccgctcgctctcgccgtcggattcgtgctcgcgccgtgcacctctctctccgccgtcgccgtcgaccttcggttcgccgccgccgccgctccggacttcctcccgactcggcgccacctccatcggcttcgccgcgttgttgccgaccccgtctgcctctccgtttcgcccgccgaccaccggagcaccgtcgccctcgtcatcccgaaccgcgccgccgcgttcctccgctccgttcgtcgtctccgccgtcctcgtgtctcggggtga

SEQ ID NO: 34103 - DNA, 459 bp, Oryza sativa
  Clone ID: PAT_MRT4530_38150C.1
gaagggatacatcgcgagacagaaaaaaaagctaattacacagataagttgatttgccctggaacttgatttggtttgatgataaagtaacccgtacaagaagtatacgaaccatttaggacccaatgagagcaccactttgttcaacttcaatttctatatctttaatcgctatcctcaatgattaatggcaactcctaaaaatgattggttgcagtggttcacattttagttccgaaagatctgtgctgaagtggtaccgtggagtagctttgggcattttctgtggtttatcagtttcatgcgttaagttaagacctaggtttgatttaatgaatgccatgttctatttattcacaaaaatgatgtttcattaatcgtttggccaagccttcattattaatcagtttttgtggaatttaatttgtcttgttcttggattgtaaatttaattatata

SEQ ID NO: 34104 - DNA, 446 bp, Oryza sativa
  Clone ID: PAT_MRT4530_38151C.1
gcttcggcatgcaatggttgaagtaggataaaagaacttctacaaaatatctttacacaaagcggtgtctgaaatcaatgtcaacttgcaattacattggtattagaattaggcagaatcaactaaggtatggtgatcttccgtgtttgactatggccaggaccccataaaaacaaaagggaaagcatttgctctattatccttgcaactggaccaatatcattcagaaaggcattacctatcatacaatttaacagaatatataccggtgttaccacactaatagattgaggatagtatcaatggcgaaaagggaaaaagatgcaagtgcagtgaatgtgattccgtaaagatgggtatggtatatataaacaaaggagatgttgacctattgaagaaagcaccagttattactgccgtcaacagaagagagaaataactcacga

SEQ ID NO: 34105 - DNA, 1635 bp, Oryza sativa
  Clone ID: PAT_MRT4530_38152C.1
atgtggggcccacatatcatcctctatctccaacccttcttcctcctcccttcctctcacatgagctgcgtcctcggccgcccctccgccccctccctcgaccacccccagcagcccaaccccccgcccgtcgccccggagaagccgcccgccgtcgccaagaaggcggccgaggaggaggaggagaagaagccgccgaagcaggctaggagggagaggcacgcatggtcgtcgcggtctgccgccgccgaggcggtcggcctggggctcggggggagcttcgccaacagggcgcgcggggagcaggtggcggccggctggcccgcctggctctccgccgtcgtcggcgaggccatcgacggctggaccctgcgccgcgccgactccttcgagaagatcgacaaggtacgtactcctgccctcgcgctcgccattgttggtggtgggggaagggaactgagctcatcggtcttgtcggtggcgcagatcgggcaggggacgtacatcaacgtgtacaaggcgcgggacacggtgacgggcaagatcgtggcgctcaagaagatgggccaagtttgcttccttctctgtaagcccagttaccgtggggatacagccgccggcggacgcggagggcggcggcggcagcagcagcaaaccgccgctttggcagaagaggaatccgggatggccggcggcggcggcggcgggaatcgcctggacctccccgtggtggacctcgcgtcctccgacccccgagccgccgccgagtccatccgaaaggcgtgcgtggagtccggattcttctacgtggtcaaccatggggtggaggagggattgctgaagaggttgttcgcggagagctcgaagttcttcgagctgccgatggaggagaagatagcgctgcggaggaacagcaaccaccggggatacaccccgccctacgccgagaagctcgatccctcgtccaaattcgaaggagacctcaaggaaagtttctatattgggcctattggagatgaaggtttgcagaatgatgctaaccagtggccttctgaagagcgcttaccaagtcggagggagacaattaagatgtaccatgcaagtgcactgtctactggcaaaaggatactctctctaatcgctctgagtttgaatcttgacgctgaattctttgagaacattggtgccttcagctgcccatcagcatttcttcgattattgcactacccaggtgaagtagacgactctgatgatggcaattatggtgcatcagctcactctgattatggaatgataaccctcctagcaacagacggcactcctgggctacagatatgcagggaaaagaataggaatccccagctctgggaagatgttcatcacattgatggggccctgattgttaacattggcgatttgctagaaaggtggacgaattgtatttacaggtctacagtgcaccgtgttgttgcagttggtaaagagcgatattctgcggctttttttcttgacccaaaccctgatttagtggttcagtgtttggaaagctgttgcagcgagtcatgcccaccgaggttctcacctataaagagtggcgactatttgaaagagcgattgagcgctacatacaaatag

SEQ ID NO: 34106 - DNA, 792 bp, Oryza sativa
  Clone ID: PAT_MRT4530_38153C.1
ccgtatgcaccacatctaaacgcctccacgaagcagcaaaatccagctagaatcaacgctactcgcctaaaaaaaccacaaaaacctcctgaaattcgcagtaataagcatccatctcgcgttgatctatccgatgccacgaattattacaatactaatcagctcaacctcgccaaaggccatcatcaaaaccagcctaaaaatagttttaaagaaaaaaccaccaagcacagcacagaaaaactaaaaccgcacgggaaaaataaaaaagcattacctcgatcagcctttcaaccaatccggacctcacgcggcgtagacggcggcggcggcgaggggatagacgcgcgcggcggcgacacgggcggtggaggaggcgcaggggaaggaggaggagagagagagggagagaaacggctcggaggaaggagaggcgagaaaaagattttttccggggatggtggtggtggtggtgacccccgaatatttgaccgattagcatgtcaaccgttggatggaaggacgtggccatcggacggcctcaacgaggaggcatccgcttcgctttaccttctcgggaacggcaatcggggtgacgtcaccgctacgaagctggacggctgtagatcacggatgggaggtcactggacggtgaaaaatatactactcctaatcaatcttagcttaattaccacggcgcaagttactaaccgggtttcgcgggcagtggacctgagagggaatatccgatccgcatcggacggcccacaggcgtccacgctcgccacgagt

SEQ ID NO: 34107 - DNA, 305 bp, Oryza sativa
  Clone ID: PAT_MRT4530_38154C.1
attcagaccagtgcaagactcatgtactcattgatgattctggagaaattcggagctcatgtcggaaaatacatatgtgcagatgtatatgtaccaggcaatatggtgtacatggaaagtcgctttacgacagcacgtgatactgtcggtgccatggatagtccttttggacgactcgggctcactggatgctatgatctgagatttgcagagctataccaaggtccgcgctttaagcatcaagctcatgtcttactagtaccattcgcgtgcacacatgtaactggagaagcgcactgggaaat

SEQ ID NO: 34108 - DNA, 381 bp, Oryza sativa
  Clone ID: PAT_MRT4530_38155C.1
atgacggcggatgagtgctcgacccatcggcgctccaggggaaaccacttgagcaccctcccgtccgacacgcccgtgtacgggccgtcgccgtcgccgtcgccgtcgaacgccacgctctccggcccaaccgcgccgctggagtccacggtgatcagcacgtcgtcgctccgggaccgggagtccagggacaagaacaacgccgccgccaccgccacggcggccgcgagcaccacgaggctggcgtcggcgcgtcagcgcacagcgcactgccctgccgccgccgcctgctgcccgcctcgcccccgcgtcgcgaatcgccagccgccgtttggggagggggaaggggaagaatcgaagaaaggagctggaatgggctga

SEQ ID NO: 34109 - DNA, 423 bp, Oryza sativa
  Clone ID: PAT_MRT4530_38156C.1
atggatctcccgctccaccccaccccaagtccagtgcagcagaggggagtaggggactgtctggagaggaagagagggagggggagctgcgggcttcgattcgaagcggcggaggcagccagccctcacgacggcagagagcagtcgagccgtgctcgtactcctcgtctggccgccgccatcgccgtcattcttgtcccccgcgccgccctcgctctcgccgtcgtgctcgtcctcctcgccgcccgcgctctcaccgtcaggctgcagtactcagctgaggagatggggaccggaaggccatgcgccgcgacaggcagcgcgcggcgaatggaggaggggagcgagtggaggaacatagcggcctcctcggcagtcagggagaggaggaactcctcctcgccgtctctcagcagcgagtga

SEQ ID NO: 34110 - DNA, 140 bp, Oryza sativa
  Clone ID: PAT_MRT4530_38157C.1
agactcctctcctcctcgatgatgggggtatggcaatggcaaaggcgatgggatcttggcttgaatgacgggaaggggcatcgccgttccacctccttgaggacagtcgagcactgggtgtctgacatagactccgccct

SEQ ID NO: 34111 - DNA, 921 bp, Oryza sativa
  unsure (1)..(921): unsure at all n locations
  Clone ID: PAT_MRT4530_38158C.1
ctccgcgcgtgccccacgccgcccgcccccgccttcttccttctcctcctccgcctcgaatggctccacgcttcagccgcggctagggtttcgtcgcgagcgacctcccgccgcccgccatggaagcttccacctccctcctagtcctcgtcctcgccgccgcggcgttcgcggcggggacggtgacggaggcggcgggggacgggtgcagcgccgggtgcgacctcgcgctggcttccttctacgtgacgccgaaccagaacgtcaccaacatggcggatctcttcggcatcggcgcggcgaactaccgcagcctcgcgccctacaacccgaacatccccaacctcgacttcatcaacgtcgacggccgcgtcaacgtctacttcacctgcggctgccgctcgctgccgggctcgccgggagtcacctacctcgccggcgccttccccttccagatgtcccgcggccagacctacaccaccgtcgccgccaactacaacaacctcaccaccgccgagtggctgcaggccaccaacagctacccggccaacaacatcccggacaccgccgtcatcaacgccaccgtcaactgctcctgcggcgacgccagcatctcgccggactacgggctgttcctcacctacccgctccgcgccgaggatacgctcgcctccgtcgcggcgacctacgggctctcgtcgcagctggacgtggtcaggaggtacaacccggggatggagagcgccacggggagtggaatcgtgtaccatccccgtcaaagatccccatggaagttacctacctctgaaatcaccanggcagcttctgtcctttgcaagctaattatgcgtctgcatgaaggacagggagcttctgcaggagctatagcaggaggtgttgtggctggtgtcgttgtgcttg

SEQ ID NO: 34112 - DNA, 1510 bp, Oryza sativa
  Clone ID: PAT_MRT4530_38159C.1
ttagtaatcatctaaagcttgttctggtcctctgtggcatgttctaccataatgcgcctcacctgagctacctccttgcccaatgaactttaccgtagcgaaggtcaagtcatttgcatatgtgattgtgaatcctgcagactgcccatcgatatgccaggctctccagtcatccacaattgggtagttgagtgatcttacccaggcttgtgtacccaaaaatggaaccacggaatcatggtcgccactgtataccaagacacgatagcctctagatgtaagattttgatggtacttaatactgctctctatgtcctgagaataaggtagtccatcgtcatggcacctcacccactcatccacagttcccttttttattccaagattttcccgtgtgttgttgctgttagcccagaaatatgacaaatagttgggataggtactacaatccattggaggacgtggtggccgatggtttcccactacaatctcctccagaatctttcttccaatagtaccatcatctggtttgggagatacatagatgcattttttatacaaaatatgtgcctctgaaacttctcccatgagctcactgaacctgttcaaagcttgagcgcaggttgcattcttgggattggcataatcctctcttccgcaatgctccagtatagtctcatatagttgatctgaaatgattccaactccgtgagcataaggcactttcgactcgtaatcgatgctttcgccggtacccgggttgccaaccagatagcccttgagattaagcacaggcttgactccagcctcaacatcttctgagattttctgcaggagaaatgggacaagctttccagcgtaggattctccaccaacgtacaacggattcgagaggaattcgcgatgttgagagaaccacttgttgacaaatttggtgagctgcagcgtggaggagacgtcgccgacgtcgtaccccctggggtcccgggagaaggagaagccggcgccgaccggcgagtcgacaaagaggacgctggcgaccttggtccacgtgtaggggttgtaccgcagccgcggcacgccgccgtcgtacggctctatcgccagcttcaccggacctgcagcacagaggcgggtgagcggtggcgcgccggccggtgagcggtggtggttgaggttctcaccgatctcgaagaagagcgcgctgaggacggagcagcggttgccgccgttgatccagaggaggacggggtcggcgccggggtcgccctccgactcgatgaagtagtagaacagctctgccgccgttctcctcgtcgaccgtcacgtacccggtctcgaggcgtgaaggcagcgcgccgtcgaaccccggcagcgtcgcgacgttcgtgcgttcggcggcggagacgacgaggagggggaggaggcggcgggacgacggatgagcggcggcgaggaggaggcagtagcagaagaggagacggaaggcgagacgcagtcgcagggacat

SEQ ID NO: 34113 - DNA, 1515 bp, Oryza sativa
  Clone ID: PAT_MRT4530_3815C.1
ttaatcgaacacgtaattttctgtagtcggtatcctttccacgccgagatgatccatgagagttgcgccgtggtcagcacgccgccagctgctgtcgcttctcggctttcctcgcgagtcgaggctcgcgtcgcgtggtcggcccctccgccggccgttccctacttccttcgccgccagtcgcccggaaagaaggcgcatccacccttctcgctgagacatttccatcgagccacccgcaggcggcgaaggaagggattgcgcggcgcgatggagggaggcggagaggatacggcggcggccatggcgatggaggtggagatagaggcagaggccgtcctatgcatggggacatcctcgcccgcgacgtccaactcctcgtctccaagccctaacagcggcatctcctcgagacgtttgggcctcaagaacagcatccagaccaacttcggcgacgactacgtcttccagatagcttcttggtagtatgccctctgcatcttatttcatatatctgatggaactataagagcttgggatacaagaagctttaagcagatatctttgctaaggggttctcaagaattgttcagcttctcctttggtggatcaagtggtaacctacttgctgccggttctaattcccaggttctattgtgggattggagaaattctaaacagctagcatgcttagaggaatctcacatggatgatgtgactcaagtaaaatttgcaccacatcagcatagcaaactcatttctgcagcagttgatggattaatatgtgtttttgacactgatggtgacatgaacgaggacaatcatttgctatctgttatgaatgtggagacttctgttgcaaaagtgggatttttcggcaacacataccagaagatctggtgcttgagccacattgaaacattaagtacctgggactggaatgatgggagtagagaactgaatatagatgatgctcgttccttggcaactgataggtggaaccttgaccatgtggactattttgttgattgtcactactctctgcccgacgacaagttatgggtgattggcggcacaactgcagggacaataggttacttccctgtaagagctggtcttgaaggggcaataggttccgcggaagctatccttgaaggaggccatacagacgttgttagaaccgtatatccagccgcaaacactcatactgggcaaaacaggggcatttttggatggacaggtggcgaagatggtcgtctgtgttgttggcgctctggtgaaattgctgagatgaacaagtcttggatctctagttcattagtgtcaagggttcaaaagaaagctaaatgccgacaacagccatactaactgatgcgatatatgtccgacacatatgattaacaaaatacagctgttctcctatattaggaaggttgacaattgttaatccgtaatgtttcccttgtatgtgctatatagattattttcgtttcaaatgaagtaatggttgtgttt

SEQ ID NO: 34114 - DNA, 262 bp, Oryza sativa
  Clone ID: PAT_MRT4530_38160C.1
cccacgcgtacgcccacgcgtgcgcccacgcgtacgcatgaacatggttgatatatgtagctgcacgtcactccaaaacgagaaacttatggcatagctcgtgcgctatgacgttaccttggcggtgaaccgtgccttaagtcatacagatgacagatcgatctatacccaggtatacttggtgcttaaggaaaacggcggctgcaagtgcggcaccagctgctcctgcaccgactgcaagtgcggcaagtgaagtcacgag

SEQ ID NO: 34115 - DNA, 1428 bp, Oryza sativa
  Clone ID: PAT_MRT4530_38161C.1
tagtggtatgctggaaatccaacgcttaaacattgcaaagcacctctccggctcaaactctggtgcagtgtgtccagcaccctggccatcgatatgccaggctctccagtcatccacaattgggtagttgagtgatctcacccaggcttgtgtcccgaggaatggcacaacagcatcgtggtcaccacaatataccaaagcacggtaaccttttagtgtaacatttcgatgatactttatgctgctcctgatgtcgatgttgtatggtagatcatgttcgtggcacctaacccattcatttatggtgcccttcttgattcctagagttcttcgtgtaaagttgttgtttgcccaaaaatatgacaaatagttggcatagacctgtggatgcgaaaattcacctagattcagatgaacttaaatatatatagaaatatgtacgataaattgatggacccgttagattagatatattttttaaaaaactcccttcttctaatctctgaatgcatgtgcaatcagagttaacaaagatcacgcaggaatcatttaggacataattaaattttgtgagccgcgtgttcgactgttcacctcatataactgatctgaaatgattccgactccatggctgtacggcactcttgattcgaggtcaatgcgttcccctgtactcggattacctaccagatagcccttcagattaaacgtcggtctgacgccagcttcaatatcttccgagattttctgcaggagaaacgggacgatctttccggcataggagtctcctccaacgtagaacggatttgagaggaattcgcgatgttgagagaaccacttgttgacaaatttgatgagctgcagcgtggaggagacgtcgccgacgtcgtaccccctggggtcccgggagaaggagaagccggcgccgaccggcgagtcgacaaagaggacgctggcgaccttggtccacgtgtaggggttgtaccgcagccgcggcacgccgccgttgtacggctctatcgccagcttcaccggaccgatctcgaagaagagcgcgctgaggacggagcagcggttgccgccgttgatccagaggaggacggggtcggcgccggggtcgccctccgactcgatgaagtagtagaacagctcgccgccgttctcctcgtcgacggtcacgtacccggtttcgaagcgggaagggagcgcgccatcgaggccagggaggctggcgacgttcgtgcgttcggcggcggagacgacgaggagggggaggaggcggcgggacgacggatgagcggcggcgaggaggaggcagtagcagaagaggagacggaaggcgagacgcagtcgcagggacatgatagacgtcgcctttgtctctgtctgcactctgcaggtgcgcccacgcgtccgcggacgcgtggg

SEQ ID NO: 34116 - DNA, 935 bp, Oryza sativa
  Clone ID: PAT_MRT4530_38162C.1
tttttttttttttttttttttttttttttttttttttttttgtttaaaagttaatggtgtcatctattaaaaaaacgaagagagtatcactgagagatctcaggattatttgtatcctttcatattcactttagtaatcatctaaagcttgttctggtcctctgtggcatgttctaccataatgcgcctcacctgagctacctccttgcccaatgaactggccaagggatgtatcattcattagataataatcaaagcagctctcatcataactgatatacacaatcgtcaaagtgatttctctgaaatccatctcccaaacattgcaagacacctctccggctggtactctggtgcagtgtgtccaccaccctttactgtagcgaatgtcaaattgtttccatatgctatggtgaatccagcagactggccatcgatatgccaggctctccagtcatccacaattgggtagttgagtgatctcacccaggcttgtgtacccaaaaatggaaccacggaatcatggtcgccactgtataccaagacacgatagcctctagatgtaagattttgatggtacttaatactgctctctatgtcctgagaataaggtagtccatcgtcatggcacctcacccactcatccacagttcccttttttattccaagattttcccgtgtgttgttgctgttagcccagaaatatgacaaatagttgggataggtactacaatccattggaggacgtggtggccgatggtttcccactacaatctcctccagaatctttcttccaatagtaccatcatctggtttgggagatacatagatgcattttttatacaaaatatgtgcctctgaaacttctcccatgagctcactgaacctgttcaaagcttgagcgcaggttgcattcttgggattggcataatccc

SEQ ID NO: 34117 - DNA, 567 bp, Oryza sativa
  Clone ID: PAT_MRT4530_38163C.1
atgacggtggaaggaggtgacgacgcgcctcgccgtgatcagcagtcgacgagcgggatggttgcctggttggcagctgcctccgccggtacaccatgcaatgatagaaactacgtcgctgctggtgtgttgagaaggtccagcgagagcaaccaatgggtttgcattccacacttccccagcggcgcgtcgagaacctccagccgtggttgttcacattcgctagtggcgggcggggcagcaacgacgaccaccaccatgggccacagtggcgggggcggcgttcgcgactacatcatcgccaagtgcacatgctcccactggttcggactcctctggcactggcaacccgctgttcccagatgtcgctctactatgtaccaggacagggaggacttaagtgctcttgagggctgtcaccacctctacacccacctcaaacatactgtgggatacgctacacccacctcaaacatattgtgggatacgcagcaaccactagagattaattacccagacaccacgtttacgcaattaataactactctagtgccgatcaaacactaa

SEQ ID NO: 34118 - DNA, 628 bp, Oryza sativa
  Clone ID: PAT_MRT4530_38164C.1
atggaaacaaatgggaaccgtgagacagcaccagaacaagcggagcatccaactttaccagctcctctggacgcacctgaggaggcctcaaaggagaacattaaccccactgacgaatctgaggaggttcaaaatgatggtgatatgccagccatgaagttcagaaactaccttcctcatgatgagcaacttcggggtggtaaggtggctccagtgtccctcccaaagtttgaggatccaatttctgctgaaactacagagccaaagcaagttgagaacccctttggaaacatagctccaaagaatccaaattgggatctgaaaagagatgtgcagaagaggatggacaaacttgagaagcgcacgcagaaagcactggctgagattgcattggaacaacaaaaggagaaagaagcacttggggaaggaagcgatgcagcccaagattgagggagggctcaggggagatggatatgaagtagctgaacctttgatatgttaagaatgctcaaggggtgcactgtgaactgatgaaaagctaatggtaacattcggggtctagcaattagtgtgcgactatacgtttgtaagcatggaaaaccttaataaacctgattcaggttgctag

SEQ ID NO: 34119 - DNA, 306 bp, Oryza sativa
  Clone ID: PAT_MRT4530_38165C.1
atggctaaagaaaacagtgataatgtcgacggcgacgacgaaaaagacggccggaaccggaggaaggcggcggcgcggctcgggtcgacggggtcgccggcgttccggcggtcggcggactcggcgagggggtggaacggggtccacggcggtgcggcgaagccggaggaggcgacgccggggcgggagacggtctcggcgagcggagaaggccggccggagggttggaagggggagagggcggccggcggggaaggaataggcgcggtaggtccggccgccatcaatcgcgccggcgagatttga

SEQ ID NO: 34120 - DNA, 358 bp, Oryza sativa
  unsure (1)..(358): unsure at all n locations
  Clone ID: PAT_MRT4530_38166C.1
aaggggaacaacaaggtctgggagtctgagagggccgggattctttttctttttcttttaccacagggggcacgtggatgatgtatgacctttattngttaacatatcgagctattatatgaggtacaattcaagttccagacaccatcaacagaggcaatgctcctgggagcactatagtagctagggtagataccacatatttttggcaagttgaaggtcaacagagggggggcttgagcttgagtctgatcaaagtagacaccactaatttgctgcagttgtacgctgcagcacaatcgcttgaacattgctaacggcctggcagtgagattgccgcgctaccagcctgagctgt

SEQ ID NO: 34121 - DNA, 180 bp, Oryza sativa
  Clone ID: PAT_MRT4530_38167C.1
atggtggtggatccgctgcgcgggggcagctcaacgccgctggcttgcggaaaaggagaggaggggagggaaaggaagagggggacactcgtcggcactgttgacgcctttcagccatctagcaaggccaaaaggcgacgtgctagggtgacgacggcggcgcagaagggggagtcatga

SEQ ID NO: 34122 - DNA, 825 bp, Oryza sativa
  Clone ID: PAT_MRT4530_38168C.1
gcacgaggggtagtagtagtagtagggctttgctctggtcttgcaagttaggttagtgattagtagcagcagaaagagtggaagatttagaggatatgttgacctgctcgtatgtcggatacagccttgtcgggcgcgccgccggcggcgaggtcggaggattcgtggagtcagcagcagagctacaacttcagcgggcgcgtgctgctcacggccgtcgtgatcctgttcgtgatcgccgtcgtcttcgccgtcacccgcgtcttgctgtactacctcgtggtgcggcccggcggtggcggcggaggccgtcgtcgtggcggcctggcaggggggatcttgcggtcgttgaactcgctcggcgtgagcggtcgccgcgggctggacgcgtccgcgctcgccgcgctgccggtcaccgcgtaccggaagaacggcggcgggggcggtggtggggagggctccaaccgcggcgggcctggcgccaccgccgccgactgcgccgtgtgtctgtcggagctcgccgacggcgagaaggtgcgggagctgcccaactgccggcacgtcttccacgtggagtgcgtcgacgcgtggctgcgctccaggaccacgtgcccgctctgccgggccgaggcggaagtacccaaggcgagggcttcggcggcggcgacggcgacggcgcagtcgtcgtcgtcgctcggtgacggaggaattaccgtggtcgtgaccatacacggcggctctgacgaagccggtggcaggtcaacggcgttgactggtcaaccgggatcctcgaactctcctagctgcgaggctgcaaggaattga

SEQ ID NO: 34123 - DNA, 864 bp, Oryza sativa
  Clone ID: PAT_MRT4530_38169C.1
atggcgtgcgccaccgtctctcccccgcccggccgcggcgtcatcatcggcgcctacgcccacccggccaccatgcgcttccacctcctgcacgccgccggcgaggccgcgtgcctcgtggaccccggcctgtacgtcgcgaccgccttccggctccggcgagtcggagacggcgcctggcgcgaggttcccctgcctcaactggaagacgcagatgcgcggctgaagatgcacggagctcgctccatccgactgcacggcaacctccactggctagtgcagcggggctccggctccgccgggaaactgcaggtgctcgtgttcgagcgggcgcgcgagaggttccggctgatggatgcgccgccgcgccgccgtggcgaggaagaagacatggcgagatcgcgaatctgcgtcctctccagcggcaagctctgcgccgtggccgtcgctcgggcgacgagcacgatggagatgtgggtgctcgacgactaccaccactgctccgacgacgcgcggatcagcggctggcggctgatggagagggtcagcctggttatgtgggacggggacgggcggcgcgacctgtcgaggacgttcacgtcggagacccaggtggaggcggtgcacggcgaggtggagggcgaggaggtgatcgtccgcaacggcggcgaggtcgacgcgtacagcctccggcgcggagcgtggttgtgggtgcgcggcatctccagctcgggtggtcctgtactggatgtggcgctgctggcgcaccgggacagcgtcgtacaccacgacgtgagcttcggcgaggcgtcgcggcctcttcgataccccgacgacatccatggccagcgtttgtttgtataa

SEQ ID NO: 34124 - DNA, 355 bp, Oryza sativa
  Clone ID: PAT_MRT4530_3816C.1
gaaatgggaaatagctcgctgatgtaagtgcagacaaccttgttctcccttttacagcagccttttttttctgagagctacagtgcattgatcagcggagatttatactggtattctctgttgcttgccttggctagcagagagctgcagcaccttgctcctcgcttcagtttcagattcagatgctttcatttgattactgctttcattgaggcgagccacgaattctgtttctgcaatgtgtatggtaccaattcacggcctgtataaattgtgtatggaacgcaaaaaatgagttgttcaattctttttttcccctctgttgtgagattgttgaggattgagatttactttt

SEQ ID NO: 34125 - DNA, 284 bp, Oryza sativa
  Clone ID: PAT_MRT4530_38170C.1
attccatggctattgctaaccgaatcggattgtgtatggacgaaaattagatgtgacgaccggaaaaacacgaatatttatattagttatagattttacatgttaaatataactatatcttttgcatccatcaaaacatcacaaaaaagctgattccggctatcggttggcaaaagtgaagcacttattaactctctttattattttattggtcgatacttatcaactgcattagtgcaaagagataggtaaagtaatgggttttctagagattctgatgtgca

SEQ ID NO: 34126 - DNA, 1287 bp, Oryza sativa
  Clone ID: PAT_MRT4530_38171C.1
ctgctggtttttttttttttttttttttttttttttttctctttgaactagcagttgctatcgatttaaattctggccgtcagaaagcattcactcgattcagtgatacatttaccatgtctatactcaagacacgatgggcctatttcattaaaacaaatgttttacaaacaatgcaaagtgaaaaataagttatctgctcatctcttcaactccgaaaattgttgtcataaagcactaccgctgatgggatttgcatatgcaattcgactccgatttccgtctaaaaattgatctgtgtaccagcctctactcttaacttctgccacaaacatggggaacacattctccatcctctcgtaggctacatttagaactgtatcacctgaaccaacacctgatctttccatttctgaagcaaaggcagcaactagccatcccctcagtgcatcttctcccgttgcactctgctcaagaaccatgtatgcactgttgtcttttcgactaagcaaaaatttctcctttgagaaagttgctttcagctgttcgatacgctgtgggctaagaactctgcggactggttgtccaattttcacacttcctgcttcttctattaatcggttaggaaaaagaagatcttctcgatatcttagctcagctgggctggaaacctttccactcttgataaaatcagcaacaatcattgctgttctttgcggattaagtgtgtttacaggagttgccctcatctcttgcacaactccatatatatgtacaacagaaagcaatgggcctgcaattaacttcccttgagttgttgagcacaccgtagatgctaatccaatgccagcacctattcccatgacattgaaaagtgttgagatggcttcccctttagcaaataagtcactaaggttaccttccttggcaaaagaagaatagattggtagccttgtcgctcttgctgcaacaacagccattccctttgcaaagtttccgaagcctgctacttcaagaaaaagttgtgggcacaaaggtgaaatgacttctaaggcagtaccaaaatcatagagaacatcagcaagtatcctccaactctttggctctgaatccattcttgcccccatgccactacatatgagctttcctgcgtgctgcattccatcttttagaatccaacttacagcagttgcttgtgcaggggtaggtcgcaaacctgcagcaaacaacaaagactgggttgatagcacatgcagcatagcactagaaaaatgctggagcgctcgg

SEQ ID NO: 34127 - DNA, 220 bp, Oryza sativa
  Clone ID: PAT_MRT4530_38172C.1
agggttaacggtttaggggaaacggactattgggactggtctatattaccaagaacagtcccccaaagcaccacctcaactggatgaagctaaccttgagggatcccccaaggcgagacccaacaggaaaaacgtgattagaaaaggcctaattaataaaggacgaaaaaacgaaggccgccccaatgcatgattaccccaagctttattaacaaaagct

SEQ ID NO: 34128 - DNA, 450 bp, Oryza sativa
  unsure (1)..(450): unsure at all n locations
  Clone ID: PAT_MRT4530_38173C.1
tgcggcccccccagcaaaacaagctccggcnaaacccaaggttgttgctggtatgggatcttgaccgcatggaacatccaccgattggcagcataggagtacaatctaagtagcagctaaggtaggagatttgagcaaaatgtgtagtgttcacctgctcttctgcgcaagaaatgtcttttggtacgttctcaccaggtcagagctgttttgttgctggagaccttcccttccaggctccagcgaggggcctatgtagtgttgatatattgtagtaataatttgatagctaaccgtagtccatgtcctttgtttatttatctttatttaagaaactgacgactattaaaaatagaggggacataggaccaatattcaggaaatattattaaggttcaggcaattatattggactaaaaaaaaaaaaaaaaaaaaaaaaaaaaaaaaaaa

SEQ ID NO: 34129 - DNA, 2021 bp, Oryza sativa
  Clone ID: PAT_MRT4530_38174C.1
acctttttcatatgcaattcgatctaaggaaaaaaaaaatgatcatctaaaaaaagtgttgctgacatgccataggatctgtgcagcacttttttttaaaagagagagagagagagagaaaggggaaaataattctgcactaattttcttcctgtactacctttcaccaatcgccaattggcaattgtgtctgtactctgtaataatctgtactgtactactacctttcaccaatcgcaacttggcaattgtgcaaaaatgtaatcgaatctttcttgtgttcgacaagcagctgcaaagctaacaatgacgtctcacgagagcacggtcttgagcttgtagttcttggcgaacccgctgtacacgacgaagttgagcgtgcacatggccgccagcatccagaagaagtagtcgaggtggccctggttgaggtcgtcggagatccacccgtggccgcccgccgtcgccgtgaacgcctccacgacggcgtagatgagcgagctcaggtagctcccgagcgcgatggtgagcagcgccagcgacgtgcacgtgctcttcatggtgtccggcgcctcgccgaagaagaactccagctgcgcgatgtagcagaacacctccgcgccggcgaggaagaagtactgcggcatctgccacgcgatgttgatcgcctcgccgctcgccgcggcgttgagccgcttcgtctccacgagcgcggccaccgccatggcgagcgccatgaggaggcgcccggcgcccatgcgctgcagctgcgacggctcgccggcggctccggaggaggagaagcccctcagcgccggcacgatcaccttgctgtagaggatcacccatgtcaggacgcagagaacctggaaggagcttaacgacgccgccggcaccggcaccgagaagatgtgcatgtccatggcgctgccttgctggatgaaggtggtgctcatctgcgagtatgccgcggacacgatgatgctggtcgcccagatggggagcagacgcagaaggatcttgagctcctccacctgcgtcacggtgcagagcttccacgagctcgccgcctccggcctctcctccaggtccgactccgagacgacggccgccttgtcaagaaacgtgaactcgctggtgtgcgcgatcttgggctgggagtcgaccttgtcgctgacctcgtacaggagctcggcgtcggcggggagcttcatgccgaccttcctgaaggcggcgacgacgacctgggcgaggctcttgagcggcgtgcccgtcggcaaccggcgcttgtacatgggcgtggcgagcacgaacgcggcgaacgcgaccgcgatgcacgcggtggcgatgccgaagccgaggccccagctgacgttctgctggatccagacgaggagcacgccggagacgatcaggccgaagtcgacgcagaggtagaaccagctgaagaaggccgccttgcgctccctatccgccgcgctgtcgtcgtcgaactgctcggcgccgaacggcagcagcgacgaccgcaccccgccgctcccgacagccacgaggtacagcccgacgaacgcgacggtctgcgccgcggccgcgccggtgccgcacgtcgcgcccgccgcgcacagcgccgccgtggccggcaggaacgccgagaacgtgaccagcatcatcccgaggaggtagacggcgagggagatgaggatggtgttgtagttgccgaggaacgtgtcggcgacgatggcgccgaagatcggggtgaggtagctcgtgccgtaccacgtcgtgacgttggacgcgctggccaggttgctgccatggaggacggtctccaggtacaccaccaggttcgtcgagatgccattgaacgccgtgctctccaggcattcgaaccctagaactattgcaggtgccttgctgccgccgcgtttcttatccttgaggagtggcacttgcaggctatcatcttcagtctttggtccgtgactctcgggcaggagcgccgcgcgctgtccgctctccat

SEQ ID NO: 34130 - DNA, 1002 bp, Oryza sativa
  Clone ID: PAT_MRT4530_38175C.1
atggcggcatggctaggatgtgccgatgatgccgtcgaaccagctcgacgagacaatgagggggtggggtataagagggctcagttcagggatcggaagaataccctggaccatcctagtgctcctatgggtaggaagaggtgcatcggcactgagcttgaaaaccttggcgccacgtgcattggcgctgagtttgaacacctcagcgctctacagcctcgcatgactatgttccaaaccgcaaaggggaaggcaaaacctctgcttgcaaactccaaaaccttctggaacgtttcgtcgttcgaatcgcccgcaccaaaatcccacccctcctcttcctccttcctctgcaagcaaagcaacccggtggaacaccacgcgccgcacccctcctccacctcgctcctccgctcccgctccccgccgccggccatggtgctcgagctccaggtttttattgttggctggaacccaatgcattcgcagaggagcatgcaggcaactatgatatgcgtcgacgactcggtgtggatgctgaaggaggactacccgccgacgcggctccaggcgcaggccgacgccgccaacctcgtgttcgccacgaaaatggcggttcgactgcaacctcgcgaacacggccgggtgccggccatggctggggacagagtgcgcgtgctcctcgcgctcaccagcgaccccgtcaagttcctcgcctgcatgcgcgggctgaaagttagtggtgaagcaaatttgactgctgctttagaggttgccgaactggcactgagaaatcatgccgacaaaacactgagccagaggatagttgtttttgttggcaggcgacgggcggccgacctaatcaccgcccactcccaccgggggtcgtcgtcgggtcgtggccgtatcggcgtgcggctccggcagcggcagttcagggatgaggaggagcggcggcgaggcgcatccagccacggctcggagacgaggaggttcgggcggtga

SEQ ID NO: 34131 - DNA, 174 bp, Oryza sativa
  Clone ID: PAT_MRT4530_38176C.1
atggggcttggcaccgacgaaccaaatccaatagagaagggcgagtggccagaagattccgggaaagaatctacggggttccaagaggctccggggaagaacctccgtatacccgagaaggcttcccgaggttccgagctagatcccgaatactttggacctgtacagacctga

SEQ ID NO: 34132 - DNA, 509 bp, Oryza sativa
  Clone ID: PAT_MRT4530_38177C.1
tttcttagatgtccagacggtctgagcttcggtgacgatgatcagatcgagccattgcacctgaacaacaagggacatagacctactgcctctgaacccggactgtgtgaaccattcgcccacagcggcaggagctgagctgacccacagcttcttgagcaacgagaactccctcaccttcggtacccagaacactatggagccgattaccgtcgagaaggcccggttcaacaattccgggaaggccagcgcgctggtccagcacgagaggaggccatagtttgtgaggaccatctgagcataagttgagaccaaggtcattgacatgagcttaaaggtcctgattgcggtggacctcaagacttgactttttctagggggtacttacattcaaaggatgaatctggatgagtcgaaaatcatcttggcgcatgctcattttttgtttgtagttgctattagatttcaagaactgccatgtttaatgtgaggatattttttttctggta

SEQ ID NO: 34133 - DNA, 454 bp, Oryza sativa
  Clone ID: PAT_MRT4530_38178C.1
aaaaaggaagagtaaaaaaaattcattctcattgggagaattcaaaagagccacctggtaatcaatggaaccagcaacacaataaagtgatgatgaatccatcgaccacgactcagtgtggaaagaagaagaagaaaatggaaaagatatggcacccaaatgattggtccatagatcagaagagaaaggttaaaaatggtgaaaagatcagaagcgcttgtaccttagcccaatgctttgtcttgtcgaaataggtacaacaccagcgtgcagacgcacgaagaagaaatttgaaaatggaacgctctcaaatcatttgctgggatgtgtaacgcttctgctagatgagggttctatcagacgcgcatggcttagaaaaggcgggccagacgagcgaagaatccggtgggctcgggcttagcgggctcgttgggggcagaagaagcctggccac

SEQ ID NO: 34134 - DNA, 300 bp, Oryza sativa
  Clone ID: PAT_MRT4530_38179C.1
atggaggcggggattggggcggcggcggtggtgggctttcaccgcatccgtgagcgcgaagcaccggtggaggcaggcgaggagaaggcggccggcggcagggttgcagcagcggtggcggcgaggcagcggcggccgtggtgggcaccgccagatttggacccccttggccagatctggcggctgacggcagggacggcgggcgcacgtgctggcacgcgagcaatgccagcagccggaggtggatgtggggagaggaaactggcgacgggctgggctgcttgtgcagagggcacgtga

SEQ ID NO: 34135 - DNA, 1713 bp, Oryza sativa
  Clone ID: PAT_MRT4530_3817C.1
ttctccttcccctaatgctatttgcaaaaggtttctccgttcttccttcttcggattttcaactagtactagatggtcagctttgcgaagaagaagatgtcgtcaattgtttgccgaagctccggaagactgcaaggatccgctagtgaagtggaggaagcagtgaagccagctgtgaagcaggacaaaagacttagatctgttaaggtcctatccttagtttctaatctgtctctcccctttgttttccctctctccctctccaaacctttgcaacagatggctgacaatgagaaaggcaataaggtcagaagtcaggacattggtacctcaagctcccgagtgaatgaagcaccagacaccagttgtgtggcagtggtccaacacctgattaaccagaaccaattgcttatagagatactacagcagcatcggatgccaattttgaacccgagtcagatgcaacatcaagtgcagttggaggcagtccaagcactcacaccacaagtcagcgcaccgccaacatcccagaaggcccctcatgccatgccacatgttgacccaaaagaagcaagtatcatctgttttatgtgtgatgagcaagggcactacgcaaggaactgtcctcagcagaaaagaaaagcaccaatgcgaaccgaagatgaagtccgtaagatgatcattaccagcacagaatggcctccaccaggaatgacaaaacatcagagaagaaattcctcccgaggtgcacaacagttgacagagcatcttttagctaatggaggtagagtgtctggtagtgaagattcagatcaagtctcctcagatgatgaagatgcgaagtctccccaaggctttaaccagaataaaatagaacttaaggcatgctctcgttgtggagaaatcggtcatgttgccagctcgtgtgcctctacatgcgttcattgtgaggaagaccatccacccgacaggtgtccaacgagcaggatcacttgtttcttttgtgaaggaactgatcatgtaccaaaagattgtcaattcagttttctgctgacgaagaagatggccaaccaacccgccagttccaacggagagaagcatcaaggcaacacaaatccccgccaaggtcaccgtttcagcctaactccagtgccaggacagaggaatcgaaatgagaaaagaaaatgccgagtccgggaagacatctgttgcttcaattgtcaaggaatgggtcatttcgccgacaagtgcccaaaaccgagaaacatagctgccggcacgtcagtccacgcaactccctgcaatcagaagcttgctcctcaacgaattgtcatccatgcatcccgaagcagtcctatagcccgcgttgcaacagctccaattccaatgaatgcactaccacaaggtgtcaatgctcaatttcagccccagccaccagctgacaagacaggggccagtatctgcgttgtacctttggaagttccaatacagcagctgagaaatcaagtacaagatgaagaacccgagtgtaagaaagttattgtttgttacaactgcagtgaagaagggcattactccaaaaactgtccccaaccaaggcaaaatcgacctccacattaccgccaatttacacgaagcagacattccaatcgtattgtggtcactggagcaaacgccgtacccgtaaggcctcgtgttaatcagaacccatag

SEQ ID NO: 34136 - DNA, 1258 bp, Oryza sativa
  Clone ID: PAT_MRT4530_38180C.1
atggcatcatctcccgctccaagccccgccgcgccgccgctcctcctcgccgcgctcgcggcgctcgccgtggtcgcgtccgcctccgccgccgcgtgctccgcgggcgaccgggacgcgctgctggcgatccgggcggcgctgtcggaggcgcacctcggggtgttctcgtcgtggacgggcaccgactgctgcaccagctggtacggcgtgagctgcgatcccaccaccggccgcgtcgccgacctcaccctccgcggcgaggccgacgaccccgtcatggcgcccgccggccgcccggcctccggcgtcatgtccggctacatctccgacgcggtgtgccgcctcggccgcctctcctccctcatcctcgccgactggaagcagatctccgggcccatcccgccgtgcgtcgccaccgccctcccttacctccgcatcctcgagctccccggcaaccgcctcaccggcgagatcccgcgctccatcggcagcctctcccgcctcaccgtgctcaacctcgccgacaacctcatcgccggcgaaatcccaagctccatcacctcgctcgcgtcgctgaagcacctcgacctcaccaacaaccagctcaccggcgggatcccggacgacgtgggcgacctcaccatgctcagccgcgcgctgctcggccggaacaagctcaccggcgccatcccaacgtcggtcggctccctgacccggctcgccgacctcgacctcgccgagaacggcctcaccggcgggatcccggacagcctgggcggcgcccacgtgctcacctccctgtacctcggcggcaaccgggtctccggccggatcccggcgagcctgctgcagaacaaggggctgggcatcctgaacctgagccggaacgccgtcgagggcgccatccccgacgtgttcaccgccgagtcctacttcatggtgctcgacctgtcccggaacaggctcaccggcgccgtgccgaggtcgctgtcggcggcagcgtacgtcggccacctcgacctcagccacaaccggctgtgcggctccatccccgccggcccgccgttcgaccacctcgacgccgcctccttcgccagcaacagctgcctctgcggcggcccgctcggcaagtgcacgtgacgtgccccaaccagagccgtccgatcgatcgggagagcctgatcgaacgtgtggtgtgcgatgtaccgtgtacgatgcaacgaacttacgtgttcgtatatatggttaattagtt

SEQ ID NO: 34137 - DNA, 483 bp, Oryza sativa
  Clone ID: PAT_MRT4530_38181C.1
atgtggagtgtcactgccgagctcctcctcgagagtagtcgctacctcactatggagcaccgccgccgagctcccccaaggatcgccgactcgcccccgttagaatcatctcataaagagatccaaacagcaaccacggttaaaggggagaggccagatgccgtcaggactctgtgtcgcgcctccgtgaacaccactacttctcctgctcatgcgacccatctccaagaccagggcggcgaggttggggagcatgagttcaatggaggcggtggaagagctatagctagaggcggggggaagaggcggagcttgagctcgccagttggcctgtgcatggaggaggatgaagagccaccattttctcatattgccaccaacgatgtggagatggaagagctgcttggtggaggtggaggtggatgctgtgctcgcaaggtggtggcgatgaaggagctgtacgaggagaaggattggatctag

SEQ ID NO: 34138 - DNA, 802 bp, Oryza sativa
  Clone ID: PAT_MRT4530_38182C.1
ggccgtgccggcgcgcgcggtggttgggcagcagcccaagtcgatcctcaagaagacggtcaccgacgacggcgcgccgtcggcggcggcgctccgtgatgccccgcgggtgaagttcatgctcgacgccggggacagcaagctcgagccgccgccacctgcagcgccggcgagcggcggcggagacgccgccgcgccgctcgccaagagcgccaccaagtcggtcgggttcgcgccaccgcctctccagccgccggcgcgcccggcacagcacccccacctgcagccgccggcgcgtccagcgcagcagcctcctcgcccgccggtgacccagccactccctccgccgccgcctctccatcagcaccagccataccaacctcgccacaccgacgcgctgccgctgccgctgccgctgccgccgccaccgccgccgccattctccgtgcagcagcagcagctccctccaccgccaccataccacctccgccacagcatcgacggaatgcaccaccagctccccggaccaccgctgccgccgtcgtaccagcatcgcgccgccggcggcgtcgtcttccccggacagcatcagcagcagccataccgccccaacaacgacacccagctcggcctccccggcgccggcgccgccgccggtgacgtcacgccggcgtggaagagaggagggagagagttcgactctgaggagttgatgagggtgatgcggggaatcgccaagatggtggagccattgacggacaagaacggcaacttcccctaccacctcttcacctcagcttga

SEQ ID NO: 34139 - DNA, 1108 bp, Oryza sativa
  Clone ID: PAT_MRT4530_38183C.1
ctacaagcttagagcattcagaagagaaactctgatctggatcaatctcctgaacaaagtctcaactccgctctcgagatcaacgatggcgaactccaacgcctgtaattgctcctcctggcatgcaagccttgtcttctgaaatgccttggagacaagtgaccacttgctagaatttgatgttgtgatcttctttgacaagagatgtgaagaggactcaagcattgagatggcgacctctctagcttcggccaacagcttgatcaccctggagccctcctgctcagctgaagcagacttcttgctgatcttcttggactgcttttgcaccttcttggtcagacgaatgaaatactggatgttggcctgaacaactgtagcatcccttctcttgtgaaccaactgcatctcctgaatgcttgtcttgagcttggaaacactctcttggatagagttgcagaggtcgagcagcacaagggaatgctcgagctcttgctctactgctttcctctgctgattctgacaaagttgagcttggctgcttggcaagcatatgatctcctcaatgttgttgtacacagctccaatcctgctgaaaccatcaagcattgtttcaatggtttcagcgggtgaagtgatggttgccttcaagctctgaagctgttcctcaacattggttttgttagaacgagggctgcaactgctctcctcgcaggaggcatctctcttcttcttggagacgagctgggaccacctgcttgaactcgacatggtggcgatctgcttcggcaagagctttgctgctgctgtttcgagcgctgcgacggcgatctctctggcttcagaagctgcaggcttgctgctgccaccgccggagatactgcctactcgtcgcctcccacaactcaccaccaccggagaaggcaagaaagagtggaggggtagagcccgctctggcgagtcggcgacggcgacggcgacggcagccccagggagcggccgcatgctgtatagtctccagcacccagggggggcagctgagttttcccactcgtccggcatatttgctgcagaattgcagattatgctgtctacgctacaattatag

SEQ ID NO: 34140 - DNA, 477 bp, Oryza sativa
  Clone ID: PAT_MRT4530_38184C.1
gctacacgggactgatcgtgctctatgaaccaaacttaacaacatgctctgctggtgcggccaggcctctacgcgtagcgatctgtgcgtggagcctatctacttgagaggcgcacgacttgcagtccatagcgtggtacttgacgctgacacacgctacagcgctttagcacacatatgcaatgcgcaacatacccttgaacacgggtcactacacggaaaagccttgtattcggcaatactcttcgagatgcttatcggagccgttgatgcgttctctctagtgctctaccaccgaaactcgagcaccggcttgtgtaatgagagcaaccagcagaccattctcacgcaggatcacgcatgaactatgccacgctactgtagacatggaccactacatgctgactatacattgctgactgagcaacttactaagcagaacgaccaactattcagagaaattggtctctgtctgct

SEQ ID NO: 34141 - DNA, 2490 bp, Oryza sativa
  Clone ID: PAT_MRT4530_38185C.1
atggacctcaccttcaggggagatggagagcctgcaccggtgtatcgcactggttgtaagtatttcttccttgagtttcatcatggtggatttttctgtggaatgggagtgaatcgcacatacatggatggcaaagtgaattggtttgataacgtggattccagagagtggggtagagttctgcgagtcgcagatttcgttgctatgctaggatatgaaataggaccaagattgaaggtttattcgttgctgtctgggaagactatagttgatgggttgaggatagtggatagtgaagttgaaactaatgtcatgaattcagtgtcccacaagattaagaactttttcatttatttagatcatactgaccatgtgtcaggcagaaatcatgaagacattgtattgacaccaagagctgagctccctgaagtttttagccctcctagagatgatcaccatggaagtggcagtgctggtggtcaagctgcagcacataatgatgctcaggtggatgacacaccacaagtattggatgaagaggaaggtgaagaaattaatttgtttgaggacaacgatgatagttcttctgattcagactttgttgacagtgattatgagtggcaggatgatgatgatgacttgtttgatgataatgtggatggtgaagtggaagatcttgggttaagaaggaagacattcaatcacaagaaggcaacagggagtaagttgaagggaaagaaagtttgtgctgaagattgttctgagcaagctttgtcagatgatgaaggaatgcaattgccacataactcagataatgaggatgatatcaccctaaattttaagtctttcaatcctgaggacatcaacaacccaattttcaaggttggaattgtgttttcttcggtggaactacttaggaaggcaataactgaatatagcttgaagaatagagttgacatcaagttgcctaggaatgacagagagagggtaaaggcacactgtgcagaaggttgtccatggaacttgtatgcatccatggatagcagagtgaaatccttcactgtgaagacctatgtgccacagcataagtgcaagaaggagtgggttctacagaggtgcacagcaaattggttagcagagaagtacattgagactttcagaaaatcaaacccaagaagctcattttacctaaggctagatgacagcaagtttagctccttgtatttttcacttgatgcttgcaagagaggctttcttagtgggtgtagacctataatttgcctggatggttgtcacatcaagaccaagtttgggggtcaattgctgacagctgtaggtgttgatcctaataattgcatcttccccattgcaatggctgttgtggaggttgaatcctttagctcattgagttggttcttacagatattgaaggaggaccttggtattgtgaacacatacccttggactatcatgacagacaaacagaagatgttgtttaaaggtgagaatcttaagaaccaactttgggcatgtgctagatctagttctgtcttagaatggaatagaaatatggatgagatgaaggctctgaatgaggatgcttataactggttgggagagatgtcaccaaatacttggaaagaagcagagaaatgggaagggccattatgtcctaaaatcaagaagaagctattgaagtttcctgaccaggcaaacatttgttatgtcttgcctgctagaaagggaatattccaagtccaagaaagacagtccacctttattgtcgatgtagtcagcaaacattgtgattgtagaagatgggaccttacaggcatcccttgttgtcgtgccatagcttgcataagagaagagagactgttagaacaagatcttctaccattctgctactcaattgaagctttcaaaagtgtgtatgccaacaacatcatgccatgtagtgacaaggccaagtgggagaagatgaatgaaccacaaattctgcctcctgtgtatgaaaaaaaggttggaaggcccaaaaaaactagaaggaagcaacctacagaagtgcatggaaaatctggtccaaaactcagcaagcatggagttaccatccattgcagttattgtcatgaggcaaaccacaataagaaaggttgtgaaatgaggaagaaaggaatcaaaccaaatattcaggttagaaagaaagctatagctggagaaagtcaggagcccaatctgacacagtcttcacagcccagccaattgactcagcagcatgggccattgccagattgtgttttcatccaacagaaccaacctactgcaagaccagttgtacttaccactgcatccaaagaaggtagatcaaagacaaccaaggcaaagaagaaagcaaatgttggtgctaagagcaaaagaacagaggttggtcctactgatgcaggtgctgcttccaggaagaagaagacgacttcaccaaccaagcagtga

SEQ ID NO: 34142 - DNA, 3677 bp, Oryza sativa
  Clone ID: PAT_MRT4530_38186C.1
tttttttttttttttttttttttttttttcaactaaacacttataaatatccctttatttgcttgctccgtcattcaatccatcaaaacaagatagaaggaaattaaattaagctaaaactccagtcctaatgtatatactttatcctagttagcaacaaaaaacaaacaaaagaatacgacaatttcgtacttacaaacatgtacagttttatgaacccctttaaataacacaaggttaaagattgcttccccgagttagaatttgatttatattaactccgatcaagtgaagccaaatatcaacgattagggtgtcacttgacccggcgctgcatgcaaagcttccaccacaggagttgcctgcaaaaacaatatcttgtccttttctttgacccttgggatatttacactgaatatttgccggtcttagctctgtccactctcctcttcatctcgccgtgaagctcttctccaacaagtaggcttgaaataatcctggagaggtcttacaggcacaggaatgaatttccccagatatgccagaggccaacttataatgccaatagcaactgagaccaaccataatctccaattaagtctcacagttttgaagaactttcccaggaactcaataattagtatctgaaatacagtagttatagcaattattcccatgaagagatggtttttcgttattcctttgaagacattcctctcctcgggcttgcgtgcattgaactcgttgaagatctggcaaaagacaaaggtgttgaagataaaggtgttttgtgttttctcagcatcctcccgactatcattctgtaaccgcagtatgcttcttccagaaaaatcaaagataagaaggatcgctatttggtaaatggcatgccttcgaccaacaggctgtctcttcataaggttatccgtcggtggttcagttgctaaagccagagctcccagtgtatccatgattagatttacccagagaagctcaacagcatttagaggcacgtcaccagaggacacagctgcaacaacattaatcacgagtgcggcaacattaacagtaagctgaaactggatgaatttctgaatatttgcatagacagaccttccccagcgaacaaccttcacaactgatgtgaagttgtcatccaagattataatgtcagaactttctttggcaacttctgtccctgaaatgcccattgagagacctatatcggcctcatgcaatgcaggagcatcatttgtgccatcaccagtaacagccacaacatgaccctttcttttcaaagcttggacaagcaaaagtttgtcatttggagatgatcttcccatcactgttattttgtcaacaatatctcctctagcagcttcagacatctcgcgaaacacttttccctctattacaaatggctccacaaaagctccatttgcatctaatattccacactccaaagctatggctttagctgtttcaatgttatctccagtgaccatgcgcacctttacaccagcattggtgcataattgtacagcactcttcactcctgggcgacaaggatcctttatacccacaatacaaagcagagtcaggtcatcctcaggtaacttccaatcagctatgtcttcctttgggattctttcaatttcacaaggacaatatgcaaaagcaacgcatcgtaatgaactcgttgccatgtcttcaattgatttcttgcattcattatacttctcagcactcatgggctgaactgaaccatccagggcaagccagcttttgcaagatgataacacaagctcagctgcacctttccaatggacatgaacaccagcatctgactgtactgcaaccccaccacgcttcttctccgaattaaatggaaagacatgaagaatttgagattttgaccgtgcatcattgaaatccattcctatctgttcaaagtggaagaacttaaggccccaagaaagaatagccttttcagttggcgatcctgaaagttcagcatctcccccatcctctggcacaaaaatagttccagttgtgttttgtgctattccttcaataagaagttctgttgccccacatgacactgccctaatatcatcacaaggatccaacattgttccaccaaaatatgcttgaacaactgtcatcttattcaaggtaagtgtccctgttttatcactgcatattgtagttgcagatcccattgtttcgcaggatgagagacgtctcaccagtgccttgtctcgcatcatctttctcattgagtatgcaagtgttaatgttactgctaatgggagtccctcaggcacagcaacaaccacaatagtaacagcaattgtcaaaattctgattgcccccataaatcctttttttgcccgagtagttccagccacaaattgagtagtgccatccggatccttggtatgtccagtaaaatatcttatccaaaggactacaagtacagcaccagccactgtcaaacccaccataccaataaaagttgcaacgccattcaagcgcacctgcaacggggtttcttcaccattatcttcggaaaggttagccatcaactgaccccattcagtattggtgcctacacctgttaccaacatagaaccatagccatctgcaactttgcagccagacatcaagaagggttcctttttatccttgtgaacagtttttgattccccagtcatacttgattcatcaattgcaagagaatggccagatatcaggacaccatcggcaggaacttggtcaccaattttaagaggaaccacatcaccaacaacaaggtcaaatattgaagttccacatcttttaccacctctaacaacctccacttgtatgttctgtttctcctcatttagatgtcgaaactgaagagactgtctgtaatcactgatagctgtaacaagtatcacaagaaaaacagctaagaaaatacttccaccatcataccatccttcatctgcgccctctgtggtcatgcccaatgtaagtgatatggcagcagccaccattaaaatgataagagttaaatctttgcatgcttcaaatatgaaacgcagtatgcttttccttttcttgcgtggatatgtgtttgctccaaaaatacccctcctttgcaacaagtcatccgcatttagagaaattcccttctctaaattactcttcaataaatctgacagccccttaacctgaacaaaaagagtagttgagacaagcgatcctccgacttcctgaagcaaaacactatcatgatccctattcaatgctgtaagcttttccagttcaattggaaaactgcgagaggccgtttcaagttttataccagtataagcttctctgagatctttttccccagcttctttgaaaagaaatgctgcccgtatcacttgtgcatgtgctcggatttttcttcttatcatctctttctcttcctcctttttaaggtctagagtatatctgaagcggcgtgaggcattaagcacaagagcagcttgcctccatcgccgcaagcgatcgtgggaggcgttcttatgtggaatatcgaacgcgtcgtcgaacttctcctcgacatccgtatcctccgcgccgtccagttccggcgaccggatctccggcgccggcggcgacgacctcccgagcgccat

SEQ ID NO: 34143 - DNA, 2944 bp, Oryza sativa
  Clone ID: PAT_MRT4530_38187C.1
atgacgaccccgctcaagacgcccgcatccaagcaccgcctccacttcccggccatgacgcccaggaacggcggcggcgggggcgccgcggcgggcggcacggagcacccggtggaggtgatcggccgcatccggaacctcgccgcgggggcgggcggcgcgtcggcgctggagatcgcgggcgggggcacggccgtgcgcgtccgcggcgacgccggcgggtgccgcgacttcaccctcgacggggtctcggtctccgaggaggaggatctggaggggttctaccgccgcttcgtgcggtcgcggatcgagggggtgcgggtgggcgccaagtgcaccgtcatggtgtacggccccacgggctccgggaagagccacaccatgttcggctgcgccaagcagcccgggatcgtgtaccgcgctctccgggatatactggaaggaggaggaggaggagggggaggtgtctctggtggtgggggtgaaggcgatggccgtggcgaggatgacgccgggttcgggatggggctgttcgtgcaggttgccgtgctcgagatctacaacgaggagatctacgatttgctcgtggggagcggagcgaatgctaaaggaaacgcccccaaggcgaggctagaagtaatggggaagaaagccaagaatgcaacctacatatctggaaatgaagccgggaagatatcaagagaagttgcaaaagtggaaaagaggcgtattgtcaagagcacgctttgtaatgagaggagttcccggagccactgcatgataattttggatgttccatcggtggggggaaggctcatgcttgtggatatggctggttctgagaacatagaagcagcaggccaaactggatttgaagccaaaatgcagactgcaaagattaaccaagggaacacggctttgaaacgagtggttgagtccattgctaatggtgactcccatgttccatttcgagacagcaagctcacaatgctcttgcaggattcatttgaggatgacaaatcaaaaatcttgatgattctctgtgcaagtcctgacccaaaggaattgcacaagacagtttctacattggagtatggtgctaaagcgaagtgcattatccgtgctgcccacgctgcaaccccaagggacaaaatgagctctgaagagtcatctacaatgctcaattcaagaattgtcgcgatgaatcagttcatctacaatctccagaaagagaacaagctaagggagaaagagcgcaatgaggcccagagtgtgctaaggaaaaaggaagaggagcttgcacagctcagggacaagcagaagatcggttagatctttcgtagggctgcaaaggaggaagagattaactcaaaggtcatggagaagacccagagtttgaggactgagctcatgaagatggaagagaaaatgcttaggcagcagcaagaactccttgctttgcaacagcggctgaaggaggttgagcgtgaaaagcctgtgcagcaggatatcatcggaggtagattgctggcacgtctgtcagagatgtccgctagggcggatcagtccatgtcaatggatatgtccattgattttgatatgggagatcagccagctgcgcaagacgtgaaggtgatcaaggaggatactcgcaagcagggccagatatggagccaagcaaatactgcaggctcttgcaccagcgctgtggagcaagaagatgatgttgtgaggctgtctgggtacccagaaaaggtggtcctgagcactgtctttgaggagggagatgaagaagaagataaagacagtggcgttgaagaggaagtgtgcaaggaagttgtcgaagagagctatgtaatgcaacagccccttgcagagcctgaagaccctgccacaaggaataaccggattcagaacattttcaggctttgtgggaatcaccgagaattagccaagaaggtccagtcaccagcaaagaaggcgttcggagatgagaacaatgagcctgcgaagcaaacattcggagatgagaacaagcagcagcctgcgaagcgagtgtttggagatgagaacaaggacccttcagcatggggagcgatagaacctccaatgtgcgacgtcagagtgaccgacagtccagtatcctcgcagctttcacctatcgtctgccaagttgtggacgatgccaagttgcccgtgtcggagcagctgaaatcatgcaatgctttggaggcagctgatgagaacaaggagaacaatgcttctggacaagacggcctgcttgaagtctacatcaaatgggagtccggccatctgataaaaggtctgaaattgctgagcaactcgtgtctttctgacctgagaaagctcttggaggatcacttcgaagaagcagggagcaagcagcagcagcagttcaccttcctccttctcggggatccttctggcgcaccggtgtccagagagaaggaagcaggggtgccgataagcaagctgccaagctgcaacaaccagccgaacagctacctagcctgcttgcgcgctgtcaagaagcagccggcgacggagcagatgccgttcagcccactggagagcaagctcaattcggcactgaacgacgtgcacctcgccgccctctcgccgaaggtcaacccaatgagccctaactacatccgtgagctcagagcttgagctcttccaacctgaagaagatcggttagatctttcgtaggtttgtcgccggtggcatttcaacggtggcaacgatgtatcatcatttatctatagtctggctctgttctgtctgtaaatttgctagccataggctggttctgcaaacctaaactttgaagtgtaaccatgttacacgagtggctgtggctagacactgcgggtcatgcgtctgtggccaacaaggtgaatatgaatatgattcgattcgttt

SEQ ID NO: 34144 - DNA, 747 bp, Oryza sativa
  Clone ID: PAT_MRT4530_38188C.1
acagaagttgccaaagaaagttctgacattataatcttggatgacaacttcacatcagttgtgaaggttgttcgctggggaaggtctgtctatgcaaatattcagaaattcatccagtttcagcttactgttaatgttgccgcactcgtgattaatgttgttgcagctgtgtcctctggtgacgtgcctctaaatgctgttgagcttctctgggtaaatctaatcatggatacactgggagctctggctttagcaactgaaccaccgacggataaccttatgaagagacagcctgttggtcgaagggaacctcttgtgactaatattatgtggcgaaacttgtttgtccaggccatttaccaaatagcgatccttcttatctttgatttttctggaagaagcatactgcggttacagaatgatagtcgggaggatgctgagaaaacacaaaacacctttatcttcaacacctttgtcttttgccagatcttcaacgagttcaatgcacgcaagcccgaggagaggaatgtcttcaaaggaataacgaaaaaccatctcttcatgggaataattgctataactactgtatttcagatactaattattgagttcctgggaaagttcttcaaaactgtgagacttaattggagattatggctggtctcagttgctattggcattataagttggcctctggcatatctggggaaattcattcctgtgccctgtaagacctctccaggatta

SEQ ID NO: 34145 - DNA, 1047 bp, Oryza sativa
  Clone ID: PAT_MRT4530_38189C.1
atggcagcgaggcaccgtgtggctctaccgtgggcacagacggcggcggcaactggcccctgcccgtatccagcggcggcggccgtcccccacccggatgcgtgcggatccaatggcggtggcagccggcgcgacggtggtggtctcgggcgtagacgacggtcgctgcggcgtcacgacgacagcaacagggtgcggcgacggcgcgatgatggcagccgggagcggcggcaggcgattctagggtccagatcattcataatgataatgaattgctttgttggaacttggaagcattctaagaatggaatttgtaatactaagagtgcatataaggagattatgaaaagtgatcagattcataactttcaacagctttggaaggccagaaatgatctgaaatttcagggcatcttaaaggagccgacccaagtggaatctcaggaggaggaaaacaaaagaagaatggaaaccatttcggagggcaatagatgttatatagatgcagcttgggagaacactttcatagggattggtattttcttccacatgccgatgacacacaatgctctttttattaagagatttgctctggcagaactggtggcactgcaactagctatggagattgccaaattcttcaactttgcaggcactagttttttaactgataattcagtaatagcggacacgatcaagaaaagagacttcaacaatgaaccaggccattggagcctcagacctttatggagccaaattcaaagagacatagctgaaaatttgttccaggtggcatggattccatggaaaatcaacaaggtggctgacaaggtaaaagtaaaggtatatcttaagtatgaagaggcatatacctcttcaagaatgggagaaaatctctttatgtatttaatttgtactgatactaaggtatatgcgagactacggaacttggccagattggagtcgacttgtattgtcttgttggcttttgtggctcatgttggttttgtgatcgccttggtcaagatttgtaccctctattcctag

SEQ ID NO: 34146 - DNA, 318 bp, Oryza sativa
  Clone ID: PAT_MRT4530_3818C.1
atggagtggccccggtggttctccctgacgaccgagaccacggcggcgagcgaattggtgtgcgcggttgagcttgtcaggaatgaagcacttgagcatgtggatgaagtcgtagatggattacttggacgtgaggacgtggccttctttgttcaccacggtggtatccggatcaatgctagactcgacgacgttggcgaggacggcggcggccatggccttgtaagggagcgcctcgtcgtctacctttcggatgtagagctcctccaccatgaccgggacgacctcgacgagcgtcttgctgttggggcggtgtga

SEQ ID NO: 34147 - DNA, 268 bp, Oryza sativa
  Clone ID: PAT_MRT4530_38190C.1
gcacgaacaatttcttagattgaagccttagccgcactgaaatcgtgtacaacaaaaacagaatatggaactgagaacatatctgtaaacaggaggataccagctaaaggcatatgggcattagaatgattggagtgctcataaaggtgcataaacgatctttcacgaaactaccatgaactttatataaatcgaagtggacagctgtatcatcggccagtgaatatcaagagaatcttgaagcgtgtgaaaaccctcatggtggtga

SEQ ID NO: 34148 - DNA, 976 bp, Oryza sativa
  Clone ID: PAT_MRT4530_38191C.1
ctacgcgtacgccacgccacaacgcttctcgctctccctccactcgtagcagctcgagctgcctgtagcagatagcgcgacgctgcgaccttcgtgtgcccggccgctcgccgccccgcgcgcataagagggaggaggaaggaaggaggagagatcgtagcaagagcgaagcgagatggctgccgggctgggcgtgaaggcggcgccgttcacgtacgtggcgcacgcgctggccgtggcggcggcggtcatggtgctcgtctggtgcatcagcttccggggcggcctcgcgttcgaggcggacaacaagaacctcatcttcaactatgcggctattactatcatgctctatgagtccattgttactagatactgtaacaagttagacgaatatatggtctgcaaactttatcaagttcaccctgttcttatgctgattgggtacattatcctcggcagtgaagccataatgatctacaagatattcccaaaactgaaccacgacacaaccaagctgatccacctgattctccacgcgatcgccattgttcttggcgccgtcgggatctactgcgccttcaagttccacaacgagagcgggatcgccaacctctacagcctgcattcctggctcggcatcggaacaatctcgctgtacggcattcagtggatatttggattcgtggcgttcttctaccccggcgcggcgccgcacgtgaggcgcggggcgctgccgtggcacgtgctgttcgggctgttcgtctacgtcctgacgctggcgacggcggagctcgggctcctggagaagctgaccttcctccagagctccggcctcgacaagtacggcgcggaggcgttcctggtgaacttcacggggctggtcgtcgcgctgttcggcgccgccgtcgtcgtggccgccgtcgcgccggctcacgtcgaggaacccgagggctatgctccaattccggtcaactag

SEQ ID NO: 34149 - DNA, 185 bp, Oryza sativa
  unsure (1)..(185): unsure at all n locations
  Clone ID: PAT_MRT4530_38192C.1
gcacatcagggcncnaccggcgaaggaccccatggcgatccccgccgacctcgggtacgacgacaacttccgcaagtggtcgacgagntgccgncncgtacgntccatcgacatctgtaacaacnnctgagagtcnnnnttcatagaatagaggatatggaacntgttnaaaattttattagtga

SEQ ID NO: 34150 - DNA, 271 bp, Oryza sativa
  Clone ID: PAT_MRT4530_38193C.1
atggcatggcagacctatgctggcggtttttgtgctgggctgaacggattctgccgatcagaataaaatgggcattgtggatgctaaggcgtcagagccgagaaataatggttaggaggctgatgagaccaatgctaggttggaacccgacatgctaaatagggtagactttggcatggcctgcttgaaaaatgcaatctacaaaggtgctaaatggagcgaaccatactgctgttatgctgacctgtacatgcgctatctacgtgaagcc

SEQ ID NO: 34151 - DNA, 553 bp, Oryza sativa
  unsure (1)..(553): unsure at all n locations
  Clone ID: PAT_MRT4530_38194C.1
cgaggggaaagggggggaccccccgcaattcactaaaaaaaaaaaaaaaggggaccccgtttaaaagggaaaaccggccccaaaaaccttacaaccccccgggtaataaaaggaaaaccggaaaaaaccccgacattgacaaacggaacctaaaacccgctatccaaaaaaaaaaaaaccccaaaaacaaacccctaaaaaagggcccccccacaaaacgggaaaatcgccccacccaaaaaaaataagggttttacccggaaaaaacccttgaaggggagttaaacaagggccccaaaaacaaccccttcaaaaaggggaacgggccccaagggcgtnccccgttgctaacccccaaaggggaacaaaactttccccttgaagcacccctcaaccaaagcatccccgaggggagcccccaaagggcccccgccccccggggggccccgcaaaatgcacaccacctggacaaaaggcggatgccaaaccaccccatccccacttgagggagccccccgatctgggcaagggaaccaaaaccgggcggccccct

SEQ ID NO: 34152 - DNA, 754 bp, Oryza sativa
  unsure (1)..(754): unsure at all n locations
  Clone ID: PAT_MRT4530_38195C.1
tttttttttttttttttttttggtaggagcatataaccgcatatattctccttatgccatgtccccgacttattcttcagaggcaattcaaacgattaagatttaagaactcaccaaaagattgcataaagttgcagattacaaatactaattactgctgcttaagtagctgcgtacgcagtcgcatatttgagagcaaatacagcacaaaatctgatccaaattcgcaaagcaaaacggatcagaaaaaaaaaacatagctgacaataattgatgctagaagtttacagcatcctcagcctcctgttgccaccgttccctccgtccctgaagctcgacatatcagcggaggaagggtcgtgggagaagaggaagaggaggaggaagcagaggaaggtgagcagcgggatgaggtggatggtcctctcctccctgaccgaccggcccttggccgccgacgactcctccggcaccgccatcacctccgccgcgtcgctgccgatgccgatgttgccgccgtcgtcgtgctgctgctgcttcggccccggtgagaggctaagctgccgatgcattttggctctttgtaggcgggggagcgtggtggtctctgatctgaaatgaagctgtcgcgtttggtcggagncgactagcgcataggacagttaggccggagagcgcttaaatgcggcggaaatgggagcgggcgttcggtctggtgtttgaattggaatgcaagcaaaggggangcaaatac

SEQ ID NO: 34153 - DNA, 369 bp, Oryza sativa
  Clone ID: PAT_MRT4530_38196C.1
atggtcgttgctgaggcgttccttgagattgctgtggcatgggctcaaattgattgtattgaggaacaaactggggttgagccgatcctgcctgctgatattgaacttgcggtgatggctgaccaccaggtgtcgcaaacccagccgatgcattcattaagccttgctgctgaattggctagacaacctgctgccttaatggcgtctgttgaattggttgcaaaacctggcgtctctacggcgtctgctgagctggttggacaacctgttggattgggggtgtttgctgaatcggctgtacaacctgctgccttggcgcaagtgcgggagccgatactggtgccatcggctgagccgatggtgcattga

SEQ ID NO: 34154 - DNA, 950 bp, Oryza sativa
  Clone ID: PAT_MRT4530_38197C.1
atgtcaagcagcagaacacccgtgccgccgacggcgaactcccaaacccatctgtgcaaagcagccgccgccaccactcctccctctactcaccggctccgttgctccgacccttcgcgagcaatcgtcgtctcaccgtgcaccgccgtcgctggtgctcctccctccccgcagaacctcaccaccgccgcaccgccttcgccgacccgccggagccaaatccatcgcacacacttttcgacgccgccagatgcgccgcgtgcgtgcctcggcaacaccagatccatcgcctcgtcgccgagccttcgccagatccaccctgccgtcgtcgcccccctcctcctcgtcgtcgagccgccaccgccgctcctcttcctcgtcgagccaccgccattcctcccactcccccgcatcatcgagccgccactactcctcctcctcgttgagccaccgccgccgctcctccgccttgtcgagctgctgccgctcctccgcctcgtcgagccaccgccatcacttgccgtcgcgttgatggcaaaaacggggacgatgagctcgagctcgattgacctggagctccttggccccgccctccgcgctggtcctggagctcgacggcccgcccgcgcggggccttgatatagacgagtagggacggcggcggaggtccacgccgtcgcgctcgcgtcgtctcctcgatagcctcctttgccgcttccgccaccacggccggtcgcaccgccccctcgacccttccgccaccaccgcgacctctccgctcgtcgccggagatcggaggcggagacaacggagctggtggtggcaggacggccggcggtcagcccgatggctcctcttaacccgctcttgcatttgcaagcggcctcatccatcagttctttctcagcccaaatccatgccgtgccatcaactcctaaaaaaatttccat

SEQ ID NO: 34155 - DNA, 550 bp, Oryza sativa
  Clone ID: PAT_MRT4530_38198C.1
ttgtttttttttttacacaggacacacaattaatgttaactgttagtctaggattaaatcttccaatttcacaagacattcgtccgtgacaaagttccctacactcaacttcacaagcttagatcttagattcggcgtcggtttcgcttcttgttctttcctccaccgccaccagagggtgacgacgtttgcttcggcttcttttcgtccttcttcttcccatctttcttctcatccttcttcttctcatccttcttcttgtccttaccaagatttctcacttggtcaatcaaaaactcaggaatctcaacatcaccgcgcttttcgaacaagacttgctcacagaactcttcgagcgagatgtcttgatcatcgaagtcttgaaagctgtcgcttccagcaacattgaactcatccacctcggaattcgattccaaagtgttggaagcattagcaagttgaagggtgcatgccatgcccaaaagtgcaaaaagtgcgagcttcattgtttctgaatgatggtgggttgcaaaatgtcggcttcgaaaaa

SEQ ID NO: 34156 - DNA, 457 bp, Oryza sativa
  unsure (1)..(457): unsure at all n locations
  Clone ID: PAT_MRT4530_38199C.1
cggcgcatgcactctgacttaatttttggacccatttaagacccccgcccttttttttnttttgtttttttaaanaattcccttttttcccnatttttttttttaaggaccccggaccaaaaaaaaaccaccaatcaaaaaaccatatgcatatggctggaacaggattttacaaacatataggggggaacacggcgcaacacaaatgacaaaaccgataaaatatattttagctacgtagcattgcccccttttaatggacaagggaacggaataacttaaaagaacaagctccagcactggtggatgcactaacaacttaatcaaaggagcgtaacaggctagcagccaaggagctggtttaagcctttttcccaaagaagagtctactcaacaaggtcccaccctggttctttttcttcctcttcttcatatcaacagaaacaggggttagggg

SEQ ID NO: 34157 - DNA, 1062 bp, Oryza sativa
  Clone ID: PAT_MRT4530_3819C.1
aactttcccgagtttagatcccggcctcccatggctatataaaggaccccctagtcgtcctctccctatcccctcaagtcccgtccgccgtcgtcgccggaatcgctctccccgcgctctccctctctctccacctccggccgccgctccagccgccattcgccgtcgccccggccgtcgccggtcagcaccgccacctccctcggcttcgcagtgaagatctctaccccggccacccgttcttttgcgccgaaccccgccggaagtcgccgtcaccgtgaaggccgaaccgttgccatgttttgatctccggcgaagctttgccgtcgactccgtggtcgccggacctcgccgtatccactgtcggcatcgcagcagtgaggagaagcccggcagccatctccccgaagccgaaatccatcggagcaccgtcgtcaccgtgaagccgatctgttccatcttcagtcgcgccgttcgtcgtcgtccgtcgtcgccctcggtcgccgtcgactccattgggttcgcaggagcaaggtgaagcccggccatcggtttttcttcgccgaagatcgctgaaacgtcgccgccgtggacagtacctcgccgcccttcgaagctcgtcgtcggccatcttccgtcgctgtccgtcgttgcgtaagtgttggtaagaatcgccgtcgccttctctacctcacggtgccctccgtttgcattattgtgccatggttcgccggcaaccgccactcctatgccgttcacctcctccgtccgtttccgcctctcgccgcccatcctcctcgccggattcgagctcgcgacgtcgctctctctctctccgccatcgccgccgagctccggtccgccgccgtcgtcgccccggaccgcctccgacctcggcgccgcctccttcgggttcgccgcatcctcgccaacctcgtccacctctccgtttcggtcgccaaccgccagaacgccgtcgaccccgtcgactcgagccacgccaccgcctccctccgctccggccgcctcctccgtcgccaccattgccccggggtgagccat

SEQ ID NO: 34158 - DNA, 567 bp, Oryza sativa
  Clone ID: PAT_MRT4530_381C.1
atgcctcctcctccctgctgccgccgctctgccgcatccttgccggagctctgccggagctccgccggactcttactcggagccgccgccggagcaggcctcggcccctcatcaacttcactgccgaggccaacatccaggttgccagaccaccaccttcttcaacaccatattgtggcccttgacttctgcctgattgccgtcacagagacgttcatcaaccctaggtggccatggtaccacgatgctgcggtgattgctgatactattcctgttatgtcatgcttgatgctgaatcacgagggattctccaagagttggaagctgtcaaacagcactaggcagtcaagttgtagaaatggtgaaaagtatggagaagctgcagtcaagttgcttgccgctacattacgagatcaatgggcgcttgctgataaaagaatgcatataaataacaattggtggaggcagaaaaggaggctggtcaagtcagcctcctgcaattatgtcactggaaatttatttgcaaagcactcaatttactgctctgcaattgcttcacagaaatag

SEQ ID NO: 34159 - DNA, 991 bp, Oryza sativa
  Clone ID: PAT_MRT4530_38200C.1
caggagcaggaggcgatggtttcccagaatgagagtccgacgccccttccctgtcgccggcgttcgtccttccccgctggtactcccgttccgctcatccacggcttcgacctccaccgccaccgccgggcctccacccccggcatcagcttcctctacgtcgccccatggagctccaccgccactggctacctgttcgacggaatgcaacagggagacagcttttaacctggatcgtgttagctatcattggacggtgctgccgacagagtacagctcggctgcaggactgcaaggaggaacaaccacgacttgcagcagatgcccaaatcccaatttcgcgtcctgcctctttcttgtgattcagtttgcatttgcaaatgccatttacagagcagtccttgtagtgctgttggctggcatatcgccattggtctcaactcttttgatgtccagctctagcctctaggacaccagatcaaaccgactggcatcagcatctgcaatgtgcactttggcaggtggatgcacatcttgatggcatggtggttggtaattgctctgctgaagatggacatgaaactagaaaagaacatgagaagattaagccagtggtggtggtgccactggaatgccatcctggtcattatcctcaacatgtccttaatcaacgctcgtcgccggcggccaacaccaaagggcaggggtgatgcaaagatgtcaaccccttcatcaacgctcgtcgccggcggccaacacaaagggcaggggtgatgccgagatgtcaacccaggacgagcacaccacaattgatgacctgcttcggtggcaggcgatgccctctagactgatttttttggtaccgagtgtatatgtgtgtttgtaacgataatggcacgatcaattgtaaaaacaaaaaaccattatacccgtattctagtgcagtaaaatatttactgccttatatatcaggcccaatcaattactaagt

SEQ ID NO: 34160 - DNA, 548 bp, Oryza sativa
  Clone ID: PAT_MRT4530_38201C.1
gcacgaggggctgcaacaatggccacctctcccctgctcctcctcctcctcctactagtcgccgccgccgctgctgccggcgacgaggcatcgctgtcgccgtcgaacgcggctggcgccggcggcgccggcggcgcccgtgctggtcggcgggaggacggagatcagggacgtgggcggcaacaaggcggtgcagtcgctgggccgcttcgccgtcgccgagcacaaccgccgccttcgccatggctcctgcgggcccgccgaccccgtcccggtgaagatcgcgttcgcacgcgccgtggaggcgcagaagcaaagtcgttcctgcgtggcctactacctcaagggcgtcgcgaggggaccccgcgggggggccgccccccgggaactggtgtttgactccccgcggggggtgaaggacttgttcatagttcaaagagatcttctgctttcaagctcctggctttaaccaataataccccctacatatagattgtggctcccccccactaattaatattactagtggggctttcttgctccctcct

SEQ ID NO: 34161 - DNA, 1494 bp, Oryza sativa
  Clone ID: PAT_MRT4530_38202C.1
atggaacaagaagccccaccggcgaagaaggcgaagccatcgcacccgcaggacgacgcctccgaggagatcctcgcgcgcctcccgctccgcgacgacgcggtcaccaccgcgctgtccagccgctggccccgcgtcttctccacgctcccgcggctccgcctcggcccgaccacgttcaacagccgcgcctccctcgacatcggctactgcgacgacgacgaccgctgggtcgacgccctggaccgcgtcctcgacggccgcctctcgccggtcgccgcgttcgaggtcgacgccgacatggacctcctggagggctacgacgactggttctactccttcttccgcacgctctgccggagcggcggcctgcaggagctcgcggtgcggaacaagcacgtccacgagtgctacgtcgtgccctccccggtgtacgcctgcgcgacgctcacctcgctcgagctcgacgcgtgccacctccgcgtgccgggcaagctcaccggcctgcgcgccgtgcgctcgctcgtgctcctccgcgtcgtcgccacggacgtcggcctccggcgcgtcgtctcgcgttgccgggccgtggagcggctcgtgctcgacgactgccaccgggtgcggaacgtcgtgatccgcgggtcaagcctcaagcagctggagatccactcgtaccgtccgctctgcgtcgcgctgaagaaggcgcctcacctggagtcggcgaagctgagcctcggctacggcgtcgccgaagtttcttggagcatctacaacaactccgatagcgagatcgaaagcaagcgcggaagtcttcagctgtatgagttcgaggcgcaggagaggcgggagcagaggaagacggacgaggctacgaacatggtgacatttctcagcggattgaactgtgccaaagagctgtatttgtacttgccatatgagtacgccaagatattaagaaattctgctgactggctgaggtcaggttttaaggaataccagcatctcattaccaatgaggttgcccaaaaaatgctacttgcgtgggctgcagaagcttatcctttatctgaacacaacgacggagccattgctcaagtggtgtcgtgcctccagaacagctctccgaacctcaaggttctcgagatcaagaatgattttttcgatgatcgtcgcgcaagcactgacgtgccggacttctgggagaagaacatgggtgcagctgaatgtgttcagaatcatctatcaactgtcaccttctacctgaacagtgagtgcttccagggacgctcctacatcgacctctcaaagttgctgctgatgcgagccagggctgtcgaaaggttgagcatcaagtatcggcgcttggaggatcaggaccggtactccgctgagctggagagtgtccaaagcgagctccctctgtggcctcgggcttctccgggcgcgctggtggagatccgcgctgttgaccgcctaccttcgtggtattag

SEQ ID NO: 34162 - DNA, 308 bp, Oryza sativa
  Clone ID: PAT_MRT4530_38203C.1
ttggtaattaagatacacatgcatattaatttattacttcggggtacatgcaaacgttacacgattttacacatgtagtatatggtgtatgtgcatatgcttgggtgtatctagttaaactgggagggcgttgcgaggaaaaagttggtgacgaggtctttgatgtcggcgccgggcgggtgtacccgtccctggccaccaagggtagatcacctccagcatcctcgtcaggttcaccaccagccgcgccgccgggagcaggtgcccgatccatctccagcgcactcccgggtataatcgtcctccag

SEQ ID NO: 34163 - DNA, 538 bp, Oryza sativa
  Clone ID: PAT_MRT4530_38204C.1
tatttgtgttgccttccggatccggagtaatgattaataggacatcggggcattcgtatttcatatcagaggtgaaattcttggatttatgaaagacgaacaactgcgaaagcatttgccaaggatgttttcattaatcaagaacgaaattgggggctcgaagacgatcagataccgtcctagtctcaaccataaacgatgccgaccacgggatcgcggatgttgcttataggactccgccggcaccttatgagaaatcaaagtctttgggttccgtgcctggtggacggcggcgacgcggcggtgttcaggccggaggagtactaccgagaggtggacccatggaggcggcgtcccggcgctcaaggaggtggtgcagctgtgcgccgggtggcagcccgtgccgaggccaccgggcgagtgatccatccatccatgttactagtgtatatcaaaagaaatattcatgtattatccatttagtgtgtcagtacatcattacccagtaataatcgtgtaaaaaaaaaaaaaaaaaaaa

SEQ ID NO: 34164 - DNA, 303 bp, Oryza sativa
  Clone ID: PAT_MRT4530_38205C.1
atggccgtggacgagatggttggtggcggtgttggccggtggatccacgagaagactacggctgcagccggcaccgtgtccgcggggaggtggtgcaggacaatggctccaggggagagctgcggcgccgctagctcgacgacgacgaagcggcgctgggtcgccggcaagaagaagcaacagcggccgcggatggcctcgccaggaagcgacaagggcgagcgtcgtgagctgcgcgcgcgaggtggagacgaaaggggaacggtggcaccgtcggagtcgacgaggcagccgagagaatga

SEQ ID NO: 34165 - DNA, 1086 bp, Oryza sativa
  Clone ID: PAT_MRT4530_38206C.1
atgggcgcctcggcgtcgtcgtccgccggccgcagcaagccgccgccgccgccgccgtgctccagctcgggcgtcgccgtgagcacgtctcgcgggtaccacctcttcgagatccgcaaccactcccgcatcaagtcgatgaccccgctgggccgcggcgagacggcggaggccgccgactacgccgccgtctacctcgactatgtcatcgacagctacccgcccaagtccgtcaccgcctacttcctcctacgcctcgtcgacaaggtctccaacgacctcatggacccgccgcccgacgacgacgtgcgcgccgccgcggtgcacgagttcagcgccgggcagaacagctggggctactacgcgttctggaagaaggacgagctggagagctcggggcgcatcgtggacgacgtgctcaccatccggtgcgacgtcggcgtcgtcggccggtacgccacggccaagacggacgccgccgccgccgccgcctccgtggcgtcgtccgtccacgtgccgccggccgacctggggcaccagctcggcgccctccgctcgcgcgcggtgggcgccgacgtgacgttccaggtcggcgccggctccggcgcgcgacggttcggcgcgcaccggtgcgtgctcgccgcacggtcgccggtgttcgaggcggagctgtacggcccgatggtggagcgggacgccgggcgcgtcatccggatcgacgacatggacccccaggtgttcgacgcgttgctcgacttcatgtacaccgacgccctgcccgggatgaggaagcgcgacgcggtggccatgtcgcagcagctgctcgtcgcggcggacaggtacgacctgaagaggctgaggctgctgtgcgagcatgagctgtgcaagcacgtgaacaagggcacggtggccagcatgctggcattggtcgaacagcaacgccctagctgccaggggctcaagaaggcatgctttgagtacctccgaaaaacaccgaaagttctacgtgaaatcatggcgacggaagcgttcgatcaccttgtgaatgagttgttattgtccaacaagcttgccatccgtgaatga

SEQ ID NO: 34166 - DNA, 177 bp, Oryza sativa
  Clone ID: PAT_MRT4530_38207C.1
gttcagatctcacagattcttttaaaacacgaaagatcattttatttctatttatatcatcggatgagacactggctgatatgttcactatctcgctgcatgctacacagcatcggtgtcatgccaccggctatgaggctagcgctctcagccgcgctctgggccccagggtagatg

SEQ ID NO: 34167 - DNA, 339 bp, Oryza sativa
  unsure (1)..(339): unsure at all n locations
  Clone ID: PAT_MRT4530_38208C.1
ccgctgntccgccttgcctgctcttagcccgcttgccgcaccacgctctacgccaaagaaaagagaagaaagaaaagagaagagaaaagagaagaaaaaaggatacagacccacatttttattcatcccacttacatgtggtcccagattgctaactaggatgccacgttagcgaaaccacccatatatactgtcatagaaccttgattgcacggtttgtgtgagtttaggagtacacatttatggttttgtggctaagggaccttaaaaaaatcacgttgttaagttgaggtacctcaggagaacttattcctcattctaataagagaagaaaaaaaa

SEQ ID NO: 34168 - DNA, 419 bp, Oryza sativa
  unsure (1)..(419): unsure at all n locations
  Clone ID: PAT_MRT4530_38209C.1
aaccctgtcactactcaagctaccttcctttcttcgaataggattccttcctctcctcgctttttcactggctttcacaccctccgacgtctctgttctaccctattctctctcatgttatccccgtccgggggggggcttctcatgtcttgcttccttcgtgcatccaccaccggtatgagcttacagttcactnctgggggccttcaggtgggatctaccattgagctctccgacgggcgatatactttctccaanggatatgtgcgctgacgcatatgctgcatgcgtaccctgttagggacccctggctgcgttgcgtgttgcgcttgtgggtgctaaccgtgggtgtgggaagaatgtggggggtggggggcngtggngggcctttgtctgtgggcgggggggggtgggggctt

SEQ ID NO: 34169 - DNA, 169 bp, Oryza sativa
  Clone ID: PAT_MRT4530_3820C.1
gacagaatcctacaaggctcaaatatatatatggaatagatattagacagtgaagttgtgtttttcaataagcaaaatttaattttgtacaaacgctctagagtgtaacttattgagaacagtgatgctggtgctgtctttgctgccacagccaaaaaaaaaaaaaaaa

SEQ ID NO: 34170 - DNA, 305 bp, Oryza sativa
  Clone ID: PAT_MRT4530_38210C.1
atgccctatggaacaaccaaccaaggaaggctacagtaagaacgggagcttgatacgtcgagcacacatggcatgagctcaaatccattcttccccggcatgacctatccttgtcacactgtagggactacacaatatgagatctcccaaactttcacaggccggactagggatctacagtacatcaagcgaagtacttacaacctgcagcccaagtaacacgtcatacatagggcagtcgaggaccaattttcattctttgaaatacagctgacccttatcaaaacgacaattctgaggacctc

SEQ ID NO: 34171 - DNA, 534 bp, Oryza sativa
  Clone ID: PAT_MRT4530_38211C.1
atggcggagagcgggcgatgggcgcggcgggggcgggtgtggcaggagcgcggcgtcgcggcggagggagtcgcactcgaggcggagggcgtcctggctggagcggagggcgtagttgcatgtgatgaagacgctgccgttgaagcactcggcgcggggcgcagccgatcttggtgaagttgagcctaactatgaagacgaagtggccgcacttgtggaagtcgacaccggcaccacgcgggcgatctccgcctccgcagccggacttccggacgagctccgcctccgccgccggtcgtccgagagtgtgcgcctcctccgctaccagccgtccgagcgcgtcgacctcgtgtggggaatgacgggatgggaggagtacagcctcatcaaggatcccagcagggccctcttcgccatccgccatcccgacctgccgctctcctactacaccggcctcctcggtacgaattgaaccatgcatgccgcgattgattagcagatcagcatccataaagaagagagttgggcctattt

SEQ ID NO: 34172 - DNA, 472 bp, Oryza sativa
  Clone ID: PAT_MRT4530_38212C.1
gcacgagggccggcggcgccggcgagggcgggacggcgacgacgaccgcgccgggactcggccgtctccaacgacggcggcgacttcctaaaggaagccctgagggctcttgtggagcggccgggcgccgccgccggcgaccggccgaagaggaggcgcgtcgtctccgacatgaacatgcaagctgcagcctagccggcggccatagctcaacatagctatcagtttgcttggtatactatactacgtattttgcttgccatgttttacttagtttttgtgtgctaattagttgccatctccatatatatatggctcttcatggtgataccaatattgccaattgatatgccatatatgattaagtaggatatatattaccattagggtttgcttgagctttcaccaaaagctgttccaaagccaatgcaaaacccagccactgaataacaatgtcagcatccccaatata

SEQ ID NO: 34173 - DNA, 1265 bp, Oryza sativa
  Clone ID: PAT_MRT4530_38213C.1
ttccccccgccggctcgtggtctgtaacgtccaatatatgaaactgaataaaaaccatgattttgacatgtatttcctgctaacagactaaatacaaagcccaagttaaaaggtacagtccattgtgaaagtttgtacatatgtgatctatattttccatcatctcatctttatagtcacagagtcactaactaaatatcctcagagtttatattctcttctatgaccccgatgcaagatccaactgacttcccagaggacattgcctccgcgagctgtgatctggcctttttatggcgacgcagtgcaggtacagtattcagcacagcccatctcacctgtgaatcagctttcttctgggtgaaacctagacctttgagcaatccatctagttgcccaatgtcagctagtcctccttcagcatatccatacaaaagatactctgttgctactccagccaaggcaatgcatgagaacttgttcaacatcgtggcagatattgtccctgaagcgacttcttgaaggaactcaaagtcaacaaaagctgtcccagcttgcacattcagtgagcccttttttatgaatgtatctaaacttgtgatagtgtatcctttgggaaggaccccaagcaaatacgctatcaagaagtggccagcttcgtgctgaataactctattacgatacttctggctaagattgtgaccaattgtatcaagaatcaagtttctcactccaccaccgaaatataccaaatccaccgaccacagagatagtagacccaaaaacagaaacagaacttggagtttagaaagctcgaatgcagctgatacagagagccctcctagaactgcagcaatttggagatttctctcaattgatcccaaagtcagatcaacaggagataggaaagcagaagtatcgatcccatttaacttcagctcatccaatgtataaagtctttgaggtacctgcctcgccgcgccaaagaaccggagcccgccatccgccccctgcgagccgcgcacgagggacagcgcggcctcgtcgttccccttccgcagctcctcgtccacctgctcgagaaccgccctcagccgcgccgccggctctgaggaggtattcgcggcgcgggcaggcggcagcagtcgcagcctgacggcggccgcgacgccgccggcggggtgcggctcggtgaagcagtagcagcagggcgcccttcccagcctcatcatctttaacacgtggaggccgaagaactgaggcat

SEQ ID NO: 34174 - DNA, 400 bp, Oryza sativa
  Clone ID: PAT_MRT4530_38214C.1
gagtattgccttacctagtgcttatatacactttctgataacgcggctttgtgaaatgtccgctagagatggacgcataggccattcttccttgtaactttcagaaagcttattactcacagtccacttctaactaatgcccatattgatagatggactactgatatagaggggatggaaatgaagaatctgctgattcattacagatgaggaggatgaacaggaacaagatgatgatgatgaaaagggcttccactaatggtgacaggcggggtgaaccactggaaagtatcgccctcgaatttggtgtgaaaccatatgactggctttgtttcctggacgagatggccgccgaagatgaaaagcggctgtacgaagattatcaacgcgatccttccat

SEQ ID NO: 34175 - DNA, 181 bp, Oryza sativa
  unsure (1)..(181): unsure at all n locations
  Clone ID: PAT_MRT4530_38215C.1
gtgcactgatgcatgaaggagctgtgtggtatgatgtgatgccatatgctgtttgtttttgctgttgtgtttaccaatntttgcgggcttggaggtgtgatgaagatagacatatatancccccctcncccattgnaataccaattaanggctgtggatataaaaaaaaaaaaaaaaaaaa

SEQ ID NO: 34176 - DNA, 406 bp, Oryza sativa
  Clone ID: PAT_MRT4530_38216C.1
gcgtcgcgtgaggcgattggtcattcgtacggccacgcgtgctggcgacactcgcatgttcgatacaatgtcatctcctcttcggaggagggtacaggcgatgacagggagcggtggggttcgtactctctattgacgctcgcggcgccgggttattcttccccacggattaccacgccgcctccgtttcctccgtcgccaggctcgggagcggtgggtctgccgacgatagcgccggcttccggaccgggatccgtctgcgcagttgctgggcacgggagcggtggatttcggggctccctttgcactatacccaccaggggatcgaatccccaactttaatggcatgcctttaaggcccacgccttatatcccctagtggggattttaacacttgtcccaaatt

SEQ ID NO: 34177 - DNA, 1761 bp, Oryza sativa
  Clone ID: PAT_MRT4530_38217C.1
gtgaagctgcagccgccgccgtcgccgttagaagttgcgaggagagctcccttgttcttgttcttgtacttgaacgtgacggcgaagtagccgtaggcgagcagctcgagcgcgctgagcgcggcgatcagccagtagaagtagtcgaggtgggcgcggttgaggttgttggagaaccagctgccgcccctcgccgccgtcgcccggtcgatcccggacacgagcgcgctgctgatgaagctgccgacgccgaagatgctgaggtagagcgccagcccgaggctgcgcagcttgtcgggcacctggtcgtagaagaactcctggagccccaccatggtgaacacgtccgccgcgccgaacagcacgtactgcggcaccatccaccacaggctcatcggcaccgggacgcccgccttgtcgacgagcccggcgtcccgcgccgcccgcagccggcgggtctcgacgagcgccgcgatcaccatggacaccagggacagcaccatcccggcgccgatccgctgcagcatggtgatgcccgaggggacgcccgtgtagcggcgcgccaccggcacgatgacgcggtcgtagaccgggatgatggccacgatggtgatgctgatgaagctctgcagcgccgccggtgggacctgtatatggtcgccgatccgccggtccagcgtccccgcctgcttcgtgaagaacgtcgacgactgcgctaacgccacggcgtagatcaggcacgtcgcccagatcgggaacagccggacgatgcccttcgcttgctccacgaggcccgccttgtcctgcgaagccggcggaagaagggggatcgacttcgccctgtttcgccacgccgcgagtgcctcgccggcgcgagcgaccacgcccttcttgctgccggagacgtagtagcggtacgtcctggtgccgagcaggaacacggcgagggcgcacgccatgacgacgcaggggatgccgaagccgaggccccagccgatgttgtcctggacgtagctgaggaacaccagcgtgacggcggtgccgccgcacatgccgaagtaccaccagttgaagaaggagctcctggagaccgactcctcggggtcgctcgggtcgaactggtcggcgccgaacgcctgcacgcacggcttgtggccgccctgcgcgacggccaccatgtagagggagatgtagaagaacgccacccgcagagtcgacggtgggcaggtcttgccgccggcgacggcggcgctgctgcattggttgccgccggtggagatcaaggtcgagaaagctaacatggccagggaattttttttctctctttttttttctatatctaggagagaaacagacgagagaaaagaagagaaaaaaaaaacaatggcgttttggtggtattaatttaccaggatgtagagcagcgaggcgaggaggatggtgcggtagcggccgagccaggagtcggcgagggcgccgccgagcagcggcagcagctgggagacgccgctccaggcgttgatggccgccgccgcccccgccgtcgactcccccagcggtcccgtcaggtagctgatcaggttcgccgacacgccgtggtacgcgaacctctccgcgatctccaccccttttcacatccaaaatccacaaaatttcactcaatcgatcctcgggagttggggttcggggaggagggggagattgggcgtaccgaggacgaacattgcggcggcccagcggccggtggagccccgggaggcc

SEQ ID NO: 34178 - DNA, 4989 bp, Oryza sativa
  Clone ID: PAT_MRT4530_38218C.1
atggaggaaaaatactctgcgaaaccatttgttttcgatggacacaattttgtcatttggaaggcacgaatggaggcctacctccagtcgcaagggcataatgtgtggaataaggttaaatcaccttacactgtgcccgatgatgctgacatcacgcctgcaaatatggctcaggttgattttaattatcgtgcaagaaatgcaatcattggtggaatttcttctggtgaattcaatcgtgttcaacaccacaagtccgttcatgacatgtggactgctctgtgcaatttccagggaaacaatgatattcaattggttcgtcagaatcaatttcataaagaatatcaaagatttgagatgcacccaggagagtctattgattcttatttcaagcgttttggagaaattgtttcgaagttgagatctgttggaaaagagttttctgataatgataatgctcgccatcttttgaattgtctttattatggtgtttgggaaatgaaggttgcttccatcacagagagtgcacctctgagtgaccttaccatggacaagctttactcaaagctaaaaacccatgagatggatgttttccatcggaaaggcctcaaacactcggtggctttggtagctgatccctttggtagtacttcttctaatgactcagcttttgtgtgtggtggcttctctcttgccgctttacactcagtcactgaggagcaattagagaagatccctaaagatgatcttgctctttttgctagaaaattctcaagagcttacaaaaatgtgagagatagaaaaagaggaaaaaccaatgaaccatttgtgtgttttgagtgtggagagcctaaccacataagagtgaattgtcccaagttgaagaagaagagtgacaagatgaccaagaagaccgagggacaagggcgaaaggggagaaaggatttgatgaagaaggcgatccacaaggtcttggcggctcttgaggaggtgcagcttagcgacatcgactccgacgacgatgatcaagaaaagggggacaaggacttctccgggatgtgctgtctcgccaacaacgaggacttcatcaacctgtgtctcatggcacttaaggataaggatgactcatcggagcatcctgaggtatgtcttgatgatatcccttccttggatggttctctttgtgatgattcttgctcagataatgactctgttgatgatgaactaagcaaagaaagaatggcacacttgatgattgaaattagtgacaagtataggtcttctaagtataaaattgagaaactaaaatctgaaaatgatggaatggagctagaaattgctaggcttcgatccatgattcctaaggaggatacctgttctacttgtgcttcatatctttctgaaatttatctcctcaaggataagttgaaatcatgtgctttaggagctgggaatccttctagtgctagtgctacttgctctacttgctatgaaatgaaagttgatatgggtttgcttgagatggaattgaaagaactaaaagaaaaatttgttcatgataggattggtaggtgtgaaaattgtcccattctcactagtgacaatgatgaattaagacaacaagttgacatgcttaggaccaagaatgatttgttagaatcttttgctactaaggaacctgttcattcttcatgtgctaattgtgctatcctagaaactgaacaaaaagatgctaaaactgtcattgattctatcaaatctattgattcttgttcatcatgcatttctctgaaagttgatcttgagtctgctaagagagagaactcatacctacaacaatctttagagaggtttgctcaaggaaagaaaaagttgaacatgatcctagaccaatccaaagtgtccataaacaatcaaggtataggctatgattttgcttatgattttgctgagtctttgaggataggtacccatgagattttaggtgtcagatgggatgatagaactagctcaaaaacctataaccttcaagtctgcagctggttagaaaggctagaaaagaacgacaagaacgtcttaggactaggagagctactagagtccctgggaggttcgagtgtgcgtgtcattgtcgttcaagtggtgtatctcgctttcctcgccgagatgtgcaccctcgacgtgacccagcagggttggggcaaaacagacatggattttggagtagggaggagtaactcttggcttgtggactccggttgttcacgccacatgaccggtgaagccaagtggtttacttctctcactcgtgcatccggtgatgagaccatcacttttagggatgcgagcagtggacgcgtgatggctaaaggaacaatcaaggtcaatgacaaattcatgctgaaggatgtcgcgcttgtaagtaagcttaagtacaatttgctctctgtttcacaactctgtgatgaaaatctggaagttcgtttcaaaaaggacaggtctcgagttctcgatgcttctaaatctcctgtttttgacatttctcgagttggtcgagttttctttgctaacttcgactcttctgctcctggtccttctcgttgtctcattgcctcagagaatagggatttgtttttctggcatcatcgtcttggtcatattggctttgaccacttgtctcgcattagtggtatggatttgattcggggtttgcctaagttgaaagctccgaaagatcttgtgtgtgcaccatgtcgtcatgggaaaatgacatcttcctcccacaagcctattacaatggttatgacagatggaccgggacaactgcttcacatggatacggttggtcctgctcgggtccagtcagttggggggaagtggtatgtcttggttgttgtggatgatttctctcgctactcttgggtctattttcttgaatcaaaagagaaaacgtttggcttctttcagtctcttgttcgtagattggctttggagtttcctggtgctcttcaagcaattcgcagtgataatggctctgaattcaaaaattctgcatttgaatatttctatgattcttctggagtcgaacatcagttttcttcgccatatgtcccacaacagaatggggtggttgagaggaagaaccgcacccttgtggagatggcacgaactatacttgatgagtttactactccaagaaagttctggactgaagctatttctatggcttgttttatctccaatcgtgtgtttttgagaactatcttgcacaagacgccatatgagctcagatttggtcatcgaccaaaagtttcacatctcagggtcttcggttgcaagtgctttgttcttaaacctggaaatttggacaagtttgaatctcgatctgtggatggcatttttcttggctatgctactcattctcgggcttatcgagtttatgttctttcaactaacaaaattgtggagacttgtgaagtcacttttgatgaggctagcccaggagctagaccagaaatttcaggtgtttcagatgaaagcatctttgtggatgaggattcagatgatgatgacgatgattcctttcctccacctctagacagtacaccaccagtgcaagaaaccggttctccttcgactacatcgccttcaggagatgcaccaactacatcatcttcagcagctgaggagattgatggtggcacatcaggaccgacagctccccgacacatccagaaccgacatccgcctgacttgatgatcggaggcctgggtgaaagggtaactagaaatcggtcttatgaacttgttaattcagcatttgttgcctcttttgagcctaaaaatgtttgtcatgctttatctgatgagaattgggttaatgccatgcatgaagagttagagaattttgaaagaaacaaagtttggtctttggtagaaccgcccttgggttttaatgtgattggaacaaaatgggttttcaaaaacaaactaggtgaagatggttcaattgttcgaaacaaagccagactagttgcacagggtttcactcaagttaagggcttggattttgaagaaacctttgcaccagttgctagattagaagccattcgaattcttttggcttttgctgcttcaaaaggtttcaagttttttcaaatggatgtgaaaagtgcttttctgaatggtgttattgaggaagagatatatgttgatgacatcatatttggtggctcttctcatgcacttgttgcccagttttcttatgtgatgagtagggaattcgaaatgagcatgatgggagagctgactttcttccttggacttcaaatcaagcaaaccaaggaaggaatctttgtacatcagaccaaatactccaaagagctcttgaagttcgacatggccgactgcaagccaatcgccactcccatggcaactacttcatcgcttggtcctgatgaggacggtgaagaagttgaccagcacgagtacagaagcatgatcggctccctcctctacctgactgcgtcaaggccggacatccacttctccgtgtgcctgtgcgcaaggtttcaggcttctccaagaacatcacatcaccaagcagtcaagcgcatcttccgctacatcaagtctacacttgagtacgctgaggctgagtacgtagctgctgctagtgcatgtagtcaagttctttggatgatttcaactctgaaagattatggtctgtctttctctggtgttcctctgctttgtgataatacaagtgcaatcaatattgcaaaaaatccagttcaacactccaggaccaagcacattgagatacggtaccactttctccgagacaatgttgagaaaggtaccattgtgctagagtttgttgaatctgaaaaacaattggcagacatttttacaaaaccacttgatcgctctcggtttgagttcttgcggagtgagttaggagtgatccacccctatggcttgatttga

SEQ ID NO: 34179 - DNA, 5436 bp, Oryza sativa
  Clone ID: PAT_MRT4530_38219C.1
atggaggaaaaatactctgcgaaaccatttgttttcgatggacacaattttgtcatttggaaggcacgaatggaggcctacctccagtcgcaagggcataatgtgtggaataaggttaaatcaccttacactatgcccgatgatgctgacatcacgcctgcaaatgtggctcaagttgattttaattatcgtgcaagaaatgcaatcattggtggaatttcttctggtgaatttaatcgtgttcaacaccaccagtccgctcatgacatgtggactgctctgtgcaatttccatgagggaaacaatgatattcaattggttcgtcagaatcaatttcataaagaatatcaaagatttgagatgcacccaggagagtccattgattcttatttcaagcgttttgaagaaattgtttcgaagttgagatctgttggaaaagaattttctgataatgataatgctcgccatcttttgaattgtcttgattatggtgtttgggaaatgaaagttacttccatcacagagagtgcacctctgagtgaccttaccatggacaagctttactcaaagctaaaaacccatgagatggatgtcttccatcggaaaggcctcaaacactcgatggctttggtagctgatccctctggtagtacttcttctaatgacttagcttttgtgtgtggtggcttctctcttgccgctttacactcagtcactgaggagcaattagagaagatccctgaagatgatcttgctctttttactagaaaattctcaagagcttacaaaaatgtgagagatagaaaaggaggaaaaaccaatgaaccatttgtgtgttttgagtgtggagagcctaaccacataagagtgaattgtcccaagttgaagaagaagagtgacaagacaaccaagaagctcgagggacaagggcgaaaggggaagaaggatttgataaagaaggcgatccacaaggtcttggcggctcttgaggaggtgcagcttagcgacatcgactccgacgacgatgatcaagaaaagggggacaaggacttctccgggatgtactgtctcgccaacaacgaggacttcatcaacctgtgtctcatggcacttgaggataaggatgactcatcggagcatcatgaggtatgtcttgatgatatcccttccttggatggttctctttgtgatgattcttgctcagataatgactctgttgatgatgaactaagcaaagaaagaatgacacacttgatgattgaaattagtgacaagtataggtcttctaagtataaaattgagaaactaaaatatgaaaatgatggaatggcgctagaaattgctaggcttcgatccatgattcctgaggaggatacctgttctacttgtgcttcatatctttctgaaattaatctcctcaaggataagttgaaatcatgtgctttaggagctgggaatccttctagtgctagtgctgcttgctctacttgctatgaaatgaaagttgatatgagtttgcttgagatggaattgaaagaactaaaagaaaattttgttcatgataggataagtagttgtgaaaattgtcccattctcactagtgacaatgatgaattaagacaacaagttgacatgcttaggaccaagaatgatttgctagaatcttatgctactaaggagcctgttcattcttcatgtgctaattgtgttatcctggaaactgaactaaaagatactaaaattgtcattgattatgtcaaatctgttgattcatgttcatcatgcatttctctgaaagttgatcttgagtccgctaagagagagaactcgtacctacaacaatctttagagaggtttgctcaaggaaagaaaaagttgaacatgatcctagaccaatccaaagtgtccataaacaatcaaggtataggctatgattttgctgagtctttgaggataggtacccatgagattttaggtgtcacagatgggatgatagaactagctcaaaaacctataaccttcaagtctgcaggtttcattggaaacactagttctagtacacccaaaacctcagaaccaaagatggtacctatgactagcaagtctaagtctgtagagttacctagacccaaaaatccaaaacaagttgagcacaagcaaaaccagaaacaaaccaagcctgtagagaaaaccaagtatgagtgcacctattgtgggaaagctggtcatttggtaggtttctgctttagaaaggctagaaaaaagcgacaagaacgtcttaggactagaagagctgctagagtccctgagaggttcgagtgtgcgtgtcattgtcattcaagtggtgtatctcgctttcctcgccgagatgtgcaccctcgatgtgacctagcagggttggggcaaaacagacatggtcatcttgcatataattatgctcataacactaaagatgcttgtactcctcgcatggattttggagtggggagaagtaattcttggcttgtagactccggttgctcacgccacatgaccggtgaagccaagtggtttacttctctcactcgtgcatccggtgatgagaccatcacttttggggatgcgagcagtggacgcgtgatggctaaaggaacaatcaaggtcaatgacaaattcatgctaaaggatgtcgcgcttgtaagtaagcttaagtacattttgctctctgttttacaactctgtgatgaaaatctggaagttcgtttcaaaaaggacaggtctcgagttcttgatgcttctgaatctcctgtttttgacatttctcgagttggtcgagttttctttgctaacttcgactcttctgctcctggtccttctcgttgtctcattgcctcagagaatagggatttgtttttctggcatcgacgtcttggtcatattggctttgaccacttgtctcgcattagtggtatggatttgattcggggtttgcctaagttgaaagctccgaaagatcttgtgtgtgcaccatgtcgtcatgggaaaatgacatcttcctcccacaagcctgttacaatggttatgacagatggaccgggacaactgcttcacatggatacggttggtcctgctcaggtccagtcagttggggggaagtggtatgtcttggttgtagtggatgatttctctcgctactcttgggtctattttcttgaaacaaaggaggaaacatgtggcttctttcagtctcttgctcgtagtttggctttgcagtttcctggtgctcttcgagccattcgcagtgataatggctctgaattcaaaaattctgcatttgaatctttctgtgattcttctggagtcgaacatcagttttcttcaccatatgtcccacaacagaatggggtggttgagaggaagaaccgcacccttgtggagatggcacgaactatgcttgatgagtttacgactccaagaaagttctggactgaagctatttctactgcttgttttatctccaatcgtgtgtttttgagaactatcttgcacaagacgccatatgagctcagatttggtcgtcgaccaaaagtttcacatctcagggtcttcggttgcaaatgctttgttcttaaatctggaaatttggacaagtttgaatctcgatcattggatggcattttccttggctatgctactcattctcgggcttatcgagtttatgttctttcaactaacaaaattgtggagacttgtgaagtcacttttcatgaggctagcccaggagctagaccagaaatttcaggtgttccagatgaaagcatctttgtggataaggattcagatgatgatgacgatgattccattcctccacctctagacagtacaccaccagtgcaagaaacagcatttgttgcctcttttgagcccaaaaatgtttgtcatgctttatctgatgagaattgggttaatgccatgcatgaagagttagaaaattttgaaagaaacaaagtttggtctttggtagaacctcccttgggttttaatgtgattggaacaaaatgggttttcaaaaacaaactaggtgaagatggttcaattgttcgaaacaaagccagactggttgcacagggtttcacccaagtcgagggcttggattttgaagaaacctttgcaccagttgctagattagaagctattcgaattcttttggcttttgctgcttcaaaaggtttcaagctttttcaaatggatgtgaaaaatgcttttctgaatggtgttattgaggaagaggtctatgtcaaacaacctcctggttttgaaaatccaaaatttccaaatcatgtgttcaaacttgataaagctctttatggtttaaaacaagctcccagagcctggtatgaaagattgaaaacctttttgcttcaaaatggttttgaaatgggggcagttgataaaactctctttactcttcatagtggcattgattttcttcttgtccagatatatgttgatgacatcatatttggtggctcttctcatgcacttgttgcccagttttctgatgtgatgagcagggaattcgaaatgatcatgatgggagagctgactttcttccttggacttcaaatcaagcaaaccaaggaaggaatctttgtacatcagaccaagtactccaaagagctcttgaagaagttcgacatggccgactgcaagccaatcgccactcccatggcaactacttcatcgcttggtcctgatgaggacggtgaagaagttgaccagcgcgagtacagaagcatgatcggctccctcctctacttgactgcgtcaaggccggacatccacttctccgtgtgcctgtgcgcaaggtttcaggcttctccaagaacatcacatcgccaagcagtcaagcgcatcttccgctacatcaagtctacacttaagtacggtatttggtactcctgctcttctgccctttcagttcgagctttttcagatgctaattttgctgggtgtaagattgatcgcaaaagtacttctggcacttgtcattttcttggcacttctttggtctcttggtcctctcgtaagcagtcttctattgctcaatcaacagctgaggctgagtacgtagctgctgctagtacatgtagtcaagttctttggatgatttcaactctaaaagattatggtctgtctttctctggtgttcctttgctttgtgataatataagtgcaatcaatattgcaaaaaatccagttcaacactccaggaccaagcacattgagatacggtaccactttctccgagacaatgttgagaaaggtaccattgtgctagagtttgttgaatctgaaaaacaattggcagacatttttacaaaaccacttgatcgctctcgttttgagttcttgcggagtgagttaggggtgatccacccctatggcttgatttga

SEQ ID NO: 34180 - DNA, 741 bp, Oryza sativa
  Clone ID: PAT_MRT4530_3821C.1
atggagccgagatcgccgcgccggtttccttcccctccggccgccctctctcactcccaacactatttaagcactccccgtgcctccctcctccgtttccgacccttgccgctttctctccccgtcggaatcgagctcgcgccgtcatcctctctctccgccgtcgccgccgagcttcggttcgccgccatcgtcgcctcggacctcctcccgcttcggcatcgcctccttcggcttcgccgcgtccccgtcgacctcgtccaccccttcgtttcgcccgccgaccgccggaacgccgccgtcctcgtcgacccgagccgcgccgccgcctctctccgcttcggtcgccgttcccgtcgtcgccgtcgacccggggtgagccgaggaccgccatttcgtttcccccttccctctcctctctcgggcgccgctccgccgcgccgatggccgccgccggcgaccatcggggcgcgggcgcgccgcctcccgtcggccgtgccggcgaggccgtcttcgggcgcgccccgcggctgccatgtgggacccggccatcagccgcccgcgtcctcgggtgcggctgacgcgtgggacccacggcgccggccggcgcaagccgcgtgcacccggtccaccgtggaccgtgaggctgccgcgtgggccccactcccgtggacccgtcttgctcaatttttcccaaccccagaagaggagttccaggaggatgaaggcttcggtgtctag

SEQ ID NO: 34181 - DNA, 7014 bp, Oryza sativa
  Clone ID: PAT_MRT4530_38220C.1
ttactcatatgtatggacatgttgcgtatcttgtagcctgttcttgttgtttgtctgatctgcacgggtagcatccagcatgacgacgcccaggtaactctgttgacagatgccataggtgatagatcctcttcgaataactgtaatttgtgcagctgaagtgtaaaccgttctgttggctagctgccggcaacgggctctcggctgaagccaccagcacattagtgggcagttttcctcggtgggaatcgggaagttgaaattcactctgctcctgatcaatccccagaccgcagaggtaaagctgcagtcagcaaacaggtgctggcaatcttcctcttctctttggcaaagaacgcagtgatcctcgtggggccaatttcttttagcaagattgtcggccgttaagcattttcctttgagagctagccacatgaagaatcgaaccctggaaggtgctcttgagtgccacaagaggtcgcccacaggacagtcctctttggtcgtgaaaaagaagttgtaagttgccgatgctgagaattgcccgtcgggagagaccttccatcggatagagtcatcaccattctgcagcgtggtgtttctgacctcgtcccagagctgaaagaactcgcatagggccgcagcagacaacgaacccaccagagtccacggccttcctttctgctcaaggctcttggcatgccatttcaacctcaacgcttgcccgaacagatctaggtccatcaccccgaggccgcctttctcaatgggcatacagagcttgcgccaggagaccagacagtgaccaccattgactttttcttggcctttccaaaggaaaccgcgacacttacgctctatgtctttcaccgcccacttaggcaattgaagaactgtcatgaagtgcaccggcaaagcatggtcttcttgctgatgaatccgcgtgctctccgtcttgacgaatccaaacttgccacgttgcccagccgcgtcgtgcgcgttccgtctccttttcctcagcgcgcgctcgccagcgcccaaccagcccgaagccgccacgcgtcccgctgagccgctcccgcgcgcgcttgcaaaatcgcgtgtgggtcccgcgctcctgcacccgcctccgatcgagtcacgcgaaacgggggttgccgcgtacggtttttccgcgcgcgtccttgcgcatgcaagctgcctgcacctcctgagcccatgcgccatgggccgccgtcttgggccgtcgctgcttggacgatgcaggcctgccgagccgagccattcaccatcttgggccacgtggaacggctggattggcttggcctccccggcatccttgatcgctttggacctcaactcctccctgagtctagtcccgatccgccgttgaccaagatcgaccccgatcacccctaactcactccgcaagaactcaaaacgagagcgatcaagtggttttgtaaaaatgtctgccaattgtttttcagattcaacaaattctagcacaatggtacctttctcaacattgtctcggagaaagtggtaccgtatctcaatgtgcttggtcctggagtgttgaactggattttttgcaatattgattgcacttgtattatcacaaagcagaggaacaccagagaaagacagaccataatctttcagagttgaaatcatccaaagaacttgactacatgcactagcagcagctacgtactcagcctcagctgttgattgagcaacagaagactgcttacgagaggaccaagagaccaaagaagtgccaagaaaatgacaagtgccagaagtacttttgcgatcaatcttacacccagcaaaatcagcatctgaaaaagctcgaactgaaagggcagaagagcaggagtaccaaataccgtactcaagtgtagacttgatgtagcggaacatgcgcttgactgcttggcgatgtgatgttcttggagaagcctgaaacctcgcgcacaggcacacggagaagtggatgtccggccttgacgcagtcaggtagaggagggagccgatcatgcttctgtactcgcgctggtcaacttcttcaccgtcctcatcaggaccaagcgatgaagtagttgccatgggagtggcgattggcttgcagtcggccatgtcgaacttcttcaggagctctttggagtacttggtctgatgtacaaagattccttccttggtttgcttgatttgaagtccaaggaagaaagtcagctctcccatcatgctcatttcaaattccctgctcatcacatcagaaaactgggcaacaagtgcatgagaggagccaccaaatatgatgtcatcaacatatatctggacaagaagaaaatcaataccactatgaagagtaaaaagagttttatcaacagcccccatttcaaaaccattttgaagcaaaaaggttttcaatctttcataccaggctctgggagcttgttttaaaccataaagagctttttcaagtttgaacacatgatttggaaattttggattttcaaaaccaggaggttgtttgacatagacctcttcctcaataactccattcagaaaagcacttttcacatccatttgaaaaagcttgaaaccttttgaagcagcaaaagccaaaagaattcgaatagcttctaatctagcaactggtgcaaaagtttcttcaaagtccaagccctcaacttgggtgaaaccctgtgcaaccagtctggctttgtttcgaacaattgaaccatcttcacctagtttgtttttgaaaacccattttgttccaatcacattaaaacccaagggaggttctaccaaagaccaaactttgtttctttcaaaattttctaactcttcatgcatggcattaacccaattctcatcagataaagcatgacaaacatttttgggctcaaaagaggcaacaaaagctgaattgacaagttcataagaccgatttctagttaccctttcacccaggcctccgatcatcgagtcaggcggatgtcggttctggatgtgtcggggagctgttggtcctgatgtgccaccatcaatctcctcagctgctgaagatgatgtagttggtgcatctcctgaaggcgctgtactcgatggagaaccggtttcttgtactggtggtgtactgtctagaggtggagaaatggaatcatcgtcatcatcatctgaatcctcatccacaaggatgctttcatctggaacacctgaaatttctggtctagctcctgggctagcctcatcaaaagtgacttcacaagtctccacaattttgttagttgaaagaacataaactcgataagcccgagaatgagtagcatagccaagaaaaatgccatccacagatcgagattcaaacttgtccaaatttccaggtttaagaacaaagcacttgcaactgaagaccctgagatgtgaaacttttggtcgacgaccaaatctgagctcatatggcgtcttgtgcaagatagttctcaaaaacacacgattggagataaaacaagcagcagaaatagcttcagtccagaactttcttggagtagtaaactcatcaagcatagttcgtgccatctccacaagggtgcggttcttcctctcaaccaccccattctgttgtgggacatatggcgaagaaaactgatgttcgactccagaagaatcacagaaagattcaaatgcagaatttttgaattcagagccattatcactacgaatggctcgaagagcactaggaaactccaaagccaaactacgagcaagagactgaaagaagccaaacgtttcctcttttgattcaagaaaatagacccaagagtagcgagagaaatcatccacaacaaccaagacataccacttccccccaactgactggacctgagcaggaccaaccgtatccatgtgaagcagttgtcccggtccatctgtcataaccattgtaacaggcttgtgggaggaagatgtcattttcccatgacgacatggtgcacacacaagatctttcggagctttcaacttaggcaaaccccgaatcaaatccataccactattgcgagacaagtggtcaaagccaatatgaccaagacgacgatgccagaaaaacaaatccctattctctgaggcaatgaaacaacgagaaggaccaggagcagaagagtcaaagttagcaaagaaaactcgaccaacttgagaaatgttaaaaacaggagattcagaagcatcaagaactcgagacctatcctttttgaaacgaacttctagattttcatcacagagttgtgaaacagagagcaaattgtacttaagcttacttacaagcgcgacatccttcagcatgaatttgtcattgaccttgattgttcctttagccatcatgcgtccactgctcgcatccccaaaagtgatggtctcatcaccggatgcacgagtgagagaagtaaaccacttggcttcaccggtcatgtggcgtgagcaaccggagtccacaagccaagaattacttctccccactccaaaatccatgcgagaagtacaagcatctttagtgttatgagcagaattatatgcaagatgaccatgtctgttttgccccaaccctgctaggtcacgtcgagggtgcacatctcggcgaggaaagcgagatacaccacttgaacgacaatgacacgcacactcgaacctctcagggactctagtagctcttctagtcctaagacgttcttgtcgctcttttctagcctttctaaagcagaaacctaccaaatgaccagctttcccacaataggtgcactcatacttggttttctctacaggcttggtttgtctctggttttgcttgtgctcaacttgttttggatttttgggtctaggtaactctacaggcttagacttgctagtcataggtaccatctttggttctgaggttttgggtgtactagaactagtgtttccaatgaaacctgcagacttgaaggttataggtttttgagctagttctatcatcccatctgtgacacctaaaatctcatgggtacctatcctcaaagactcagcaaaatcatagcctataccttgattgtttatggacactttggattggtctaggatcatgttcaactttttctttccttgagcaaacctctctaaagattgttgtaggtatgaattctctttcttagcagactcaagatcaactttcagagaaatgcatgaagaacaagaatcaatagatttgatagaatcaatgacagttttagcatcttttagttcagtttccaggatagcacaattagcacatgaagaatgaataggttccttagtagcaaaagattctaacaaatcattcttggtcttaagcatggcaacttgttgtcttaattcatcattgtcactagtgagaatgggacaattttcacacctaccaatcctatcatgaacaaatttttcttttagttctttcaattccatctcaagcaaacccatatcaactttcatttcatagcaagtagagcaagcagcactagcactagaaggattcccagctcctaaagcacatgatttcaacttatccttgaggagattaatttcagaaagatatgaagcacaagtagaacaggtatcctcctcaggaatcatggatcgaagcctagcaatttctagcgccattccatcattttcagattttagtttctcaattttatacttagaagacctatacttatcactaatttcaatcatcaagtgtgccattctttctttgcttagttcatcatcaacagagtcattatctgagcaagaatcatcacaaagagaaccatccaaggaagggatatcatcaagacatacctcaggatgctccgatgagtcatccttatcctcaagcgccatgagacacaggttgatgaagtcctcgttgttggcgagacagcacatcccggagaagtccttgtcccccttttcttgatcatcgtcgtcggagtcgatgtcgctaagctgcacctcctcaagagccgccaagaccttgtggatcgccttcttcatcaaatccttcttcccctttcgcccttgtccctcgggcttcttggtcgtcttgtcactcttcttcttcaacttgggacaattcactcttttgtggttaggctctccacactcaaaacacacaaatggttcattggtttttcctctttttctatctctcacatttttgtaagctcttgagaattttctagcaaaaagagcaagatcatcttcagggatcttctctaattgctcctcagtgactgagtgtaaagcggcaagagagaagccaccatacacaaaagctgagtcattagaagaagtactaccagagggatcagctaccaaagccatcgagtgtttgaggcctttccgatggaaaacatccatctcatgggtttttagctttgagtaaagcttgtccatggtaaggtcactcagaggtgcactctctgtgatggaagtaactttcatttcccaaacaccataatcaagacaattcaaaagatggcgagcattatcattatcagaaaattcttttccaacagatctcaacttcgaaataatttctccaaaacgtttgaaataagaatcaatggactctcctgggtgcatctcaaatctttgatattctttatgaaattgattctgacgaaccaattgaatatcattgtttccctcatggaaattgcacagagcagtccacatgtcatgagcggacttgtggtgttgaacacgattaaattcaccagaagaaattccaccaatgattgcatttcttgcacgataattaaaatcaacctgagccatatttgcaggcgtgatgtcagcatcatcgggcacagtgtaaggagatttaaccttattccacacattatgcccttgcgactggaggtaggcctccattcgtgccttccaaatgacaaaattgtgtccatcgaaaacaaatggtttcgcagagtatttttcctccat

SEQ ID NO: 34182 - DNA, 5214 bp, Oryza sativa
  Clone ID: PAT_MRT4530_38221C.1
atgccgggtgacaagattggacataaggttgcacacggtggacgaacaccgtgtgaggaggtcttcgcaacggacttcgcaagggaggccaagccaatccagcccttcctcatggctcaagatgatggatggatcagcaggcagggaggccaggccgagcaggcccaagacaagacgacggcccacggcattggcaccatgcgcgggcaagcgcgggagatcgcgcgaggcacgcgcgcgcagtggacacgcggcggcaaggaattcggcgcgtgcgggcgtggggtccacgctgtttcaagtggctcggaggcgggagttgtactgggacccacgcgcgatttcgcgagcatgcgtgggagcagctcggcgggacacgtggaggctttggactggatgcgcgcagctatggaggaaaaatactctgcgaaaccatttgttttcgatggacacaattttgtcatttggaaggcacgaatggaggcctacctccagtcgcaagggcataatgtgtggaataaggttaaatcaccttacactgtgcccgatgatgctgacatcacgcctgcaaatatggctcaggttgattttaattatcgtgcaagaaatgcaatcattggtggaatttcttctggtgaatttaatcgtgttcaacaccacaagtctgctcatgacatgtggactgctctgtgcaatttccatgagggaaacaatgatattcaattggttcgtcagaatcaatttcataaagaatatcaaagatttgagatgcacccaggagagtccattgattcttatttcaagcgttttggagaaattgtttcgaagttaagatctgttggaaaagagttttctgataatgataatgctcgtcatcttttgaattgtcttgattatggtgtttgggaaatgaaagttacttccatcacagagagtgcacctctgagtgaccttaccatggacaagctttactcaaagctaaaaacccatgagatggatgttttccatcggaaaggcctcaaacactccatggctttggtagctgatccctctggtagtacttcttctaatgactcagcttttgtgtgtggtggcttctctcttgccgctttacactcagtcactgaggagcaattagagaagatccctgaagatgatcttgctctttttgctagaaaattctcaagagcttacaaaaatgtgagaaataaaaagagaggaaaaaccaatgaaccatttgtgtgttttgagtgtggagagcctaaccacataagagtgaattgtcccaagttgaagaagaagagtgacaagacgaccaagaagcccgagggacaagggcgaaaggggaagaatgatttgatgaagaaggcgatccacaaggtcttggcggctcttgaggaggtgcagcttagcgacatcgactccgacgacgatgatcaagaaaagggggacaaggacttctccgggatgtgctgtctcgccaacaacgaggacttcatcaacctgtgtctcatggcacttgaggataaggatgactcatcggagcatcctgaggattttggagtggggagaagtaattcttggcttgtggactccggttgctcacgccacatgaccggtgaagccaagtggtttacttctctcactcgtgcatccggtgatgagaccatcacttttggggatgcgagcagtggacgcgtgatggctaaaggaacaatcaaggtcaatgacaaattcatgctgaaagatgtggcactagtaagtaagcttaagtacaatttgctctctgtttcacaactctgtgatgaaaatctggaagttcgtttcaaaaaggacaggtctcgagttcttgatgcttctgaatctcctgtttttgacatttctcgagttggtcgagttttctttgctaacttcgactcttctgctcccggtccttctcgttgtctcgttgcctcagagaatagggatttgtttttctggcatcgacgtcttggtcatattggctttgaccacttgtctcgcattagtggtatggatttgattcggggtttgcctaagttgaaagctccgaaagatcttgtgtgtgcaccatgtcgtcatgggaaaatgacatcttcctcccacaagcctgttacaatggttatgacagatggaccgggacaactgcttcacatgaatacggttggtcctgctcgggtccagtcagttggggggaagtggtatgtcttggttgttgtggatgatttctctcgctactcttgggtctattttcttgaatcaaaggaggaaacgtttggcttctttcagtctcttgctcgtagtttggctttggagtttcctggtgctcttcgagccattcgcagtgataatggctctgaattcaaaaattctgcatttgaatctttctgtgattcttctggagtcgaacaccagttttcttcgccatatgtcccacaacagaatggggtggttgagaggaagaaccgcacccttgtggagatggcacgaactatgcttgatgagtttacgactccaagaaagttctggactgaagctatttctgctgcttgttttatctccaatcgtgtgtttttgagaactatcttgcacaagacgccatatgagctcagatttggtcgtcgaccaaaagtttcacatctcagggtcttcggttgcaaatgctttgttcttaaatctggaaatttggacaagtttgaatctcgatcattggatggcattttccttggctatgctactcattctcgggcttatcgagtttatgttctttcaactaacaaaattgtggagacttgtgaagtcacttttgatgaggctagcccaggagctagaccagaaatttcaggtgttctagatgaaagcatctttgtggatgaggattcagatgatgatgacgatgattccattcctccacctctagacagtacaccaccagtgcaagaaaccggttctccttcgactacatcaccttcaggagatgcaccaactacatcatcttcagcagctgaggagattgatggtggcacatcaggaccgacagctccccgacacatccagaaccgacatccgcctgactcgatgatcggaggcctgggtgaaagggtaactagaaatcggtcttatgatcttgtcaattcagcgtttgttgcctcttttgagcccaaaaatgtttgtcatgctttatctgatgagaattgggttaatgccatgcatgaagagttagaaaattttgaaagaaacaaagtttggtctttggtagaaccacccttgggttttaatgtgattggaacaaaatgggttttcaaaaacaaactaggtgaagatggttcaattgttcgaaacaaagccagactggttgcacagggtttcacccaagttgagggcttggattttgaagaaacctttgcaccagttgctagattagaagctattcgaattcttttggcttttgctgcttcaaaaggtttcaagctttttcaaatggatgtgaaaagtgcttttctgaatggagttattgaggaagaggtctatgtcaaacaacctcctggttttgaaaatccaaaatttccaaatcatgtgttcaaacttgataaagctctttatggtttaaaacaagctcccagagcctggtatgaaagattgaaaacctttttgcttcaaaatggttttgaaatgggggcagttgataaaactctctttactcttcatagtggcattgattttcttcttgtccagatatatgttgatgacatcatatttggtggctcctctcatgcacttgttgcccagttttctgatgtgatgagcagggaattcgaaatgagcatgatgggagagctgactttcttccttggacttcaaattaagcaaaccaaggaaggaatctttgtacatcagaccaagtactccaaagagctcctgaagaagttcgacatggccgactgcaagccaatcgccactcccatggcaactacttcatcgcttggtcctgatgaggacggtgaagaagttgaccagcgcgagtacagaagcatgatcggctccctcctctacttgactgcgtcaaggccggacatccacttctccgtgtgcctgtgcgcgaggtttcaggcttctccaagaacatcacatcgccaagcagtcaagcgcatctttcgctacatcaagtctacacttgagtacggtatttggtactcctgctcttctgccctttcagttcgagctttttcagatgctgattttgctgggtgtaagattgatcgcaaaagtacttctggcacttgtcattttcttggcacgtctttggtctcttggtcctctcgtaagcagtcttctgttgctcaatcaacagctgaggctgagtacgtagctgctgctagtgcatgtagtcaagttctttggatgatttcaactctgaaagattatggtctgtctttctctggtgttcctctgctttgtgataatacaagtgcaatcaatattgcaaaaaatccagttcaacactccaggaccaagcacattgagatacggtaccactttctccgagacaatgttgagaaaggtaccattgtgctagaatttgttgaatctgaaaaacaattggcagacatttttacaaaaccacttgatcgctctcgttttgagttcttgcggagtgagttagggataactctcaaagctctcaaaacactaaaatttgtgatcggggtcgatcttggtcaacggcggatcgggactagactcagggaggagttgaggtccaaagcgatcaaggatgccggggaggccaagccaatccagcccttcctcatggctcaagatgatggatggatcagcaggcagggaggccaggccgagcaggcccaagacaagacgacggcccacggcattggcaccatgcgcgggcaagcgcgggagatcgcgcgaggcacgcgcgcgcagtggacacgcggcggcaaggaattcggcgcgtgcgggcgtggggtccacgctgtttcaagtggctcggaggcgggagttgtactgggacccacgcgcgatttcgcgagcatgcgtgggagcagctcggcgggacacgtggaggctttggactggatgcgcgcagtggttgcaatagaggttgctatatactccagtgtaaaaatccactatcgttataatgaccgctacaaaagctatttattacctcgtttgtaa

SEQ ID NO: 34183 - DNA, 363 bp, Oryza sativa
  Clone ID: PAT_MRT4530_38222C.1
atggcgcaggcttgcctgttctgtggaaagcctaaggaggatgcaagtgctcatttgcagcaattcctggaaagctatagcacgtataccgtcagaagagtcagactccaactgttgccgttctccctcctcaggagagcagaacagtggttctacatcaaccgtgcaacgttgtctctccttatgaagagactggacaacaatgagaaggatgccaagcagggcaccgttaaggccctggactttaacacaacatgtgaggtctatggcaacaccggtcactctgggatggattgtccaaaaacccgtgagaacgtcatgctcatgaacaacaacaacgggaatcatccacaaggagactaa

SEQ ID NO: 34184 - DNA, 637 bp, Oryza sativa
  Clone ID: PAT_MRT4530_38223C.1
cggacgcgtgggcggacgcgtgggttcctaatacgcaccgtagggtccaccagcaaacctctgttgatccatcagcaagttttacattagttgcatagctgtcagttactatcatgtggcacttatttcttttcctttgtcatttatgtgtaaacatatgctaccgatgttgctgactctcatagtacacggcaatatcaggaggtaatgagagctctttcttatggattttcatttgccacctgatcaaaagctgccattttgtttccatacaaatgtgcatttattcaaagtaacctatatagcaactattcaagtatgttgcttggtaggttgtgaacagaattactcgaagcatagcaggacagaggcataagagggaaaagtcctatcgttttgtctgcatgtctacattgttatctttgattgctgattttggcaaatcatattagtcaaattgttgtttctatatataatagaagcttgaattgaatggatagatatgtcagtctgcatattataaagcttttgatttttctgcttatgcatcaggatagtaatcctttatcctttttccatctcctatttcagatgtagatcaaataggctatcctattagatggttattgagcaagca

SEQ ID NO: 34185 - DNA, 3699 bp, Oryza sativa
  Clone ID: PAT_MRT4530_38224C.1
atggagaaagcggtgataactgccttcgtgaacactgtcatgccgccgctgtttaaggtgctgtcaggcagttgtaagatggtcatgaacgtgatcgatgatagcgactcaatgagacgtaaactagttctgctcgcagcttccatggacgacgacctccggcggacgaagaaccccacggccgccgccaaggtgttcggcgaccagctgcgcgagctgacgcacgacatggaggactgcattgagcgcttcctccaccgcgtgtcctgcgccgagggagcgtcgcgggcgcgccggctggggcgcttcctgctcaccatctgcacacgctaccggttcggggacaagatcaaggcgcttaacaggcgcctcgaggagctgaccaatgaacgcctgtgccagttcgtctacgacaagcccccgccgccgccgccactggcgccggcggcggcacaacaacgcgaacatgttcaactcaaccccgtgggcgtcgagggagccaagggggacatcctcgcgatgctggaggaaagtccggaggagctgagggttatcgccatcgtgggttttggcggctccggcaagacgaccctcgctaaggcagtgttccgctcaactgatgatgatagaatccggggattattggtcgatgacgagcaatatctccaagcccagctcatggactacctcaggggtagaagggcctgcttgctatatttgagcatatttccaaacgatgttccgctcgagaagaaagtgataatcaggcgttggatagctgaaggattcgcaaggagcgaagatgtggacattgatgaccagactattgcacgttgcgacatctgtgccaagacaacggttgtttggttcatgtgggtgcaggtgatcggagtcgatcttggtcaacggcggatcgggactagactcagggaggagttgaggtccaaagcgatcaaggatgccaggccaatccggcctgtccagctcgggagctcggtcggcccaagcacgttgctgactcaagatggtgaaggccaggccgagcagaccctagacatgacgacggcccagctcggctcggcaaatgcacaggcgtgtgcatgcgcgcgcggaggcgggagatcgtacggcacctggaggcgtggcggccttctgttcgtcaaggaagcggagacgcgcgggaacgtggttttcgcgagcgcgcgcagaagcggctcggcgggaggaacggcgacatggcggcttctgacttgtggcgcgcaggcacgaatggaggcctacctccagtcgcaagggcataatgtgtggaataaggttaaatcaccttacactatgcccgatgatgctgacatcacgcctgcaaatgtggctcaagttgattttaattatcgtgcaagaaatgcaatcattggtggaatttcttctggtgaatttaatcgtgttcaacaccaccagtccgctcatgacatgtggactgctctgtgcaatttccatgagggaaacaatgatattcaattggttcgtcagaatcaatttcataaagaatatcaaagatttgagatgcacccaggagagtccattgattcttatttcaagcgttttgaagaaattgtttcgaagttgagatctgttggaaaagaattttctgataatgataatgctcgccatcttttgaattgtcttgattatggtgtttgggaaatgaaagttacttccatcacagagagtgcacctctgagtgaccttaccatggacaagctttactcaaagctaaaaacccatgagatggatgtcttccatcggaaaggcctcaaacactcgatggctttggtagctgatccctctgtcactgaggagcaattagagaagatccctgaagatgatcttgctctttttactagaaaattctcaagagcttacaaaaataagaagagtgacaagacaaccaagaagctcgagggacaagggcgaaaggggaagaaggatttgataaagaaggcgatccacaaggtcttggcggctcttgaggaggtgcagcttagcgacatcgactccgacgacgatgatcaagaaaagggggacaaggacttctccgggatgtactgtctcgccaacaacgaggacttcatcaacctgtgtctcatggcacttgaggataaggatgactcatcggagcatcatgagtttcctggtgctcttcgagccattcgcagtgataatggctctgaattcaaaaattctgcatttgaatctttctgtgattcttctggagtcgaacatcagttttcttcaccatatgtcccacaacagaatggggtggttgagaggaagaaccgcacccttgtggagatggcacgaactatgcttgatgagtttacgactccaagaaagttctggactgaagctatttctactgcttgttttatctccaatcgtgtgtttttgagaactatcttgcacaagacgccatatgagctcagatttggtcgtcgaccaaaagtttcacatctcagggtcttcggttgcaaatgctttgttcttaaatctggaaatttggacaagtttgaatctcgatcattggatggcattttccttggctatgctactcattctcgggcttatcgagtttatgttctttcaactaacaaaattgtggagacttgtgaagtcacttttcatgaggctagcccaggagctagaccagaaatttcaggtgttccagatgaaagcatctttgtggataaggattcagatgatgatgacgatgattccattcctccacctctagacagtacaccaccagaccgacagctccccgacacatctagaaccgacatccgcctgggtgaaaggggtttcacccaagtcgagggcttggattttgaagaaacctttgcaccagttgctagattagaagctattcgaattcttttggcttttgctgcttcaaaaggtttcaagctttttcaaatggatgtgaaaaatgcttttctgaatggtgttattgaggaagaggtctatgtcaaacaacctcctggttttgaaaatccaaaatttccaaatcatgtgttcaaacttgataaagctctttatggtttaaaacaagctcccagagcctggtatgaaagattgaaaacctttttgcttcaaaatggttttgaaatgggggcagttgataaaactctctttactcttcatagtggcattgattttcttcttgtccagatatatgttgatgacatcatatttggtggctcttctcatgcacttgttgcccagttttctgatgtgatgagcagggaattcgaaatgatcatgatgggagagctgactttcttccttggacttcaaatcaagcaaaccaaggaaggaatctttgtacatcagaccaagtactccaaagagctcttgaagaagttcgacatggccgactgcaagccaatcgccactcccatggcaactacttcatcgcttggtcctgatgaggacggtgaagaagttgaccagcgcgagtacagaagcatgatcggctccctcctctacttgactgcgtcaaggccggacatccacttctccgtgtgcctgtgcgcaaggtttcaggcttctccaagaacatcacatcgccaagcagtcaagcgcatcttccgctacatcaagtctacacttaagtacgtcttctattgctcaatcaacagctga

SEQ ID NO: 34186 - DNA, 606 bp, Oryza sativa
  Clone ID: PAT_MRT4530_38225C.1
atggcgcaggcttgcccgttctgtggcaagcctaaggaggatgcaagtgctcatttgcagcaatttgtggaaagccatagcacgtataccgtcagaagaatcagactccaactgttgccgttctccctcctcgagagagcagaacagtggttctacatcaaccgtgcaacggatcacctggatgctgctgctggagggacattcttctcaagaatagtcagatgccaaccaattgagaagatggtctcaaatatgggttggagcgaggaacgactccaaacccgtcaatgcggcatgtacaccgtcaagaggacggagatgctcgccgcccagttggatctccttatgaagagactagacaacaatgagaaggataacaagcagggtaccgttaaagccctggacttccacacgacatgtgaggtctatggcaacaccggtcactctgggatggattgcccgaaaacccatgagaacgttatgctcatgaacaataacaatgggtatcgtccacgaggagaccaaggatggagcatttctccatggggtagatcaagaatggaccaaacacaaggaggtcaaagtaaaaccccgaaggacggatag

SEQ ID NO: 34187 - DNA, 2490 bp, Oryza sativa
  Clone ID: PAT_MRT4530_38226C.1
atggatacggttggtcctgctcgggtccagtcagttggggggaagtggtatgtcttggttgttgtggatgatttctctcgctactcttgggtctattttcttgaatcaaaggaggaaacatttggcttctttcagtctcttgctcgtagtttggctttggagtttcctggtgctcttcgagccattcgcagtgataatggctctgaattcaaaaattctgcatttgaatctttctgtgattcttctggagtcgaacaccagttttcttcgccatatgtcccacaacagaatggggtggttgagaggaagaaccgcacccttgtggagatggcacgaactatgcttgatgagtttacgactccaagaaaattctggactgaagctatttctgctgcttgttttatctccaatcgtgtgtttttgagaactatcttgcacaagacgccatatgagctcagatttggtcgtcgaccaaaagtttcacatctcagggtcttcggttgcaaatgctttgttcttaaatctggaaatttggacaagtttgaatctcgatcattggatggcattttccttggctatgctactcattctcgggcttatcgagtttatgttctttcaaccaacaaaattgtggagacttgtgaagtcacttttgatgaggctagcccaggagctagaccagaaatttcaggtgttccagatgaaagcatctttgtggatgaggattcagatgatgatgacgatgattctattcctccacctctagacagtacaccaccagtgcaagaaaccggttctccttcgactacatcaccttcaggagatgcaccaactacatcatcttcagcagctgaggagattgatggtggcacatcaggaccgacagctccccgacacatccagaaccgacatccgcctgactcgatgatcggaggcctgggtgaaaggggtttcacccaagttgagggcttggactttgaagaaacttttgcaccagttgctagattagaagctattcgaattcttttggcttttgctgcttcaaaaggtttcaagctttttcaaatggatgtgaaaagtgcttttctgaatggagttattgaggaagaggtctatgtcaaacaacctcctggttttgaaaatccaaaatttccaaatcatgtgttcaaacttgaaaaagctctttatggtttaaaacaagctcccagagcctggtatgaaagattgaaaacctttttgcttcaaaatggttttgaaatgggggctgttgataaaactctttttactcttcatagtggtattgattttcttcttgtccagatatatgttgatgacatcatatttggtggctcctctcatgcacttgttgcccagttttctgatgtgatgagcagggaatttgaaatgagcatgatgggagagctgactttcttccttggacttcaaatcaagcaaaccaaggaaggaatctttgtacatcagaccaagtactccaaagagctcctgaagaagttcgacatggccgactgcaagccaatcgccactcccatggcaactacttcatcgcttggtcctgatgaggacggtgaagaagttgaccagcgcgagtacagaagcatgatcggctccctcctctacctgactgcgtcaaggccggacatccacttctccgtgtgcctgtgcgcgaggtttcaggcttctccaagaacatcacatcgccaagcagtcaagcgcatgttccgctacatcaagtctacacttgagtacggtatttggtactcctgctcttctgccctttcagttcgagctttttcagatgctgattttgctgggtgtaagattgatcgcaaaagtacttctggcacttgtcattttcttggcacttctttggtctcttggtcctctcgtaagcagtcttctgttgctcaatcaacagctgaggctgagtacgtagctgctgctagtgcatgtagtcaagttctttggatgatttcaactctgaaagattatggtctgtctttctctggtgttcctctgctttgtgataatacaagtgcaatcaatattgcaaaaaatccagttcaacactccaggaccaagcacattgagatacgggaggccaagccaatccagccgttccacgtggcccaagatggtgaatggctcggctcggcaggcctgcatcgtccaagcagcgacggcccaagacggcggcccatggcgcatgggctcaggaggagcgcgggacccacacgcgattttgcaagcgcgcgcgggagcggctcagcgggacgcgtggcggcttcgggctggttgggcgctggcgagcgcgcgctgaggaaaaggagacggaacgcgcacgacgcggctgggcaacgtggcaagtttggattcgtcaagacggagagcacgcggattcatcagcaagaagaccatgtgagggttcggatcgatgaggtggcaatcatctggagcttttcctttgagtag

SEQ ID NO: 34188 - DNA, 650 bp, Oryza sativa
  unsure (1)..(650): unsure at all n locations
  Clone ID: PAT_MRT4530_38227C.1
gcttcaaaagaaccagactggctcgttaaaaggaaataaattacacgtaatcaccgcaattttcaatttccaagtttctggtacaatggcatttcccttcagcaaataagttcgttgctgtgaggttctaccagacagaagatgggacgattgaagcacacatccaaataattgatcgtgtataccgtacaatttacagggatagcatatcgagctaatgactacaattatcgtggcagattctttaccacagttttaacaattagtggaaccaaactgaagctgcaaatcagcagtttgtctgtcatcgctgcacactaaccagttctgctgggtctgaaccaccagactaccagagtgccatgagttaaagccggtaagagtatttatccaccacgtctgcttctgtctgattgggtttacatccctgttttctttgcttaacaaacatgtattttccccagtgcagcaagggacgtgctcaatcacccagcattctccgttctcaagttgtctgcctcactacactagagctcacaagttttcagctcgcgctgtgactgatctatngactggtattctttggcagatgcaagatgatggaaattcattgaaatcatctcttcctggtctgatatcatccggttctt

SEQ ID NO: 34189 - DNA, 6168 bp, Oryza sativa
  Clone ID: PAT_MRT4530_38228C.1
atgatgtcatcatccccttacacaaggacttgtcatgtggtgcccgccaccaatgtacactgcatatcatggcacatgatggaagtcattagttctcattcaacgactgtgatcggggtcgatcttggtcaacggcggatcgggactagactcagggaggagttgaggtccaaagcgatcaaggatgccggggaggccaagccaatccagcccttcctcgtggctcaagatgatggatggatcagcaggcagggaggccaggccgagcaggcccaagacaagacgacggcccacggcattggcaccatgcgcgggcaagcgcgggagatcgcgcgaggcacgcgcgcgcagtggacacgcggcggcaaggaattcggcgcgtgcgggcgtggggtccacgctgtttcaagtggctcggaggcgggagttgtactgggacccacgcgcgatttcgcgagcatgcgcgggagcagctcggcgggacgcgtggaggctttggactggatgcgcgcagatccggcttctctaatagccgcggttctagcacgaatggaggcctacctccagtcgcaagggcataatgtgtggaataaggttaaatcaccttacactatgcccgatgatgctgacatcacgcctgcaaatatggctcaggttgattttaattatcgtgcaagaaatgcaatcattggtggaatttcttctggtgaatttaatcgtgttcaacaccacaagtctgctcatgacatgtggactgctctgtgcaatttccatgagggaaacaatgatattcaattggttcgtcagaatcaatttcataaagaatatcaaagatttgagatgcacccaggagagtccattgattcttatttcaagcgttttggagaaattgtttcgaagttaagatctgttggaaaagagttttctgataatgataatgctcgtcatcttttgaattgtcttgattatggtgtttgggaaatgaaagttacttccatcacagagagtgctcctctgagtgaccttaccatggacaagctttactcaaagctaaaaacccatgagatggatgttttccatcggaaaggcctcaaacactccatggctttggtagctgatccctctggtagtacttcttctaatgactcagcttttgtgtgtggtggcttctctcttgccgctttacactcagtcactgaggagcaattagagaagatccctgaagatgatcttgctctttttgctagaaaattctcaagagcttacaaaaatgtgagagataaaaagagaggaaaaaccaatgaaccatttgtgtgttttgagtgtggagagcctaaccacataagagtgaattgtcccaagttgaagaagaagagtgacaagacgaccaagaagcccgagggacaagggcgaaaggggaagaagaatttgatgaagaaggcgatccacaaggtcttggcggctcttgaggaggtgcagcttagcgacatcgactccgacgacgatgatcaagaaaagggggacaaggacttctccgggatgtgctgtctcgccaacaacgaggacttcatcaacctgtgtctcatggcacttgaggataaggatgactcatcggagcatcctgaggtatgtcttgatgatatcccttccttggatggttctctttgtgatgatttttgctcagataatgactctgttgatgatgaactaagcaaagaaagaatggcacacttgatgattgaaattagtgacaagtataggtcttctaagtataaaattgagaaactaaaatctgaaaatgatggaatggcgctagaaattgctaggcttagatccatgattcctgaggaggatacctgttctacttgtgcttcatatctttctgaaattaatctcctcaaggataagttgaaatcatgtgctttaggagctgggaattcttctagtgctagtgctgcttgctctacttgctatgaaatgaaagttgatatgggtttgcttgagatggaattgaaagaactaaaagaaaaatttgttcatgataggattggtaggtgtgaaaattgtcccattctcactagtgacaataatgaattaagacaacaagttgccatgcttaggaccaagaatgatttgttagaatcttttgctactaaggaacctattcatttttcatgtgctaattgtgctatcctggaaactgaactaaaagatgctaaaactgtcattgattctatcaaatctattgattcttgttcatcatgcatttctctgaaagttgatcttgagtctgctaagaaagagaactcatacctacaacaatctttagagaggtttgctcaaggaaagaaaaagttgaacatgatcctagaccaatccaaagtgtccataaacaatcaaggtataggctatgattttgctgagtctttgaggataggtacccatgagattttaggtgtcacagatgggatgatagaactagctcaaaaacctataaccttcaagtctgcaggtttcattggaaacattagttctagtacacccaaaacctcagaaccaaagatggtttctgctttagaaaggctagaaaagagcgacaagaacgtcttaggactagaagagctactagagtccctgagaggttcgagtgattttggagtggggagaagtaattcttggcttgtggactccggttgctcacgccacatgaccggtgaagccaagtggtttacttctctcactcgtgcatccggtgatgagaccatcacttttggggatgcgagcattggacgcgtgatggctaaaggaacaatcaaggtcaatgacaaattcatgctgaaagatgtggcactagtaagtaagcttaagtacaatttgctctctgtttcacaactctgtgatgaaaatctggaagttcgtttcaaaaaggacaggtctcgagttcttgatgcttctgaatctcctgtttttgacatttctcgagttggtcgagttttctttgctaacttcgactcttctgctcccggtccttctcgttgtctcattgcctcagagaatagggatttgtttttctggcatcgacgtcttggtcatattggctttgaccacttgtctcgcattagtggtatggatttgattcggggtttgcctaagttgaaagctccgaaagatcttgtgtgtgcaccatgtcgtcatgggaaaatgacatcttcctcccacaagcctgttacaatggttatgacagatggaccgggacaactgcttcacatggatacggttggtcctgctcgggtccagtcagttggggggaagtggtatgtcttggttgttgtggatgatttctctcgctactcttgggtctattttcttgaatcaaaggaggaatcgtttggcttctttcagtctcttgctcgtagtttggctttggagtttcctggtgctcttcgagccattcgcagtgataatggctctgaattcaaaaattctgcatttgaatttttctgtgattcttctggagtcgaacaccagttttcttcgccatatgtcccacaacagaatggggtggttgagaggaagaaccgcacccttgtggagatggcacgaactatgcttgatgagtttacgactccaagaaagttctggactgaagctatttctgctgcttgttttatctccaatcgtgtgtttttgagaactatcttgcacaagacgccatatgagctcagatttggtcgtcgaccaaaagtttcacatcttagggtcttcggttgcaaatgctttgttcttaaatctggaaatttggacaagtttgaatctcgatcattggatggcattttccttggctatgctactcattctcgggcttatcgagtttatgttctttcaactaacaaaattgtggagacttgtgaagtcacttttgatgaggctagcccaggagctagaccagaaatttcaggtgttctagatgaaagcatctttgtggatgaggattcagatgatgatgacgatgattccattcctccacctctagacagtacaccaccagtgcaagaaaccggttctccttcgactacatcaccttcaggagatgcaccaactacatcatcttcagcagctgaggagattgatggtggcacatcaggaccgacagctccccgacacatccagaaccgacatccgcctgactcgatgatcggaggcctgggtgaaagggtaactagaaatcggtcttatgatcttgtcaatttagcgtttgttgcctcttttgagcccaaaaatgtttgtcatgctttatctgatgagaattgggttaatgccatgcatgaagagttagaaaattttgaaagaaacaaagtttggtctttggtagaaccacccttgggttttaatgtgattggaacaaaatgggttttcaaaaacaaactaggtgaagatggttcaattgttcgaaacaaagccagactggttgcacagggtttcacccaagttgagggcttggattttgaagaaacctttgcaccagttgctagattagaagctattcgaattcttttggcttttgctgcttcaaaaggtttcaagctttttcaaatggatgtgaaaagtgcttttctgaatggagttattgaggaagaggtctatgtcaaacaacctcctggttttgaaaatctaaaatttccaaatcatgtgttcaaacttgataaagctctttatggtttaaaacaagctcccagagcctgtggcattgattttcttcttgtcgagatatatgttgatgacatcatatttggtggctcctctcatgcacttgttgcccagttttctgatgtgatgagcagggaattcgaaatgagcatgatgggagagctgactttcttccttggacttcaaattaagcaaaccaaggaaggaatctttgtacatcagaccaagtactccaaagagctcctgaagaagttcgacatggccgactgcaagccaatcgccactcccatggcaactacttcatcgcttggtcctgatgaggacggtgaagaagttgaccagcgcgagtacagaagtatgattggctccctcctctacttgactgcgtcaaggccggacatccacttctctgtgtgcctgtgcgcgaggttccaggcttctccaagaacatcacatcgccaagcagtcaagcgcatctttcgctacatcaagtctacacttgagtacggtatttggtactcctgctcttctgccctttcagttcgagctttttcagatgctgattttgctgggtgtaagattgatcgcaaaagtacttctggcacttgtcattttcttggcacttctttggtctcttggtcctctcgtaagcagtcttctgttgctcaatcaacagctgaggctgagtacgtagctgctgctagtgcatgtagtcaagttctttggatgatttcaactctgaaagattatggtctgtttttctctggtgttcctctgctttgtgataatacaagtgcaatcaatattgcaaaaaatccagttcaacactccaggaccaagcacattgagatacggtaccactttctccgagacaatgttgagaaaggtaccattgtgctagaatttgttgaatctgaaaaacaattggcagacatttttacaaaaccacttgatcgctctcgttttgagttcttgcggagtgagttagggataactctcaaagctctcaaaacactaaaatttgtgatcggggtcgatcttggtcaacggcggatcgggactagactcagggaggagttgaggtccaaagcgatcaaggatgccggggaggccaagccaatccagcccttcctcgtggctcaagatgatggatggatcagcaggcagggaggccaggccgagcaggcccaagacaagacgacggcccacggcattggcaccatgcgcgggcaagcgcgggagatcgcgcgaggcacgcgcgcgcagtggacacgcggcggcaaggaattcggcgctgtttcaagtggctcggaggcgggagttgtactgggacccacgcgcgatttcgcgagcatgcgcgggagcagctcggcgggacgcgtggaggctttggactggatgcgcgcaggtgagcgtgggatccacgcggtggagcgcgcgctctcgcgtgctgaggcgtga

SEQ ID NO: 34190 - DNA, 4713 bp, Oryza sativa
  Clone ID: PAT_MRT4530_38229C.1
atggaggaaaaatactctgcgaaaccatttgttttcgatggacacaattttgtcatttggaaggcacgaatggaggcctacctccagtcgcaagggaataatgtgtggaataaggttaaatctccttacactgtgcccgatgatgatgacatcacgcctgcaaatgtggctcaggttgattttaattatcgtgcaagaaatgcaatcattggtggaatttcttttgaattttctgataatgataatgctcgccatcttttgaattgtcttgattatggtgtttgggaaatgaaagttacttccatcacagatagtgcacctctgagtgaccttaccatggacaagctttactcaaagctaaaaacccatgagatggatgttttccatcggaaaggcctcaaacactcgatggctttggtagctgatccctctggtagtacttcttctaatgactcagcttttgtgtgtggtggcttctctcttgccgctttacactcagtcactgaggagcaattagagaagatccctgaagatgatcttgctctttttgctagaaaattctcaagagcttacaagaatgtgagagagagagaaaggagaaaaaccaatgaaccatttgtgtgttttgagtgtggagagcctaaccacataagagtgaattgtcccaagttgaagaagaagagtgacaagacgaccaagaagcccgagggacaagggcgaaaggggagaaaggatttgatgaagaaggcgatccacaaggtcttggcgactcttgaggaggtgcagcttagcgacatcgactccgatgacgatgatcaagaaaagggggacaaggacttctccaggatgtgctatctcgccaacaacgaggacttcatcaacctgtgtctcatggcacttgaggataaggatgactcatcggagcatcttgaggtatgtcttgatgatatcccttccttggatggttctccttgtgatgattcttgctcagataatgactctgttgatgatgaactaagcaaagaaagaatggcacacttgatgattgaaattagtgacaagtataggtcttctaagtataaaattgagaaactaaaatctgaaaatgatggaatggcgctagaaattgctaggcttcgatccatgattcctgaggaggatacatgttctacttgtgcttcatatctttctgaaattaatctcctcaagaataagttgaaatcatgtgctttaggagctgggaatccttctagtgctagtgctgcttgctctacttgctataaaatgaaagttgatatgggtttgcttgagatggaattgaaagaattaaaagaaaaatttgttcatgataggattggtaggtgtgaaaattgtcccattttcactagtgacaatgatgaattaagacaacaagttgccatgcttaggaccaataatgatttgttagaatcttttgctactaaggaacctgttcattcttcatgtgctaattgtgctatcctggatactgaactaaaagatgctaaaactgtcatttattctatcaaatctattgattcttgttcatcatgcatttctctgaaagttgatcttgagtctgctaagagagagaactcatacctacaacaatctttagagaggtttgctcaaggaaagaaaaagttgaacatgatcctagaccaatccaaagtgtccataaacaatcaaggtttcattggaaacactagttctagttcacccaaaacctcagaaccaaagatggtttctgctttagaaaggctagaaaagagcgacaagaacgtcttaggactagaagagctactagagtccctgagaggttcgagtgattttggagtggggagaagtaattcttggcttgtggactccggttgctcacgccacatgaccagtgaagccaagtggtttacttctctcactcgtgcatccggtgatgagaccatcacttttggggatgcgagcagtggacgcgtgatggctaaaggaacaatcaaggtcaatgacaaattcatgctgaaggatgtcgcgcttgtaagtaagcttaagtacaattcgctctctgtttcacaactctgtgatgaaaatctggaagttcgtttcgaaaaggacaggtctcgagttcttgatgcttctgaatctcctatttttgacatttctcgagttggtcgagttttctttgctaacttcgactcttctgctcctggtccttctcgttgtctcattgcctcagagaatagggatttgtttttctggcatcgtcgtcttggtcatattggctttgactacttgtctcgcattagtggtatggatttgattcggggttcgcctaagttgaaagctccgaaaggtcttatatggaccgggataactgcttcacatggatacggttggtcctgctcgggtccagtcaattggggggaagtgtctcttgctcgtagtttggctttggagtttcctggtgctcttcgagcaattcgcagtgataatggctctgaattcaaaaattctgcatttgaatttttctgtgattcttctggagtcgaacatcagttttcttcgccatatgtcccacaacagaatggggtggttgagaggaagaaccatacccttgtggagatggcacgaactatgcttgatgagtttactactccaagaaagttctggactgaagctatttctgctgcttgttttatctccaatcgtgtgtttttgagaactatcttgcacaagacaccatatgagctcagatttggtcatcgaccaaaagtttcacatctcagggtcttctgttgtaagtgctttgttcttaaacctggaaatttggacaagtttgaatctcgatctgtggatggcatttttcttggctatgctactcattctcgggcttatcgagtgtatgttctttcaactaacaaaattgtggagacttgtgaagtcacttttgaagaggctagcccaagagctagaccggaaatttcaggtgtttcagatgagactatctttgtagaagatgattcagatgaagatgacgatgattccattcctccacctctagacagttcaccaccagtgcaagaaaccggttctccttcgactacatcgccttcaggagatgcaccaactacatcatcttcagcagctgaggagattgatggtggcacatcaggaccgacagctccccgatacatccagaaccgacatccgccagacttgatgatcggaggcctgggtgaaagggtaactagaaatcggtcttatgaacttgtcaatttagcatttgttgcctattttgagcccaaaaatgtttgccatgctttatctgatgagaattgggttaatgccatgcatgaagagttagaaaattttgaaagaaacaaagtttgttggtctttggtagaaccacccttgggttttaatgtgattggaacaaaatgggttttcaaaaacaaaataggtgaagatggttcaattgttcgaaacaaagccagactggttgcacagggtttcacccaagttgagggcttggattttgaagaaacctttgcaccagttgctagattagaagctattcgaattcttttggcttttgctgcttcaaaaggtttcaagctttttcaaatggatgtgaaaagtgcttttctgaatggagttattgaggaagaggtctatgtcaaacaacctcctggttttgaaaatccaaaatttccaaatcatgtgttcaaacttgataaagctctttatggtttaaaacaagctcccagagcctggtatgaaagattgaaaacctttttgcttcaaaatggttttgaaatgggggccattgataaaactctctttactcttcatagtggcattgattttcttcttgtccagatatatgttgatgacatcatatttggtggctcttctcgtgcacttgttgcccagttttctgatgtgatgagtagggaattcgaaatgagcatgatgggagagctgactttcttccttggacttcaaatcaagcaaactaaggaaggaatctttgtacctcagaccaagtactccaaagagctcctgaagaagttcgacatggccgactgcaagccaatcgccactcccatggcaactacttcatcgcttggtcctgatgaggacggtgaagaagttgaccaacgcgagtacagaagcatgatcggctccctcctctacctgaccgcgtcaaggccagacatccacttctccgtgtgcctatgcgcgaggtttcaggcttctccaagagcatcacatcgccaagcagtcaagcgcatcttccgcgcatcttccgctacatcaagtctacacttgagtacgtcttctgttgctcaatcaacagctgaggctgagtacgtagctgctgctagtgcatgtagtcaagttctttggatgattttaactctgaaagattatggtctgtctttctctggtgttcctctgctttgtgataatacaagtgcaatcaatattgcaaaaaatccagttcaacactccaggaccaagcacattgagatacggtaccactttctccgagacaatgttgagaaaggtaccattgtgctagagtttgttgaatctgaaaaacaattggcagacatttttacaaaaccacttgatcgctctcgttttgagttcttgcggagtgagttaggggtgatccacccctatggcttgatttga

SEQ ID NO: 34191 - DNA, 2961 bp, Oryza sativa
  Clone ID: PAT_MRT4530_3822C.1
atggaggaagagaaggaggctgggagctttcttgatgtgcccaaggatatccccattgccgccaccaagtcgctcaccatccgcaccaatggcggattcagcagcagctccgaccggtcaaaccccatctcgccggccatctccatcaccccgcacctctactcgccgtcgccgccgtcctccgcgttcgtgtcggcgctgcagtcgccgtacatctcgcctcgagtcctcgagcccccgactcccgctgcggcgccgccgccaccgcaggaagcggcggcgccgtcgccgccggcgtcctactccaactcggaggacaccgatgcgccgagcgcgtcgcggacgccgccgtccgagcgctacgactccggcggcatcgacccggccaccaaggtctccgactgcggcggcggcgtgcagccgcgcgtgtcgttctcgttccccgtgccgcgggtgtccttcacccgcggctccgtggcgtcgccgtcgtcgaacgccaagctccggagctgcgacgtgtacatcggctaccacggcaatggcagcctcggccggttctgcaagtggctcaagtcggagctcgagctgcagggcatcgcctccttcgtcgccgaccgggccaagtactccgacacgcagagccatgagatcgccgaccggatcatctgctccgtcgcattcggcgtcatagtcgtcaccatgtcaagtttcctcaatccgttcagcctcgaggagatcaggttctttgctcagaagaagaacctggtgcccatactgttcgacaccgagccaccggagatcgcggggcttttcgacggcaaattggaggataaggaggggaaggaagcgttcgaaggattgatgcggtgccatgagtttaagcttgaggcgaatgagaccaattggagaagctgcgtgtccaagacggtcaccttgctgcggtccaagcttggcaggaagagcattgctgagaaggagagtgaagggcctgaaggaatgccttttccgcggaaccggcatttcgttggaagggagaaggagctaagtgaaattgaaggaatgttcttcggttccacggtggatatccaagaggttgattgcccgaggggttccgctgcgaatgacagatcgagtggtgtgtctgatgggtttgctgatgaggagagtgacacagtgaggacatcgaatgccaggtatatcagtttggagatgcgcaagtgcaaggagccgacattggaggcctggattgatccagttatagagttatcatcgggtaaagggagaaatcttcagaagcagagatcaaagcacaggaggtcaaggtttcggtgcaacagcaaaggatatggcagtgccagtgtgctctgcatcactggttcttcaggaattggcaagactgaactggcattggaatttgcttaccggtattcacagcggtacaagatggtcctgtggattggaggtgaagctcggtatttgaggcaaaacatactcaatttatccatgaatttgggattggacatcagtgcagaggctgagaaggagagaggtaggatcaggagctttgaggagcaggagtttgatgcttttcagagggtgaagcgggagctgttccgcgacgtgccgtacttgcttgtcattgataaccttgagagtgagagggattggtgggaaggtaaggatctccatgacttcatccctaggaacactggagcgacacatgtcattgtgaccacacgtttaccacgtgtgattaaccttgaaccgatgcaactgccacagctctcatacaatgatgccatgatattgataaaggggaagcagaagaatgactatccgcctgaggaaatggaagttcttaggaagcttgacgagcggttaggtcggttgagctttggcctgtggatcgttggttcactgctgtctgagctcatgattacaccttccactctgtttgaggctgtcgagagaatatcactgaatgagagtttgttcccacttggtgccaatgacgatggcttctgtcgtaacaattctttcctaataaaggtcctggtcttttgttttgcattgatggaccgagcaaaaggaggaagccttacctcaaagatgattatcgctggttcttggttagctcctgctcctgtgtcgtctacgctattagctgcaacagcgagcaagctaccaatgaaaggcagtatgcacctgttgggtgaatccctgaagactgcatttctatgcggcacacattgctttctagctccacatggtcgaaaagctgaggtggagtcagcactcttacttgtcaagcttgggctggcaagaaaggcaactcgtcatcctggctgctggatccagttccacccaataacacagctctttggcaagattaggggaggtttggcaccaacaactgcagcagtgaacggcgtaatgagggctggtaacccctcagtgtactcggaccacttatgggctagtgcattccttgtgtttggtttcaagtctgaaccaccttctgttcagctcaaggcagtcgacatggtgcatttcataaggaagacggcacttcccttggcaattgactccttcatgacattctcacggtgcggctcggctttagaactgctcaaggtgtgcaccaatgtccttgaggaggtggagaagtcttacgcatcgcggatccaggacctgaaccgtgggtcgctttgctggaggaagaagctgcaaccgaatcaccgtgtcgatgagtttgtctggcaggaagtgacgctgctcaaagcgacactgctcgagacgagggcgaagctgttgctccgaggtgggctgtttgacaccggcgaagaattgtgcaggacttgcattagcatccggactgttatgcttggccatggtcatgcccatacactggctgctcaagagacattggcaaagctggtcagatacaggagtaagatttga

SEQ ID NO: 34192 - DNA, 3742 bp, Oryza sativa
  Clone ID: PAT_MRT4530_38230C.1
gtacaccgtgtgaggaggtcttcgcaacggacttcgcaaggtcaagtgcaagtgccgggttcgcgaacagaatggagaatggaagaggagcttgtatacatgcactggcatgtgcatatgcaagcatggacagtggtgcttcggttgtgcatgcgtgcacatggccgaatgccatgcacgggcgcaagacatgcatgtgtgcatgaggagcttgctagcccattggtgcatgtgagctgtgattggttggcagggaggccaagccaatccagcccttcctcgtggctcaagatgatggatggatcagcaggcagggaggccaggccgagcaggcccaagacaagacgacggcccacggcattggcaccatgcgcgggcaagcgcgggagattgcgcgaggcacgcgcgcgcagtggacacgcggcggcaaggaattcggcgcgtgcgggcgtgggggtccacgctgtttcaagtggctcggaggcggaggttgtactgggacccacgcgcgatttcgcgagcatgcgcgggagcagctcggcgggacgcgtggaggctttggactggatgcgcgcagatccggcttctctaatagctgcggttctagcacgaatggaggcctacctccagtcgcaagggcataatgtgtggaataaggttaaatcaccttacactgtgcccgatgatgctgacatcacgcctgcaaatatggctcaggttgattttaattatcgtgcaagaaatgcaatcattggtggaatttcttctggtgaatttaatcgtgttcaacaccacaagtctgctcatgacatgtggactgctttgtgcaatttccatgagggaaacaatgatattcaattggttcgtcagaatcaatttcataaagaatatcaaagatttgagatgcacccaggagagtccattgattcttatttcaagcgttttggagaaattgtttcaaagttaagatctgttggaaaagagttttctgataatgataatgctcgtcatcttttgaattgtcttgattatggtgtttgggaaatgaaagttacttccatcacagagagtgctcctctgagtgaccttaccatggacaagctttactcaaagctaaaaacccatgagatggatgttttccatcggaaaggcctcaaacactccatggctttggtagctgatccctctggtagtacttcttctaatgactcagcttttgtgtgtggtggcttctctcttgccgctttacactcagtcactgaggagcaattagagaagatccctgaagatgatcttgctctttttgctagaaaattctcaagagcttacaaaaatgtgagagataaaaagagaggaaaaaccaatgaaccatttgtgtgttttgagtgtggagagcctaaccacataagagtgaattgtcccaagttaaagaagaagagtgacaagacgaccaagaagcccgagggacaagggcgaaaggggaagaaggatttgatgaagaaggcgattcacaaggtcttggcggctcttgaggaggtgcagcttagcgacatcgactccgacgacgatgatcaagaaaagggggacaaggacttctccgggatgtgctgtctcgccaacaacgaggacttcatcaacctgtgtctcatggcacttgaggataaggatgactcatcggagcatcctgaggtatgtcttgatgatatcccttccttggatggttctctttgtgatgatttttgctcagataatgactctgttgatgatgaactaagcaaagaaagaatggcacacttgatgattgaaattagtgacaagtataggtcttctaagtataaaattgagaaactaaaatctgaaaatgatggaatggcgctagaaattgctaggcttagatccatgattcctgaggaggatacctgttctacttgtgcttcatatctttctaaaattaatctcctcaaggataagttgaaatcatgtgctttaggagctgggaattcttctagtgctagtgctgcttgctctacttgctatgaaatgaaagttgatatgggtttgcttgagatggaattgaaagaactaaaagaaaaatttgttcatgataggattggtaggtgtgaaaattgtcccattctcactagtgacaataatgaattaagacaacaagttgccatgcttaggaccaagaatgatttgttagaatcttttgctactaaggaacctattcattcttcatgtgctaattgtgctatcctggaaactgaactaaaagatgctaaaactgtcattgattctatcaaatctattgattcttgttcatcatgcatttctctgaaagttgatcttgagtctgctaagaaagagaactcatacctacaacaatctttagagaggtttgctcaaggaaagaaaaagttgaacatgatcctagaccaatccaaagtgtccataaacaatcaaggtataggctatgattttgctgagtctttgaggataggtacccatgagattttaggtgtcacagatgggatgatagaactagctcaaaaacctataaccttcaagtctgcaggtttcattggaaacattagttctagtacacccaaaacctcagaaccaaagatggtttctgctttagaaaggctagaaaagagcgacaagaacgtcttaggactagaagagctactagagtccctgagaggttcgagtgattttggagtggggagaagtaattcttggcttgtggactccggttgctcacgccacatgaccggtgaagccaagtggtttacttctctcactcgtgcatccggtgatgagaccatcacttttggggatgcgagcagtggacgcgtgatggctaaaggaacaatcaaggtcaatgacaaattcatgctgaaagatgtggcactagtaagtaagcttaagtacaatttgctctctgtttcacaactctgtgatgaaaatctggaagttcgtttcaaaaaggacaggtctcgagttcttgatgcttctgaatctcctgtttttgacatttctcgagttggtcgagttttctttgctaacttcgactcttctgctcccggtccttctcgttgtctcattgcctcagagaatagggatttgtttttctggcatcgacgtcttggtcatattggctttgaccacttgtctcgcattagtggtatggatttgattcggggtttgcctaagttgaaagctccgaaagatcttgtgtgtgcaccatgtcgtcatgggaaaatgacatcttcctcccacaagcctgttacaatggttatgacagatggaccgggacaactgcttcacatggatacggttggtcctgctcgggtccagtcagttggggggaagtggtatgtcttggttgttgtggatgatttctctcgctactcttgggtctattttcttgaatcaaaggaggaaacatttggcttcttccagtctcttgctcgtagtttggctttggagtttcctggtgctcttcgagccattcgcagtgataatggctctgaattcaaaaattctgcatttgaatttttctgtgattcttctggagtcgaacaacagttttcttcgccatatgttccacaacagaatggggtggttgagaggaagaaccgcacccttgtggagatggcacgaactatgcttgatgagtttacgactccaagaaagttctggactgaagctatttctgctgcttgttttatctccaatc

SEQ ID NO: 34193 - DNA, 200 bp, Oryza sativa
  Clone ID: PAT_MRT4530_38231C.1
ctgttcggaatttaaaacgctgagtctggtggtgcctaccgagtgagctatactgcctaaaagcgggttgtgcttactgacagtttttctatctggaatcctaaacctgcagactacctatggaaacagacaacacacaggtgtgagcgtctagtcaagacgtgatctgtggctgtctctcttcgactcaactccgcatc

SEQ ID NO: 34194 - DNA, 219 bp, Oryza sativa
  Clone ID: PAT_MRT4530_38232C.1
atgcaccagcagccggcaacatatataaaccatcgccaaaacgcggcctcacttgcacctctccatttcttcacctcctccctgctcgagctctactacagccactcctctgtccagcgcactggctgcctcctctccgcttgctccgccgcggccggctccgactgggcctcagttgagcaagaggacaggaagaccgccgcgccattgatcacctga

SEQ ID NO: 34195 - DNA, 424 bp, Oryza sativa
  Clone ID: PAT_MRT4530_38233C.1
aaaaaaaaaaaaccaacgatttattgggctggtgtttttttaaacacacaaattggccttggagttttttgggcatttataaagtacatatacggggccagcggaaaaacaatgggccgatttgatcgaaatcgataaaaaaataaccgaaaaaaagccgacacacaaaaaaaaatgatcctcccccaaaaacccatgatcggggacacatgccctaacgaggcctgtttgcctacatgaagctgggggagggtaatttgtttttttttgcacccccccctttgattattttttttttaggggaaaaccacccatcgatcccaattgatgaacaacccaaaccaaaacctgatccattgatctattaggcgcccaaaggaaaacccttggtgggggggaaaaccccggccaaaaaaccgggggg

SEQ ID NO: 34196 - DNA, 672 bp, Oryza sativa
  Clone ID: PAT_MRT4530_38234C.1
atgggcaacggcatgtctccgtgcctgtgctccccgcccgtgcacggcgaggaggcggcggcggaggcggcggcggcgaggctggtgttctggggcggggcggcgagccagctggtggcgtccgcggcgacgacggccggcgacgtcatggcggagctccccggccacctcgtctgcgccggcgactcgttcttcatcggcctcccgatcccggcgctgccggccggcgaggagctggcggcggggcggacgtacttcgtgctccccgccgcgcggttctcgtgccagcaggcgctcaccgccgcgtcgctcgcgtcgctgtcgccgtccccggccgcgaaggtgtccctcgccggcggcgcgtcgtcgccgttcgagtacgtgacgggcgacgacggcatggcgctcatcagggtcctcccggagttcatcgagagggcgatcacctgcgtggcccgcgtcgcgggcggcggcaaggcgggcggcgaggcggcggccgacgaccagctgtgcagcacgccggagctgaggaagcactacatgcagctggtgggcgcgcggcagcagcggccgtggtcgccggggctcgagacgatatcggaggccgagaagcggcggcggcggcggtcgccggtgaggctggtcgcgctggcgaaggcggcgtcaagatag

SEQ ID NO: 34197 - DNA, 259 bp, Oryza sativa
  Clone ID: PAT_MRT4530_38235C.1
cgagaattggagcgggactgaaggacttcggtgagcccgttggaccttgtcatctggctgcagctcactctgtgtcgataagaagtccaggcgagaagtcagtgttccgtaaggaagacacgaagagatactgtactgtgattatgtgtgtttagtaggcatctttgttgaccgatgagttcacccatgggtcacatgggtcccctgtaatatctgtttgtatggacctacacaatacttttgttagctacttggcagt

SEQ ID NO: 34198 - DNA, 309 bp, Oryza sativa
  Clone ID: PAT_MRT4530_38236C.1
atggcggtgatggggccttctccatggcggcgcttcctctttggcgcgggggaggtggcgtttgccggtgtcgtcgacaacagggtagtcttcctcctcaagtccgtgcccggcgagatcagagatagcgctttcgtatctcctgatagtattcggagacaccgtaggggaatagccatgcctatccctgaagtcgatatccggcggcgtgtctcggcagataacgttagacttcatttgtcagcctcatgcgggcacccaaagggtttgtctgagtcaatctccgatgtcaaccaaggaagtacatag

SEQ ID NO: 34199 - DNA, 359 bp, Oryza sativa
  unsure (1)..(359): unsure at all n locations
  Clone ID: PAT_MRT4530_38237C.1
aaccattaaaaccacttttttgcagaaacatcctggaggtggtaacctacctgttgtccanagaaggagattgcccgtgccagtggaaactggaggcagaagaggctccatggctcttttgttttgcatgaactcagcttgtgatgctctggatgcagctccaccaacctcatccatccccaagtatccctgatcgatgtgccagtttggaacaacgngaaaatttcacacattgcagatattgctatagagtaaagctcagcattgcccatacctgagcaactattgtatctgtacgatttccttcacaaatatcgtggcccccttttgagctgactttaccatcaaaaaaaaaaaaa

SEQ ID NO: 34200 - DNA, 1215 bp, Oryza sativa
  Clone ID: PAT_MRT4530_38238C.1
cagacaaccaccgcaaattggagggaacggagcagaaggtagcgaaggagccaagaagtcttcagtattccttccttgcaagcatcgttaatggaggggtcaacgagtcaagaccatgtgattgggatcccggtgagcaacaccgcctatggcatagaggagccggacttcgcagcggaggagacgaccacccctgatcatgccggtttcgttgttggttccttccaattcaacaacgatgcgaatagcccgacgacgacgacgacgacaaccgatcgggcgagcaaatatggcaggaagggggacaagattgcacagggcatcaaagaacatgtgaccctcgggccgaagctatcggaaacggtcaaggggaagctcacgctgggcgcccggatcctccaggccggcggcgtggagaaggtgttccggcagtggttctccgtggacaagaacgagaagctgctcagggcgtcgcagtgctacctgtcgacgacggccgggccgatcgccggcatgctgttcgtgtcgacggagcgggtcgcgttccgcagcgaccggccgctggcggtgtccgccccgggcggcgacaaggtgcgcgtcccgtacaaggtgaccatcccgctgcggaaggtgaaggccgccaagccgagcgagaacaagcacaagcccgagcagaagtacatcgaggtcgtcaccaacgacggcttcgagttctggttcatgggcttcgtcagctaccaccgctcgctgcaccacctggagcaggccgtcgcgcaggcgcggcgatgacacgcacgaaccgcgcgcgcgcgccgcacccatgtcgtggcggagctcgctctcgatcggatcggtctcttcgtgtcgtacgcttgtgtgtgtgcgtgcgtgcatctgtgtcactctagcttggtgatgcttagatgggttaggatttgtgtatgcgtagggttgatcgatcacaacatgtcgttgtgtgttgggtcgccatggctggcctgctggtggattgatcgatcggcatgcagttttgcaattgcatccagcaggttagatataggcggcttgattagggcatgcgatggcatgtgatgttttgtggggcgtgtgcggaattgaaattcatgaagaagttggatgagaaatggtttcggctgcaaaaaaaaaaaaaaaaaaaaaaaaaaaaaaaaaaaaaaaaaaaaaaaaaaaaaaaaa

SEQ ID NO: 34201 - DNA, 299 bp, Oryza sativa
  Clone ID: PAT_MRT4530_38239C.1
tggtggactttgatgcaatgcagatactggcaaatgctcttctagacactagctcgatagcagttagggtggctcctacacgtacttgggttgcaaatgaagtgcaagctccgagaatctcaatcttctcgtctagaggaccaagcccatattggccacaattccttaagcctgatgttgcagcgcctggatcaaatatcttggctgctgtgaaagattcatacaagttcaagtcaggaacttcaatggcatgcccacatgtgtcaggtgtaactgcattacttaaagcattgcatcca

SEQ ID NO: 34202 - DNA, 1197 bp, Oryza sativa
  Clone ID: PAT_MRT4530_3823C.1
gggacgacgctcgtcggaacagcgcccggcacatggttgggtactgggcggcggcgctgacgtgcacgaaggcatagtcaggtcgccgccggagccggagagggaggagatcgcgcgcgatctgcttcttcgttacttggcccttgtggatgtcatctatctagtcctgttcctaatggggtggattgggagcatgttgccgctggctggccccgttggctcacacaggtggccaccgaggctgtccgaggctggctgccacggaaatctgactcttttcacaagctgcacaagataggtgaaggtacctacagtagcgtgtataaagcccacgatctagagaacggcaaagttgttgcgcttaagaaagtgcggtttgccaatatggaccctgagagtgtccggttcatggcacgggaaattcatgtcttgaggagacttgatcatccgcatgttgtgaagcttgaaggattagtgacttcacacatgtctagtagcttgtatcttgtattcgaatacatggagcatgatcttgccggacttgcagctacacctggtataaaattcacagagcctcaggtaaagtgttacatgcaacaattactttctggactggaccactgccatagccatggggtattacatcgggatataaagggtgcaaatcttcttcttgacaacaatggcaccctcaaaatagcagattttggtctggctacgttttttaacccaaatcaaaagcagcatttgacaagtcgtgtggtaacactgtggtaccgtcctcctgagctattgcttggtgctaccaattatggtgctgccgttgatctttggagtgccggttgtatccttgcagagttgttgtctggaaggcctatcatgcctggacgaaccgaggttgaacaattgcacaagatatttaaactttgtggttcaccatcagaggaattttgggctagtttgaaactttcacgagctacggtctttaaaccacaacatctgtatcatagatgtgttaacaatgtatacaagggcttctcgtcttcagctttggagcttttggatcagttgcttgctgtagatcctgcaagtagaggaactgctgcttctgccctcgaaagtgaagtaagttttacaaagcctaggtggtgcaacgctccaaggcatgtcagcgcgaaatatctggatggatggggt

SEQ ID NO: 34203 - DNA, 530 bp, Oryza sativa
  Clone ID: PAT_MRT4530_38240C.1
ttgaaaatcacaaaagcccacctcatgggatggcatgcatgggagtttagtatcaccttgcttattctaggagaggaggacctccttattttgttttgctgcgggaaatttagaaaaatccgttgcgtgaaaacggcgtggagttcgaataagttacgcgtgacttatccggttcggttacgcggagtggagatcaagcgacctttctctatataaaccgagccgccgcctccacgcaacacacgtgaaatcaatctagggtttgcctcctactctgtactgcgccgtcgcttgtagactactccattccgctcgccggcatgcagcggcgatcgggatagcatgtctccggaacctctgccttccacgtcctgcaccgggagaaggcggcaataaggtttttgggaagcgcttcgcacgactgctccctattcgttcacgacggctcgtctttctgtttgctcgcgtgatgcacgcctttgtcaacgcccgcaaccgcgagtaattcctgctgtgcaactggtcttccg

SEQ ID NO: 34204 - DNA, 402 bp, Oryza sativa
  Clone ID: PAT_MRT4530_38241C.1
atgagtgcttggtttgatggcgagacccacgcgctgtgctacaaagagggatatgacttgtactcgaggtttatcggcacaaccacgacgaccacatcaccggcggcaccgagcctttctcaaactgaggttttatcatgggactgcaaaatccccctcccagtgactccacagtcattgccatcgtgcaaatgggacatctacgcggggtatcgtcccggcttgctctcgcctctcaccttcgcgtcccagcaaattaacgatgatgatgatgatgaagatgacgagtctacttctttcgttcacaacttgctatgtgcgctgcggcaccagaaatcactgaaacgtcagcctccaatgccaacggatcataccaacgccaagagaagagtttgctcttga

SEQ ID NO: 34205 - DNA, 2076 bp, Oryza sativa
  Clone ID: PAT_MRT4530_38242C.1
atggcccttgccgatcatttacaagcaccctgggaccctggaggcagtaacctggttactctcttgcatgttaggaaggacaggcagcaaccaccaccacgaccactgcaaattgtctttcctattggattatctgtgtaccactgggtgctctcaagcacggggcgcctcgacggcgtgctggccggcacactccgcggctacgtttggtggccgtcgatctgcgacggccatgggggagacgcgcggcactttgagttttggtccttggacttccacaacaacagcagcatcagcgacggcagggactggatccacctctccactgcccgcggcctgccgctctgcccgcccctccgctcgcctgcggcctaccgccgccgctccggcgtgaggatgagggagagccgagaggaagaagagggacagccgagagggacttcttcagctatttatataacggaattatttaaagttgacaccaatagaggactagaagagtgcagagtgcataacgctgagaacaagaccatgttttaccagatgctcgctgccattctccaagcacttcttatagctcagatgattcatgggcaaagcgataaggaagttcttgttcagctcaagaacttcctgcaggtgcaaaacccgataaaccacggcgcttacgtcagctggtcggagtcagaggcctcgccgtgccattggaaaggtgttgggtgtgatgatgccgggcatgtgaattccctcgatctttcgaactcaaacatcgcaggtccattattcagaaacttctcacgcatcatgcggcttacccacctaaacctttcatcaaacagcatcactggtgaactccaggatgatctcaaacaatgccagagtctccagcacctcaacatatccaacaacctcattggtggcatccttgatttgtccagcctgaccaaccttcagacactagacgtatcccaaaatcggtttcagggaaggatagacagaaacttcccgggaatatgcggcaacctcactttcctcagtgtctccagcaacagcttcacaggcaggatagataaactatttgacggctgcccaaagctcaagcatgttgatctcagctggaacggcttcaccggcatggtctggccaggcattgaaaggcttagacagttcaaggccaacaacaacaacctcacagggagaatttctcctggcatgttcacagaagggtgcaaattgcgctcactgaacattgctatcaactcattgcacggtagctttccaagctccattggcaattgctctaacatgaaattcctttcactatgggaaaacagcttttatggatctataccaccaggaattggttcgattgcacggcttgaggagctggtccttgcaagcaacagctttgatggaattattccaatggagctgacaaactgtaccaacctgaaatatttggacatcagtgacaacaattttggtggagaggtgcaggatgtctttgggaaactaacatgcatgaggagtctgttactccaagagaacaactatactggtggcattacctcatccgggattctccagttgccgaatctaattgtgcttgacctatgctacaaccaattctccggtgatttacccagtgaaatcagcagcatgaagaatctcaaggttctcatgcttgctgaaaacaacttctctggtaaaataccaccaacatatggtcagcttctcaggctccaagtattggacttgtccttcaacagtctttctggtgagattccaccagacattggtaacctatcatcacttctccttttgatacttgctgggaaccaaatttcagggaatgttccaagcagtgggcagctctccacctttgatgagcaatcttttctgggagatccactgttgtctttgaatgtaacagcagtggacagcaagaaccgtggtgtaggtgacggcatctggggcgatccccaggccaggcatttcatcgagtaccttgagggcagaatccaggtcaccgatgccaacaagccccttgagcaggaatgcaggatgttgcggtag

SEQ ID NO: 34206 - DNA, 663 bp, Oryza sativa
  Clone ID: PAT_MRT4530_38243C.1
tatagttataaaaaatggggtatgtctcatagcttctgcggatatccgaattattatccgtatccgacggaaactccgataccatattcgtattcgtatccggaagaaaatatccgtattcgtatccgtatccgaattatccgatccgaaagttatctgtattcgttttttgccggagcagatggaaactatccgctccgttttcatccctaatctagacatatatgtgtgtctagattcattaacatttatatgaatgtgagcaatgctagaaagttttataacctgaaacggagaagtaggggtgggcattcggtctaaccgaaaatttctgtctcggtctttggtctttcggtcttttcggtccgaggagactaaccgaattgaccgaacaaaattcggtctttcactacctaggaccgaattgatgaccgaatttctcggtctcggtctcggtcttttcggttcggtctttcggttcggtctttttctgatgctcaggacgacgtcctcagatgcgaaactcaagccgtcatggtggccgaggggaacatcaagttgggcggcgctcgccgtcgtggcgccggccgccgtggcctcacgctgtcgtccggttcccctcctcgtctcacgccgcgcgccgccgtgcgtgcctccgcccat

SEQ ID NO: 34207 - DNA, 150 bp, Oryza sativa
  Clone ID: PAT_MRT4530_38244C.1
atggccattgctgtactcggggcaggagcaggacaaataactccatacactggcatgaacaaaacgcatactgctacaagattctcattccggccaagcagcactgcgactcgcaagaagttccagctaggagttatacagctaaggtga

SEQ ID NO: 34208 - DNA, 545 bp, Oryza sativa
  Clone ID: PAT_MRT4530_38245C.1
aaattcaatatacttgtttcttcaggaggttcgtcatggagagatgcatcaaaatcgtgcattttggaaggaggaggctgtgcttacaaggaaagttgatactaaagattacaagctcttttccattggaacagttgaatcagcagacagagaagtactgcacgtcattgggattctgggcaactggtggatctatcgtgcatcgtatgggaagtgagaggggttggtatagcatctcatattctgaggagcgtttaaccaactagtgtgcaaacatcagaatgttgacagtagataactagaatataggcagtttcattaggcaactatggcactagatattttaaaagcgatggtgttcaatgtaattctaaaataccatcagtgttgaaaacaggtcattctcaagggggttgtactggaaggagtttccacatctgactttgtaagttcatttgaaatatcttattctcttggtccaagaagactgtttcttggatgcatgagttaagctgagagtgaagaaccgtaggtcgttgctcatg

SEQ ID NO: 34209 - DNA, 356 bp, Oryza sativa
  Clone ID: PAT_MRT4530_38246C.1
gctacgcgtgcggctgaattataagaggctctatagtactatattcggtactagaataggaagagagtagagtagaaagagtcggaagaattccggagttgtcggcggcgaccgtggctacggacgtggaggctgtacctacatgcttctctgatgcgcctgaggataggaactggatccaccacctgtacgtgctgctcctgccggagatgtcttgtcccgcgtacacttctgcagacacaacctcatgttccagctgaagctcgtggaggccatcaaagaatctggaaatgcaatttgttttctagaaacacgaccatttagttaataatttaagaaaacttgattttaatttg

SEQ ID NO: 34210 - DNA, 510 bp, Oryza sativa
  unsure (1)..(510): unsure at all n locations
  Clone ID: PAT_MRT4530_38247C.1
cttaaaataaaatatctagttcagataatagttatgtataaatatatactactccactattgttcctgctttagaggtttctgtaactgtaaaagggaataatcagcacgctacagatacaatggcatcgaccataccatctaggacagatacgatggcatcgaccgcaccatctacgacaacaatgtaccatctaggacagatacgatggcatcgaccgcaccatctactacaacaatgacgacggcatctaccacttagaaggccaattaaggcgacgctggactagacagaaatacgatatttgaagaacggaaatgatgagtgttaccagctcccttgaaatgacgggaatgaactacannatctgagttagaatcgagctacaaaaaagttcatagtgagagcaatacgaattgcacattcaagttgtatctagaatcatggagttctctatatgtctatgagatggccactatggcagtatctccagttgttgaaaattgaaac

SEQ ID NO: 34211 - DNA, 591 bp, Oryza sativa
  Clone ID: PAT_MRT4530_38248C.1
atgcacagaaaggaggcaattaaaactgtgtatcgtgaagttggtggtgaatgtaaagatggatcaactattggtattgacatgaattcccataacacatcagttaaggagtgcttgagcaaaacagaggttgtgactaccgactcctgcccagaccgtgtaatcatcccagaccctacacctaagttgaatccagactacagtaaggcagataccaatgatatctacaagcttatccatcttctgtgcctaccagaaatgaagatcttcatggatacgactaggctgcttgcaaagcacacaaatgatctggttggtgagatttgcaattacataaaacatgggaaacttctgcagactgcagttttgctcctggcagctcaagagcatatccggggtagcaaaagaaatgggctggtaaagctcttggtcaatgcattcaaaggcattcaaagctcccgctacgactgccccttgcccagtggactcatacttgacgaatttgggactactgtagctactcatctgcatgctggaaaggaaaagggcactgaatccactgactttgtgccaagtggccttgattcttga

SEQ ID NO: 34212 - DNA, 371 bp, Oryza sativa
  Clone ID: PAT_MRT4530_38249C.1
gcctttttaccggcgccgccgcctcgacgccgttgacgccgtcgaccggcaccggaccgtcgtctatctaccgcaaatatacctgcgcgcgctccctgccactgcacccccaactctgccgaaccgcgcgccacgggctgcaagagggagagggcgacgcgaggaggcccctccaacggacgacgtcatgctctctttctcactcgccgtgctgatgggcgagacagttgcgctctgtgaggtggctctcccccctccaggatcctctccggaggctgccggcacgcttctataacgagtgctagattaccgagagctggtggttcggaagccctaacgttagcttgggtggaattctccgggcgagctct

SEQ ID NO: 34213 - DNA, 1092 bp, Oryza sativa
  Clone ID: PAT_MRT4530_3824C.1
atggccaatagtactcctaagaggaaggtgactgataaggcggatgatccagagatgcaaaaggaaaatccagtgccggaagtgccaccggagattgcattgccggaggcagccatggagatttcaccgccggagacagccatggagattccagtgccggatgtgcccatggagattacagtggcagaaccagaggtgcaatttgtagcatcagtcgggtcagacaaagaagaagtaccaggattggaatgggatggtacaaagccagaaatatttgaagacccttctcctatgaaagaccccgatgtgccacgagtgcttaggagccatgactccaagtccaaagatgagaacaaggagaagttcatagtaaccgtcttcagagggggtaaggaacgtgccaagctcagagatgacaacccccagaaggctgctgaactagccgggccaacatacttcgcaaccgatgattgcccggaaaagtacgaacatgggaaagcactcttgccggaatgggcactgaaagaagcactatgggagatgagaaggatgcaatacatggatgctaagaagaaaaaagaacccatcagcttcttgtatccaactcggatctgccaaacacagcataccgtgatgctagcaccagggtcaaaccagctgaagggcaagaatccaaaagagatagcagaatacaagaagggcttgcacaaggagaaattgattactgtcgcatacgatcattatatctgtttactcatccaccctaaagacggaaccatggtagtcttggatcctctcgattacagtcacaagcaatacaaagaatttctaacaatcttacagtatgcataccaatactataagttcaagggtggagaacagacccgaacacgggagaagctgctattgccaagattagaatgtcgaacaagctttgacgatacaggtatcacaaatgtccagcgtgatctgtgccacttcatccaccatgagtgctgtcatgtcaaaggagatttctttgacccagagggtgccctagcggcaagtgacgaattcaaggatcttcgggagtggaacactgctatgccataa

SEQ ID NO: 34214 - DNA, 192 bp, Oryza sativa
  Clone ID: PAT_MRT4530_38250C.1
atgactctcctcgtgcatgtgccggcgaaggccgaggaggaggtgcaccctagcagtgcccggatggtgatggagcgaggagatgctgggacggccattgtcgttgtcgttgttgtccatggtggcggcttctccagtgaggtcatcacccagggagaagctggtagtggatacgtggtgtatcgctgctga

SEQ ID NO: 34215 - DNA, 1294 bp, Oryza sativa
  Clone ID: PAT_MRT4530_38251C.1
acatatcaacatcctactgattttagtaaagtctcaacctctaccacaaatattacattgagtatttaaagaatcatttgactgtctactaaaacaactcggacaatagatatatactgtacaaatcttatttaatttttcaaacaatttgataactacgtgtttaaaaaagtgaaggacatgtcctgttttggacagacacatgttgcaagcagagcaagtctcctttccactcctttggtcagccgctgttcttcagcttctttatcgggttcaagaagttcttcccctccagcttcttggcgaagaagagcttcagaagttcgtcatggtccatgcttgtataagcagcatcgtcttcatgctccaccatctcgctcagaggacctacaatggcgtttttgcttggagaatggaaggtcgccatcgacagccgctctttcttcccatccacaacaacccggtgctcgacgctcttgtacctcccattagtgaagacctgacgaatgtctcccacgttgacgatgagagcgccctccagaggcctgacgggaagccaagccccgcctctcctgatctgcaggccatccacctcgttcgcttggaggagaatggtcaccagatcagcatcagagtgaggagagatgccgactactttgtccgcctgaccgcacggagggtagtactgcaccctcaccgactggactccacccacccatctctctgcgatcacctccgactccactcccaggttggtcgccatggcagccagaaggccatccgctgtgatcttcacagccgcgcagtatctgtccagtgccattctgaagccggcaggttggtcaggccagaatctgaggttcctgtcctgcaacggctgcgttttcacgtagaggatgtcagcccagtcgagcttctgatcttcagacacaacgaacagctgaccgtagccttccagctgccctggctcctgaacgacctgcttcttggtctccgcaggcagctcgaagaatcccttgatgctggccttcatcccctccaccacatcctctggaacattgtggtttaccagctggaagaagccccagtcctggcaggcaatgtggaggcgagccagctcgtcgccgtcgccgagctgcagcctccagaagtcgacgacggggatctccgcctcgccgccgtcagaagcgaccggctcgtcggcgtccgtggggcggaggtatctgggtggaacatggtcgatgccgatggccgcccgcacgcgtggcacgcttggcaccgggagagacgccat

SEQ ID NO: 34216 - DNA, 501 bp, Oryza sativa
  Clone ID: PAT_MRT4530_38252C.1
atggcatccacctcgccggaaccctccaccgccgccgccgtcgcggagaccggctgttccgtccaaatccgtcgcctggaggcgacagaccacgagaagggattcgtggccctcctctcgcagctctccgcctgcccggacctcaccgcgtccgagttcgccgcgtgcttcgccgacctcgcggccctcggcgacgaccacgtcatcctcgtggccgaggaccccgccgccccggagagtcggatcctcgccacggggtgcctcttcgtggagcgcaagttcctgcgcggcggcgggaaggtggggcacgtggaggacgtcgtggtcgacgccgccgcgcgcggccgcgggctcgggctccgcgtcgtgcgtcgcctcgtggagatcgccaaggaggccggatgctacaaggtcatcctcgactgcacgcccgagctacgcgcgtactatgccaagtgcggattcgtggagaagggggttcagatggcaatctacttctga

SEQ ID NO: 34217 - DNA, 329 bp, Oryza sativa
  Clone ID: PAT_MRT4530_38253C.1
gccagacagcagtgccggcggagacagctagtaaccgcaatctgtagtctggaatctggagttcgattaattttgttagcttggctagctccatttggcagagtcacaactaagactcaaagggaagctgctcccttttgattgatttgtagtttcttagataaaattaattactacattaaatacaaccattcttggctatgcacctgaataagtactcgttagtgctagccagatcgagacaaatgaacttacttatttaagccttctcgaatcaactctggaaggcatataattgtttccatgtctaaaaaaaaaaaaaaaaaaaa

SEQ ID NO: 34218 - DNA, 1322 bp, Oryza sativa
  unsure (1)..(1322): unsure at all n locations
  Clone ID: PAT_MRT4530_38254C.1
tttttttttttttgagggaggtaaaatagacttatttcaaggcataaatgtgacaaacaatgtctgtttttactgcgatttatgcgtgaatgcgtcagccaatgcatgtcctacgatacatgcgtgaatgcatgtgcaacgccaacgcaacgaacgaaacaagagaacgtacggtttcacctcgaattcgcaatgatcatcatattacaacaacttgatttcgatgccatccatggcgacagtctaatcagagctcgaatttttaatagacaggagattaaaaaaccgtacatgtatttactgcatccatagcccctcttccctctcaccacagctcagttgtggcagaccttggcggtgggcatggtgacgcagatctgcgcgtacttcttcttcgcctcgggcgtcccgcgcttcacgtccgactcggcgaacgcggcgctggcgccgccggcgccggcaccgatcgccgacagcgcgacggccgcggccgcgaacatcacggcgcggcggccctcggcgccggcgccgcccctgcacccgcacccctcgccgcagtggtgcgcctcgtgctggcactcggccctgccggcggccgccctcgccaccgccagcgagccgcgccgcggcgcacgcacgccgccgcgcgccccggcgccacggcggagagggacgccatcatggtgagcgacgccacttgctgctgctgctgctgctgcttcttccactgctgcgtgtgatgcggtgagctggggctcggcgcgtacttcttcttcgcgtcgggcgtcccgcgcttcacgtccgactcggcgaacgcggcgctggcgccgccggcgccgccaccacccnagctcaccgcatcacacgcagcagtggaagaagcagcagcagcagcagcagcaatggcgtcgctcaccatgatggcgtccctctccgccgtggcgccggggcgcgcggcggcggcggcgccgcggcgcggctcgctggcggtggcgagggcggccgccggcagggccgagtgccagcacgaggcgcaccactgcggcgaggggtgcgggtgcaggggcggcgccggcgccgagggccgccgcgccgtgatgttcgcggccgcggccgtcgcgctgtcggcgatcggtgccggcgccagcggcgccagcgccgcgttcgccgagtcggacgtgaagcgcgggacgcccgaggcgaagaagaagtacgcgcagatctgcgtcaccatgcccaccgccaagcggggtaggggggactcgagtccccctagcacccacgctgaatcctcccctgctaatgcggtatgggtcccatga

SEQ ID NO: 34219 - DNA, 824 bp, Oryza sativa
  Clone ID: PAT_MRT4530_38255C.1
cccgggctgcaggaattccgcacgtggcacaatttcagtccaagtactagtgcaagatcgatcaagtgtgaggctgggttgagacaatggctgggtttcaccgcctctccctcgccttcctcctgctcgtcgtcgtcgtcgccggcgacctgatgatctccaccgccacctccatggcggtgggtacatcggacgacgacggcccacctatcaagatcagtatgcggtacgccaacgcggaggagtcgcggtggctcgacagctgggcggagaagacgcagtcggccggcggtggcggcggcgacgacttcgaggttcgccgggccaccgacgaggagtcggcgcggctgaaccgcatgcgcgccgacgccgacaggagggcgagggacggcagcggcttcggcttcgacggccacatcgagttcgacgatgaccatccttttggtagagtcgtcgtgacggacttccctccgtcgtccaagccgaacgatgatctgtgaagccagaacaagtcccactcgcgccgaggatgatgagttccagtttccttaggacgacgaattaagctgaataccaacaagcttatggattggaggccggcgggttcattgcaccagagtcttcagtttctagctttggctcttcaagccttagtatcctgggcaagacccaaactatcttcagtttctatcatgtcgtgtcctcttagcttagttaaacccaacctcttaaaggtagtggttttcagtcagtgtaatcggtcttcggtcagttaaaggtgccttttcagtttcagtttgttcaaaaaaaaaaaaaaaaaaaaa

SEQ ID NO: 34220 - DNA, 301 bp, Oryza sativa
  unsure (1)..(301): unsure at all n locations
  Clone ID: PAT_MRT4530_38256C.1
cgnntccgctatgctagctcgattcggtnctactggccacttcacattcttcttggctcgcnttcgctcgatcgattggcttacaangagtttcatggggccactatatcaatccggtcaaggtctcataatgcagagggagccagaatatggcttattggcggcgnnngcggcggcccccgggtctattcatgggcaatcacccgatgctttcgtggcngtnacggcggtcaccgggcgcatggggcggcgtacccgggcttctngccgggagggccatgggntnacctcgcnncttcgt

SEQ ID NO: 34221 - DNA, 297 bp, Oryza sativa
  Clone ID: PAT_MRT4530_38257C.1
cgtttatagaaccttatcgaagctgccgatctcatcactttcttatctaatggcgaaggaacccatgcgcgtgctgggcaccggctccgaatgacatatcgggtatgctcttgtgcccatggttgctaggtgtgtgatgttggttgctgaccaccctgttattctacacatgctggacattccaccagatactgaatctgttaagggccttaagatggagctggttgaggctcgatgtactcttttgaagggaattgacgaagcaactgatgactcggaggcctgcactgacgtgaa

SEQ ID NO: 34222 - DNA, 225 bp, Oryza sativa
  Clone ID: PAT_MRT4530_38258C.1
atggagagaaaaagcttggggaagaatccggttccccgttttaacggccacgggaggccggcgctgttgactagaagtagtatttcttccgagccgcatcggctcctcatcatgaggcgagtggcggagtgggactaccgtggtcaaggtttatgttttgttttggaacaaggtttatgtgaaaaattggtaaggatagtgtcgatccacttcggccgtagttga

SEQ ID NO: 34223 - DNA, 320 bp, Oryza sativa
  Clone ID: PAT_MRT4530_38259C.1
atgatgatggtgcagcaacaggtggaaccacggtcgacggcactggtgctgctgggggcactgttgctggtgcaggtgcaggtgcaggtgccggagttggttcaggaggagggcggggtagggtttgcgaggcactggatgaactcgagctccaacaagaaccgctgcctcgcgtcgttggggtcaggcgccggcattgcctccggctccatcacgcagcaagcacctgcaaagagggccgcggcggcgggcggcgcggcggcggcggcggcgtactcggcgttcccctttgcactggcgctcaggcggcgagggcaaaa

SEQ ID NO: 34224 - DNA, 1798 bp, Oryza sativa
  Clone ID: PAT_MRT4530_3825C.1
tcatccaccgccacaggctcctccaccgccaccggtctctgccaccgccaccggctcctccaccgcgagcgcggccgtcggtggcccctccaccgccgccagcccctccaccgccgtcggccacccctccaccggcgccggccgtcggcccctccaccgctgtcggccacccctccgctcgcggccgaacggcttcatcggccgatcgtcgtccacgagcgaagacttcctcggccgaacgacgtcttcggccggtcgtcgtccacggccgaacctcgtcgtcggccgttcgtcgtccacggacgacgccggtcgtcgtccacggccgaacctcgtcgccagcccttcccgactgcagatggtgtatccgtacttggggatgcggtcgatcttgtaattctctccgaggcctcctaagaggaaggtgactgataaggcggatgatctagagatgcaaaaggaaaatccagtgctggaagtgccaccggatattgcattgccggaggcagccatggagattgcaccgccggagacagccatggagatttcagtgccggatgtgcccatggagattacagtggcagaaccagaggtggaatttgtggcatcggtcgggtcagacaaagaagaagtaccaggattggaatgggacggtacagagccagagatatttgaagacccttctcctgcgaaagaccccgaggtgccacgagtgcttaggagccacgactccaagtccaaagatgcgagcaaggagaagttcatgctaaccgtcttcagagggggtaaggaacgtgccaagctcagagatgacgacccccagaaggcttctgaactagccgggccaacatacttcgcaaccgatgattgcccggaaaagtacgaacatgggaaagcactcttgccggaatgggcactgaaagaagcaccatgggagatgagaaggttacataacttctacatggaggccagcaagaaaggcttgggcaatataacagctcgatcaccggcagattgtttcggcgaagaaggttacgtatggctagatttctcatatctctacgccatatatcgtcgggataagatggatgtcaactacgtcggtgtttggtgcatgatgcaatacatggatgctaagaagaaaaaagaacccatcgacttcttggatccaactcggatctgccaaacacagcataccgtgacgctagcaccagggtcagaccagctgaagggcaagaatctgaaagagatagcagaatacaagaagggcttgcacaaggagaaattgattactgtcgcacagtacattggacgagccttcttgcactttcaaaataagagagtcgtcatggccgcttataattttaacgatcattatatctgtttactcatccaccctaaagacggaaccgtggtagtcttggatcctctcgattacaatcacaagcaatacaaagaatttctaacaatcttacagtatgcataccaatactacaagttcaagagtgaagaacagacccgaacacgggagaagctgctattacgtacctattggccgtgtcacaagcaaccgcaaggaacggtcctttgcggatattatgcgtgcgaattccttattaacgcggaggatttgccaagattagaatgtcgaacaagctttgacgatacaggtatcacaaatgtgcagcgtgatctgtgccacttcatccaccatgagtgctctcatgtcaaaggagatttcttcgacccagagggtgccctagcggcaagtgacgaattcaaggatctttgggagtag

SEQ ID NO: 34225 - DNA, 244 bp, Oryza sativa
  unsure (1)..(244): unsure at all n locations
  Clone ID: PAT_MRT4530_38260C.1
aagaaatgcctccctttgtgccccatgcatgcaagtaatcttntncttggcaagattactcttcaagatattnactgtactcgatttgttgatgtggagtaaaacacacttgcataatacctctngggaacacatgtatcatgcatttatnngtggttctngccaagtgcatctngtgttgattgcccttggtggagtgcgtcatggttagnnccattacagtcctgtnatgtagtagaagaaa

SEQ ID NO: 34226 - DNA, 314 bp, Oryza sativa
  Clone ID: PAT_MRT4530_38261C.1
gcagcatcagtaatccgtggttattattattaattgctcacatcacatccggtggctcatgatccagccaacatatatatgtactccaactataaatgggagtagatgagattggtacctgcagtgcaggtatgtgtgtgtgtatatagacgcgagcaaatgagctttatatatagatggatgaatgatgatcatggcatgccggcggcgtgatcgtgatcgtgatcgtgatcgatggcgaggtgagtggaggaggaggaggagggcctcttctggtccttgttcttccggcctcccccgcccttcctgccccc

SEQ ID NO: 34227 - DNA, 3382 bp, Oryza sativa
  Clone ID: PAT_MRT4530_38262C.1
atggatctgcagagcctcgccgtcgtgctgcgcgcggcgctcagccacgtccccgaggagcggaaggccgccgaggagagcctcaaccagtttcaatacgcaccacaacatctggttaggttgttacagattattgtcgatgggagctgtgatatggctgtacgacaggttgcaagtattcatttcaagaactttgttgcaaagaactggtctccaaatgatcctgaggaatctcaaaagatttcagaaagtgacaaattgatggtccgcgagaatatactgggttttattgttcaagtaccccctttactaagagcacagcttggtgaaagtatcaaaactataatacattcagactatcctgagcagtggccagttctccttcattgggttacacacaatctggaatcagaaaatcaaatttttggagctttatatgtgctaagggttctttccaggaaatatgagttcaaatctgaggaggagaggatccctttatatcacattgttgaggagacctttcctcgcttgctaagtatctttagcaaacttgttcagattgtcaaccctccaattgaagtagctgacctgatcaagctaatatgcaaaatattctggtcttcaatttatttggagattccgaagcagctctttgacccaaatgtcttcaatgcatggatgagtttgtttataaacttgttggaaagaccagttccagtggaaggccaaccattggatcctgatgtgaggaaatcttggggctggtggaaagttaagaaatggacaattcatatattgaatcgtctatacacccgatttggtgatatgaaactacagaaaccagagagtaaagcttttgcacaaatgtttcaaaagaactatgctggaagaattttgggctgccacttgcagattctgaatgcagttcgaactggtgactatttgccagacagggttatcaatcttgttcttcaatacctaaccaacagtgttacaaagaacagtatgtatcagttgatgcagcctcaaatcgacatcattctgttcgagataatttttccgctcatgtgtttcaatgacaatgatcaaaagttatgggatgaagatcctcatgaatatgttcggaagggatatgatatcattgaagatttgtacagtcctcgaacagctgctatggattttgtgagtgaattggtaagaaaacgaggaaaaagcaatctccaaaagtttatccatttcattgtggatatttttaggagatatgatgaggcatctattgaaatcaagccatatcgccaaaaagatggagcacttcttgctattgggacattatgtgataagctgaagcaaacagatccatataaagctgagttggagcgtatgctggtccagcatgtcttccctgagtttaatagtcatgttggacacctgcgtgccaagtctaaaaattgcaactttgagggctctgctgtaatatatttgaaacctgataaattatattctcctgaaaatctcaacgagatacgacctatactccctcaactccttgatgaattttttaaactgatgaatgaagttgagaatgaggatcttgttttcactcttgaaaccatcgttgataaatttggtgaagagatggcaccatatgcactggggttgtgccagaatttggctgctgccttctggagatgcatggctagtcaagaagctgatgatgaagctgatgattctggtgctttggcagctgttggttgtttacgagccataagcacaatccttgagtctgttagcagtctcccacacctttttattcaaattgagccaactctgttgccaataatgcgcaggatgttgacttctgatggtcaagatgtttatgaggaagttctagaaattgtctcatatatgactttttttctcaccatcaaggtcgttggacatgtggagcctgtggccgttgatgatggaggctctaaatgattgggcaatagacttctttgagaatattcttgttccattggacaactatgtttcccggggatcggaccattttcttgcctgcaaaaacccagattatcagcaaagcttgtggagtgcactatcatctattatgatggatcaaaacatggaagattcagatattgagcctgctcccaagctcattgaggtggtttttcaaaactgcaaaggcaatgtggatcaatgggttgagccttacctcagtcttacaattgatcgattgcgtcgagcacacaaaccatatttgaaatgtctccttgttcaagtgaacaagtcaaaaagagtggtgtacgagccaattttaagagaatctaagaaacaagatgatgctgatggtgatgatatggatggttttgatgctgatgaagatgaagatgatgatgaggttgaatctgataaggagatgggacttgatgaagaagatgctgatgaagtaaacagtcttcatcttcagaaattagctgctgaggccagaggcttccagccagctgatgcgtccgatgactctgatgacgatttcagtgatgatgaggagctgcaatcaccaatagatgaggttgacccgttcattttgtttgttgaaactgtccaaggcttgcaagcatctgatcctatcaggttccagagcctcatgcaaactcttgattttcgttatcaggcccttgctagtggcatagctcaacatgctgaggaaagaagagttgagattgagaaagagaagttggagaaagcaaatgcacaatgattagtcataaagttctttgatattattgccatttcaccgggttgtggaagtggtgggccatcttgtgatttggcgcgaccacaggcaatcaattttggagccttagtctgccatttaggcaggaaaattttaggctcgcaaaattttatacttgcgagagttgaaaccggtgatagagccttcttggatagtctcttcaccggaagtcattttcctagtggcccatcggtcggtggcttggattgtgcaagcgtgacactgggaagtttctccaatttgagggcactagcttgtcatgctgtttgggccactaatatattttttttgctgggggcttagcatttgttggagagccccccactggtggcggggtgcatctccgtatcacagtttgtagggcagtttacatttagactgtagaatgtatatggttttgttcttgtctagatcttaccgtgagtttccattggtgggctgggatatacggttacgttttgtttttggcaaaatgtatcttggttctctttttttttgtggaaatttattttagaaggcaagcaatttcctggaatttttttgccccccacaaaaaaaaaacacacaactggctttgacaat

SEQ ID NO: 34228 - DNA, 440 bp, Oryza sativa
  unsure (1)..(440): unsure at all n locations
  Clone ID: PAT_MRT4530_38263C.1
acggcacgaggcaaaaccagtgctgggaaaatactacaaagagccagagaaatcagctcccctcccattccacttacttggtgtgctagcaaagagcttaaacagcgaccactatgttagtgacaccggagacgtagtgtactaccaaactgacttgaaaactagttcttctgcacaaagctcggattgacagaacattagtctctagcttatttttcgatttctcaggagcctgggcttaacatctgaccagcctcctgggcgttgagcctagaatttcaaagcattatcattgtaaaggagcatacatgtgtaattctttcgaatgattgaagacggagatcacctctgatgtaacaaacatgtgattctttcgacaagatatataatacagtaaagagcgagaaaaattgcttactaaaaaaaaaaaaananaaaaa

SEQ ID NO: 34229 - DNA, 460 bp, Oryza sativa
  Clone ID: PAT_MRT4530_38264C.1
acacaaataccatatttataggccaaatggagaacagagctcttgcacaatcttccagatagcggatgcacaatggtattgtccaataaatacgatagcgcatgcacaggggtattgtgcttctatccaatagatacacgggcacacaaaaatggaaagaaagtaaaattccgtgtgccaccaactcagatgtttacatcagcctgatcatgcatggtcaggctttaaacatcacagtactgggcatgcaaaactacatatcgcttgtgtacagattcaccttcataagggatattttccatgttgcaggagaaaaaaattgagactgaagctttagttgtgctcccagtagcccattatgacctgggatattgtttcatcccatctttctaagggacaagcttaggcaccgcaggaggggttattcaagcccagactttctgctgaattcattgggcaa

SEQ ID NO: 34230 - DNA, 349 bp, Oryza sativa
  unsure (1)..(349): unsure at all n locations
  Clone ID: PAT_MRT4530_38265C.1
acgcatntctnccagtcatntgtgngatgttgacgggggaaatacgttnnnaggaaaggttgggggtgggatcagacctgcngantttgcaaagaaagggacactanaaagggggaaacccaggcangtcgacaaacctaaggaaanatatgcacattgtcgcntgcttggganaancccaaaaacccgaccaacatcttccccccaattgtttccgcccnnaatgaaacttcccaaattggttacaatccaaagacatntttttactcntgcttagaatncatagaatggtgttgttngccccccacaaatttnnaacnatnttntgttgtncccnttttgnccntat

SEQ ID NO: 34231 - DNA, 2541 bp, Oryza sativa
  Clone ID: PAT_MRT4530_38266C.1
atgtcgacttccgccaacccatctgccgtgccatcggccgagtacgcagagcatctttccattctggttgcagtccccagtttgtttcacgatcaccagtattttctcggtccgattggcagtctcgacccctatgagttcattagtgctgagaccaatatgatcccttttagactggccaacccgaacctaaatcacttgaaaaacaccttcaaatcctggccttcacttgagaaaagcaatcccgagaaaagttggcctgtgtggtacaagcgagtatcggctagcaagcaggctcactgggacgaaattggaatcggccaggcacttgcccttactctagctaattcggctaaggatgagccactgatggccgctgcagcctatttttggtccaatactctcaatgctttcctcttcatccaagggccaatgataccaactctgctagatgtcaccatgatcattggcttagatgtgacttcatcagccaacccaataagcttaaacacgaagaatacctttgaattcaaaagcaagagcattggagactggtcgggttacattgcagcttgtggccccacaaccaactggcagttcttagccgaagccctagagacaaaaaggcaatttcctttaggcaaaatcctcctcggctacttgtatcagatgctgaacaacgcatcagctaagatagctgtcggctcagtcgtcggtgcaggtggaccacggtggctactgcagacttggttaaacttggtagccatgaaagctatcaatcggccagctgtgacagttgttgaattccctagattagagccgatcacagacaatgatggagaagagcgtacccactgcaggtgtatgtcctatggggagtatgcatccacaccagccaatgctggagcaaagttatcggctgagtttctgaaggactggttcttcagtttctatgatggatttcagaagaatgcccgagtttggtttccatatgcagactcgacggatttagatctgctggcagagttcagatttgaagacatcaaccatgagaaatatcaaaagtctagagaaatcttcgctgccaccattagcccctgcattcttcctgttagtatccatcaagggagaaatattcaggtttcttatgagttctaccatccgataagctcggccaggcaatttggaatgggccaactcccaatcggcttgtactttgccgataagacacaatgtagaggagatatttcttcaagcttgatgatggatcggctgctcaacatctcaagacctcccttgggcagcattgagaacatagagctagcaagttttaggagtagggcctttgatagatggtggagtgaatggaaactacatctattccatcaaccagcttccatgtatatgacagacctatttccggatgtcatccctcagacaacagaatcttctcctcctcgtaaaagcaatagggacaaggacatagaatatgctctaggcctcataccagacagaggtggaccatcaaccccaatcatcggctaccatgcccccaagacctcaagtctactccaagggctaataagagaaccgggccgatgctggcaagaagagaaataccaagatccatctatcgaacaagccctggatgaagaggaaattggagaagatgttgatcaagctgcagccgagctaagtgacctaggagaaaaaacaccatcggctccacctaaaaagacgcctccaactcctgcagctccaactcactttacaaggaagaagaaaatcgcttcaaagaagacatcagcaaaagcatcatctaaaccagttccatcgcctactcctcctccttcaccccctgtgcagccgatgtcaagcggccgtactccaatggtcatgggcagccatcatattgaagaagaacaacaaccagccgctcctgctatcccagtcttagccgatctattctcttttgacatcaaggactacttcgacgaggtggaagaagacaccaccagcagatccctagctcctctatatgaagatgttagaagaagtctcgaagacatttgtcatcgtctagaggcatcattagacagcttggtgaccgactgcggttctattcgggcaagattcaaaacaatccaaacctcaatcccatatgacctatcaaacgtccttaccccagctatataccttgaacaacatcaactcaagctagagaaagcaagacaaagactagctgatcggcgagagaagaaagacatagaggcaacaatccaagccaatcggcagcttgtacatgctgaaaaaatcaagctggatcatcttgccaaagagccaatcaaatctaccattgaccaactaaaatctgagaagattgagctcttagctcgccttgaagaatgcaatgctaagcttgctatggaagaacagaagttagccgatctcccgagggcaattgaagaacaaaaatcgaagttaagatcagctaccaagaacgtagctgatttgaccaagtcccttaaagttattacttga

SEQ ID NO: 34232 - DNA, 405 bp, Oryza sativa
  Clone ID: PAT_MRT4530_38267C.1
ttagcaatagccatggaaaaaaattgaaaaaaaaaaaggccgccaccgccgacggatccaccctcagacgacgccgacgctgtcggcgccgtcaccgtcgaggccgacggggagagggagagggagggagggggagggacggccgtctctgccgcaccccgccgtcgttgcgccgtgtcggcgagacgggaaggagagccactgccgccaccgccgctagcgtggggaaggtcgccaccgccgccacagctagcgtgggggaagtgcgccgtctctgccacaccccgccgtcgccgcgccgtgccagcgagaagggagggagaagggcagggaagcggcgccggtggtgggagaggcggccagctggggggaggggagaggcgggagatggggagagggagcggc

SEQ ID NO: 34233 - DNA, 294 bp, Oryza sativa
  Clone ID: PAT_MRT4530_38268C.1
atggccagttcagatatgctgggtaataagaatgataagccatcaggaccattggaaatgctccccaagctcaacttaagcatgggggactcctgctccagtgagcccacctatgagccaccagtggaagagaagctagctgctgaagctgtgaagatatcaggagaagagaagatgctgatcaaagccgacaaggagtatcctactcctccagttagccctcctaggagctttggcattggggtttgtgggtatgacctcaatgaaacgccagaagagattgatgagccctaa

SEQ ID NO: 34234 - DNA, 461 bp, Oryza sativa
  Clone ID: PAT_MRT4530_38269C.1
gggggtgggggctttttttttggaaaaaaaaaaatggaaaaagccttaattaaccccatataaaaaagggtttacttctttttttggggaggaacccaagggggttataaaccaaaaaccccccattaaaattttttgaaaaacgggaaaaaaaaaagggggttttggacctcggttcaaaattttccccaaaaatcttcccgaacttttgggagccgggaggttaaaaacctttggccctgtgaaattttaacaagggggaaaaaaaatttggggacccaacgggggcccaaaacccatttggcccctgggcccccaaaaaagaaaaaggggcccaaaactttttccccaaaaaaaaaaggcccgaccccctttaaaaatctcccctgggggaaaaagaaaccccccccccccgaaggaaaaattggggaaaacccctaaaaaaaaagggcccccccccc

SEQ ID NO: 34235 - DNA, 123 bp, Oryza sativa
  Clone ID: PAT_MRT4530_3826C.1
tcatccgaaaaccaccctaaatgtcaaaaccgcgatgaggacccacctgtcagccaccctgccaaagccggaggcctgctgggccggcccaggttcggccgaaccctagcggcgtccagtcag

SEQ ID NO: 34236 - DNA, 216 bp, Oryza sativa
  Clone ID: PAT_MRT4530_38270C.1
atgggtgagctagagaaacggggccccaccatctctttcctccatgtgtgcgtggcccccgccgggcgcgggcaggaggacgacaggcagtgcttcgtcacaatcaacacgctcaccatggccatcgtgttgtacctcctcgttggcgacctcatcggtgtcggcgttgtcaataatggcagggttgtctcgaacaccttcgtgggcatgctccta

SEQ ID NO: 34237 - DNA, 343 bp, Oryza sativa
  Clone ID: PAT_MRT4530_38271C.1
tcgtctagatcgcgagcggccgcccagaacaaaataactttattttttttattaatttaagaacgaagttccgtaaatttctcattacatcaagatggatgatcaatatgttacatcgaacaacaaaatgttttaattgaactttctcgccggtagcttctttctttaaaggaactgtaacacccggagcaaaaaggcttttacttatatctatctacccgagcaaaaagggcacgatatatgtacacctagttgatcaattctggcgattaaatggactattaacctctggctattagagggggctttagacttttctacgagggatttgtgggggggtttt

SEQ ID NO: 34238 - DNA, 168 bp, Oryza sativa
  Clone ID: PAT_MRT4530_38272C.1
atgacggttctgtccaccatccattgtgatcccaaggatagcttcccgctattgagtcgtcatggttttctgaggacgtccacattcccgcccctcaggaatcctaccgatggcgacaccactgtagacacccgcctcgcggtcctaccaatggctgccccaccgtag

SEQ ID NO: 34239 - DNA, 318 bp, Oryza sativa
  Clone ID: PAT_MRT4530_38273C.1
atgctgcacggtcgtgagcaggggccaaggcaggcacgacgagtcaccgctctgctgcccccatctggaaagagagaaggagagaggggcttacatgtggggctccgcgacgtggacggcagccacctgttactagtcgatgtcgcggcagcaggacccactcgcctcgccaatgtcgtgcccagggtgctcatccgctcgccaacaccaggtgacgaatcctaccgggtttggttcaaccggggacccaagtctgggatagatggcgaggggcaggggcactccgagggagtatcacttattcacgactggaagtag

SEQ ID NO: 34240 - DNA, 1434 bp, Oryza sativa
  Clone ID: PAT_MRT4530_38274C.1
atggcgtccaagaacagctgcgcctgccacggcgtcgtcgtcaccctggcctcgtgcctcctcctcgtcgccgccgccgtctccgtctctgtcctcgccgcgcacgtcgccgtcggccgcgtctggtctcctgccggcgccgccgccgccgccggccatcaccattcactctcaccggcttgggtgccatcaccgtcatcacgccatgctcatcatgccagggaactcgtgaaccgccgagttcaggtcgggaggatggaggccgggctggtccaggcgcgggtgtccatccggcgagccagccgcacgcgcagctgcacgccggacgacggcggcgggttcatccccaggggcgccgtgtaccgcgacgcctacgccttccaccagagttacattgagatggagaagaggttcaaggtgtggacgtacagagagggcgagccgccggtcgtgcaaaagggcggcgccgccttcgccggcaacgacggcatagagggccacctcatcgccgagctggacagcagcggcggcggcggccggcaccgggcacgccaccccggcgaggcgcacgccttcttcctccccatcagcgtcgccagcatcgccggctacgtctaccgccgcgacatgatcgacttctgggacccccagctccggctcgtcgccggctacgtcgacggcctcgccgccatgtaccccttctggaatcgcagccgcggcgccgatcacttcctcgtctcctgccaccaatgggccccgatcctgtccgctgccaaggcggagctacgcggcaacgccatccgcgtcatgtgcgacgccgacatgtcggacggcttcgaccccgccacggacgtcgcgctgccgccggtggtcgccagcgcccgcgcgacgccgccgcagggccgcgtggcttcggaacgcacggtgctcgcgttcttcgccgccggcggtggcggcggcggcgccgtgagggaggcgctgctggcgcggtgggaggggcgggatgaccgggtggtggtgtacggtcgcctcccggcgggtgtggaccacggcgagctcatgcgcagggcgcggttctgcctgtgcccgtgcggcggcggcgagggcgcggccgcggcgagccgccgcgtcgtggaggcgatcaccgccgggtgcgtgccggtgctcgtcgacgacggcggctactcgccgccgttcagcgacgtgctggactgggcacggttctccgtcgccgtccccgcggaacgcgtcggcgagatcaaggacatcctcggcggcgtctcggaccgccgctacggcgtgctccgccgccgcgtgctgcgcgtccggcgccacttccggctgaaccggccgccggccaagcggttcgacgtggtcaacatggtcatccactccatctggctccgccgcctcaacctcagcctcccctactga

SEQ ID NO: 34241 - DNA, 282 bp, Oryza sativa
  Clone ID: PAT_MRT4530_38275C.1
ctacatctggacaagctcggctcctccaagagtcaaattctttggatggcttctagcaatgaatagactgccgacacgagtcaaccctcgataacttctatggatctgcttcacaccaacaccatggtgggtcccattccggccctgcagagcaataccttcttcatcctccgttgctggcgcctgtggaatcatcgaaacgaggtcgtcttccagaaccagcccccctccatggctcggctcattagaagttgtatctaggatgctcagctctgggctcat

SEQ ID NO: 34242 - DNA, 670 bp, Oryza sativa
  Clone ID: PAT_MRT4530_38276C.1
ttttgttcctcgtcagtcttcggcggcccaagaacagctaattcagctccattccttacttcaacacacctcactaactttgtgcgaagacaagattgagtgtagtctaaaacacaagaacaatttgatttcttctttagccttataccagaagatgatggaaaatttccaggtttggccacactggacctacatctggacaagctcggctcctccaagagtcaaattctttggatggcttctagcaatgaatagactgccgacacgagtcaaccttcacaaaaaaacaattctctcctcgccaacctgtgaactttgcaagagctgcccagaagatacagaccacctctttctcaactgtcccctggtctcagccttttgggatatgatccaggtagcaccctcgataacttctatggatctgcttcacaccaacaccatggtgggtcccattccggccctgcagagcaataccttcttcatcctccgttgctggcgcctgtggaatcatcgaaacgaggtcgtcttccagaaccagcccccctccatggctcggctcattagaagttgtatctaggatgctcagctctgggctcatcgctttaaacccctgcacaaagctgtcctgccactttggctttcgctgtttaattcttctctagcgcttctc

SEQ ID NO: 34243 - DNA, 325 bp, Oryza sativa
  unsure (1)..(325): unsure at all n locations
  Clone ID: PAT_MRT4530_38277C.1
gccgccgctcctatcacgctgctcgtnctgtcactcctcctcctcgccgtcgccgccgncaccgncgccacattccccaccaccgtgaacgcctacacccccgccaccgggtccgcggacggncgncggcggccggcganggcggccggcgncaacgcgnctcgaacatngncgnnggnccgcggggngcatggccgnggacgnngnggactcggcggggcgaacatcggcgcctatataccggagccgggtacaaccngggggaagctgtncgacaacgggtggtnatggactcgtgcntggaaggtgttccgaggatccncgg

SEQ ID NO: 34244 - DNA, 416 bp, Oryza sativa
  Clone ID: PAT_MRT4530_38278C.1
acagtacagtaggctcaggtatatacatatagcagcctgcataatgcatgcatagcctgtgcgcagacaaaacaacaccacacacacgcaggcaggaagaagtacatggaaaggagaactggctgaaaaaacacaaaacggggacacgcacgcacgtaccttaaaaggaggacacgcgaacacaaagcagctcattccacccaggatactaaagccgaaaggtaagaactatacaaattcaacctccataaaatagaaatactatacaaaggccgggctgtcacaaacacaggcgtgctaagaaactttattattgatagacaaactgagagggttggctaataacaatagcggcgtcggttgcacgggttccttgtgggagttgaaaagtcgaacgggttggggatgccgatcct

SEQ ID NO: 34245 - DNA, 560 bp, Oryza sativa
  Clone ID: PAT_MRT4530_38279C.1
ataagccgccggcaggagggggctcgagtgccggtggtggtggtcgtcgccgtcgacctccccgaccatgcagagtaccagatcgagaccagccgtccgccgcccctcgtacgcccgccgccgccgccgccgctctcgtctccgaccttgtcggctgcggccatagccaccacccacgggacgcgtcgccgccactccgggtcagcacgcggcagcgctgtcgtgagcgcgagtgcgggaggaggcaccggcggcggcggtggcggcgacaacacgagctcggcggctccgcctctcccctctcccttccggcccttacacaccgccgcctcctctcatgtcacccatcacatccgtttcctccctcacctgctctcctctcctctcctctctccacttggcgaggccgccgccaccgcttcagcttcctccgccgctgccgccgctctggcgcccgcccgctgccgctccagcctcccatgctccccgcggccggccgaaggagagaggagaaaaagaaagaaagagagaagggaggaagaagaaagggagatagagga

SEQ ID NO: 34246 - DNA, 536 bp, Oryza sativa
  unsure (1)..(536): unsure at all n locations
  Clone ID: PAT_MRT4530_3827C.1
attcggccganggtgaaggacggatcgacgcccgcgnccagctcgagacctacgtgtncaacatgaanaacaccgtcggcnacaaggacnagctggcggacaagctggaaancgacgaaaanganaaagtggaggangccctcctngaggccctcccaatggctggactananccanaccncccgagtaaggatganttctannaagaanctcattgcangtcnatgccgtctgcaaccccntcntctccnccgtctncnataggaccggtggngcccccggtggcngcgccgacagcnaaggcggcctcnaccacnancntgacnanctgtacatgatgangangatnatctgattccattgattccacggagacagcccatttttgttngacatggccggttacttttantggggtgacttactactaccttgggttggggtttacgggttnncnaaaagggaaagttntatttgccgaacccccaaaaagagactnaatctctcctcttgttacttgtgtngctctcntaact

SEQ ID NO: 34247 - DNA, 385 bp, Oryza sativa
  Clone ID: PAT_MRT4530_38280C.1
ccggccgggatccttcacacaattcaaacattatagctgaagcatagcagcactaatcctacacaaaagaagatattacagtatgagctctccttgctatcgatgcatgcatcgcttatgcacggttagatgctcttagtcaaagatatagacaatatcaactacaatcgcatctcctgctacagaaacaagtgctcaacccatgcagtgagatcgtaagggaacagatagcatattggcaacccagttctggcaaccagctacagtagcaattgataaacaaccagagcatgcaggaacagtggttggcaacagctcaagagtggtagcgcaacaatcttactaccaagggcatttataatcgttcaagacgaatgaagcagca

SEQ ID NO: 34248 - DNA, 312 bp, Oryza sativa
  Clone ID: PAT_MRT4530_38281C.1
gtcgttgtgtcgtgcgacgtttgttggtattttgttttttttttttttttttgtttttgggcagggatatcaaatatattagaggaaggttagtctcccttgtataaaattttaaagtttcccaatcccaaaaaattggagcttacgcctgtacgcgtgtatccaactatccatattggaccaaaccagggttgataaaaaaaatgaaaccgtttccgtttgtttctgccaaccggacatggggggccggccggacagccgtttgcgttgcgcaaaaaggaatccgtccgttgtccggaaaggacgggggga

SEQ ID NO: 34249 - DNA, 764 bp, Oryza sativa
  unsure (1)..(764): unsure at all n locations
  Clone ID: PAT_MRT4530_38282C.1
ctnnngntctactntttnttcngncctnantacttncnttttcncntctcttcctcgcaggcgccttccccgccacccctctccttgcagcactctcagccgctcgacccctcccacctgctcaccacgccgccacctcaccggccacaacctcacccccaccattattacccctggctctcgctgctcttcgccgccgcttgtggtgccatgctcacattcttcctactcttcgtctggtactccctgctggccacgcgccgccctgtcgcaccagtcaccacctccgattccgacgtcgtctatgagaagattgtgcttgtcggagccaaggacgacgacgcccccgcagccactactccgtctccagatgtagctggtaacaacaactagtctctagtcttctttagctgtgcgcctgtgcctctgttaattattcatcacagcacagggagtatttcctcttttaattatgccctctcccagtcccagttcgagtgtgtcatgtgtgagtgctgtctgtaagtagtagtactagttaagcgtggtttggtggaaaatctgcagattttgcgggcaaatctaacaccgcaaactctgcagtttctcctcagattattagaggttcaattcaatcctgtttcatccactatcttgtactcctaactcccaatctgtcatccactacctactgctgctattcttttcaaaaaaaaaaaaaaaaaaaaaaaaatataatgaatcatattacaatncncnggccg

SEQ ID NO: 34250 - DNA, 1907 bp, Oryza sativa
  Clone ID: PAT_MRT4530_38283C.1
ctcgtgctcggcgaggcccaatatttcggcggaggctgaggcggaggcggaggcggctcgtcgccgcggaaacctcgtgctcggcgaggcccaatatttcggcggaggctgaggcggaggcggaggcggaggcggattgtctcctcgccggcgttcagttcagtcgccggataccgtcgttatattcatgtgcatcctcgtgcactcctgtgtccatcttatatggtaccaacaagaagttgaagtgtttgggtgatcgctttggggaaatggaaggcagcaacccacctggtaatatgacacagggaccttcctatgggagtttagatttgcatggtatctccaagcaaatgcatcctccaaactcaggaaatcagggcttcaaccagcctcagataccagggaattttaccattcctatggatagggttacagagcctgataacatctctgatggagttcagttaggacaacatgggaagattgcccatcatcaccatcaccacagacaccactcaaagaaccatgggagtgatgaggaggagcacgatatgaatgaggatgctgctgatggcaaagacaagaagggctctccatggcatcggatgaagtggacagattcaatggtgaagcttttgattactgcagtatcctacacaggggaggatcctggagctgatttaggcggtgggaggaggaactattcaatgatgcaaaagaagggaaaatggaaagcaatatcaaaggtcatgggcgagagaggttgccatgtgtcgccacagcagtgtgaggataagttcaatgaccttaataagagatacaaaagactaacagatatccttggaaggggtactgcttgtaatgttgtggagaatcactcacttcttgatcacatggatatttctgagaagatgaaagaggatgcaaggaagatactgaactccaaacacttgttctatgaagagatgtgttcctaccataataataaccgtataagtctgcctgaagatcccgcacttcagcagtcactacagcttgctcttagatgtaaagaggataatgatttcatgaggcatgcaagtggagatgctgaactagatgatgatcagagtgaagattcagattatgaggagaatgaggaagaacatcgagcagttgataccaatataaggggcccctcaatgcataaaaggatgtggcatgttgtagatcatggtgatgtaggttttgtcacctcatgctcgaatgatggtagtgggaggtctgatccctatgacgtgttggatatcaacaaaccctttccagatggatgtgatttggctttggtgcaaaaagacttggctctgaaagcagcagagattcaaaaacatcgtttgcagattgaaaccaaggctgtgcaactcgcaaagcaacgtctcaagtgggagatgttcaggaagaacaaggacttggaattggaaaagttggcgttggagaatgaacaaatgatgcttcagaataagcggtttgagcttgacctaagacacaaggagctagaacttgagattaagataaagggcaatgctaatcatccatgatctttgttctgttagcacttcatttcgcaatatggttgcagatcaattcaattcaggaccgtgtttatgcaagatggtagaggtggcagattgtttatgcaagatggtagaggtggcagattatctgtgactactgacaagtgacaacaatttcaatgctttatagctagctcagtgatcctctcctcttgttgtttatatatcattatatctcctgattctctctacttgtaaaatttccatgtgatactgggctccatctgtattctaaagttttcatcatttttttctatccaactttgttttactcaaaaaaaaaaaaaaaaaaaa

SEQ ID NO: 34251 - DNA, 238 bp, Oryza sativa
  Clone ID: PAT_MRT4530_38284C.1
atcatttggggtgtggagttattgcaaagcaacctcgatttctgcaccgtttcctcgattcgatgctgaagaaattgagcaaagcatggacttcgtttgggtgaaacccacaagtatcttaggtcgtatcagaatacgagaatgatcggaggagagcagaggagagccggaggatttccgcgagggagggagctccaggaccctatcaatcggggattcggtgaggggggaggaggag

SEQ ID NO: 34252 - DNA, 597 bp, Oryza sativa
  Clone ID: PAT_MRT4530_38285C.1
atggggttcatcggcgacacgatagagtcaatccgctcgatgcaggtccgccaggtgctggcgcaaatcatcagcttaggagagtttctttgggagtggtctattcttagttctgttgggtttgatttcgctggtatgattgttacctctgcattgatcatatggaagggtttaatagttgtaacaggtagtgaatctccagtggtggtggttctttctggtagcatggaacctggatttaaaagaggtgacatcctgtttttgcacatgagcaaagaccctatccgcactggagaaatagttgtttttaatgttgatggccgtgaaattccaattgttcaccgtgtgatcaaggttcatgaacgccaggagagtgcagaagttgacatcctcacaaaaggtgataacaattttggggatgaccgacttctgtatgcacatgggcagctttggcttcagcaacatcatattatggggcgagctgttggttttctgccatatgttggatgggttacaattatcatgactgagaagccaattattaagtaccttctgatcggcgcgctgggcctactggttataacatcaaaggagtaa

SEQ ID NO: 34253 - DNA, 1101 bp, Oryza sativa
  Clone ID: PAT_MRT4530_38286C.1
cttccttttggatacacgcggacactacttcctgcgtattctccccgcccgggtgtcgctctcctcctcgtcgccgtcgccggtcgtcgccggtcgcgggtggcgcgcaacccggagtctctctctccctctacctctgccggctgcttactcgccgcgggcttcagcttcctcctcgatctccggcgcgcctccaagctgcagatcggccgacccccccagtgtgttgaagcctgcccttgacacttagcaactgcagagtcctgctggagagagatggggttcatcggcgacacgatagagtcaatccgctcgatgcaggtccgccaggtgctggcgcaaatcatcagcttaggtatgattgttacctctgcattgatcatatggaagggtttaatagttgtaacaggtagtgaatctccagtggtggtggttctttctggtagcatggaacctggatttaaaagaggtgacatcctgtttttgcacatgagcaaagaccctatccgcactggagaaatagttgtttttaatgttgatggccgtgaaattccaattgttcaccgtgtgatcaaggttcatgaacgccaggagagtgcagaagttgacatcctcacaaaaggtgataacaattttggggatgaccgacttctgtatgcacatgggcagctttggcttcagcaacatcatattatggggcgagctgttggttttctgccatatgttggatgggttacaattatcatgactgagaagccaattattaagtaccttctgatcggcgcgctgggcctactggttataacatcaaaggagtaataaagatgcggcttttcagtagagtagtggcctctctagtcgcatggaagaagctggtatttgtttcaccatgtttccaatggaagatgcgaggggtttatttttaggataactgtgcgacaattggcattgtattttccagcggtttatcatgtggcatccatctttcagtggtttacagttaattgcgcaagaaaatttaacgtgacttttggttcggcaactggttattggatgctgactttgatacaatataagatgaattcataacgcaaaaaaaaa

SEQ ID NO: 34254 - DNA, 336 bp, Oryza sativa
  Clone ID: PAT_MRT4530_38287C.1
atggaggcgcaagaggtagggatcaaggcggtgccggcaaatcgaagcaacaacggcgcagtttcccgagtatgcccttctctccagtccaccccctcgccatcttcttcccctgcgcggggtgacgcctctccccaacgcggctccttgcccgttccttgcccaaagctgatgaaactacacggccctctattgggcatcgtgacgctctgcgagggtgcggtccgggccgagctagcagacatatttggctttgggaggggtgagaccacactccagtgtggagcattggccgtggccttacagagatcctcctcaagagacgcggttacgtga

SEQ ID NO: 34255 - DNA, 285 bp, Oryza sativa
  Clone ID: PAT_MRT4530_38288C.1
atggcgcgtggaggcgcgaccagaggtgacggaggcgggcacggttcgaggaggaggaggagctgccggtgggtgcggtgcggtctacggtgcacgaaggctggccggcgggggacgccggtgcagtggtcccacatgtcggcagaggttggacggtggtggagctttgcggcgttagtcgtggattcgcaggtggtggcttcctcctcccaagctaagcaaggtgggattattcagaggctcacacggtcgtcgtccgactttggtgtctttgccagcgcataa

SEQ ID NO: 34256 - DNA, 266 bp, Oryza sativa
  Clone ID: PAT_MRT4530_38289C.1
atggatagaagaaaacagctctacagaaagaagtacaatagtttgagatctataagtgtaatttatgaaacttacactgtaacttttggaaatggggaaagagggcgagcagtcgagcaccttctgggcgatgcaggcgcggagggcgtcgagggcggcgaggcacttgtcgcggtcgtagctggactcggccgcgcagttcagcagcgcaagcgcctcctccgcgcacaccggcttcggcgtcgtcgtcgtcgtcgaatccatgc

SEQ ID NO: 34257 - DNA, 250 bp, Oryza sativa
  Clone ID: PAT_MRT4530_3828C.1
ctactctgttttgtttcacacatgcctataagggtcttactaaatggcaaaaattctccacgggcaacagaaattacaaccaaaagaaaattatggtttttacaaggcttaattgcaccccgagagaaaagaatttcaaccaataggagtttaaaataaccggccgcgctaagttaaccccggaaaaaacgaacagaccctgcaggcggcccaaatttccctataaggagtgcaactaaagcttagccta

SEQ ID NO: 34258 - DNA, 304 bp, Oryza sativa
  unsure (1)..(304): unsure at all n locations
  Clone ID: PAT_MRT4530_38290C.1
gcaaaactgtttccatctttaatccgtgtganttctnccatacaaatatacaattacagctccnggaagccaancaatggtcnnaaatcaaggtnngacttattgttcgcnacnaatgaatttanaaactaatttcnnaaacccnctncnantttcnccnncctcnancatcatcggtcagaggggangnaaattnttnaacaaaaacaattaattccnccnannatcttccnnttaatctganagtggtccntgtcactcncnaacaacctcagctgananccncggnagcaggaantggtgg

SEQ ID NO: 34259 - DNA, 1028 bp, Oryza sativa
  Clone ID: PAT_MRT4530_38291C.1
atgccgatttcagagagggcaacaacaacgccatcatcgtcatattactcgttggagttggatccactgttgagtgatctcgcagagaagaagcttagcctgaggagaagcttggcttggctggatgcagagctcaaggatgccaagatcaagcttgcttccaaggaacagttgcttgctcaggaatcagaaaacaggaagaagtttgctgagtcgagggcgagaagcatggaggaggaggtgaagaagctgcataaatgtttacaggacaaggatgagcagctgcgaacatcaatatgtagcactgaacagcagtatttgtcttcctacaaattggatattcttagatcacagatttcagtggcacaagccactgcagaagccagtgcagaatcagccatgttggcacggttgcagtgcttgtccctgtcaggagggcatgagaagatcaattctttgggtgaatgcgagcttcgagtgaagaaggtagaggagcagctagatcttgttcagaagttccttgaagcgaaagagctctcgcagttggagaagaatcaaatgacaacggttcatgagctgaagaagaaggtactgaaacttgaatgcaccctcaaagtatcaagagctcagctgcgaaaactacataagatggtagagcgaagagataaacctctcaaaaaactacaaagccgattgccgctgaagcagcagaccgcctgcgacaagcagaagttgtgggagagctcaggcttcaggatcatagcctccatgtcaatattggccctggctatgctgtcgaagcgatgaactgaacaagtgatgattgacgtcgtcgtgtatcagttgtctatggcagagggcaaatgttcctgtattggtgtcagggttatgagatagttgatggtatgaatgataaatctgtgtagcatcattaccagttctccgtaccaaatttgacgaaattcagtgtactgtcgtagacttcagcgtggtggaaacttaaaccaatgcactaaatgaacttgggg

SEQ ID NO: 34260 - DNA, 174 bp, Oryza sativa
  unsure (1)..(174): unsure at all n locations
  Clone ID: PAT_MRT4530_38292C.1
gcttnagtgtgagattctgagtaattatgcacaactgcatgcctggctgcgttggaatttgaaggacctgggaaacgccatttgctgttgccattgctgtggattggttnttgtgagaaaacgataaatggagttttgatacttggtagagagtgtatattttgacaattaaat

SEQ ID NO: 34261 - DNA, 605 bp, Oryza sativa
  unsure (1)..(605): unsure at all n locations
  Clone ID: PAT_MRT4530_38293C.1
ggggctgcaggattcggcacgagctcgtgccgaatccagcgncgaaacgggtgncanctangcagatcganngcagacctcaatgagttgacgggatccatggtagcttggcttctggaggcgatgatgaaantggtgggnacancctctgtgacacnctccccgccctcgancnctacttctccgtcanccgggagcnctcggntcccnnnatgtgtnngtcnactagnncctngccatctccgacatcctctanntcctcctcctctnccctcggtnggacntccaanccgggttgcncngtngcnccttctcctttnntgtactcntggaagatttncantccgtctgacnacnctcaccttgtnaacacaaggcttaggcactgggctaaaggtagtggcctgttcatttgaaacactccccctgtatcagatgctgtaacaaccatattctcctcccangaagccataaganagtacaanntgnatatntatatatatatgncncatccctgcagtgctttggttntatggcgaatgatgataancttnttcttccgatgggtatannctgaaaggttnncctntatttccctctnatna

SEQ ID NO: 34262 - DNA, 2550 bp, Oryza sativa
  Clone ID: PAT_MRT4530_38294C.1
gcacgaggggccctctcgccgacgtcgccgtgcacctcgcatcgtcgccgtcaccgtcgccgacgaccagaccagcaacagtgccagcgacggcggctgctgcccaactccaacaactaaactgttcaactccttcagctactacttcacttgggttaatttgtgcattgctctctgccatggcggcgccggcagccgttcttgccgtgctccggtggcggcagcggcggtggctggttgagctggtcgctctcctgcttcttcttgctcgaggtggcgctgccgcggttgaccaattcttgtttcccggcttctccggcgacggcgtggccaccagcggcgcggccgccgtcacctccaccggtctactgcagctcaccaacgagacgaaggaggtgttcggccatggcttctaccccaagccggtcagcttgagaaacgcctccaccggcgcggcggcctccttctccaccaccttcgtgttcgccatcgtgcccaagtatcccgacgcgcatggccacggcctcgccttcgcgctggcgccgtcggtggccgtccccggcgccgtcgccggcaagtacctggggctcttcaacacgtccgacagcacgggccagatcaagaacaagatcgtcgccgtcgagctcgacacggcgcgggacgacgagttcgccgacatcgacgacaaccacgtcggcatcgacgacaacagcctgaaatccgtgaactccagcccggcggggtaccacgacgccgccaccggcggcaagctcgccagcgtcaacctgatcggcggcgagcccctgcaggtgtggatcgagtacgacggcgacagcgcgtggctcgaggtgacggtgtcgccggccggcatgctcaggccggccgccccgctggtgtcttgcaccgtcaacctgtcgtccgccgtggccggcgacacgtacgtcgggttctcggcggcgaacggcgccgccgcgagctcgcactacgtcctcggctggagcttccgcctcggcggcggcggccgcgcgcaggacctcgacctcgccaagctcccgcggctcccgtcgccgagcaaacccaagaagacgttgccgccgctgatcatcttgacaattctcctcctctccgtcgtgatcctgctcctggcggcggcggccgtggcggcgctcgtggtgcgaagccggcggtacgccgaggaagaggaggaatgggagatcgagtacgggccacacaggatcagctacaaggacctccacggcgcgaccaaggggttccgcgacgtcatcggcgccggcggcttcggcagcgtgtaccacggcgtgctgccgaggtccggcgtggaggtcgccgtgaagaaggtgtcgcacgactcgcggcaggggctgcgggagttcgtgtcggagatcgccagcatgagccggctgcgccaccgcaacctggtgcagctgctcggctactgccggcgccgcggcgagctggtgctcgtctacgactacatggcgaacggcagcctcgacaagcacctgttcgccggcggcgagcggccggcgctgagctgggagaagcgcggcaagatcgtccgggacgtcgccgccgggctgctgtacctgcacgaggggtgggagcaggtggtggtgcaccgtgacatcaaggccagcaacgtgctcctcgacgccgacatgaacggcaagctcagcgacttcggcctcgcccggctctacgaccacggcgctaacccgcagacgacgcgcatcgtcggcacgctcggctacctcgcgccggagctgagcaagaccggcaaggccaccacgagcaccgacgtcttcgccttcggcgccttcttgctcgaggtggcgtgcggccggaggcccatggagttcaccgtcgacgacgactcgccggggctcgtcgagctcgtcctcgagcactggaaggccggcgagatcacggcggcgagggaccccaggatcggcgactgtgacgaggacgatctcgaggtcgtcctcaagctcgggcttctctgctcgcaccctgacccgcgccgccggccgagcatgaggcaggtggtgcagatcttggaaggcgccgcgccggcgccggagacgttgccggaggacctagaatgcggcgtggggcagttctacgacgagtcattcgacgagttcgtcaccggcttcccgtccacgtcggagatcaccacgtcgacgacgcagtccaccgacgagcagcagcggctggttggctgtgttcagttgagcactgccgattttctgaagacaacttaaaatgtaaaaatgtcagtgagcaaatacttgcagcattaggtgattgtttgggctttggatcttctggagttagtaacatagggatactgtcaatcattttcagatatgatcaaatagaggttttgatcaaagattagtacagcattcagcttagaagttaccttgttgcagtttcagaaaaatgtacacctgcaagaaggcaagaaccgtgtaagaaattttgcaagggaagaaaaaaaaatatggatcccctttttttttttgt

SEQ ID NO: 34263 - DNA, 531 bp, Oryza sativa
  Clone ID: PAT_MRT4530_38295C.1
ctaacaccagctttcatcagtgtaacaaacatcagatttcatcagcttccacatgggcaactagtagacactagtcagttcataaacagcagcaatggcatccattcagaaacaacagcagcaaaaattcataggcagaaccgaaacaaccagattttcaatactgaagcatccatttaggattaaacagatgtagatggttcatccattaacttaactagataataccccgcgcgttgctgcggacataataaataactttcaacatgcaatatgtgcataacatttgagaagaaaaaagaaaaaaaaactacttattaccatataattgatggagtatatacagtggtaattataactaaatattacatgatggagtatctccccaggtagcagtggttggccaatgcaactaacagaattacaactcaaatatatggctgttgaccggatagagcaagtattaataaacaaaattgaaggcccctaaacattgcttaaaaaaaaaaaaaaaaaaaaaaaaaaaacaaa

SEQ ID NO: 34264 - DNA, 540 bp, Oryza sativa
  Clone ID: PAT_MRT4530_38296C.1
ccagccaatatcccaactatcatccgaggaccaacgatctccatagaaatagaagatcaccactttaaaaataatggataaagtagaaccaataaagggttatatgaccataaatttcaccgacccttgaaaggtcgttgagtcgtttgccactggaattcccagaaaatatagaagaactagccaagattcacccaggatagttcaaccccgttaatcctcgattttgagaaaagccattacagctctgagaccacgtggacacccaaggtgatatttaagaagtttggatcacgcttgaagagaatttaatcccagacccgagatgagttaagcacgccactggtttcacgaagatcactcactgctttttacgtccgtagaattgaacaccttcgagaaggctttctatgagatctgtcgcccaactgaatattgctaatcctctcttagggccttaaatgcttgtaatatgaatatatgtatattccactaaaattttattctccaatttccacccaaaaaaaaaaaaaaaaaaaa

SEQ ID NO: 34265 - DNA, 285 bp, Oryza sativa
  Clone ID: PAT_MRT4530_38297C.1
atggaggaagccctgcgccccgccctccccgatgtgttcacgtgcgagatcaagttctccaccactgccatcctagcgacgctcaagggaaaggaggaggcgacccaagggccctatcgccgccgcatcatcctcaacgctgttgtggttcgagtgctgatagatgaccggatctatgacacaaagatgccgatccttctatctgtgacggcctctaacatgcctagaaatagcgggccgtcacaaggaagtgatctcaatcgggccgaaaaagtgcccgattga

SEQ ID NO: 34266 - DNA, 279 bp, Oryza sativa
  Clone ID: PAT_MRT4530_38298C.1
acgcgttcgcaaagtcgaaaccctcccaaaaccctaaaccccccatggggccttccgtccccactgcctccgattgcctagcactccgccggctactctccacggcggacgacgaggcggaggcaccggacggggatcccgccgcctaaaaggcctagcataagggccccaagacggcggtgttagcgggggatgagaaggacgcgcggtgcgctgtaccgacgtttctcggcgctaggaggtgcgaaggtaagggagcgttaaccaccagatgaacaa

SEQ ID NO: 34267 - DNA, 236 bp, Oryza sativa
  Clone ID: PAT_MRT4530_38299C.1
ggggactagttggcaaaccagaggaaaacaaaaaaaacccaccaagaatgcagataccttggcaggcactgcaagaaacccctgaagggagactcttttctcaacccggtgtttgcaaattactcaccaaaaagaggattgtcttcaatattatttttatattcccaagaaggtccacacgatccaagggcataaacccccggaccttcctaaacacggggggccccaccggccac

SEQ ID NO: 34268 - DNA, 327 bp, Oryza sativa
  Clone ID: PAT_MRT4530_3829C.1
atgtcggtacagatcggaaaccgggactcggacggcatttgccggacctggcagtggcagctagcgagcgtactaacacgcacggtgaccacggaggcacggacggacacgggcaggcaaaacagggaaagcgttagacccggcgtggcagcgatcggatccggcggcagcctttcatcaaacgccctccagcctgcggacaccccaccgatttattgcgcggcgcacgaccagatcgcgtgcgaagcggccccctccgtccgtcgtcgcgactcgctcgcagtcgcaggggcctcgcctgctgcaggaaggagcagtgatgagtag

SEQ ID NO: 34269 - DNA, 1202 bp, Oryza sativa
  Clone ID: PAT_MRT4530_382C.1
actagtggatccccgggctgaggaatcggcacgaggcgaagacgcacctctcctcctcgctcgctcctcctcctccccgcgtcctggcaggagctcctccccgctgccgccgctcctcggcgcgcatgccgtagccgccgccgggtccttcttcttccccaccgccgggtcctgcttcttccccatccccaccgacgcggccggcctcttcgctcgcgcctcctcctccccgctgccgccgctccgccgcatcctagacggagctctgccggagctccgccggactcttactcggagccgccgccggagcaggcctcggcccctcatcaaacctcaatcgcgatctccctcgctcaatgcaaagcatcggacttcagcgatcaacgcttgattgccaaatggtctgatccggccgctccgctgccaaggccaccaccccgagatcgcgtggatctggctgctccgccgccgaggccttcaaccctgagcccttctgccatgagtccgcagcaggctccattgttgtgttcaccgcccgggcccctcaccgccagatcgcagtccactccaccgtgtagtcgctgcactgtgccccttcgcagctttgctgccgaggccaacgcccaggttgctagaccaccaccttcttcaacaccatattgtggcccttgacttctgcctgattgccgtcacagagacgttcatcaaccctaggtggccatggtaccacgatgctgcggtgattgctgatactattcctgttatgtcatgcttgatgctgaatcacgagggattctccaagagttggaagctgtcaaacagcactaggcagtcaagttgtagaaatggtgaaaagtatggagaagctgcagtcaagttgcttgccgctacattacgagtaacatgtgatttttcatctgaagaccaatccagaaatattgggacaatttgactgaataactgctaattataaccaatgttttgctcgaagtgttattggatgttttcattagtggtacaggttgcttacgtaatctatgtgagttttctctaggtgatttctttgtatttctttcaaacttgatactgtattagtcactgtgaacaatgtgaatattttcctttactgttcaatattgcttgccactaatcatgatgtgaaaaaataattgaggcaaagaatcatgcctttctgctatgca

SEQ ID NO: 34270 - DNA, 292 bp, Oryza sativa
  Clone ID: PAT_MRT4530_38300C.1
atggtgggttgtgggtacatggttttgatggtcgtgcttatgacaattaaggaccggtttgcaagctactgttgtgaaacattaaccgtgccaatcacaagctaacatgggcaacggctttaccttttgtatggcatgtttcattgcggggcaccagactatgaagtggtgataagttcgtggggatcgctaggtagtccatacctttcatttttaagggggtgattatgatccaggaacggtgcactgttttgagttgtattatgcgacgggtcttatcacaatcactcgg

SEQ ID NO: 34271 - DNA, 348 bp, Oryza sativa
  Clone ID: PAT_MRT4530_38301C.1
atgccgatgcatctcgggcttgcaggtggcggggcgcccaagccaggaggtcgaggtggtggtggtggtggtggcgcctcctcgcccacaatgcacgcggcggcggtgtggaggaggaggagtatatccggcgggcggcgggttcttggcgggcggcggccggcggttcttggcagcggcggcggcgggttcttggcggcaagcggccggtggttcttggtggcgggaggcaaggaggacgccaccgccgtcatccatggtagatgccgtggccagctcgtcctccccgggcgacttgtcaggttccacggcgagggcggcctaggcatggcgttgctgctccgctga

SEQ ID NO: 34272 - DNA, 390 bp, Oryza sativa
  unsure (1)..(390): unsure at all n locations
  Clone ID: PAT_MRT4530_38302C.1
caagatngctcggncntcgtcgtcgtngtggatgncgatgctcgtcgtcgccgacntggcgaagtcggcgagtccgacctgagganggactactacaacaagcacgtancccaacgtcgttaagcatcgtnctnggcgtngtgaaggacaaagatgnaagnccaccattccgganccatanggttccaaccgntccgctttttttttccacggattgtttgnngattgggtgttangggttnngttgttantcaagntgnaggnngngancaaaggnngtnangganggggcccataaantnttttgatttnggngttnaaanggntttntanaacnggttaggaggnnccaaaangccccattttnanggccctntttcccccaaccaa

SEQ ID NO: 34273 - DNA, 476 bp, Oryza sativa
  Clone ID: PAT_MRT4530_38303C.1
gaaaggaactaaagaaacgggggttacaaaactaaaaaaaaggattacaaggacaccaatttcaaaaaaaaaaagaatgagaatacaacacattaatgagaattgcaagcactaaacataagaagcgctcaaggcccataggcaggactatagggtgggtacctggttaacccatttaaggaattgggataataacttgaatgatatgggtaaccatggataccagccccaaaatttcccaaagaaaggaaatgttaggccctatggccactggttcaacatgaaataaacaaaatggccaaaggagcatgaaggcaaatcaaaaagcgaaaaactcctataacttagcccccgaaaagcaccgggaaaagaattaaagaaacttgggaatacctggaaatacatggctcaggttgatcaaacaggtaagaaacatatggagcaaacatgccaaaaccaggtgagctagaattatt

SEQ ID NO: 34274 - DNA, 892 bp, Oryza sativa
  unsure (1)..(892): unsure at all n locations
  Clone ID: PAT_MRT4530_38304C.1
atggagccagcccgacgatccaccgccgcgtcggacggcggcggcggctcgtcggcggccggatcggacggcgaggacgacaggtacctcagcgccagctccgcgctcggcacgcccagctccctcgccaccctcctcccctcctccgacctctgggatcaccagatggacctcctcctcctcgacgaccccgtcgccggcttccccaaggcccaccagctgacccgcctccatccgccgccggagccgccgcggcccgatcctcccgcccccgccgcggccggcgacgccgttctcccgcggccgccggagccggatcccacccaggaggatgaagctacaaagtgtgactgggtgttcaactatataggcatcagtgacatgtttgttgatcctgatgttttgagatcgtaccctattcattctttacttgttgggaaagcgaatggtaatgatctgaaatagttcagagatggaagcaccactgcctctacttctggtacagatgatgcttatgtatatccccttcctcaccatccttcaaaaattgattgggtggaggttgtgggagcaaagcaaagaacaggagatgtttcttttggtgagcgaatggttggggtcagagaatatactgtttatttgttaaaagtcaagagcggagaagatgactgggaaattgagaggcggtaccgtgaattttatgctctataccaacaactcaagctcttgtttgctgagaaaggtttcagtctgcctcctgcatngagaaacgttgaaaaagantcaagtaaattatttgggaatgcatccccagacatcgtcaatgagagaagtagtctaattcaagactgttgtgntctttgcttgtctctagtatccattnggacaccnc

SEQ ID NO: 34275 - DNA, 2462 bp, Oryza sativa
  Clone ID: PAT_MRT4530_38305C.1
gctgcgtttgcgtttctagggtgtaagcacgggccatctttccggtgggagctttgaatgccaatcttcaccaccatagtagtactatctcattatctctccctctgagtcctctctcgatccggttcggcttgctcgggttcgcgcaacggaaaggcgagatttttgaggggatgaagtagttgccattctgatatccttctctatctatccgcttcgacgagccgcgatctctgggaggaatcttgagaagcctatgcaattgctggttcttcatcaaccttcgcaagttttttggttccgtttgtagatattagctaaccatagatcaattatagtttagccatcttataaacaagctgttgtgagaatttgacttcagatgggccaaggagttgcggctattcctggccttgggtctcttggaggcgtttcctgcgacaaattccttttctcctttgcgaaattctacttcaacatgtggtttctactgatccaggcatccaaagttggaatttgatcacttgtgaggtagcttctcttcgctttcgtggtttgccagaatggagagagagaattcatggctgaggagaaccaagttctcccacaccgtgtacacaaggttggatcaccaacgggcgcctattgctccccttggcagggatgtggagcagaaactgcagagatttattagtatggggaagtctgtgtcgatgcctgttaaccgggacgaggatgcagcggctgcgttcaagcactctgtgagcttgccaacagcccgctcctcgcttcagattgataaggaaaaggccaacaagcagaaggcagattttgatatcccttcaagccctccggtgaactctgttaattcgaagggcctgaaggcaaggagcctggtcaagagcccaagctcagcgatgcttctcagctacttgaacaaggcacacccgaatcgagattcaaacctcaagaagactgacagacctcagcacaagctgagatcaaagtcccctcttccgaatgtagcgccttctgatgtgttcagagaagcacgtgcaagtagcaggaggtttacaagccctcccccaaagcgaaggggatctgaaagaagcatttacggcaaatcgtttgatagacaactgtctgatatgagccaaagccctgatttgtgttcaaccccagtgtcctctgataagcacaagtctctaaaggatagctcatggactaggagatattttgataatggtggaaggaggagggttagtgcagtggacgctactgaagttcggaggaaccgcggggttagtatggctcaggcagttcaaactacagttgattggacacttgatccatctaagctgctcgtggggcataagtttgcatctggggcatatagccggctctacaaaggactctatgatgataaaccagttgccattaaatttattcggcaacctgatgatgacgacaatgggaagatggctgcaaaacttgaaaaacagtataacagtgaggtcaatgctctatctcacctctatcacaagaatgtgatcaagctagtagcagcctataaatgcccaccagttttttacataattactgagttcctccctggaggttccctgaggtcatatctaaatagcacagagcatcaccccatccctctggagaagatcatatccattgctctcgatgttgcctgtgggttggagtacattcactctcaaggggtcgtgcaccgtgacattaagccagagaacattctctttgatgagaacttctgtgtaaagattgctgattttgggattgcctgtgaggagtcaatgtgtgatgtgctggtggaagacgaaggcacttaccggtggatggcccccgagatgatcaagcgtaaggcatacaaccggaaggtcgacgtctatagctttggactactcctatgggaaatgatctctggaagaattcctttcgatgacttaacccctctccaggcggcttatgctgttgcaactaggcatgcgcgaccagtaattcctccagaatgtccaatggctctgagaccgttgatcgaacagtgttgctcattgcagcccgaaaagaggcctgatttctggcagattgttaaaatcctggaggaatttcattctgttctctcccaaggtggctgcctcgactcactgaagagcagcaacagccaggatcagaaaaagcgacttctgcattggattcaaaagctgaaaccctcacatagcacctgagttcctgtagtctctaggatcctttctgccagatgtttttatccggttctgtatgctcagtagcttagcataagattttcatttttgttcagaaaaggtgaacctgtgttctaggatgcttggacatgtttatcaggtgaattgcaagtaggtttacagtacctgtatattgtgctaaaaaaaaaaaaaaaaaaaaaaaaaaaaaaa

SEQ ID NO: 34276 - DNA, 2745 bp, Oryza sativa
  Clone ID: PAT_MRT4530_38306C.1
atggcccagcgctggcgctcgagggcgcggcgcgacccggacgtggacgacgaggaaggctcgcccccggagcggcggcgcaggggggctcgaagcggcagcgacgacgaggaggcgggcaacgaggacctcagcctcgagatcgtcgcgcgggcggcgcggcggcggcggcggcgcgaggccagcgccgggttcgcggccgacgccttctcgtccggggacgagatcgacgaggatgccgtggtggagctcggcgaggcggatcccagcagcaggaagcggcgcaaggagaagaagaagcggcgcaaggagaagaggaagcagcggaagggggcgccgcccgagggctcgccctcgaccgccgccgccgacaaggagtctcaagttgctgggacccaggaggggcaaactggcacagcacaatcagtgctcactgaagatgggcctgatgtccctttatctgacaatattgttttacggaagcttcttcgcataccaagatactttgatcctggtgaaactttattggaaacatgctttaattgtggtgaggagggtcatgtagctgtgaactgtccaatggaaaagcggaagaggccttgttttgtttgtgggttgtttggacacaattcaaagcagtgcacgcaggttggtctccctagctccaaggcattattgcttggtgacttggataggttccagacttccagttcattaatcacacatatttacttgcccctgccaatgcttcttgcctgtgtggcatggcctgccaatttcaggaatcaaacatttgttaatcatttttgtagggtcaagactgtttcatctgcaaaaaaggaggtcatattgcgaaagactgccctgaaaagcacaataggaatactcaacagtctactttttgtttacgatgtggagaatcaggtcatgatatgtttggatgtgccaatgattatccacgcgatgatgttaagaaaggtcatctatgttgcgccgacttctctgatatttgtccaaaagaagttagttgttataattgtgcccaacctggtcatactggtttgggatgtgccaagcaacgtagggaagctagtaccgcggcaactccaactttgtgttacaaatgtggcgaggaaggccacttcgcacgtgggtgcacaaagaacaccaagtcggaaaaaaggcaaaggcaagaaagattttggcactagatcagctcctcatgatgctcgcaagacaagtaaaaggaaaagccccttatttgaggaaagaaggaactcatctcattttaagtccaaagctaggggtggttggattgcagacgatgcggatgaccagccatacaagaagtgcaaacccaatgtgtgggcttctccatctacccctaagaagcaatacaataaccatcagttctcttctggtggtgactactcaactcctcagtcttcaagatggcagaaacacggtttcgcatcgccgagcgcaacttactcaccaaacacaaggaagcatagcttttcatcgtcgagattcgccagcaacactcatgtccgcctacatgggcaacctactctggagctctttgctgcatcgaatcttacctctcccaacgatggctcgcagtgtagcctcatcgcgtcggagaccgaggagatgtgtgttagtggctgcatcattgagcttgagctctacggcctcctcgcgttggaggccgaggagagacacgccagcggtcatcgagtaggcgaggtgggactaaaaggagagcttactagctcagtggcttcatcgtatgggcctcgaaactcggcaagcgaaagggccgcagcccatacgtgtggtcttcggctcttcgctgctgcagacgattttgaaattgattggttgtttgaatcttctaatcgcttacgatttgtctcatcgctacgatacgatgccccgccgccgcgaaccctccgcctccgcagccacacgaccgcagcgacggtggcgcaggggctctcccgccgcgccgtgcaacctgccgacggcgtgttccgggaggaggctgccggtgatcgtgccgttccacgggggcgcgttcgcgaggggcgcggccgacagcgacgccatcgtggtttcatcgcgctctgggcatccacggccgcgccgtccccggcgccatcggctgttggccccaccccggctgctgcggcggcggagctcctccgccgggtcgcggcgcccggggtcgacccgtgcccggcgctgcggccggtgggcggtggcgcggcggagaccgtggcgtcggtgctccggaggagggggaagggcgatgatgatgatggcggcgtggaggccgtcgaggcggccgtccgggtgctcgcggtgctcgccacgtcggactgcatcgaggaggagaacaggaggcgcgtcgtcgccgcgctcgccgcggggggcgccgcgccgtcggtggcggcgtcgctggcgcgcgtgatgcggagcgggagcgggctcgaggcccgcgtcgacgcggcgaggctggtggagtcgctgctccgggacggcggcgaggatgatgaagtgcggcgggatgggcggcgcggaggcggcggtgtccgtgctgtgggcggtgtgccaccggtacagggaccggcgcgcggcggaggcggcggcggcgtccaagggcgggctgacgaagctgctcctgccgatgcagagcgggtgctcgccggcggcgaggcagatggcctcggagttccttaa

SEQ ID NO: 34277 - DNA, 1735 bp, Oryza sativa
  Clone ID: PAT_MRT4530_38307C.1
cccattgatttttcttttcctatcaaaactctcgctacacatgtacagattatttttttcttcttccctccacaaatcaattcgatctcctcctgttttctctatcatcaaattacatttagaaaagaacaaaagaagaaatgaaagaaaagaacggaacacgaaggttgatctcctgttccatgatggccctgaccaaaagcttcgatttttcagtttagaaaggcatgatgtgggtggtcttggagtcgtagccggcgaggcagctcttggcgttcaccttgaaaatcttgaggagctccgacgccatctgcctcgccgccggcgagcacccgctctgcatcagcaggaggagcttcgtcagcccgccctccgacgccgccgccgcctccaccgcgcgccggtccctgtaccggtggcacaccgcccacagcaccgacaccgccgcctccgcgccgcccatcccgccgcacctcatcatcctcgacaccaccgccgggatcgccgcctccgccacctcgcacaccgccgcgcgcccctccgcgcaccccacggcggcctccagcacgcgcagcgcctgggcgtgcgacccgccgtggtggtccgtggccaggacgcgcacggcggccgggacggcgccgagacggaccatctcggcgcgcgcgcgccgcgtcgcggcgacgatggcggcgaggcaggagaggccggcgtccacggcctgcgcgtcgaggctgcccttctcgtccgtggggccgacgagccggatcagctccgcgaccagctcctccgactcggcgaccgccgccctcacccccggcgcggtggcgccgcgcgcgccgtcccggagcagcgactccaccagcctcgccgcgtcgacgcgggcctcgagcccgctcccgctccgcatcacgcgcgccagcgacgccgccaccgacggcgcggcgccccccgcggcgagcgcggcggcgacgcgcctcctgttctcctcctcgatgcagtccgacgtggcgagcaccgcgagcacccggacggccgcctcgacggcttccacgccgccatcatcatcatcacccttccccctcctcctgagcaccgacgccacggtctccgccgcgccaccggccctcgcgagcgcgttcttgtcgaactcgtcgacgtcgtcgtcagacaggaacgccgcgagcttgcgcagcgccgggcacgggtccaccccgggcgccgcgacccggcggaggagctccgccgccgcagcagccggggtggggccaacagccgatggcgccgccggcgacgacggcgcggccgtggaggcccagagcgcgatgaggcggcggagggtgaggttggggacgaggtcggtggaggggagcgggagcatggtggcggggcaggtggtgttgccggagtcgatccagcgctggatggaggcgcggtcgtaggtgacgccggtgcagaggctcaccggcgagcgcatgacgtcgagggagatggggcaccggaagaacgtgggtaccttcacctccaggccctggtactccgccgcgagcctgccgccgccgccgcccatctccttcctcaccatggatggctgctgctcgatctcgttccgaccacaaacacttggtgttgcaacaatggcgatggcgagctgaggcctgagggtggaagtggaggagatggaatggaatggagtagaaaagggagaggaggaggaggaggaggatgaggggtccat

SEQ ID NO: 34278 - DNA, 270 bp, Oryza sativa
  Clone ID: PAT_MRT4530_38308C.1
cgggctgcaggaattggtcagagtacttatggtgatatatggttgctgtgagattgattggttgaacagtttgtatttctgatatcaagccattgaggcgtatattgcctcttcagttgctgtcaagttgctaagctactgccaactgagaattaaagttatcgatcagagtgacatagtgctagattgctagtatgttagtatatgagttgcaagagggattttcatatgtccttgcattctgactgcagaactgcaagcgatggtttc

SEQ ID NO: 34279 - DNA, 1257 bp, Oryza sativa
  Clone ID: PAT_MRT4530_38309C.1
atgcggcagtcgtactcgtaccatgcagggactttgaagccatcgtcttctactattccctgttcttctgttactcgctccgatgacttattactactcctagtattaatgatgcttcgaaatcaagcaacggtcggcagtgtagttactgctactgccacaagcggcggcggcggcggcgaggcgaggaagatgctgtgggtggacaagtacaggccgaaaaccctagacaaggtcaccgtccatgaccaggtcgcgcaaaacctcaagaagctggtggcggagcaggattgcccgcacctgctcttctatgggccgtcggggtccgggaagaaaaccctagtcatggccctcatcaagcagatgttcggcgcaggcgcggataaggtgaagatggagaacaagacatggaagatcgatactgggtcgaggaatattgagatagaactggcaatgttgtcgagcgcccaccatgtggagatgaaccccagcgatgctgggtttcaggacaggtatgttgttcaggaagtcattaaagagatggcgaagaataggccaattgatgccaagggcaagagagcatttaaagtccttgtccttaatgaagtcgacaagctctcacgagaagcccagcattcccttcgtaggacaatggagaagtacagtgcatcatgcaggctgatattgtgctgtaatagctcatcaaaggtgacagaggctgtaaggtctcgttgcttgaacgtgcgagtgaatgcacccagtgaagaccagatcgtccaagttctggagttcattgggaagaaagaaaatctgcagcttccatttggatttgctgctaggatagcagcacaatcgaaccgtaacctgagacgagcgatactgttttttgagacctgcaaagtccagcaatacccatttacatcaaatcaagtagcacctcctcttgactgggagcaatatgtgtcagaaatagcagctgatatcatgaaagaacaaagccctaaaaggctatttgctgtgcgccagaagttctacgaattacttgtgaattgtatcccacctgaaagcatcttaaagaagttgttggcggagttactgaagaaattagactctgacttgaaacatgaaatttgtcactgggctgcacactatgaacacaagatgcgtcttgggtccaaggccatttttcacctagaagctttcgtcgccaagttcatgagcatctacaaggaatttcttgtctctacatttggctga

SEQ ID NO: 34280 - DNA, 2199 bp, Oryza sativa
  Clone ID: PAT_MRT4530_3830C.1
ctgcaggaattcggcacgaggaaatcccccaccgaatcgatcgaagcagcgagatttcttcttccgcaatccaaatcgccatcgatggcggccgccgccatctcccacctccgccgcggcgcgccgcgccacgcccgcgcgctcctctacctctcgacccgccgcttctcctcctcctccgccgcgggggtggctcccctcgccgcggtcgccgcctcagcccgccgccttctctccacgtcggtggactccggcgcgtcctcgacgggggagagctacaagccgccgctcttcgaccccttccgcgccgccagcctcgcctcgtcggccccgccgctggagtcgccccccatcgaggagctccccgatgacgcgactcctcccccggaggaagagcctgggctacccgcgcccgagaaggatccggtggcgacggcgtgccagcacgagttggagggtctgaaggcctgggtggagacggtgaggagcaggaaggagtcgacggaggagaaggaggcgtggagtctgctcggccgctcggtcgtgagctactgcggcaccgccgtggggacggtggcggcgaacgacccatccaccgcgaaccagatgctcaattacgatcaggtgttcattagagactttgtcccgtcggccatcgcgttcctcctcaagggcgagggggacatcgtgaagaacttcctgctccacactttgcaactccagagctgggagaagacagttgattgctacagtcctggtcagggattgatgcctgctagtttcaaagttagatccatacctctagatggaaacagtgaagcatttgaggaggttcttgaccctgactttggagagtcagccattggacgtgtagcaccagttgattcggtcactgatggatcatgtatgatcgatcgacggatgggaatccatgggcatcctcttgagatccagtcgctattctattctgctttgcgttgtgcccgtgaaatggtcagtgtaaatgacggatctaacagtttgatccgtgccatcaactacaggctcagtgctttgtcgtttcacataagagagtactattgggttgatatgaagaagataaatgaaatttatcgctacaaaactgaagagtactcccatgatgctattaataagttcaatatctatccagaacaaataccttcttggcttgcagattggattcctgaaaagggtggttaccttataggaaatctacaaccggctcacatggatttcaggtttttttctcttggaaatctctgggcaattatctcttctctagctactcaaaggcaagcagagggtatcctgaacctcattgaagccaaatgggaggatataattgcaaatatgccactcaagatatgctaccctgctctagagtatgaggaatggcgtatcatcactggcagtgaccctaaaaacacgccctggtcgtatcataatggtggatcttggcctacattgctatggcagttcactctagcctgtatcaagatgggtaggcgtgacttagcacagcgagccattgaagtcgcagaaaagagactctcagaggacaagtggccagaatattatgacacaaggacaggaaggtttattgggaagcagtcaaggctatatcaaacttggacgattgcaggataccttagctctaaaatgcttttagactgtccagaattggcatccatattgatttgtgaggaagatctcgagctgctggaagggtgtgcatgcagtgtgaacaagagtgcccgaaccaaatgctcccgtcgtgcggcaaggtcgcagctgactgagtccccagaagtgatgagggccagacatgccgtccagctgttgcatccagcattgtttaggagcaagcagtcatgggttaaactgtcagtagtaaagactcgactgcagtcaagatctgaaattgctcctttttttttcactgatgctccctctttaacatccctgattgctccatgcatcctctgccacttaaaagaacaggagccaggcggttcctggaactgcgaggtctcccttgcagaaacaaataagatccaagcaagatctttagctttgcaattggatcagctgaatacagtggtgggggagcagaagagcattcaacaaaatctggaggacgttaagaagaagaaactaaagtatgcaaacatctgctaa

SEQ ID NO: 34281 - DNA, 683 bp, Oryza sativa
  Clone ID: PAT_MRT4530_38310C.1
cccgatgacagtgtttcatttgaattccagcacaatgtctgtggccgttcaatatacgctgaaggatctgttgatgccgcaatgtttctgcataggaaggtacgctccaatgattccaaaagaatttacgatatgattgatgtcttgagagaaggcagcatgcggtgaagttgatgaagtccgcatgaacaatatgtttagtctgggaggactattggactatagcatgatcatctgatgaaattagtaagtagctatctcatagtggagaagatgatgttccagtcaaactttcccagtgaacagtttgaagcaacccattgcagtatagtttcttctagatcactgctttcaaaattgagtattaggcccctacatctccatggtatgctcagggccgcctccctccctttcggccacgagcgcctgtgtcacggctgcattcaccactagggttgctctcgattctctgctgtgtgctctcggatgcctgaacgcatcagctccgagggtcgatccgcctggaactaagggtccttcagcggcaagccatgttctgactcaatcttccgtccctgccgtggacgtcaaagaagtcatacatagcaacatggaatctaatgctatgtagtacgtacccagctaatgaaacgcaacaatgccaatctaacctgcagcccggg

SEQ ID NO: 34282 - DNA, 219 bp, Oryza sativa
  Clone ID: PAT_MRT4530_38311C.1
atggcgattgtccaggacattggtggcagagtggtcatggtcgatggggatcggcggtggcgtggctacggaagacgggcagtgactcttggaggcgccgtgggcaacggtcgacggggagaaccggcgacatccaactttgaaccggcgacggagatcggcggctgtgtggcggatggcatggggtgcggtggaggacgggggaccagaaggagctag

SEQ ID NO: 34283 - DNA, 454 bp, Oryza sativa
  Clone ID: PAT_MRT4530_38312C.1
ccggccgggtattagaatgttggtaggaattttcatcccacatatcaagagaaatacaagctatggatattcatgatgttacccaatacacaatcttgctgcaagttcaaggtggaaaccaaacacatgtcagcaatattcgggaaagcaaccatggtgataaccattgtcaccaaaattgagccaattaataaatgagtggttgaattgactcaaggcctcaagcatatgagttccatcacagaacataagggaactctagctgtaaggaactatttttggtcctgggtgatgctgacgcaaaatgtttataacaatgcatggtgcgttgatagggaactgttttgatcccttgagatgaagtgatgtccccttgtttgtaaaacccatcaaaatagttatgagtaacctttaaaccaatttgcgcaaaaaaaaaaaaaaaaaacccgcggcc

SEQ ID NO: 34284 - DNA, 1895 bp, Oryza sativa
  Clone ID: PAT_MRT4530_38313C.1
gcccgagccttgcaagaatccactgcgacgagcagctgaggaagaggaggagggggaggaggcgttctcctgggaggggaccccgtcccgcccgtttccgccatggcggcggcggcggcttcgtcctcctcctcgccgtgggcggggcggatggcggcggcgttcggggcgccgttcctgtggctcgtctgcctgatctacttcatccagggtttcaggtcttttgtctggacagctgtctcgtaccaaatgaaggacatgatgaaactgtcaccatcaacatcacagtttttggtctcagttgcatatttcccttggagtataaagcctgtatatgggattttgtcagactgtattcccatcaagcagaggaagcgtacgccctatttgatcatttctagctgtctatctctatttccgtggctaatccttgggatgtcagaacctttgaggagctcaagcaattttcttactgctttgctgatagtacagaacttgggatctgccatggcagatgttgttatagatgcaatgattgcagaagcagttcgatcagctgggccagaatttgctggtgatctccagtcactatcttggtcatcaatggcagtaggggggatttttgggagcttattggggggatatgcactgtccaatctccctatacatgttatatatattattttctcggcgcttccattgtttcaactaatttcctgcatatttgttgaggaatctccaaaaggatttgagagtagaatggataatgctgcacctaaacatgtcgaggatcaaactattgatgcttctcccggaaaaagctctagtgaatcatataaatatgaagatactagaaggcgaaaaggagctaggagaaataataaaaggaaatcattgtccaaacgacctgaggaccatgacaagaacaagtcaactaacttaaggccatacttgtctctgaaatcagcattcttcagtttatgcacagcattcaaacaaccaactattttacgacctatggcgtggtttttcttttcgaatgtagcaattccaaatatctcaacagtcatgttctactatcaaacagaggtcctacatttggaggcatcctttctggggactgcacgtgtaattgggtggttcagtctaatgcttggcacatatatctacaaccgctattttaaacacaagaaactcaggaatattctcatgtttgcacatgttggtcttgccataattggcgtactggacattcttttggtgttgcggttacatgttcactatggaattacagacaaatacatggtcttgtggggttctgctttggctgatgcaattaaccagttcaagatgatgccgttcctcatcctctctgggcagctttgccctcctggaatcgagggaacactgttcgctctgttcatgtccatcaacaactttggctcgactttaggctcattcttgggagcggctctggcgtcagctttaagcatctcatcagcacaattcgacaatctggcgctcggcttaggtgtacagctgattggcactctcctaccggttggatttttgtttctgataccaaaggaagttacagggctaacgtcataggaagagggatacacatacctgaccatcatttttttttttccggattggtttgcagtcttaagtgctggagtaattcagaaaagaaaaattaaaggtagcatgatgaaggtactaaggtagtcaattctgttgaaagatgtatacatgaatacactagagtgaggaagaatacaaatagacagtagatggtaggcattgccaagagttgagcaaaggttatgtacctgcgtaatgtactacagtggaagtgacattttttccccggagaaattgacattactgac

SEQ ID NO: 34285 - DNA, 275 bp, Oryza sativa
  Clone ID: PAT_MRT4530_38314C.1
cccctaccttagcttggatccttttttgcggcccgccttttttttttttttggttttttagcgcaacagggcatcatttttaccacttggacactgtgtacaaatatttccggctctccatacgatctgacactttcacctaaaaatttctgagagttgatttgagattctttacaaggtctacagtggtacaagatccattatcaatctgtgctgacatggtgaggtttaggggtgaatactttctttggccactgctttgggtatcaacagga

SEQ ID NO: 34286 - DNA, 435 bp, Oryza sativa
  Clone ID: PAT_MRT4530_38315C.1
tcgtttactgcgacctaccgcaaccgaagagtcgtgcgattcgtcgacaccggcaccgacaccgtcggcagctcgatcccccgcactcaggggggatttggaatagacgaatggtggcgaacaaagtggttgcggcagcatccgtggtggaagaaccggctccctcttcagcggcggcggcagacccgatgaggctggcctcttggcggacgtatccggcgaagcgcagggccgatgtggctcgagatggatgcggagccagcgccgctcgagctgaacactaccaacaggtcgggcctcttagccgacgatctcataccgaccggatgtccgtcagtaacctcactgtcaaccagcacgggcacgacttccgcgtaaggcagagcaaccggcgtgccaccacacgccgaacgaagtactacttccagatgggcg

SEQ ID NO: 34287 - DNA, 1092 bp, Oryza sativa
  Clone ID: PAT_MRT4530_38316C.1
atggggaaggctgcgagaactgggctgccgccgcgccgtcgcggcctcccggaggagatcgtcgtctgggagatcctggtacggcttccccccaaacccctcctccgctgccgccaggtgtgccgcgcatggcgccgtctcacctccaccggcgacttcctcctcacccaccaccgccaccagcccaccctccccctcgtcgacagatacaagtgcaacgaggagttcctcctaggcatcgtttcgctcgaccgccgcgccgctgcagcccggctccagcccgtcgcccagctcgatgacacctgctacatgatgagcgctgatgcctcctgcgatggcctcctcttgctctccatcggtggaatatggtggttcatctgcaacccaatcacgcgtcaattcggtgcgctccacctgctttgtggcttcatggtcatggggttctacaagcatccccctactggggactaccgactgctactataccgaaatcaggagctgatgagtgaacatctgattcctggcgataggaatacctgctatgtatacacattgggctccagcgacgtcccgaggtgtatcgggtggcctgagacgtcggcgagcggcgcaactgttgtgctccattgtagcctgcattggtaccagaggtcccaggatatgattttggtgtttgacaccacagccgagtcgttccgatggatgcgcgctccatctgacaggatgaagtgcacattggatagcgggaatctgtttgacatggatgatatctgggtactgcaggattataagagagagatctggtctctcaagtaccaggtggaattgcctgttccagagatcagggggatgcttggtggggcttatcattggagtgcgatggtcttatcccaggagggggatgtgcttgtgctggttagctgtgatcgatggctattttacattgacactgagggcaacttgttggcgagtttccaacattatggtgatggcctctttactattggactgaagctgaaaccaagccttgttcaacatgcattctttccattgctggatagttatgccgtgaatgcttcgcctttcatctga

SEQ ID NO: 34288 - DNA, 617 bp, Oryza sativa
  Clone ID: PAT_MRT4530_38317C.1
agcagtgtaagagttcatgggctcgcaagatgatcagggtgctcctcgtcgaggacgaggagatcaatagggtcgtggcgagagcggcgctgaaggcggcaggcggcggcgacgtcgtggacgaggcggagaacggggaggtggcggtgcagcgggtgcgggacgcggcggcgccgtacgacctcgtgctcatggacaagcagatgccggtcatggacggccacgagcgtgtgttgttgttgtgcaggcgacgaggcggatccggggcatgggggtgaccacgccgatcgtcgccgtgtcgagcgacggcctccccgccgacgtcgacgcgttcatcaccgccggcgccgacgacttcacgtccaagcctctgtccaaggagaagctgggagtcatccttgccaaatttagacttgcttaacgacgtatatatatgtgtactgcttaattagtatatatgccttgctagatcaagatctccaataaacgggatttatggagtatatatgatgctgcgtttaggaacaaaattttaggcgtgtaatctccgaaaaaaaaaaaggtgtgtaatgtgtatatatgtctgaactaccttacaaagtactatgatcatgatg

SEQ ID NO: 34289 - DNA, 392 bp, Oryza sativa
  Clone ID: PAT_MRT4530_38318C.1
gtattcattaaatggaagcccttacgttagtcctgggagttcatgtttactttaatccccatgcttattttatgtagacatacaaggttcaccaataagcttataagcacaacttttgtcaagcttagcggctttgtagtttaagcgtttcatttttcaatgccattctttctccttttatcttttataatctctggaaattaaatttcatttttttagaaaaaatgaatattacacctatcatgtttccacattttaatttcttcttttgtgtgtccctgtgtaaattgtgtacttttacttgctaaggagtattctttagtgaccggcttctagtggactaagctacgcactgttcaggttgcttttttttgtgttgggggggggggggc

SEQ ID NO: 34290 - DNA, 2574 bp, Oryza sativa
  Clone ID: PAT_MRT4530_38319C.1
atggtgaaggccatatccgaggcggcagacagccggctcatcaccaacaccaaccttctccactggctgatgcgcctacatgcggcggctcaggaagccaaagatgtcctcgacgaattcgaggtcgacggctcaaacatcgcccgcaagcgcaaggccagtgacctcatactgtcatcccgatctctcaagaatctggtcattgctgatgaaagcctgaaaaggataaagataccatcaatcattttcaaaatatcaagaaatggaaagttcttctctaaattatctctcaagaatttggtcattcctgatgaaagcctgacaaggttggaacatgtcgtcaagacccttacacagctctgcgcaacctcagccactttcattgagctcatcaagatggatgattccaaaacaaaccagctgcacaaggcagcagaggccagctctcatctcccggtagatgtccctgtgtttggccgggatgaggtcaaggagttcatcctgaatgtcatctacaatcatgccagagtgaagcaacactttgagcatagagcttgggtctatgtttctgaggatttcaccatcaaaagaactttgcaagaaatcctgcattcgttccaaggacacggtggcgctattttcaatggcgatgaaagcatggaagctaccatcaccaagctccgtatcaagatcagtggaggatgtaaattctttttggtgctagacaacatgtgggaagagatgtgccaggaatggagcgtgctgctcacagcattatccgatgaggcaccattgccgtgggagagcttctggcctctctttcagtaccacacatttggtggtgtggaggttccccaacaagatgacaaccgaaacatgctattgatcgcccaagggattgcaaagaagctagatggattaccattagcagcaaaagtaataggaaacctgctgagatgtaggttctcctgggataattggagaagggttgccgagagtgattggtggaacttggaagaagctctccagggtattctgccatacctcagggacagggtggtccagatgtggcttgcgcacgattttatccagtggaatgagattgctgacgttatgaggccagatgatgttgggaggcagttatttgatgagctcgtggaaaggtccttcttccaacccacatttgttagtaacaacaattcagtttctctacaccagtgcttcttccatggtgaaagatcaacaggagtatcgtccttagcaccaggaaatattcgccacctggccctgcaggttaatagcctggaacaatgccaggagctgcacaagtacagaaatctgcgtactctcctaatatttggccgttgtgagagtgatgcattttttaaccttcttgatgggatgttggagaagtcaccaagtatccgtgtgctagacttattgatacggggaaagcccgaccttctcgacgtaggtccccgtcactcccctgacgcctcaccacctgggtgggtatggcccaaagatgctaggcccctgagaaaactgcgattccttgatctttcatttacaaagatcacaaagttgaaggatctccccaccaacctccaagtcctgcatcttcgtggatatgatgctgatcgtgtgccacaaagtatcaccaagctgaccaacctacggcatctgtatgtagatggttcagcattgtccaagattcaaagtattggacagcaaactgaacttcaagagttggagagcttcattgcacgaaagggacaaggattcatgataagagagttaaagaacatgagggagttcacggggaggctgtgcatccgtggtatcgagaatatcagaagtaaggatgaagcgatggaagctagattgatggacaagaaacatgtgggtgccttggtgatcgaagggaaaagagtgcccaagtttgcacttgaaggactgcaaccacacacaaacatacaggaactcaccatcaaattcttccaggaacaagattttcctgattgggtgtgtccagataacttggttaatctcttacaggtaaatcttgaaagctaccacttcttgtctaccattccaccattgggccatctgcctttgctaaagctcctcaccctaagaaagcttccctcagtgaagcatgccaacggcacatcattcggtggtttcccatctcttgaggagttcgagcttcattcaatggagaaatgggaggagtggacagaaccagatgcagcagctcatgcttatgggttgtcgcttttccttggacacctcaggaagctccatcttgcatactgtccatcactgagacgtttcccgcatcttccatgctttatctgcattgaaagagctgaagatctccaagcctggaagctggatcctggcattaccagcatgttctcaagtcttgtcatccctaataaccttggcagtcgagtactgcaaccacaacgttgtaatgtccgcgcaacagttcaagtccctagaaaatattgagcttatcaaaagtgaagggctacgtttggctgatggattccaatactttagcaaact

SEQ ID NO: 34291 - DNA, 375 bp, Oryza sativa
  Clone ID: PAT_MRT4530_3831C.1
atgggcgaggagggggggggcctccagtcaaagccccgcaggtgcgagcctaatcattgccaccaccgtcgggacccgcgcgcaggggcccacacggtcagagccgtccgatgctccgcgcctcctgatccgacggcccgaagcggcgataggtggcgctcgcgcgactgccaccgatgcgggagttccgcgccgctgtctgtctcgcccgcgattggatttgggctcgaattctccgcgcgcgcgtggcgcccggtccgcgcgtcccgctcccccggcccaaatcttgttcgccgctggtgtccggtcaagccctctcgccgcggccgctgccttgccgacgccgtggacgagttctcgtggccgccggcgtga

SEQ ID NO: 34292 - DNA, 706 bp, Oryza sativa
  Clone ID: PAT_MRT4530_38320C.1
tgttcaatccattaggttgcattcttaaaaggcatggagttaaatttccatggtggtttttcaaagtttactttggttgatgctttcatagacgtagtatggtccaatgtggggctgtaatttgtcatcattccagttatgtcatcacatgtggcatgtgatatacctgtcataaaaatgcgtttaatattgccatgctttcactagcaagttgtaacgatacactattgcataattgctttgaagtttgttttgactagattgaagatgtgaaaatatgatctaattggaatactgaaatgtctacatgattagctctaaacctgccacaagttacttgacattcttctctacaggcttttctgaaggaagctactgctatagttccacttgttatatttgatgatgcaattggtgatcctttatctactcttgaccagttttgatagttcattttttggatctggaatcgtactagaggtatgcctgaaatgcattagcttgtattcagaactatgctgatgaaggcatagttgatcatagatagtgttaaagattgtaaatctgcggttttcttttggctgcttttgtttaccattaagatttgaagaaggtgccaggcataggcaattctttctttcccaaagtagacttcattaacttgtctcaattgcaggcgccaaaaagaagttgagctcagactatt

SEQ ID NO: 34293 - DNA, 157 bp, Oryza sativa
  Clone ID: PAT_MRT4530_38321C.1
atgttccccgccctgtgcgcgtggccccgccgcccgcacgccgcgttgcgccttcgactcggcgtcgtcttcaccctcctcccaccaaggggacacgggcgcatgtgctgcgacgcgaacgtgggcagcacgtcctcctgcgcccgcccaacacccg

SEQ ID NO: 34294 - DNA, 294 bp, Oryza sativa
  Clone ID: PAT_MRT4530_38322C.1
atggcaggtcatgatctctggctatccgagcaagatggaggcatgcggcatggcccacgtgagttcgacgatctctacaacagaaaaggcatcactgacattcgctacttcactaactcaaagatgcacttcgccgaggacttcctcatgccgactctcaacctctgcatcaccaatgcctatatctataatgacagagcgactgcggcgacatcaatggcttcttcaaagctcatgttattgcttgagcgaataaattcactaacaacaaacatcaatccgctatttggatga

SEQ ID NO: 34295 - DNA, 672 bp, Oryza sativa
  Clone ID: PAT_MRT4530_38323C.1
atggcaaacccagaggtggaaaagttcctagatgaagagaaaattgaagaagccattgatgaagcagctactgaatcaagtgaagcaatagctaaagcacctccagctagcacccctgctcctcaaagaactccaccggctccaatacatttgacttatcaacctcggccaattcattctccaactccaatccagcatgaaacaagcgagcatactccatcggctagaggcagtcaccacattgaagatcagccgattcctgccatccctgccttagcggatatgttttcatttgacattaggcagttcatggatgaagaggaagaaacgtcaagcaaagcacaagctcctctagccgatgatcttaaaaccatactcaaagacatagcacatcggcttgagagctccttagatgctttagttgtggactgtggtccaatcagggcaaggtttgaagaaatacaagatcaaatccctgataatgcagctgaagtcatctctccagcagtcttccttgagcaatatcggtacaaactggagagagcaagacaaaggatagccgataggagggaaagaaaagaccttgaagctaccatccaatcaaatcggcaatccatcaatgaagaaaaagccaagcttgatgcattgatttctggacccaatcctatttaa

SEQ ID NO: 34296 - DNA, 461 bp, Oryza sativa
  Clone ID: PAT_MRT4530_38324C.1
gcgacgacgacgaccggagcggcggcggcgcacggctggacaagcggcggcgacggcggcgcacaagttctcgcggaggcggcgctacaggcggcggcgagctaaagcgagggtggcgacgggggctagagggcggcgacggaggcccacggcggccggcgacggcgatggaaagttagggttcgggggcgagaaatgaattcgattcgagatcgaatccaccgatttccaaatgattttagccgatgattccaaaagagaaaaggtagaggggatcccggggatcatttcccctcaatcgatttggccggagaaggaaaggggcagtgggccccacctgtcagcgggagagagagcgcgcgagcgggcggctgcgagctgacttgggccggctaggccgaggagagggtgagagagggttttgggcagccaaaagaagacttttaaaaccttttttcaat

SEQ ID NO: 34297 - DNA, 828 bp, Oryza sativa
  Clone ID: PAT_MRT4530_38325C.1
cggacgcgtgggcgggcgcgtgggagctgctgtactatagcagcagctcttgctcaccagctagcagcaagctatacacctctctttctctcctctctatctttctcaagccaatatctctctcgctaattcgattgggttatcaggccttcatcgtaatccagcttcagctgtgtgtctgtgattgtgtttgtgttgtgtgtgtgagagagagaggcgaagaaattaagaagagcgagagagagagagagctgctgctatacagacttacagaggacgaagatgatgtcgtcgagggaacgcaagaaagcggcggcgctacaggagaagctgcaaatcctccgctccatcactcactcccacgctctgagcaacacgtccatcttaatggacgcgtccaagtacatcaaggagctgaagcagaaggtcgtgaggctgaaccaggagatcgcttgcgcgcaagacgctctcagacaaaatcgggtgaccgtggaaaccctaagacacgggttcctcgtcaacgtcttctccggcaagagctgcccggggctcctcgtctccatcctcgaggccttcgacgagctcggcctcagcgtcctcgaggccacggcctcctgcaccgacaccttccgcctagaagccatcggtagcgagaacctgatggagaaggtggacgagcacgtcgtgaagcaggccgtgctgcgggcgatcaggagctgctccggcagcggcggcgatcaccacgacgacgacgacgacgacgacgacgatggctggagcagagagcaagcatggagcccagtgggtgagcatcgtgtagctggatag

SEQ ID NO: 34298 - DNA, 939 bp, Oryza sativa
  Clone ID: PAT_MRT4530_38326C.1
atggtgccgcacggccgcgtccacccggcggcggcggcgagcagctccgacttctccggcgagatgaaccagtccgccgcctcctccgacccctcctccagcccgccctacagcttccacttcgagaagcccctcccgccgacggcggcggcgccgccgcccgccgacgcgcggcggtaccagcagctgctgccggcgccgcagcccggcacgtacgtggtgcagatgcccaaggacaaggtgttccgcgtcccgccgccggagaacgcgcgcctcttccagcactacacccgccgcgccaggcgccgcgcccgctgctcctgcgcccgcgtctgctcgtggctcctcctcgcgctcgtcctcctcgccgccgcgctcgcggcctccgccgccgtcgtctacctcgtgttcaagcccaggcagccggactacacgctcctgtccctcgccgtgtccggcctcggcggcatcctcggcaacgcctcctccaccgctgcccctgcccccgtctcgttctcgccggagttcgacgccaccgtgcgcgcggacaacccgaacggcaagatcggcgtgcactacgagggcggcgggagccacgtcgccgtgtcgtacggcggcgtgaggctcgccgacggcgcgtggccggcgttctaccagggcccccgcaacgtgacggtgctggtggcgacggcgaaggggttggggatacggttctcggagcgcctgctcggcgacatcgcggcggcggggcggctccggtcggtgccgttcgacgtggacgtcaaggtgcccgtgcgcctgcaggtcggcggcgtgaggacgtgggccgtgccggtgagggtgcggtgcgcggtggtcgtggacaggctcgccgccgacgccaaggtggtgtccaagtcgtgccgcgtgaaggcgcggttcctcttctggaaggactga

SEQ ID NO: 34299 - DNA, 1424 bp, Oryza sativa
  Clone ID: PAT_MRT4530_38327C.1
ttaaaccttgatactaatagcagttcgttcgttcacccagaaaaaaaaattgtgccatgttatagagactgctaaaaacatcacatggaatcgctgtggaagctgagctacttgctcgagccagcgtcgcttgccctcatcttgaccgccgtctccgtcgcctacgcgtcggcgtcgcgcgcgctggaccatggcagggagatggagaggaacctcgacttctccgaggcctccatcacgctcgcccggtcgcaggcgctcatgatcccgctcgcgagctcctgcagcctgctgctgatgttctacctgttctcgtcggtgtcgcacctggtcaccgccttcaccgccgtggcgtcggcgatggcgctcttcttctgcctgtcgccgtacgtaaactgcgtcaggtcgcgcctcggcgttggggacccgttcgtgtcgaggtgctgctcgaagccgtttacccggttgcaggggttgctggttgcgatctgcgtcggcacggtggttgcctggttggtatcggggcactggttgttgaataacctgctggggatatccatatgcatagcgttcgtcagccatgtgaggcttcccaacataaagatctgcgcgttgctgctcgtctgcctgtttgtgtacgacgttttctgggtattcttctcggagaggtttttcggagcaaatgttatggtgtccgttgccactcagaaggcatctaacccggttcacacggtagcgaacaagctcagtctgcctggattgcagctgattacaaagaagctagaacttccagtcaagcttgtcttccccaggagtttgatgggtgggcttgctccaggaagcagtcctggggactatatgatgctcggccttggagacatggccattccagggatgcttctagctcttgtactctcatttgatcaccggaagatcaaagacatgagtgtttcacaagacatgcctccctcgaaacagcggaaatatgtatggtatgcgctgacaggttatggtgttggcttggtaacggctttggctgctgggatcttatcccagtctccccagcctgctttactgtacctggtaccatcaacgcttgggcctgttatgtatatgtcatggttgaggaacgagctatgggagctatgggaaggatccaggccaattataaacgacaaagctcatttgttggaggtttaaaattcaacaggacgtgaaaaaaggtctcgacgtccttgatgtaatctgattacaatttatttcagccatagtctaaaggagaatatttataaggtagaatgcagtgatgtaaggttataccctattgttctcgcaagagggaacaagatgtatcacttattagcaataatataaaggtgtctttcatctcaaaaaaaaaacctgcagcccggggatccactagt

SEQ ID NO: 34300 - DNA, 3442 bp, Oryza sativa
  Clone ID: PAT_MRT4530_38328C.1
atgggtccggacagactgccatttggacttggttttgatagagtacaagcatcagggggatatagatgctctgagcagtatgaatggcaacgtttggcccttcgtcaaagagaagcagcaagggagaaaccccactgtggtgcaaccctgaattaccctttgctttcacatcgcagagacaggatagaagattctgttgctgctacagaaattccagtccggtttagaggacatgatttgctgcatagtcatggcaaaactttgaatgatagaagttgtagccattcttttagggaggaagaaactaaggatcttgtgtcctcctcacatgatgatgctgaaactgagaagaattttgctatatgggaccaacctcttgatcgaactggactcctggagtcaaagcgacacaggcgcagctcctcccctagatattgtatgaagagttatccctttggaaataagattgatggatatcatggtgaaggtcgtgcttgtcctcgcgattcatcaaaatggggcaaccatagtctttctcctgatcatgctccgacaagttgtctaaggactgagggagaagttccttccctcaatcgtgtgtctgagtatgcaaaaggtgcagatggacatatgcgtacaacagaaagacttggggacttcttttcatctaatcaggggagttgcacacaaaatagaagttatcaagaagttcaacgtctgccaactgaagttaacttcccaaatgcccatttctcagcgatagataaagcaaggcatcgatcttacatggaaaagttccagacttgcaagaagcatcagggcacctgttcaaaagatttgatgtttaatatttctgatcactccttggttggtcgaacatgtcataggtttgaagtagggagagctcacaccagtaaggcatttgatgaatttcatgcattccatcatgagcaacttcaccaatctccacgtgataattttagggaccaattgggtagcagtcgaaatttcaggaatgttcataaaggaaagatgtcaagaaggcaatgcacaaaacatgatctcaagaaaaagaattccaatgttgcttttcatagtacgtatgggagaaacagtgaccggaaatggcatggcaatcatctggatggacatagagctaagaggaatatgccttctgaaaatcagtctaaagaatcctgctatccgaacatgaaggattggcaatcatattctcatggtgatgtacgccagagtggtgataatcaggagggaaataccaaaaaaatcaagaaaggaggtcaaaatggagaaaaagggaactatcatcgaaacaacaatattccaactgttgtatgtagtggctcaaagtctaatgagaattcagaagacatgaagagtgatgaggtttcgaatggtaaactacaagatgctccagtcacctatgtggagaatggtgtgaaagaatcagataatgcttctccgtctgaactacttcgtgattgtttgattatatggagaagattgaagaaagataattgtgctgaagctgaaaatgtaaaaaaaaccaatacaaatcggacagtgcaaacaagcaaggtatctgtgagcgaaagattgagaaatggaagacctagctcaggatttgatgatgaaaacagcagcacatcagggagtgcttctgttagctcagaaagcgatgatgaaagtaatagtccatctgaggactccaaacaatgtagaggtgtaatgtcatccagtgaagcacaaaagtgtagcaaaggaagaactgagagagagtcagaggaacccttcaaatcccttagtggcgacaatcgcatgaaaagcccacaaaatacaatagctgagaaaggactaatgttttatcaggatgttccaccagaaacaaatcctagtgaagttatgcagcagaaagaacaagatgacctttcatgttgttggaatggctgttctgatactagcacgaaaccagttgctgattctcatccggaaagtagtgtgcatcagaagttttctcagcagggagcaattgaaggtcattccaacgcaaggagcagacatgaattggttgttggctgtgacattgaaaatacactggaagctgatggtgccaaatcaggtgagcaatcaactgttccggaattgctggacaaaaaagctgctgttctttgctcaatggatgatgatagtgtgaaggtagtaaatgtgtcagcgtgttcaaatcaggacagtgacactactccgtgcggtgtgacaaaattggataaaggaactgcaaacaagttcctagagaagcctgtcaatctttccacaggaagtaactttagagtcatccaatggggcgccgtggattgcaacattgtgagaatcaaacaagagaattcacaacatgcagactctgaacaggatacacatcataaagagagtggggaaccatcacaagctctcaaagtggcatcaaaccaacaaataccccatcagtttgattctgacagagataatccttgtactactagacaagctgattgggattcatgttcctcgataccagacttaaattgcttgcctaatatgaatacagatgatgagctagagccagttgagaatgtgacttttcaggtaaatgaggatggtacaaatccccagaataatatcaagagtctttcagcttcctcttgtaagcccactctgcagaaagaacagtctaagcaacctgagccaattgaacttactggaggaatttgcgaaaggaaagatggaaataggttccagtcacctaattcacatagtggaccatctcagcaaagcatagttgaagaaagtagcatgtccattgatgtattcaagtgtaacctctgtgaattcataaaaaatatcataaagccattgtgggaagatgggctgttatcccgggaagtccacaaaattatagtgaggaaggctgtggaaaaagtgaccaccgtgttgggctcaaaggtccctctgacagagatagatgcctgtagatttttgttagaagaatctcagaatctagagaaactcgttcagggttacttagatttatacgtgggaagggaagttcttaaaaagaagcacgaccgataattctggatcagtcctgcaaatcacagaagctaacaagtacagtagaaagcaacttttttttttcagtttagatcggtgaaaggaaagatcaagtgacaaatcttctatcccttctcatatggggcatttttgaacaccctatcttattccttgcttctagttcccccttccatgcccctgctaaacatatcaatatctaatctatgaagtgcataatgctatgttgtactaattctgtaaatgtgacgccccagcttttggtgggtgaataatggcgcccttttttttcagcaatgtgaagtagtatcttttcccccct

SEQ ID NO: 34301 - DNA, 841 bp, Oryza sativa
  Clone ID: PAT_MRT4530_38329C.1
ttccaaaggttggacctccaagcggttatcggtgaccgagttcatcagagacaagtttatccctatacctgcctctgtcgacaggctgtaccacgagacagggaagaccatcacggtcggcggcgagggtggcaccgtcgcctgggtggacctctggcgtggcatcttcctctgcgacgtgctcgatgagttccctgcgctccgggacatccctctgccgtgcccagcgaggagcaacagggatctcttcctgatacaatatgaccccagctatttccgggatgtgaccatcagccgaaacagagactctatcaagtatattgagatggaaatgtggtcaccaaaagagccgatgaataccaccagcactcctgtttcttatgtggattgcgtgctcaataacacaaggaaatcccaggtaatccgtgacgactggaaggccacaacatggagcatgccaatgccggtgattggttcttcgtgcgagcactggcaccgtgactgtgaggttggtgttaaagacatcaccttgggtgccagcaacccatgtcgttctaacttgagcttcagcgagatcgtggaaatgttcaaggaacttccaatggtaaaccccaccataagcatggatgatgatgttgttttcttgctttctagaaccagtcccagtcccatggacaagttgcatttggtgtttgctattgatgtgaggaagaggacgctgcaaggattaaccaagcttgatgtccagccgcagaactccgtttgcatgtcacaggcgaagcacttaatgaactggaaattagctcttaaattggccaggacaaagaagcgtgtcagatga

SEQ ID NO: 34302 - DNA, 179 bp, Oryza sativa
  Clone ID: PAT_MRT4530_3832C.1
atggcctcaaagaacaatttttctaagcttgtcctcaccaccaccaccaatggatgccccagccaccaagctccattgggcatgaccttcgttcttttctccctaatgattccagtaacgctgaatgcttgctcggaagaaacgaaggaggccggaaccagaagaatatctcgagcaaa

SEQ ID NO: 34303 - DNA, 499 bp, Oryza sativa
  Clone ID: PAT_MRT4530_38330C.1
atggaggcggtgggccggcgagggccgggggaggaagggagagaaaggcggcggttcggaggtggagtgcggcggtggcgcgcgaggtcgccgagggcgccgccggctgcccgcctcgctcgcctgcgggaagagggccggccggtgggtggggaggaggccagcgagctgaggcgggagaggaggtccgacagctttcgaccgacgacgggtgacgcggacgacgacgctggagcaagaggaccgacccccatggcggtgggtgacgcagcgacggcagtgtccacgctctcctgtcgcgctccccgtccccgccgctcgtcggaggtgatggcgcgccatggcggcgtcggggcagatgctaccgcggccgtcgccagaaccacccagccgacaggcatctcccgtcgcagaggacgacatgaacaccatcaaggcccttccggcgccgaggagccggttccggtgcaagaggagcagaacgccggggacaggggcg

SEQ ID NO: 34304 - DNA, 464 bp, Oryza sativa
  Clone ID: PAT_MRT4530_38331C.1
gtgctcaataacacaaggaaatcccaggtaatccgtgacgactggaaggccacaacatggagcatgccaatgccggtgattggttcttcgtgcgagcactggcaccgtgactgtgagaaccagtcccagtcccatggacaagttgcatttggtgtttgctattgatgtgaggaagaggacgctgcaaggattaaccaagcttgatgtccagccgcagaactccgtttgcatggtcaccttatgcaccagtgagatttgcaggtatctgaggaatattacagtcacaggcgaagcacttaatgaactggaaattagctcttaaattggccaggacaaagaagcgtgtcagatgatgcaacttgagcttgttgatttatgaaaattggccgtgtttagtttcacgcccaatttttttatacggacacacatttgaaatattaaacgtagtctaataataaaacaaa

SEQ ID NO: 34305 - DNA, 2289 bp, Oryza sativa
  Clone ID: PAT_MRT4530_38332C.1
atggctgccccgactgttccctacaggaccacggctcctccccttccagagtccgacggccatgaagacggctcatcagggggcatggtcctcctcgacaggtggtgcctcatcgctgacctgcccaacgccagcaccggcgtgggcaccacgagcaccggcttgcgcatccaggcgaccttccaccccgcccgcccgccgcttctctcccgcttctgcgtccactgccccggcctcgacttccgccgcgtggtgcctaagatcatcgcctccgacgccgatctcgtcctcctctgcgtccccgtcaaccccgacagcatcgccaacgcacgaggtttggactactttgtctacaggccgcgcgcccatcggctagatctgctcccgaacccgcaccccgtgtacctccacgactctatgactgccctcctcagccgccaagacggcgcctggtatgcagtcgccgccctgggtcttggccccccggtgtacaaaggcggtgcgcccgttagctgggatttctacctccacctctacagatccacctccagttccaaaggttggacctccaagcggttatcggtgaccgagttcatcagagacaagtttatccctatacctgcctctgtcgacaggctgtaccacgagacagggaagaccatcacggtcggcggcgagggtggcaccgtcgcctgggtggacctctggcgtggcatcttcctctgcgacgtgctcgatgagttccctgcgctccgggacatccctctgccgtgcccagcgaggagcaacagggatctcttcctgatacaatatgaccccagctatttccgggatgtgaccatcagccgaaacagagactctatcaagtatattgagatggaaatgtggtcaccaaaagagccgatgaataccaccagcactcctgtttcttatgtggattgcgtgctcaataacacaaggaaatcccaggtaatccgtgacgactggaaggccacaacatggagcatgccaatgccggtgattggttcttcgtgcgagcactggcaccgtgactgtgaggttggtgttaaagacatcaccttgggtgccagcaacccatgtcgttctaacttgagcttcagcgagatcgtggaaatgttcaaggaacttccaatggtaaaccccaccataagcatggatgatgatgttgttttcttgctttctagaaccagtcccagtcccatggacaagttgcatttggtgtttgctattgatgtgaggaagaggacgctgcaaggattaaccaagcttgatgtccagccgcagaactccgtttgcatggtcaccttatgcaccagtgagatttgcagtggcagaagatacgcagccaagaaattgtgttcagcgtgttcttgccataagcggcattttatgtcacaggcgaagcacttaatgaactggaaattagctcttaaattggccaggacaaagaagcgtgtcagatgatgcaacttgggcttgttgatttagttaaattggccgtgtttagtttcacgcccaatttttttatacggacacacatttgaagtattaaacgtagtctaataataaacaaattacagtccgcctgtaaactgagagacgaatttattaagtctaattaattcgtcattagcaaatgtttactgtagcatcacattatcaaatcatggcgtaattaggctcaaaagattcgtctcgcaatttacatgtaaactgtgcaattgttttttttcgttcacatttaatgctctatgcatgtgcccaaacatttgatgtgataagtttttgaagaatttttatgattactgcaattcgatagcaaaggcaagcatggatgatgatgttgttttcttgctttctagaaccagtcccagtcccatggacaagttgcatttggtgtttgctattgatgtgaggaagaggacgctgcaaggattaaccaagcttgatgtccagccgcagaactccgtttgcatggtcaccttatgcaccagtgagatttgcaggtatctgaggaatattacaggtaacttctctacactggcaattcatcaccttgtgtttttacatgtgaccatatgtatgaatgcaatgcttgccatttttaagatctagggaattattgtttttgtacctttcttgtttcggtagggtctagagctaaattcaggaggcatgccttgtcgccttgatgacagtgtgatgcatggaagactattgatatcagttgttttgtacatcgttgtcaaagttatatatcagttaatt

SEQ ID NO: 34306 - DNA, 411 bp, Oryza sativa
  Clone ID: PAT_MRT4530_38333C.1
atggtggttggttcaacaagggaggtggcaaccaagtgtgtagctaatcgtggagggcttgaggtagccgatgagccattgaagggtacagaaacaaactacagggggagggggagggttgaaaatgaggggggcctcggggtgccacgtcacacccctcaggcccgtgaggcatgctgccccgaggccctcacccgaccaccacgtggcggggcggataggacgggcggcagtgcccccacgtcctaccctatgtcaggcggagtgggggcaggtatgccccgtcccatcggcacactgccaagtgtgccccctgtatatgatgagtccaccaaagtctccatacatttaagagggaatgacagggatgtcccccgtgtcaggtggaggacagcgttgggccccacctag

SEQ ID NO: 34307 - DNA, 156 bp, Oryza sativa
  Clone ID: PAT_MRT4530_38334C.1
atggcggtaagtgatgaagtattgaatagagactttgggacttctccactaagattattgctcatgagcctaagtacttggagagatgagctgtttgccaaggactctggtgactccatcccagttgcagaaattcaaggatgtgttgctccatga

SEQ ID NO: 34308 - DNA, 301 bp, Oryza sativa
  Clone ID: PAT_MRT4530_38335C.1
gccgctggtcctttgcctgcagttgcgtgcagcagtgggcggaaggttaacgccggcgatccatcctcgtcgtgggcgtctctgcacgaggacttggtgagcctaatcggatagcgagtggcagccggcgacttccgcgactacatccgcttccgggccgtgtgtgcccagtggcgctccggcaccatctgcccgcgccgccgtggcatactcgacccgagcttacacccgtgcgggtggatgctgctgcccgagggcacgtggcctacacccgggccacggcaagctacgtggtcacgtc

SEQ ID NO: 34309 - DNA, 375 bp, Oryza sativa
  Clone ID: PAT_MRT4530_38336C.1
ctttcgcgggcttcttcgcattcagcgccgtgggtggcggggggctcaagaagatgcagaacgggaggaaagaagacaaggaggggtatcgatgcatgggacaggcaaatgatggagcgcgaccgccgactgaccggattcatgcgcggacagacagacaagccggttgctccggaaggcttcggggggggcggcccatggaggtgcgagcaacgattcatctaagcgatgcgagcttttcccgcgtcgaaagcggaactggcatacctacacagtatattacatacccaatagtgactacatcgtgctgcgaaaggatcacagcatatacggcagttgtggggacatgcaagcaatcaacaattctcaacgttc

SEQ ID NO: 34310 - DNA, 1278 bp, Oryza sativa
  Clone ID: PAT_MRT4530_38337C.1
atggccgccgccgccgccgccaccttcctcccccacacgcccaccccgcgccgccgcctcgccgtcgctgtccactcaccgacccgccgccgtctctccctcgtgttctccggccctcccgacggcgccctgtcggtggcggcggcggaggagaaggccgacgccggtgaggaggcggcggcggcggtgtcggccccgcggggcggcggaggaggaggagggaaggagcggcgccgcgtggtgcggaaagcgtgggagaagctcgtccggtggtcccggtcctggcggcggcgcaaccggagcgacgtggtcgagacgacgcgcaaggtggtggtgctcggagggggctcgttcgggacggccatggcggcgcaggtggcggccaagaaggccgacctcgaggtctccatgctgctccgggacgacctcgtctgccgatccatcaaccacagccacatcaactgtaaatatttacgagaccacaggttaccagaaaatatcactgcaacaactagtgctagtgatgctttagcaggagcagatttctgcttccatgctgtcccagttcagttcagttcatcatttctcgagggtatttcaacacatgttgatccgaagttgccgttcatatcgcttagcaaagggcttgaacttaacacccttcggacaatgtctcaaatcatccctcaagcgctggggaatccccgccaaccgtttattgttctgtcaggaccttcttttgcaatcgaactgatgaacaaattgccaacaggaaggaacctcatagttattaaactttacatggcagctatggtggtggcatccaaggacaaaaagttggcagctgctgttcagcagctgttggcctcaccgaatttgaggataagcacatcaaatgatgttacaggtgtagaaattgctggcgcacttaagaatgttcttgcaatagcagcaggtatagtagaaggcatgcatcttggaaataactgtatggcggcccttgttgctcaaggctgttcagaaatacgctggttagcaacaaaggttgctgaaggtgtatcaactgctggggctgtcatcgcattggctcagaagtaccatgtaaaaatgccagtcttgacagcagttgcacggataattgacaatgaactaaccccaaagaaggctgttatggagttaatgaatcttccacaggtgcaatatcttagcgaaaacattttattcattcaacgaaaacttgctcatggagaactagaaaacattgaaattaatgaatga

SEQ ID NO: 34311 - DNA, 1761 bp, Oryza sativa
  unsure (1)..(1761): unsure at all n locations
  Clone ID: PAT_MRT4530_38338C.1
gagtcgtcgcttcccccgcccgccaccaccacctgtcgacggcgtacgactactatctcggtgctttgttgctagcttcttccagctagccatgggtgtgaagtggaaaggtggtggcgcgctcctcctgctcgccgccgggctgctcctggtggccgtggcggcggcggcggcggaggaggagggtcggcgggacccgaaggaggagctccggtggtgcaagaagcagtgccggtgggaggccgggcaggaccagcggcagctgagggagtgcgaggagcagtgtctccagcggcagcaggaggacgacgacgacgacgagaacacgcacggcggcggcggcaaggagtgccgccgcgagtgccgtggctaccgcgacgagccgtggcggaagcaggagtgcatgaggcagtgcgagtggcgccgccacgagcagcaccaccacggcggcggccatggcggatccaggccggactgccgtgagcagtgcgagcaccagcaggactggtgggagaagcagcgctgcctcatggactgccgccaccggcgacaggaggtcgacgccgacgacgacaaccaccatggcagagacccctgctacaagcagtgccgccaccaccacgaccagtggaagaagcaacaatgcatggaggagtgcagataccaccagcgccaacaagacgccggcgtcgacgtcgacgaggaaggtagctgacaaccacggcggcgatcgctgacgcaagcagtgccagcaccaaccatgaccagtggaagaagcagcagtgcatccaagattgcaggtaccatcaccgccaagaagacgacgtcgtcgaggaagaagacggccatggcgatcagcaatgccgcaagcagtgccaacaccaccatgaccaatggaagaagcaacaatgcatgcaagactgcaggcagtggcggcgccaggaggaggaagaggccgccgtcgacgaggaagaagaccacaactacggcggcgagagagagcaacactgccgcaagcgatgccagcaccaccacgaccaatggaagaggcagcaatgcatgcaggactgcaggtacaggcgccaggaggaagacgacgtcgtcgacgatgacaaccaccacggcggcggcggcggccatggcggcgaccactgccggaggcaatgccagcaccaccgcgagtggcacgagaggcagcggtgcatgcgagactgccacgagcgccgccatggatgggccacggtggccgccgaagccatcctccaggcagtgtaattaaaggtaacgtaattaagatactgcttcgccgggtgtagggtatagctagctagggtttccatggtcgatcgacctagagctagtgctgtgctgctcgcgcgcgtgcacacacgaatgtgtacgcgagggaggggagaggaataaattgagcaggagatagatggccatggctctctccgataggagagcttctatatatctgggggagacttggaagctatatatactagctagtgtctactatgtctatgtatccggttgttgcagtacacttgtgcttggaagaggtgtatgtatgagataaataaagtggcgttcgcgaaaaagaagagataaataaagtgagagccctttgagtaaaaaaaaaaaaaaaaaaaaaattaggaagtggatattgatcccaaaagtggatatactctgttgtttgtatgtcacttaaatggttataaaaaaaaaaaaaaaaaaaaatgcggagcgtncata

SEQ ID NO: 34312 - DNA, 302 bp, Oryza sativa
  Clone ID: PAT_MRT4530_38339C.1
tttttgatttgcgaacgtagcgaaacgattgccacggtgcactaaaaaaaaatggttgtcaacctgcatagatggtataaccagtcaaggatatttcagtatcatatacatcagattgggtttctgaaaagcaatacatataaatgggatcttcttcaggtgtcatttggtttgatgatgtttacgattccttggatggtcattgctaaaatcctgaccaaggatgtacctacgtccaagacccaacgatcacacactataaagttgaacctgtgaagaaatctcactattgaattagtttt

SEQ ID NO: 34313 - DNA, 1803 bp, Oryza sativa
  Clone ID: PAT_MRT4530_3833C.1
atggccgccggagcgccgccgctcgccggcgtcggagaccggggctcgtcctcctcctcctcgcacccgcctccgcctccccctcccaagatccttctcgccaagcccccgcttccgcccccctcgtcctccggcgccgacgacgacggcggcggcggaggaggcgcgggccgctcgcggcaggccacgcagcctggctcgctcagcctcgtctccgacgcgtgggaggtccacaccgacaagatcctcccgtatttgactgagaacaatgatttcatggtgattggagtaattggtccaactggtgtgggcaagtcaaccatcatgaacgagctttatggatatgatggaagctcacctggaatgcttcctccttttgctacacaaactgaggaaatcaaagcaatggctaagcactgtactgctggcattgatatcaggatctctaatgaacgggttatacttctagacactcagccagtattcagtccctccgtactaattgatatgatgaagccagatggttcatccgcaattcctatcctcagtggtgatccattatcagcagacctggctcatgagttaatgggaatccaggggattaatgacctgtccatgtgggacctcattcttacggttgatttactgaagcacaacatacctgatccatcattattgacctcctcaactacccaagacaaggaaaacaaaaatgataaccaatcaggcattgaagattacatagctgatctctgttttgtgcatgctagattgcgggaacaagacttttctccttcaaagctcatggttctgaagagggttcttgaaaaacacttcaagtcctcctcctttagcattggaagctctggagcaacacctcaagtttctgactcctcagttccttcaagcatgaagattgaggatctgagctccaatcagcaggacatatatcttcttccattaagaacacctgataactcaacaaattttgagtatcggacatgtccatccatgttagggatgcttcgtgatcagatcttatcaaggccatcgaggtcattctcgaagaatctcaccgagcgtgactggttgaggagctcagcgaagatctgggacatgaaaccagaagcaatgctgaaagattcagagaccagaaacaagttcagtagaaaccaccaaggaacagatcgagacgaaccaccaagctcatctatggctgcctccgatctcacgcaccgaccaggtttggcaatcgtgatcatgggagtcagtggctgcggtaaatcgacagtagcagcactgcttgctgaaaccttaggctgcagcttcatcgaagcagacgactaccattctcaggcaaacaaagccaagatgagcaagggcatccctctcaccgacggcgaccgcatcccgtggctggaggccctccgcgacgctgtcagggagcggctggatcatggcgaggacgtcgccgtcagctgctcggcattgcagcagaagtacagggagatcctcagggaaggagactgcagcttcaggtcaggttcagggagctactccagctgcagggtgaagtttgtgtgcctggaggcatcagcagaggtgattgctgacaggatcaggaggagatcaatggaaggggagcacttcatgccggcgagcttgctccagagccagctcgacctgctgcagatcgatgaggcggaggggatcaccgtggtcgatgccacggtgcgccccaacgccatcgtccacgacaccattgctcggttcagggagcagctagcatccactgtgtgctga

SEQ ID NO: 34314 - DNA, 620 bp, Oryza sativa
  Clone ID: PAT_MRT4530_38340C.1
atgaggcagcccaaatgtgtggcggcctgggaacggtggccgatgcgggtgaagccggagccgtccgatctgatcgacgcgtcagcggtgcctctccctctccgccgcaacggcgccgctccccttctccctcccccaccggtggcgctgctccccctcccagcaccggtggcgccgctccatctcccccctccctcccgtttcgttcacacggcgctgcatcggcgagtgctcgacgggggtaagtcagcgacgacgaccaccctcacttcccctctccccatcggcctcgatggtggggctacggggcgggccatccttctctctttttctcatctgcctccgagcaggaggagagcgccggaggatggggcgccggggtagagggagagggtgccgacgcggttggggaggcggtgagtgtggccgtgcctggcgggcgtgaccacgataggagcgcagtggacggcgatggcgacgagctaagatcaaccggatcgggtgacattaagcttgcccatttatgtgattttttcctctcctttttttctttttttctagggttctcgatgcgtatatctgttcgaattgattcttttttcacgtagatttacccgttt

SEQ ID NO: 34315 - DNA, 1249 bp, Oryza sativa
  Clone ID: PAT_MRT4530_38341C.1
agtattcttctcggggtcggggaatgaacttgatgattctttttttttttaacaagaatttaactcgatcagaattcaaaacagaaactaactgaaaaaaagaacaagaagaagaatatgaacagtttgttgatcataaggcaaagctgcgagcgccagatcatcttattactacagctttttggcgatatgctacagaagctttttcctcccttgcaaaaagaaacccaaaccttatttacaacgcaacacacacaccggacacaaatgtgcagatcaaatttaaacataaagcgcgaggagcgtgcaactgtggcgcgacgggggcggggagatgtcggcaaccatgaagtcgtcgtcttcgtcatcgtcgcggatctccagggggaggaactcctcctcgtcgccgtcctcgtcgtcatcgtcatctccggcgagctcgaacgtggcttacggccagcgttggccgtcggcccgcgacttccactccccgacgctctcctgccgcggtggagcacgaggagcgagcccgggggaaggtggcggccgctggcgtcgacctcctcgccgaagaagaggaacaaatggttggcccggcggatgcggaggccgtcgaagccggcgagcgtggtgtccacgcgcagcgcccgcatcctcatcgtcgtccgccgcacgctcccgcacctccgcgacctcctccgctccctcctctactcccccgcgggcgtcgctgtcttcctctccgacctccttgcgtgatgcagcaagagcaacccatgatggactgtacaccgacattgatgtctttctcaaggtatatttgttgtcagttgcatccgaacgtgccgaaggcggagaagaggatcggaagatctcaagcttgatggacgtgaagaagctgtccaaggaggcgtgcatccacgcggcgcagaacaatcgcctcccgctccgcgtcgtcatgcaggtggtcttcttcgagcagctgcgcgcggcagcgggggccagcccggcggcggcgaccggcggcattgcgcggcgtctggtggaggaggaagacgaggacgacgatgtcagtagaggcggtggggattggagcaagtcccgcgcgctgccgacgccgacctcctcaacccgcgagcgctcgccgtggccgccgagctcgcaggaagaaagaagagggagatggatcttgatcgaagggctcggaacgagcgtgtgcatgagtgcagctatatgcccgtgtgcatag

SEQ ID NO: 34316 - DNA, 193 bp, Oryza sativa
  Clone ID: PAT_MRT4530_38342C.1
atggaggcttagtttattctgacgaggattgggcttattgtaattacgctgacgggggctcttactgcctgctaaacaacagcgaattttatgtttggcatgcaggtgcatctgaaggcttatcccaggtgggtttactttagagaccacccgtatgcatgccacttattgatatgtacccaaaaaagtgggc

SEQ ID NO: 34317 - DNA, 1066 bp, Oryza sativa
  unsure (1)..(1066): unsure at all n locations
  Clone ID: PAT_MRT4530_38343C.1
nccggccggggctggccggccggacactccacaccccatccaacccccaccaccatgtctcccaagaaggacgccggcctctcgccgccggtggcggcgccgccgccgctgtcgctcgccggcgtgcccgtgctgacggggagcctacgccccgcggagtgcgccgacctgctcggcctggtcgccggcgtgaagcgcccgctcgaggacgtcgtggcggacttcctcgcccgcatccagcccgagcgccgcctccgcttcggcgccgccataaacttcgtcctcaaggacaagatgatgcttcgaccagctgagcgtttagttgcattcacaattcttcatcaaggttattcctcacagttggaaaatccctttgttcctctaataatacatgctgcttgtgatgaaacctctgataaaccagaacagttgtttctccaacttctgttaaattcaactaatggggacaacgatagggagattctgaagcattctgctgcagattacttggaggaatctgcttatgcatctcaggtcttgctcaccagagagcagcttgaaagacaatatacctgcaatgaggtgcaaccccagcctagcactggtagtttcagagaagctactgttagaagtgttattcctgatccagatatttctcaaagctgcactgattcatcagagatatcaataaccaaatcaaatagagataatttggtcacttgtttacttcaacaaacatcacttgatggaattggtcctcagtggatacggcctcctcctccaagacttgaaatacttgatggagagttgcagtggctgaacctagacaacaaccacgagctattgtgggacagtagtatgtgtgctgatactagtcgaggtgctgcgatccgagatttagttggaaaagcttgtaaaggaccactttcacctgcccaacaggagcaagttctggtggaattggcaaaggactggaagctagtttatcattgtgggatgacaccacagaagctccctgaccttgtggaacataatccactcgttgctgttgaagtcctttcaaagt

SEQ ID NO: 34318 - DNA, 4264 bp, Oryza sativa
  unsure (1)..(4264): unsure at all n locations
  Clone ID: PAT_MRT4530_38344C.1
nggggnaagagggagagaganaggaaaaggagngnnnaaacgactgatcgcacattagagatatcgcgtgctgtggatgatgggctctcgtgggccaagcccaataggaaagaggctgagaaaagccagaaaaggcaagtggtggcggcaagtggcggaaagggaaatcgatcgctgctcctgtcgcccagcgattgatcgcgcattaggagtttcgttccatttaggtataaagtacactgacttccctagcatttctgaagggtctagactaaaatacattgctgacaaccaacatgaactccgctcagaatctgtacaagggataagtgatgccattgatcatggtcttgcatctggggattctgtaggaaagaagtatgtactgcccaccagttttactggtggcagacgttatatggtacagaattaccaagatgcaatggccatatgccgtgtatttggagcacctgacctatttgtgacttttacttgcaattctaagtggcaagaaatatacgatgcattgttgtttgaaccaggccaggtaccaagcgaccgttctgatatgattgttagagttttcaacatgaaagtagacgagtttatctcggacattaaggaaggaaagacatttggcccagtccttgctgtgctctacacagtagaatttcagaagcgtgggccccctcatatacattgccttatttggctgcctgcatccactattgacttcagtgctcctattgttgatgggttcatttctgctgaaatccctgacattttcactgatccattggggtatgctttggttgatgagttcatgatgcatggcccttgtggcaaccagaacaaatcatgcccatgcatgaaaaaaggggagtgttctaagcacttccctaagtcttttcaggacgagacaataatggacgagtttggttttactatttacaaacgtagagataacgaccgatatgttcttaaaaatggagtgaagatcgataatcaatgggttgtgccttacaacatggaacttcttaaaaaataccaagcacatataaatgtcgaatggtgcaataaatctaacatgattaagtacctctttaagtatgtcacaaaaggaaccgacagatctaaagcgtactatgaggttaatagtaagttaccgagtcagttatctgaaaataatagtgcaccacaaaatgacacatcaaagaaaacaccaaacagtaacagcacaccacggaatgagatacaagagtacattgatgcaaggttcctttctacttgtgagtccctttggcatgcttttgagtttgatatccactatagggtgccttcggttgagcgcctaactgtgcatcttccataccagaactttgttcgatacaaaaaaggtgctgacctgaattcgctgcttacaagtcctgcagcccaaaaaatgatgctgacagaatggtttgaggccaataaaaaacatagtgctgcaagaacactgacatactgcgatttcccaaaggaatggacatgggataacagctcatgtagctggcatcctagaacaccatgcgaaaagatagggaggggggccttgtcatatgctgatgttagaacatacgacggtgttgtttatacaacgttcagagaggcgtgcgaagcaagagggttactcgagagtgataatgagtggtacttgctatttgacaaggctataatatctgcatcatctagccaattaagacagttatttgttactattgtgatgttctgctctgttggaaatgtgagatccctgtttgaaaaatattggttgtactttaccgacgatatacaacgacgtcttagaatagctctgttgaacccttcttatttggtcccccatgaaaggctgatgtcactgttaatgaaagaagtgcagactgctttttccaacagtggtggtaccatagacgactacgatttaccgcgcccagcgatttattcagatgatgtggtaggtgttgcttcactgcttctgcctcgaggacgcactgctccttcaagatttaaaataccaattgagattgatgaaaccagtatctgcgctattaaaagaggtactatgcttgctgagctgattcaaaaaacatcacttattatatgggatgaggctccaatgactcataggaaacatcacttattagatcgaactttgcgtgatttactatccgagcaaaaaccttctaatggcaggctgccatttggcggtaaggtagttgtgcttggaggtgattttcgacacatactagaagtgataagaaagggctcgcgtgcttccatagtcgatgcatccataactaactcccccctctggcggcatgttactcttttaagactgaaaattaatatgagacttcttcaaaatgggcttaatgaacgcacccgacgagaccttgaagaatttggtaattggatcctagatctcggtgatggcatgctacctacaaccaaaaaaaacgatgaatctgaaccaacatggatagatattcctaatgatttactaataaagacacccggcgacaaagtaaaggcaattatagatgaggtctttccagatttcccctccagctacacagatcattcctatctagcatgtcgtgctattgtttgcccaaataactcaacagtcgatgaaataaatgattgtgttgttaagatgatacctaccgaagctaaagaatatcttagctgtgatacaatttcaaaagcatgtgaccatatgcctgactttgatatactctacccaactgagttcttagattctattaatgttaacaatttcccatcacatcgtcttactcttaaaaagggtgtcacagttatgttgttgcgaaatttaaatcaatctatgggtctttataatggcacaagactattggttgtttctctaggccatcgacttatagagtgtgtaatattgactggttctaacattggtgagaaggctttcatatctcgaatcgcgcttacaactacaagttctaagtggccttttacacttcaaaggagacagttccctgctacgctaattaataggcttgaacctagtcttgggaacccaacaattcgtgttcgtgtgtcaaggttctgggcttttcgtgaccaaaatgatgaaagtaatttgcaccatcttgggctggttctgcttgatcgcacgggagccagtattgcagcccagattttcccaccattagatgagcttttccagcctcagatcactgaagggaaggtgtatgatctgacattctatcgtgtaaggcagtgcaccagccagtataggccagtgagcaatatgcagtcaatttctttcacaaagtggtccacactggaagaatgcaatgatgtgctagaagatttccctaacatcaaaggaaattatgaaccgataaaatatatcgacctcccagcctcatctgatgctccaaacaatgcagaacaaaagaaaattattgagatcaaggacctgcacccttttaagttcaagtgtgctaatcaccaccctacttctggcaaacagaaacatcagttcttggtcactgttgtcattagaaaaatcaatatggatagttcctggtggtacactgcttgtgacatatgcaacaagacagcaaagcgatttggtagtggatacagatgtggagatccaacatgcccaccagttatttcagcttcgcctgggttcaagctgagtgtgttagcaggcgacgacacagctgatacttcgttcattatctttggtcgtttggcacagcggctcattggtcgttcagtggagacgctgttgcagcagaatccagctaccactgatttcataccaaaggagatcactgatctacttgagaaagaattttcttcgaatgttagtatcatagagaacactgcctttactggcaatgttgcgttccaggtgaacaggatccttggaggtgcttcttcccacggccttcccttgcttcagtcgccatctgcatctcaagcatcttctctcccagcttccatggctctatcaccaactccatcagttggccttagtgatgcacagactggaccaaccagcccatcaactgctgtatcgaaaaagaaggagttggacatagaatgtgtttcaaagacccatgcagatgttcaggatgaagaggacgtagaggatgagggcgctgatcatgccagcctgccacagaaatctcctccatctggcactaaacaaagcgcttccaaaagctaa

SEQ ID NO: 34319 - DNA, 479 bp, Oryza sativa
  Clone ID: PAT_MRT4530_38345C.1
tcgccattcttgtcgcacctggatgcatcagagagagggggaaggaaaaaaaaaaatccatttcgtcagttggcgatcgatttatcgtgttcatcttggaaattataactgggacggtgaaccattacatgtcaaagaaaatgcgaagccgcgagtcgaagttctggtcggtcatctcctcccagaactccttgagctgctccttggtgatgccgtcctccggctccaggttcctccgccgcgccagcgccacgaacagctcgccggcgaactccttggagtcccccatgccttttgatgccaagcagatccaccatggattaatttttcttagttcaattaaaagatcatgaatcatgggcattgttagacatccaaactatctaaaaagagaaatgattcgcttagcgctacacgattattattccatcgatcgcctaactgcctccagcatgaaccggtcgctataaaaaaaaaaa

SEQ ID NO: 34320 - DNA, 807 bp, Oryza sativa
  Clone ID: PAT_MRT4530_38346C.1
ccggccggggccaccaccctctgcgccccgcacgctcccctctcccctcctctctctcgcacacccgccgccgccgctctcccctcctctctctcgcacacccgccgccggcgccgccggcggcgtcgatccgacgtcgattcccatcttcagatcgacgccaccggcgccccctcacgccgcttctactcacgccgcaagaacgctatcgcctcgcctcatcgatctccgacaacaccgccgcgcgcccccgcctatctccgctgctagaacaacgttcctccgcctcatcgatctcctccgacgatattccgactcaattaatcttcagatcaataaggcagtggcgtcggttgaggtcaccatacacaaccgacaacgacaacgcgatgccgctgccccctcaagatccaccgctacctatccgtactcacgccaccgttcctcctccaccaaaaggttcagggcaccctgcaacacccctaccctatgtctaatatgtctccactatcccgataagaatccctgatgtagattttatgtaaaagcatgatttatgctcaatatatattctatgtaccttgtctcagccagggagaagcaaggattacgtggcccgtctagcttcgtccttagcctgcgctgaactggtctcctggcctctgatttgctcgtgcaatctcctgatcctgttccatactgctgatttcagtatggtggggaattgatgtggctggaataagaaaaaaaaaaaaaaaaaaaaaaaaaaaaaaaaaaaaaaaaaaaaaaaaaaaaaaaaaaaaaaaa

SEQ ID NO: 34321 - DNA, 513 bp, Oryza sativa
  Clone ID: PAT_MRT4530_38347C.1
atgacatcatcaatggccggcccaggttggcaacctcgccggagattggatggtcggctgcggttttggagcacatgtacacgtagaggacgacaagacgaacgcaacggtgctcaccaacacgtctaacgaccaccgacgacggccggcgacgagaggagatggcggcggcggctcggacctcgccggcggcgagctacggcggtcggcggcggaaaggagagggtggccgagcttccccacggcttggcgaagcccacgacagtgacggcgaccgacggcgatggcgaacgcggctgcgcgacggcgccggagatagccggcggcgacggcgagcaaagcggcggtggcgacgaggctacggagcacgggaaggcttgggagttggggcaaacgaaagaggaggactagggggtcctatttatagccttggattgaagagatcggactcctcccgcaagaaatcagctcgggaaatcaaaaactcggttttggagataaactcaaaaacga

SEQ ID NO: 34322 - DNA, 3014 bp, Oryza sativa
  Clone ID: PAT_MRT4530_38348C.1
gccgcccttcccccgcgcgcctggtcggccgctgccgccggctccgcggggttgggtccgctgcccgccgtgcctggtagctgctgtgccgttgctcgacggtctggggtggtgggggggggggggggatggctgcggcgacggcgccggtggcgggtgcggcggagcggcagcagcaacagcagcagcagcagcgcggcggggcggcgtcggcgagcggcaacgcggtatttaagagtggccctctcttcatatcatccaaaggaattggatggaaatcatggaaaaagcgttggttcatcctcactcgaacatcacttgttttcttcaagagcgaccctaataccttgccccagagaggtggtgaagtgaatgttactttggggggaattgacttgaacaattctgggagtgtagtggtcagggaagacaagaaattgttaactgtcctttttccagatggtcgtgacggccgtgcttttaccttgaaggcagagacatcggaagatttgtttgagtggaaaacagcattggaagaagctcttgcacaggccccaaatgcagctcttgtgatgggacataatgggatatttcggcgagagaagaggcctatcaaatcattggttgttggtaggccgattcttcttgcactggaagatattgatggcagcccttctttcctagaaaaagctttgcgttttcttgagagacatggaataaaggtggagggaattttgcgccaggctgcagatgtggaggaggttgacaaaagaatgcaagaatatgagcaaggaaggacggagtttgcacaggatgaggatgctcatgttattggtgactgtgtaaagcatgttctacgtgaactaccatcttctccagtacctgcttcctgctgcacagccttattggaagcttttcgtctggagagcaaggaatctcggataaattctatgcgtgcggcaatatctgagacatttcctgagcctaataggcggctgctacagagtttatcaacaactggccaaattcttaacaagcttgtaaaaccattttttggcagaattttgagaatgatgcacactgttgcttctcatactgctgagaatcgaatgactgcatcagcagttgctgcctgtatggctcctctcttgttgcgtccacttctggctggtgagtgtgagatggaagatgacttggacatgaatggtgacagttctgcccagctcattgctgcggcaaatgctgccaacagtgctcaaggcattgtcactactctcttggaggaatatgagggtattttttatgatgagcacctgaggtgttccctatcacctgattctcaaattgaagatagcggaagtgaagagtcaacagatgatgaaactgtggatatcaaggacagtggatttcatgatgcagagaatgatgcagatcaagaattagatgactctgagcgcatattgagtggaaaattaagtgaaaccagtgcatgcactgctggtgacctctatgactacaaggtagctgatgatgattcagacggtgaaccttctacagaagataaggctttggaaacaaaggtggatgtaaatgatgcccagcatagtcatttagctgaaaatgtttcagtgaatgtccagagatcaccgaatgaaaaagatccaccaaatatggtgtccagtcaggattccccgttgtcgatgggagatattctttcttctttggatgctggaatttccttacctggtcctggacctgaatattctgtagacaggcagtccatcaaatccaatggaactcagatgcatgtgaagcgctccaacttttggggacggaacaatggaagaaaaagtcaacagtcagaattggctgattcatcgggtgaagaagagcttgctatccaaagactggagatcacaaagaatgacctccagatcagaatcgcgaaagaggctagaggaaatgcaatcttacaagcaagtttggaaagaagaaaacaagcactacatgagcgccgtttggctctggagcaggatgtttcaaggttgcaagagcagctacaagctgaaagagatcttagagctgcattggaggttggattaagcatgtcttctgcacatatttctagttcacgttctatggattcaaagacgaaggcagagcttgaggagattgctcttgcggaggctgatgttgcaaggttaaagcagaaggttgcggagctccatctccaactcaaccagcagcgtcaacatcagtatggctctttggcagatgcaaatgatcgttatcaacatcttccaaaccatctcccacagaactttgttcaatcaggttttgatatgaaccttgctttctgtaatcaggagaagaagcaaaggaatgagggccccgcaggtgcatcgcattggagaagcatcaagcagcacgtgctacctcatggttcttcaaggcccttctcccggaagcactccatggacgcctcgtcgagtgattcgagggaggcatcaacgagcatgccagcggatggcaattccatgtccgtgaacatcccgaaggcaaccgagggcgtcgagtacgggaggcaagctcccgtggcatcgtccactctggtcgaactgacgaccaggctagatttcttcaaagaacggcggtcacaattaatggagcaactccacagcctggatttaggaaatggatcagctaatcatggtttcccatacaagtcttcgtcaccttggaacagtccaaggtaggaggagacttctttttttttgcgacattctgtttgtatattcttggtaaagaatcctctcgttttctttcgtagaagctgctagtgagaatgaatgtatatccctttcctgttcgtcttccatttgtttttgttttgttgttgcatgcggcagcctcttttgggtgtgattttgtaatatgctttttgtaatctattgtatgtaacacgagttggggggatcataatcattgccacttgtttctggtgtctttccaat

SEQ ID NO: 34323 - DNA, 288 bp, Oryza sativa
  Clone ID: PAT_MRT4530_38349C.1
atggagcggaaggcggagcacgaggttaacctgctccggccgccagcgttgctgcactgggacggctgcgacggcggcgagcagcctccgcccctcaacgagcggcgacggatcgtgcaacgatggattgaatacgaaaatcgcaaaggtcctcgccgtttcgactatgtctcaggcggatggctccagcgccttgacgagccgcgcggcggtagctgcgggcgcttcctccgccgccggagctccgcccgctgccccctccacctccccgagctacgctggctgtga

SEQ ID NO: 34324 - DNA, 4887 bp, Oryza sativa
  Clone ID: PAT_MRT4530_3834C.1
tcattcgtaattggatgatggttcgttgaggtcaaagtcaaacactatcggcctctcattcccagcagcaccttgggtcaacgaggatgcgacatcggtggcagcctgagccgacgaggagggaacgtcgatggcagcctgagctgatgaggaggggacgttgatgaaagcctgaaccgacgaggaagggacgtcgacagcggcttgagctgacaacgatgcgacgtcaacggctgcctgagccgacgaggatgcatcgtcagcagctagagacgacgaggtgtcaacgtcgaggagcattgacatcgagctcagcagcacgggctcgccctgctcaccgtcgggcacatcagcgaagaagatgtttggatcaaagtccagagcctcgtggacggcgtagtttgtcggcacaccgccaggagggatcaccacctggaagaaggaatcgctagccgccggccgtgccgccggcggtggcggcggcgcatgcgatggccctgcagtgtaggagaagacaccgttggggaagagagttgccatgacaacttcatgggctgtcagaacccgcttttccggtaaaggcgtagctgctgcggttgcgagctcaggcgtcgctggaaccggtggcggtgcagctgcgccagaggcagcgagtgtagaaggcaccggcgaaatcacaacatttggttgcattaacggtgcagttgctagtgctgatgcagatgcaggcaccaatgccggttctgtagcaggtgtgggtgccgacggcgatggagtacccacggtcaccgcagtcggaatgcgtccgcgtccgcgcccgcgcccattccaaactccacggccacgactagcaaaggttgcctcagcaacacgcccgcgtccgcgttccggtccaccgcttttggagagggttgaggctgtttggagcttcctcttcttgggtacaggtgcagcagctgcggctgcaactgcaggcggcggcatcgggaccaggatggcttcaggcaccgccgtcggcggtgccaccgccggtgcagcagcagaggcgcctggcgcgagtgtggatgaccccggcgaaatagtggcattcggctccattgttggtgctgatgcaggcaccggcactggagctgcagaaggtggcagtggagcacctgcggtcaccaccgccgaagtaagtccgcatccacgcccacgcccacggtttccacccgcaacggcggcatcggcaacacgtccgcgaccacgtgcacgtccacggccgcgctctccaccgcttgcgaagagggttgaggctgtctggagcttccttttcctatcgggtgcaggtgcagcaactgcggttgccgctgcaggcagtggcggcggtggcggcgggatcgcttcagctgccaccggcgccggtgcaaatgcggctgcagcagaagcgctggctgcgagtgtggacgacaccgtcgagatcggtgcaggtgcaggtgctgatacaagtgccttcgccggagtggcagcaggtatgggcgccggcggcggtggagcacccacgatcaccaccgtcggagcgcatttggtttcggacccacgcccatggccacgaccggcagcgttggcgatggcaacacatccgcgtccccgtccaagtccgtgctctctgctgcttgcagagagagttgcgggtgtagcaggcggtggtgcgagcgcttcaagagccgccagcgatggagccggtgccggtacagcataagcgggcgcgagtgcggatgacggcggagaaatgacagcattcggctccaccggcggcgcaggtgcatgcacagcaggtgtgggcaccggcagcggtggagcaaccacggtcaccgccgtcggagcgcatttgcctccgcgcccacgcccaccaccgccaccgcgcccatgtccggtaccgacaccgcggagaagtccacgcccaccaccaacaccgacactggcgccgcgcccgcttccccttccaccaacaaatgcaccttgggtcgacgaggatgcaacatcagtggcagcctgagccaatgaggcgggaacgtcaatggcagcctgagccgatgaggaggggatgtcgacgacagccagaaccgacgaggaagggacatcgatggcagcctgagctgacgatgatgcgacgtcaacggctgcctgagccgacgaggctgcatcgtcggcaaccagagtcaatgagttgtcaatgtcaaggagcgtcgatgtcaagctcagcaacacgagctcgtcctgctccccgtcgggcacatcggcgaagaagacgtttgggtcaaagtccggagcctcatgtatggcgtagtttgtcggcacaccgccgggagggatcacctcctggaagaaggaaccgctagccaccggcggtggcggcgcatgtgatgacccggcagtgtaggagaagacaccgttggggaagagtgttgccatgacaacgtcatgggctgtcagcaccggcttttccggtaaaggcgccgctgctgcggttgtgagctcaggtatcgccggcaccggtggccatgcagctacgccagaggcagcaagtgtgggcggcaccggtgaaatcacaacatttgactgtattaacggtgcagttgctgatgctggtgcaggtgtgggcgccgacggcgatggagtacccacggtcacctcagtcggaatgcgtccgcgtccgcgcccgcgcacactccaaactccacggccacgaccgacaaaggttgcctcggcaacacgcccgcgtcctcgtcctggtccaccacttccggagagggttgaggctgtccggaccttcctcttcttgggtacaggtgcagcagctgcggctgcggctgcaggcggcggcatcgggatcaagatcgcttcaagcgccgccgccggcggtgccaccgccggtgcagctgcagctgcagcagaggcgcctggcgcgagtgtggatgacacgaccggcgcaataatgtcattcggctccagtgatggtgctgatgcaggcgccggtgctggagctgcagaaggcggcggtggagcacccacggtcaccaccgctggagttagtccgcatccgcgcccacgcccacggctgccaccggcaatggcggcatcggcaacacgtccgcggccgcgtgcacgtccacgtccgcgctctccaccgcttgaggagaggcttgaggcagtcaggagcttccttttcctttcagctgcaggtgcagcagctgtgcttgccgcagcaggcaatggcggcggcgggatcacttcagctgccgccggcgctggcgccggtgcaaatgcagctgcagcagaggcgctggctgcgagtaccggcgagatcacagaactcggtgcaggtgcaggtgctgatacgaacgccttcgccggagctgcagcaggtgtgcgcgcctgcggcggtggagcacccacggtcaccgccgtcggagcgcgtttggctccgctcccacgcccacggccgcggccggcgaccgcagcgttcgcgatggcaacacatccgcgctctccgccgcttgcggagagggatgcaggtgcagcaggtggcggcggcgcgagcgcttcaagagccgccggtgctggagccggcgccggcgcagcataagcgggcgcgattgacgctggagaaacgagagcatccggctccaccgacagcgcaggtgcatgtgcagctgctgatgcaggcgccagcgtcggggctgctgcacctgcagcaggtgtgggcaccggcggcggtggagcaaccacggtcaccgccgtcgtcggagcgcgtttgcctccgcgcccacgcccgccaccgccaccgcgcccaagtccacggccgccaccaacaccggcaccggcgccgcgtccccgtccaccaacaaatgcagcttcatcagatccagatgacgtcggagctggcacctgcaccggcaccggcaccagagcaacatcagatgacggcggcgcgggcacctgcaccggcaccggagatgcatcagataacgtcggcgctggcaccggagctgcatcagatgacggcggcacgggcacctgcacaatcaccggagatgcatcagataacagcgtcgctggcacaggagctgcatcagatgacgacggaggcgctgccacctgcaccgtcaccggagacacatcagacgaaggcggcggcgcaggcagcaacaggagaggagcaggagcaggagcctcgctcgcctccgcctctgccgccgccgccccacgttcctccaccacacgctcgcggcgagctcgagctcggtcgaagaacgctagcatggaccgcatctccgccgaaagcggcgacggcgtctgcgcgggatcgccgaagttggtcgccgccgcctccccgcgcagcacccgcgccgccgcgtcgtacgcccacgccccctgctccgccgtgtcgaacgtccccagccacagccgcccggcccccgtcgggttgtggatctcggcgacatacctcgtcccaaacctcaccctcaccccacgatacttcgtctccgggtcaatctcctcccactcctccgccgccgcctgacgacgccagcgccgccgctccacggcggggacgacgcgaacctcgccctccaccaacggcgaaaccaaaacctccgccgacgccgacgacgacaccacctgatccccctccatgacgggcacaatcacgagctccaacccggaaccggccctcaacctctccctctccccgggcgacagcagaaatccgccgccgccgcccgcggcggcggcgcggcggtactcgttcccccgtacctgcacggcgaggcgcgccgactgctgggagtactccaccagcaagcctttcatcgcctccgctactctctcctccggatccat

SEQ ID NO: 34325 - DNA, 825 bp, Oryza sativa
  Clone ID: PAT_MRT4530_38350C.1
atggcggagcaaggcattctccggcggtggaagcgcttcttcccggcgttcgcctccatccacgccgccatcgaggccgccgagccgggcatctcccgcaaggagttccgcgacgcgacagacaaggtggtggcgatgctctgcagcgcgacggacgacgaggcggtggcggaggagctccgcgtcgtgctcgacgagatgatggtcgaggcgctcctgacgctggagctggtgccggcgatgcccaagatgctggcctccaccgacctcgcgcaggacgtcggcgcgctgaggaaccacccgtcggagcgagtccgcggcctcgccaccggcatcgtccgcgcgtggagggcctccgtcaaggacgagctcctcaaggccgcagccgccatggagaagctctcccaggcgctggagcccgacgaggccgacgaccatcacgccaagatcctgcagccatcgccgcccaagaagacggcaaactcctcacagccgtcgttccccaagaagcagagtgctccggtcgccggcggcagtcatgtcacgatggccaagatggagccgccgcgggagaagctgccggccgccgtcggaagcttccgccgcgagagtgccgcgtcgtgcggtaccgacgagaaggccatgaacgctgcgaagcgcaagctccgcgaaggttatcaagaagcagaggacgcgaagcggcagcgcacaatcaaggtgatcgaggcgccgaagcagcagcagcggaagaggcacccgatcgtgcaggagcggaaccgatctagagttgcctcgcacacgtcgtcgttgcgtcgtagattctag

SEQ ID NO: 34326 - DNA, 255 bp, Oryza sativa
  Clone ID: PAT_MRT4530_38351C.1
atgtcctcctcgagccccttaagcatccagacccatgttgcaacactcatgccccttaagcatccagacccatgcaatgaactccaacgagcagccacccgcatcatgctgcagcaggtccctgcctccatttacggcaaccgcgggggagagagagctccaatgcttgccgctgccgccgtcgaggagtacatccttccggtctgtgctcaagaccgcgtggccgtcggctgccctgaatgttgtgtcctctga

SEQ ID NO: 34327 - DNA, 518 bp, Oryza sativa
  unsure (1)..(518): unsure at all n locations
  Clone ID: PAT_MRT4530_38352C.1
tttttttttttttgagccaaatgttgttgnagtcttttattcctgagttccaggttttattccatacgcagaccacactctggnaaagccnntagcncctacnaggcatcacgccagccagttcatggtcagntcctttttcaccaggtcagggcaaccaggtcatcctctcaccggtccagacatgcccatctcaagccatccaatcatcacggtggcatttggcgaaaaaaatgcgaccacaaacanacacacacaacaacagcaacatcaaacacaccacactgggcacccaggcatcatttccttcctcaataggggtcctcccccgcaacatcaatttcaccagcattgtgccatcatgcaatcagcacactcaggcgttttggccaggcgccattgttgctttggagcattgcaccatgcattcattgccccancaatccactcccaaacccagcaacccaagggctgcttgcctgcaagcatcctccaatccacccccacaaggcatcctt

SEQ ID NO: 34328 - DNA, 867 bp, Oryza sativa
  Clone ID: PAT_MRT4530_38353C.1
atggcggagcaaggcgttctccggcggtggaagcgcttcttcccggcgttcgcctccatccacgccgccatcgaggccgccgagccgggcatctcccgcagggagttccgcgacgcgacagacaaggtggtggcgatgctctgcaacgcgacggacgacgaggcggtggcggaggagctccgcgtcgtgctcgacgggatgatggtcgaggcgctcctcacgctggagctggttccggcgatgcccaagatgctggcctccaccgacctcgcgcaggacgtcggcgcgctgaggaatcacccgtcggagcgagtccgcagcctcgccatcggcatcgtccgcgggtggagggcctccgtcaaggacgagctcctcaaggccgcagccgccatggagaagctctcccaggcgatggagcccgacgaggccgacgaccatcacgccaagatccttcagccatcgccgcccaagaagacggcaaacacctcacggtcacagccgcctttccccaagaagcagagtgctcgtccggtggtcggcggcagccgtgtcaccacgatggccaagatcgatccgccaccggagaaggcgccggcggcggctgcggctcgaagctcccaccaccgcgagagcgtcgtgccgtgctgtaccgacgagaaggccatgaacgccgcgaagaggaagctccgggaagggtaccaagaagcagaggaggcgaagcggcggcgcacgatccaggtgatccaggcgccggacaggcagcggaagatgcaggcgatcacgcggccgcgaagccgaccgagcttcgtcgccgccgcctccacggcgaagaagagctctggattctcatcgcttcggaggttttag

SEQ ID NO: 34329 - DNA, 577 bp, Oryza sativa
  Clone ID: PAT_MRT4530_38354C.1
ctcgcgtccggtttgtctgattcttcttggactgatacggatggtggacttgttctcgttgcgcgtacgttacaagaaccgtgacggcgtgtggctgtggacattgtccatggtcgtgatctttttttttcctttgatttgttgtagtttatagttttttttttttattctattttatttttttatttttttttattttttttttatttttttatttatctttttattttattctttttatttttttttttttttttttttttaattatttattctttttttatttttattttttttttttctttttttttttttttctttattaattttttttatctatttaatttttctattttatattttcttttttattttttttttttttttttttattctatatctttttttttttttttcttttctttttttttattatttttttctaattcttatttttattttttttttctttttttttattatttcttatatatattttttcttttattttttttttctttttattttttcattattattttttttttatatcttttttattatatttttatttttt

SEQ ID NO: 34330 - DNA, 192 bp, Oryza sativa
  Clone ID: PAT_MRT4530_38355C.1
atgagcatccttaatgagatcatcatccggaataggaagacctgggcatgcacaactcacatcgagacatccaaggagatcatcatgcaaaataaaacaaaatttgaggggagcaacgcccgcggacacctgaatacgacggtgcgattcgccggcctgcgccgccacccaccgtggcctgaaaccaagatc

SEQ ID NO: 34331 - DNA, 3161 bp, Oryza sativa
  Clone ID: PAT_MRT4530_38356C.1
acatacaaaaccggtagtgctaatcttgcttagaaatcactcaagttacagcaattaccatttggaaatcttgaatcaatgcaggaggccaatctctgctcgcctccccaacactacactactgcatgtttacaaactgagcgagccgtgaaatatatcggaggaaaaaaatgcgtgttgacgactacggtagccgtgagcccatgaagacaaacctgaactaaattctcgacgagaaaattttttttggtcctaatgctcttacatgtaaagaagatgataactggaaccatctaatacaaagttcaccatctactagctaagttacaaaacttgggcagaaaaatcgaaaccacgcccaaaagttaaactctaacaaaactgaaagtataatgtcgatctccaaacaaatggaacaattacataactttccttgagcttagttgccgagatgagacctcaatatcttttgtgaatatatttgtgagggcgaaaagcagcaacacaaaaactacttgggcactcacgattccgaaatggctgatgctattgccaatttccatccaactccccgtatttcgaaccaggaaaaagaaatgaatcgtcattacatcagacagcagtattacaaggaaataacagcccagccgtggtatacgtacaaccttggttatggcactaaatgtacatatgacaagcataaatggaatgaacaatttgaagataagaagtgctgccatcaggaacggactaaatattgtaatgaaccggtacacagatgaaatttcaaagcttgcaatactcgcaaaattcccagttccaaagaacgcaacattaaataagatcgtaaataacagagggattcgtagatcagatagttgtaagcatctttcatcatagccgaaaattgagccctccacaatgctactacggcgtgcagaaccattttgttctgagcaatacaagttggcagattccacaaatatccatcccataagtaccattgcaaaagcactatagaaaaccgcttcatagccaatagagagcaatagaaatggaggagcaaatcccaagaacccagatgtaaggcgagatagaacacttgatggtgaaaaaagtggtagcaccatagcaaaaccagctattaaccagttgatcatctggtgcaatgggtgcagctgtttgttctgagaccggtgcgaggtcgatatccacaccattatagaagatatcgcaacaaatacaacctgaacaaaaaatagcttagagaattgaggatcccgtttatttgctcgagtaagatatagccaaaagttgttattatttgtggccatccatctcgatgccattgcagtcagtattatcaaggccccactaaaaattaccaagttgttgttttctggaatttcagctggcatcaatgtgaataaagataggaaccagcatgaaagccacacatagactgcaagtgcagagctagcttgtataaatattgcaacacaagatgaagcaagtatcccaaggatcaaaaagcaccaagtataaagcttcctatcaaagaagctcataaccagaaactccaatatgaacagcgcaatgactgaaatgttcagaagattcatggtgtacttgaatggcatattagataattctctccatactgccttgatgaattcaaaattttgaacaattcttgtccaaaggaatattgtcataaataaataagcatgataaagaagtggagatttctctaaaagtagtataatggatgaaaaacccataatgaagcatccaactatgtatactttcacagaggtgttcttagcatacacttgagtccttttttgaagattagcaggaaatgatgtataagactgtagcacatgtagaatgaggttcaccatccatccaatatatccaagggtaattgttgtcatcaacatgaaccagtcatatgtttgaaaataatggagaccagcaagagccatacttcggagttcttcagaatgcttcatggcattttcatagtcctttgcagatataagatcttcaatttgatcaaggactaaagaatagtttgccagtggcttaaaaggcttgaagtagagtgaacttgattgtttcatctcttgcttaatttcaaataatgcgtaggtaagcttccaacagaattcagcgggcatggcagacccacaagtgtagcctttgtcactcattccatgatccgctgtaaacacgtaagcagtctggttatcgttgaagtagctttccatgagattgtacatactttcagctatttgatctacaaccttaacgttgttaagatagatgtttgaatagggtcgatgtgcatggccgttagtatcacaacccagtaagtgcagaaatatgaccaatttatcctgtaggagcaattgtctcaatttagcatcctcaaaagacctgttgagaagaccttgaaactgtcgcaaagtcttcatattcatggggataagtaccccaggtactgtgaggtaggctgctgcagaatatgggaacaatatctggactgccaaacgagataatgtgtctactttgattgaatacagaatcaaactcaacaggattggccttccatccgtgtatcccaaattttcaacacaaaataggtccttaataaatctcaagtaaagtagcccacaggccacagccagcacaagataacctaggatatcaatgggtagaacaatgctcacagtttctacaactttggtgacagcactggggtcttcatagaagccggcgatgatggcgacgtggcctggcctggactccgttggcggccgcgcgtggctgaccccccacctgcccttctcctcgatcaccccgcgcagaaacggcgccctgtacctcccccgctcgtccggctcgaagaacttgtccgccctgagcccgtccgcgacgaggaggacgaggcgcttggcggggggagcggagaagcggggcggctcgggggccatgccgtggacgatgggggacttgaagtagatgtcgaagatgctgagcatgtagacggcgtggagggcgacgccgaggacgaccagccaccgctcgcgccgccgcgtggaggccgacggcgagtgcggctgcggctgcggctgcgggcgggcgcggccggccat

SEQ ID NO: 34332 - DNA, 1104 bp, Oryza sativa
  Clone ID: PAT_MRT4530_38357C.1
atggaatctgagcctttagcatcaagttcatcaagagaaaaaaccatgatgtcatccaattccctcttccagcgtctggcaaaatggtgcccgtggttactgagagatgagccgaagaagcctgtcaaggttcttgtcaccggcgccgcagggcaaatagggtatgccattgtcgcgatgatcgcgaggggcctcatgctaggagccgaccagccggtggtgctccacctgctggatctgccggtcgcggccaatgctctgaacggcgtcaggatggaactgatcgacgctgcgctgccgctgctcagaggagtggtggcgacgagtgacgaggctgaggcgttcaagggcgtcaacgtcgccatcgtcatcggtggatggccgaggagagacgggatggagaggaaagatttgattagcaagaacgtgacaatctacaaatcccaggcctctgcgctccatcagcacgccgccccaaactgcaaggtcttggtcgtggccaatcccgcgaacaccaacgcgctcgtcctgaaggagttcgccccggcaatcccggccaagaacatcacctgcctcaccaggctcgaccacaaccgcgccctcggccaggtcgccgagaagctgaacgtgcacgtcggcgacgtcaagaacgccatcatatggggcaaccactcctccacgcagttccccgacgccagccacgccaccgtctcgaccgaccgcggcgagaggcccgtcagggagctcatcgccgacgagatatggctgagggaggagttcgtcaccgacgtgcagcagcgaggcgcggcggtgatcaaggcgcggaagcagtcgagctcgctgtccgccgccagcgcggcatgcgaccacatgagagactggatccttggaaccccaaagggtacgtgggtgtccatgggcgtttactctgacggcagctatggcgtccccgagggcgtcttcttctcgtttccggtgacctgcgagaagggggagtggtctgtcgtgcagggtcttgagattgacgactttgcacgctccaagatggaaacctcggcgaccgagctcaaggaagagaagtccattgcttatgagtttctctga

SEQ ID NO: 34333 - DNA, 352 bp, Oryza sativa
  Clone ID: PAT_MRT4530_38358C.1
aaagggcaaacgaacggaaacccttgtttttttaaccttcatgggttgtcaaaacctttcaatttttccaaggggttcattagaactgggaactttttaacatttttttttgtaacttggacattgacccattttaattaaacttggaacagggctttacgggccctttttttttgggggcaacaactaatttcaggatagggcccttttttcatggtttcatgaacaaacccccaaaccattaaggagttttacatttccaaattttttgggccccacaaatccttttttgacaggtttttttttggagttctttaaagggttggcaatgtttttttcacacgatttttgg

SEQ ID NO: 34334 - DNA, 334 bp, Oryza sativa
  Clone ID: PAT_MRT4530_38359C.1
aaataggggaaggcgtacccatggaaggggcatcaagacagaactgtttcgcatgaacaatcaggaatgtggggttaacacccgaacccttatactattgcacactggtaccagacaccggcaacggagggaatgctcctacaatgaatgcacctgatgggatagattccccatctgggtggggggtttggggccaacaaaaattgaacttgagcgttgatttgcccaaaggataccacacctacctgctgtaactgtaaatgctgcacaactgtctgaacgctactaaaggccaggaattgatattggtgcaactccagcctgatctgttggc

SEQ ID NO: 34335 - DNA, 886 bp, Oryza sativa
  Clone ID: PAT_MRT4530_3835C.1
gttctctcttggcctaatttttcaatgatatatctgcactcaaaggtagaaggcacataatatactaaaactgtcgcatgtcattcaggtccagattatcttgacagtgtcatgcatgtcccaaagtgcaaagtttcatttctatttattttgagaagaaccacaagagttgactgggaaaaaaatcaataaatatacaaattcaaccttgaagttttctctccatttctcccgtatgttgtcaatatggcgacaggcacaccctcattaagcgcatcatcaatgaacctttgaatggtttaatacacaagatcagacacaatgtaacttccaaagttcaagatagtagtaattcataaagcaagctcatggcatagaaaagaaaaaaaggaacaaaagatcaaaacaacgacagaacagaaagatattgcttacaaatgctcatgcattgatggaaataaagcaagatgcatgggtataaaaaaaacacactggatcttttgaattatggtaccatgtctgccatactttgcagaatgcaaattctcacataaatttctggtaaagcccctcaaaagaactaccttgcataccactatggttatcatatcttagaagtatgatttataatgatcctaaaagtgatatatcaatcaacaataacccaaatgatcctggaattatttccctagagagatacttcatagaaaattagataaactgggaacggtagacttactgttcaactccaggccgcagtggtaagctatcagaagctgagaacccttccaaagctttcagctatgagaagaagcacatgtaaacaagtcagtagaaggatattttttggtctataggaaagaagacgaaaaaacccccatcaccc

SEQ ID NO: 34336 - DNA, 1365 bp, Oryza sativa
  Clone ID: PAT_MRT4530_38360C.1
acatgataatccttctttacactgtgatgtggcaggtatatatgcacaccatattaatcactagtacctaacttgggttagctaaacttgggtgtctttctgtacacacggccacacggggattcagaatccacggtaatgtgccagcatcaacatggtagcaactagcaaacccaccagtcataccaaatacaatatatgggaatggtctagcagatactagatagacagctccactactctactctctactctagatctaacacctgaagttaaattaggagttagagctctaccaaataggccctaacgattagaataaaaattcagcaaaaaaattgatgtactgaaatatagaagttgttttctctgagaaatatatacgcatgttcggagaacaaatcaaccactagacatgttttccataccacgatattctactttagaggcagcacaatatttagccggttgatcacttaccgggtctagctttagcctggcacactacaagaaataaatgacgttccatcatattttaaatctgaatattacactgcaatcaaggttttcaaattaaaaagtatggaccataacaaccatgaaacacagtttctagcccaataggatacaaccgtctgatggctcaaagtttcattgatctttccgagaccgccaaagattttctgtagtcaagtgcgcttaaacaccttccgggacattgaagcaacagtataaagcatccttctggactcacttgacaatgggggccagcccatcgaaccaagatttcccattgatttgattgggttacacgggtggtcaatactcttggtccccttcgtgctcgcttcagcacttagcaagtccttcctgcttagttgacaggatggaactatctttagctgcaaccgtcgagacaacaccgatttccagtatgggaagaacatatctctcacttcgcgtatggctgatcctttaggtggttgctttcccaggatcattttactaacttcgcctatatcagaagatgacttgtccgcttcaatagtttccccatagcccactgtaatcagcaatgaaattggtcatgagacagcttatcaaatggaaagcatagttccgaggttggtgtacagagtctggttgcacccccttttgcgctggatgcaagtcataagctttctgcaatgttccaaagttgtgcgttcaccacagcaaatgactttgtaatgggtggacacgtaataaagtttcacagctattttcctttctagtttattttaataaggaataggatcaaccaaaatgaaacacacctctttgtgaatctgacttgccaatcgacatccccccaccatgttggaa

SEQ ID NO: 34337 - DNA, 678 bp, Oryza sativa
  Clone ID: PAT_MRT4530_38361C.1
aagcttctcatctgtgacttgcagttgttacttgttgttacccgtacatacttcaggactgattttgtagtgagatgcatctgcagctgctattcctctgaaaacttaccatttggttggtgaagcataatggatagggccattcagtacatggaaggtccaattctccaaacgtacagctgatgattttctactactgtcacgggccatggcctttctgtttaattgttcagcaagtcaaatgcaaacaagtaatgagcagagacagaaaacctgcttgctgagacatcgactgtgcacaattacatgtttcttatgccatagtgcatgaaaaccaccttttttcttggcggagggagtaatattgtggtgttaattaattgtcaatgaaaacatgttgcttgtgctgtttgcatggatatcaccttttttttggggggcggaggggattgtgttgatagagatagtgtagttttgctgcatagttgtatatgttatgtggaaaaccacattaagtccgcattttggggcactcatacatttgttgattcatcttgtaaaatggaaagttgtagctttgttttaagtagtgttagttttgctgcatagttgtatatgttctgtggaaaaccatattaagtccacatttttccgcgctcaaaaaaaaaaaaaaaaaaa

SEQ ID NO: 34338 - DNA, 471 bp, Oryza sativa
  Clone ID: PAT_MRT4530_38362C.1
ttttgtttttttttttggccggagaataccctgaaaccagcaaccagattatttgctaaccgctgggtgaaccaatcactatttaccacagcaacaggacagctagaagcctaacatccagagcagcagagctccttgttaaaggaaggaacaattctagtctagtttcaattaattttacagctcaacaaaaggggttggtcacactgacaaaagaaaaaagactggactgatcgattcactggtaaaggtttgatcagacgacttcgacctttcgtttggaagagactgatgacctccattactttgctcttgtcacgctatatgctgcctgctatacctttaatttcctgtcgccaggcaaacatgttttgaggaccaaggagaaatgtcatcaaactagccagcactgcaatttgcttcacatcccattttagtcggctggtctgttccttgatgcttgcttgcagc

SEQ ID NO: 34339 - DNA, 2452 bp, Oryza sativa
  Clone ID: PAT_MRT4530_38363C.1
ttctcatgcttccttttgcctgatttgttagggaggctggaagccaaaaggcagcggcaatgccggagtgtccagcgagggagcggttctccgcgctccgcggcgcccggtggcgcgccgatctcggcgtcctccccgactgcgcctccgtgtccaccgaggagttccgccgagccgccgccgactcccgccgcaggtatgctaatttgcggcggcggctgttaatagatccccatctctctaaggatgaagaaaacgctcctgaccttgctgtggaaaatccactatcacagaacccagaaagcacttggggccaatatttcagaaatgcagaactagagaaaatgttgaaccaagatttgtctcggctctaccctgaattgggaaatttcttccaaacaaccatatgtcagtccatgcttggacgtatactgttagtttggagccttaggtacccagagctcggttacaaacaaggaatgcatgagctcttagctcctcttctctatgtcctccatgctgatgtgcattacttcaaacaagtcagggagcttcatgatgagctttttagtgatgattttgatggccaaacatttccagataggataaaactgaacaggagtgacaggacaaacacaattgagggtagtgcagctaaaataagaagtttggatgatcttgattctgatacgagggaccttttcttgattaatgatgcttatggagcagaaggggagctgggtattattttgtctgaaaagttcatggagcatgacgcttattgtatgtttgagagtttgatgcatggttcgatgaatggtgcacaaggtgtggttgctattactgacttctattctctcagtcctgcaccagaatcaagcacaggtttaacacctgtaagggaggcatcatctgcaatatatcacttgcttgctagtgtggattcccctcttcacagtcatttgatggagttgggagtagagcctcagtactttgcgctacgatggctgagagttctattcggtcgtgaattttcacttgacaatcttctgtttatttgggatgagatcttctcatctcctaaccattcatattgtgcagacataaagaatcaatcagactatcagtttaagattttatgttctcatcgtggtgccctgattttgtcaatggcagtttcaatgatgctccatctcagatcttccttgctaggaagtgaacatgcaacttcatgcctagtaagattgttaaattttcctggagacactgacttaaagagcttgattgataaagccaaattattgcaaccttttgctcttgaagcaaatcttccttcatctcctctcagaggaaaatctcccttgaatccacccaactactgggaagagacatggaagatactccagatgtcagaagagaaaagaagtggtggttcaattaataggatgaaggtaagaggtttgttcagaagaagttcccccaacactgaatcaaatgtttcgagaaccaaggatgctaattttgaagatagcaattcgacttcaggtacgcaatctactgctgatgaacatcacagatctggtatagttccagtaaatttggtaaatggtacacttcacacgcctataagagaacgaacaagtcatgttgaacaatgtactgcagagaatatgatcaccacctcaaacaatgtattggaggcaggacagcctgaagttcaccgctccagttctgttgatgttagagatgctcttggagttgcatgtggaaatttatcaagagacagcagtacctcgttatcatgtggtacggagtatgaccatgagactcatcatgcagatgagccatgtgcttcccatgatgataaggtggttagtgagcctgatccactccctgtgcataatgataagattgatgaagtgacaatcgcagccattcaaacatgtgcattggtcgattatcagcaatcacaacagaataaaccgtgttctgttaatgggaaatcagaggtaaaatatcaacaaaattttgctgtgcatgaagttggccgcaaagaaacatttgaactaggttcaagctcagatgtggctgataaagagctacttggaacattaaggttacttggggaatctatggttgaaaacattgaggttattgacttgttgtttcaaccaaatttgcactctacctcactggataaatcagaggaaattgttcttggtagtatagagcaagctaaagcaaaagcagctctagaaggtctcaagaagattagtgaacttctacgacgaatctaacgtgtatatttgtgggaactcgcaaggtaagctctaactacctgttccctacttccatgatatatttccattttttttcacaccagttctaacttaacagaattgttgtcctgaccgaaccatggataaatgggcccattcctttgggaaaaaaa

SEQ ID NO: 34340 - DNA, 270 bp, Oryza sativa
  Clone ID: PAT_MRT4530_38364C.1
atggcgagcacgaggatgatgatcgtcaggaggtgggcgccggtgatcgccgtggcggcggcgctggtggtgctgtcggtgctcggcacggcggcggaggcggcgaggccgttggtagacggaggagtggacggctgggtgggccccggcggcggcggcggcgcggcggcgtccatcgtggagacgctgaggaggctgtacctgcagcagctgggcgggccgggcgcgtcgtgcgggaccaacagccccaacaacggctgcccgccgtag

SEQ ID NO: 34341 - DNA, 393 bp, Oryza sativa
  Clone ID: PAT_MRT4530_38365C.1
gtcgcttcccactatgggggtccactactaatccatactccgccccctcgggtgcaagcgcacaactcatctgctccctcgcctcgtccatatccatgcccccctctcccatgatcaaccccagctcccgccgcctcgccacaccgccccacccgcccacccctccgccacacgccctcgcgggtccgcgccgcggagacgccggccctgggcgcccaccccgcccgcccccgcgcgcccagccccccccgccgcgccgtccgcccctccgccgcggcggcccccctccccggcggcccccccccgccgcgacgtcggccggcccggcggcgccgcggacgcgcggccgcgcggggcccccccgccgccgcgcgcagcccctccgcctctcct

SEQ ID NO: 34342 - DNA, 127 bp, Oryza sativa
  Clone ID: PAT_MRT4530_38366C.1
actaatcaaacattttttgcgaaagcatttgctggataatctatctaattggtttatttgaaaaacaaaacttccattcattggaaatttctatttaggaaaatgagcttatgttttcctccaacag

SEQ ID NO: 34343 - DNA, 3510 bp, Oryza sativa
  Clone ID: PAT_MRT4530_38367C.1
atggcagccactaatcctttcggaggaaacacaatctcagagaaattagccaaaaacaactatgcgctatggaaagcgcaagtcctggcgtcggtgagaggagctcgtcttgaagggcatctcactggcaccacagcagcgccggccatcaccatctccgtgccaggcgagaaggaaggcgacaaggccaccagggtggctaatcccgcctacgatgaatgggtggctacggatcagcagatcctagggcttctactgagcaccctgtccagagatgttctggcgcagggcgatctctccatcacagaatatgtcgccaagatgagagcacttggtgatgacatgacggcggctggcaaggtcgtcgacaacgaagatctcatctcctacatcattgccggcctcgacgacacgtatgaaccggtgatctcctcaatcgtcggcaaatctgagccgatgtccttcggggaggctttctctcaactgctcagctttgagcagtgcaacaatctccgtcacggcggtgagtcgtcagcaaacctggcgaatcgagggtgcggcaccaccggcggcaacggaggccaacgcggacgcggtgggaacaaccgtggacgcggcggcaatggaggcaacaacagcgcaaaccgcggcaagggtggtcgcgggaatggcggcttcaatggaggacgtcaaggaggtggcgtcgacactaggcccaagtgccagctatgttacaagcgaggacatacagtaatcaactgttggtatcgttatgatgaggattttgttccagatgagaagtatgcaggttctgcagccacctcctatggtatcgataccaactggtatgtggatactggggcaactgatcatgtgacaggagagttggagaagctcatcgttcgtgatcactacaaaggacatgatcaagtgcataccgctagcggtgcaggtatggaaattagccatattggtcactctattgttaaaacccccagtcgtgatattcatttacgcaatattttacatgttcctaaggctaacaaaaatttagtttctgctcaacgtcttgtttctgataattctgcctttatggaactatattctaaatatttcaatcttaaggatctggccacgaagaaacttctgcttagggggccctgccgtggttgtctctatgctcttccatctacaccgccacatgcacactcaaccaaagaagtttatggagtctccaagccatcttttgaaaggtggcacagtcgtctcagtcatccctcctctccaattgtagagaaggcaaagagtcatcaattgccttattctatatcatctagtatatctagtcatcctttggaacttatttattctgatgtttggggtcctgcccccacttctgttggaggcaaacagtattattccttccaccggtcgcgtttactctcccatgatgtaatttttgatgagaatgttttcccctttgcctcacttcatcccaatgccggtgcaaaattgcgttctgaaattttattattgccatcccatcttgatattcctattattcctggggtgcaacaaatgagtaccactgtggctaatgttcctactaatcctgctaatcaaatttctggagatgaattatcgctacaggaaaattcggcagcaaataatgcagctccagatggtgcggacgcagccacagctgccacgaaagatccagcggctgactcccctcacacctctgacgcagcgtcttcgagcgtcctccagcgtcgtgtggaggccaccgcagagtcctcctgctctcctgatcggttgcatgtcgagctcacaccggcgcactcacccgtggccatgcaatctccagatgccacgtctcctactgcttcctctaactcacaggagccatccacgtctcttgatgcttctgttgcaggggaggcagatactcagcatcaacagcaccatgtaatatctagaccggctaccacgctgcaaagtgccatcccccacgaaaaaccttatactgatggtacagttacatatgggactactgttctccctgagactggagagccaaataatttaaaggccgccttaaagcctctaattgggaaaaacccccccggcgccgagaaacaagatgggagtctagacagatataaagctcgcttagttgcaaaagggtttaagcaaagatatggcatagattatgaagatacttttagtcctgttgttaaagctgctacaatcaggattattctttccattgctgtctctaaaggatggtgtatgagacagttagatgttcagaatgcttttcttcatggagttctcgaagaagaagtgtatatgaaacaaccaccaggttatgaggacagttctttgccagggtatgtgtgcaagcttgataaagctttatatggcttaaagcaggcacctagagcttggtactctaggcttagcaagaagttatatgatatgggattccaagggtccaaggctgatacttctttgttcttttataacaaaggagatttgattatatttgtactcatttatgttgatgatattattgtcaccagttctagacaggaagctgttccagccttgcttcgggatttacaaaaggagtttgctctgaaggatcttggagatcttcattactttcttggtattgaggtaactaaagtgtctggtggtatagttcttactcaagataaatatgtcaatgatttgttgagaagagtaaatatgtttgactgcaaaccggttagtacacccctgtctacaagtgagaaattgtctataaatgaaggagatcctttaggaccaaatgatgcaacacattatagaagtgtagttggtgctttacagtatctaacattgactaggcctgatattgcttttcctgtaaataaggtttgtcaatttttacatgctccaactacacaccattgggcagctgttaagagaattttaagatatttgaagcaatgtactagacttggacttaagttaagcaagtctagatctatgttagtaagtgcttattcagatgcagattgggctggttccctagatgacaggagatctacaggaggttttgcagtattcttaggagataatcttgtgtcatggagtgcacggaaacaagctactgtttctagatctagtacagagtcagaatataaagctttggctaatgctacagcagagattatgtgggtacagactttattggcagaattgcaagttgagagtccatctatggcaaagttgtggtgtgataatttaggagctaagtatctttctgctaatcctgtgtttcatgccagaactaaacacatagaggttgattatcattttgttcgagaaagagtttcaaggaaattgttagaaattgattttgtgcctacaggagatcaagttgcagatggttttacaaaggctttgtcagttcgacagttggagaattttaagtacaatcttaacttaggaaagttatga

SEQ ID NO: 34344 - DNA, 1116 bp, Oryza sativa
  Clone ID: PAT_MRT4530_38368C.1
atgccagtgcgtcggaggtggtaccccccgagctccaccgcagcccagcccagcccagatggaggcgatgtaaacacagatgacgccgacgcctgcccatcttctcgacagcagagaccgccgtcgcttccacagcattcggctcccatccatcaccgtagacgagtaatcaactccattgatgccagcggtgaggtgatggaatatggatctagtaacgatcagaggatgcaggacatggaaatatggccgtcggacggcggcggcgtggaggaatacgacccgtggacggcttggctttacaagccacacacggtctcggttctccttgccggcgcatgcctcctgatctgggcaagtggggtccttcatccagagattacaagctctcatgataaggtcatacctattaaaaggggtgtctgggctatgatcgcagttttcctagcatactgcactctccaagcaccttcaacgatacttattaggcctcatcctgctgtgtggcgtttggtgcatggcatggctgttgtgtaccttgttgctctaacttttcttcttttccagaactaccagagagatcatatggttctgactgccgagacattgtttgatgaatttgttattgcccatgtcttgggttggtggggtaaggcagtaatgatacggaaccaacttctcctatgggtcttgtcagttggttttgagctcatggagcttacatttaggcacatgctgccaaattttaacgagtgttggtgggacagtattatattggatatcatgatatgtaattggtttggtatttgggcggggatgcacacagtccgttactttgatggcaaaacatacgaatgggttggactgagccgtcagccaagcattatgggtaagaagtcaggctgtcttgtctgcagtttggtatccttaatccctgaatttctaagcaactggtttatcctgcgcaagctagtcaagttcactttaagttcattggttaaccacttccattgtggcaggaaccccttggttgtgtatcggctgatcctttggtggttaattgctatcccggcaattcgtgagtacaacacctacttgcaagacaggtcttcttga

SEQ ID NO: 34345 - DNA, 4140 bp, Oryza sativa
  Clone ID: PAT_MRT4530_38369C.1
atggcagccactaatcctttcggaggaaacacaatctcagagaaattagccaaaaacaactatgcgctatggaaagcgcaagtcctggcgtcggtgagaggagctcgtcttgaagggcatctcactggcaccacagcagcgccggccatcaccatctccgtgccaggcgagaaggaaggcgacaaggccaccagggcggctaatcccgcctacgatgaatgggtggctacggatcagcagatcctagggcttctactgagcaccctgtccaaagatgttctggcgcaggtggccacctgcggcactgcagctgccgcctggagcatgctggaggagatgtatacctccatgacaagggcacgcttcatcaacactcggatcgctctctccaacaccaaaaagggcgatctctccatcacagaatatgtcgccaagatgagagcacttggtgatgacatgacggcggctggcaaggtcgtcgacgacgaagatctcatctcctacatcattgccggcctcgacgacacgtatgaaccggtgatctcctcaatcgtcggcaaatctgagccgatgtccttcggggaggctttctctcaactgctcagctttgagcagcgcaacaatctccgtcacggcggcgagtcgtcagcaaacctggcgaatcgagggcgcggcaccaccggcggcaacggaggccaacgcggacgcggtgggaacaaccgtggacgcggcggcaatggaggcaacaacagcgcaaaccgcggcaagggtggtcgcgggaatggcggcttcaatggaggacgtcaaggaggtggcgtcgacactaggcccaagtgccagctatgttacaagcgaggacatacggtaatcaactgttggtatcgttatgatgaggattttgttccagatgagaagtatgcaggttctgcagccacctcctatggtatcgataccaactggtatgtggatactggggcaactgatcacgtgacaggagagttggagaagctcatcgttcgtgatcgctacaaaggacatgatcaagtgcataccgctagcggtgcaggttaccaaaaatttagttttgctcaacgtcttgtttctgataattctgcctttaaggaactatattctaaatatttccatcttaaggatctagccacgaagaaacttctgcttagggggccctgccgtggtcgtctctatgctcttccatctacaccgccacatgcacactcaaccaaagaagtttatggagtctccaagccatcttttgaaaggtggcacagtcgtctcggtcatccctcctctccaattgtagagaaggcaaagagtcatcaattgccttattctatatcatctagtatatctagtcatcctttggaacttatttattctgatgtttggggtcctgcccccacttctgttggaggcaaacagtattattttaaatctgaagttatccaaaagttccatgagtttcaggctcttgttgaacgattgtttaacagaaaaatcctagcgatgcaatctgactggggaggagaatatgagaaacttaattccttctttaccaaaataggtattactcatcatgtgtcttgtcctcacacacaccagcaaaatggctcagctgaaagaaaacataggcatattgtagaaatgggtcttgctcttcttgcttactcatctatgccattaaagttttgggatgaggcttttacttctgctgtttatctcattaatcgtactcctagcagactcttgaaatatgcaacgcctttggaacgtctgtttaaacaaactcctgactataatattctttgtgtatttgggtgtgcatgttggcctcatctccgaccatataatgctcgcaaattacaattccgttccaaacaatgtacctttctaggttacagtccccttcataaggggttcaaatgtctagatccttccaccggtcgcgtttacatatcccgtgatgtaattttttatgagaatgtttttccctttgcctcacttcatcccaatgccggtgcaaaattgcgttctgaaattttattattgccatcccatcttgatattcctattattcctggggtgcaacaaatgagtaccactgtggctaatgttcctactaatcctgctaatcaaatttctggagatgaattatcgctacaggaaaatttggcagcaaataatgcagctccagatggtgcggacgcagccacagctgccacgaaagatccagcggctgactcccctcacacctctgacgcagcgtcttcgagcgtcctccagcgtcgtgtggaggccaccgtagagtcctcctgctctcctgatcggttgcatgtcgagctcacaccggcgcactcacccgtggccatgcaatctccagatgccacgtctcctactgcttcctctgactcacaggagccatccacgtctcttgatgcttctgttgcaggggaggtagatacacagcaacaacagcaccaggtaatatctagaccggctacgaggttgcaaagtggcattattcgtaaggaaaaagtttatactgatggtacagttaaatataggactacttttctcactgttactggagagccagaaaatttagatgacgctttaaaagataataattggaaaaaagctatggatgcagagtttatggctttacaaaataataagacctggcatttagttccacctcagaaaggtagaaatgttatagactgtaagtgggtgtataaaattaaaaggaaacaagatgggagtctagacagatataaagctcgcttagttgcaaaagggtttaagcaaagatatggcatagattatgaagatacttttagtcctgttgttaaagctgctacaatcaggattattctttccattgctgtctctaaaggatggtgtatgagacagttagatgttcagaatgcttttcttcatggagttctcgaagaagaagtgtatatgaaacaaccaccaggttatgaggacagttctttgccagggtatgtgtgcaagcttgataaagctttatatggcttaaagcaggcccctagagcttggtactctaggcttagcaagaagttatatgatatgggattccaagggtccaaggctgatacttctttgttcttttataacaaaggagatttgattatatttgtactcatttatgttgatgatattattgtcaccagttctagacaggaagctgttccagccttgcttcaggatttacaaaaggagtttgctctgaaggatcttggagatcttcattactttcttggtattgaggtaactaaagtgtctggtggtatagttcttactcaagataaatatgtcaatgatttgttgagaagagtaaatatgtttgactgcaaaccggttagtacacccctgtctacaagtgagaaattgtctataaatgaaggagatcctttaggaccaaatgatgcaacacattatagcagtgtagttggtgctttacagtatctaacattgactaggcctgatattgcttttcctgtaaataaggtttgtcaatttttacatgctccaactacacaccattgggcagctgttaagagaattttaagatatttgaagcaatgtactagacttggacttaagttaagcaagtctagatctatgttagtaagtgcttgttcagatgcagattgggctggttccctagatgacaggagatctacaggaggttttgcagtattcttaggagataatcttgtgtcatggagtgcacggaaacaagctactgtttctagatctagtacagagtcagaatataaagctttggctaatgctacagcagagattatgtgggtacagactttattggcagaattgcaagttgagagtccatctatggcaaagttgtggtgtgataatttaggagctaagtatctttctgctaatcctgtgtttcatgccagaactaaacacatagaggttgattatcattttgttcgagaaagagtttcaaggaaattgttagaaattgattttgtgcctacaggagatcaagttgcagatggttttacaaaggctttgtcagttcgacagttggagaattttaagtacaatcttaacttaggaaagttatga

SEQ ID NO: 34346 - DNA, 141 bp, Oryza sativa
  Clone ID: PAT_MRT4530_3836C.1
atggagttggatgcttgggtcaggttggttagtggagtcgaggtcgaggtcgacgccggagttgggtttggattgaccggggttggggttggggttggggttgggtttggtcaaatttcaagtctgggaaaccgtggttag

SEQ ID NO: 34347 - DNA, 1408 bp, Oryza sativa
  unsure (1)..(1408): unsure at all n locations
  Clone ID: PAT_MRT4530_38370C.1
atgccccgccctggaactgaggctaccaccaccaccacttctggctgtgaagcggattgtggtgtccctgctatgaaggcgacgttgatgatgatgagttgtcggagtcggagtcggagcgggcgtgctcactggatgctgctgctcttctgcctcctcctcgccttcccttcacatggtcctagagccgtggaagcgtttcccgggggctatgggataaactacgggagaatagcaaacaacatcccttctccggataaagtagtacaactcctgagagcttcaaagataaggaatgtcaagatatacgattccgatcacagcgttcttgatgcattcaagggatctgggctcaatctggttatcgccatccccaatgagctcgtgaaggattttgcggcgaatgagagcaggtcgatcgactggctgaatgagaatgtgcagccctatcttcctcagacacgcatagttgggatcactgtgggaaatgaggtgctgggaggtcaagatacaagcttggccgagcccctcgttcaagctgtgaagaatgtctataatggactcaagaaatttcacttgcaagacaaaattgagctattcacaccacactcagaagctgtttttgctacttcatatccaccttctgcatgtgttttcaaggaagatgtcatggtgtatatgaaaccactgctggacttctttcaacaaattggctcacctttctatgtcaacgcatatccctttttggcctacataagtgatccagaacatattgacattaattacgctctcttcaagcccaatcctggaattgttgacccgaatactagtctgcattatgataacatgttcgatgctcagatagatgcagcttatgctgctctgcaggccgctgggtatagagacatggaggtccgagtagcggagactggctgggcttctagtggagatcaaactgaggcaggagcttcagttgagaatgcaaggacttacaatttcaacctccgaaagaggctctttctgaggaaaggaactcctctcaagccaaagagaccagtcaaagcatacatctttgcgttgtttaatgagaattcgaagcctggacctagctcggagaggcactatgggctgtttaatgctgatggaaggattgcatatgatattggttatgagggtctattaccttcatctgcaccctcgtacttcttgtctcttagggaaaacgtatgagggggttggattgtacactattcggctacagttattttatctgttttcattttcttagccttagtgactngattacagaatagcacatctgtattgaacatacaaccgaggttaagtgttagaacaatgtgattgggaattttacaatgaaagatgaaataatagctcccttcgcacc

SEQ ID NO: 34348 - DNA, 3744 bp, Oryza sativa
  Clone ID: PAT_MRT4530_38371C.1
atggcagccactaatcctttcggaggaaacacaatctcagagaaattagccaaaaacaactatgcgctatggaaagcgcaagtcctggcgtcggtgagaggagctcgtcttgaagggcatctcactggcaccacagcagcgccggccatcaccatctccgtgccaggcgagaaggaaggcgacaaggccaccagggtggctaatcccgcctacgatgaatgggtggctacggatcagcagatcctagggcttctactgagcaccctgtccagagatgttctggcgcaggtggccacctgcggcactgcagctaccgcctggagcatgctggaggagatgtatacctccatgacaagggcacgcttcatcaacactcggatcgctctctccaacaccaaaaagggcgatctctccatcacagaatatgtcgccaagatgagagcacttggtgatgacatgacggcggctggcaaggtcgtcgacaacgaagatctcatctcctacatcattgccggcctcgacgacacgtatgaaccggtgatctcctcaatcgtcggcaaatctgagccgatgtccttcggggaggctttctctcaactgctcagctttgagcagtgcaacaatctccgtcacggcggtgagtcgtcagcaaacctggcgaatcgagggtgcggcaccaccggcggcaacggaggccaacgcggacgcggtgggaacaaccgtggacgcggcggcaatggaggcaacaacagcgcaaaccgcggcaagggtggtcgcgggaatggcggcttcaatggaggacgtcaaggaggtggcgtcgacactaggcccaagtgccagctatgttacaagcgaggacatacagtaatcaactgttggtatcgttatgatgaggattttgttccagatgagaagtatgcaggttctgcagccacctcctatggtatcgataccaactggtatgtggatactggggcaactgatcatgtgacaggagagttggagaagctcatcgttcgtgatcactacaaaggacatgatcaagtgcataccgctagcggtgcagttatccaaaagttccatgagtttcaggctcttgttgaacgattgtttaacagaaaaatcctagcaatgcaatctgactggggaggagaatatgagaaacttaattccttctttaccaaaataggtattactcatcatgtgtcttgtcctcacacacaccagcaaaatggctcagctgaaagaaaacataggcatattgtagaaatgggtcttgctcttcttgcttactcatctatgccattaaagttttgggatgaggcttttacttctgctgtttatctcattaatcgtactcctagcagactcttgaaatatgcaacgcctttggaacgtctgtttaaacaaactcctgactataatcttcttcgtgtatttgggtgtgcatgttggcctcatctccgaccatataatgctcgcaaattacagttccgttccaaacaatgtacctttctaggttacagtccccttcataaggggttcaaatgtctagatccttccaccggtcgcgtttacatctcccatgatgtaatttttgatgagaatgttttcccctttgcctcacttcatcccaatgccggtgcaaaattgcgttctgaaattttattattgccatcccatcttgatattcctattattcctggggtgcaacaaatgagtaccactgtggctaatgttcctactaatcctgctaatcaaatttctggagatgaattatcgctacaggaaaattcggcagcaaataatgcagctccagatggtgcggacgcagccacagctgccacgaaagatccagcggctgactcccctcacacctctgacgcagcgtcttcgagcgtcctccagcgtcgtgtggaggccaccgcagagtcctcctgctctcctgatcggttgcatgtcgagctcacaccggcgcactcacccgtggccatgcaatctccagatgccacgtctcctactgcttcctctaactcacaggagccatccacgtctcttgatgcttctgttgcaggggaggtagatacacagcaacaacagcaccatgtaatatctagaccggctacgaggttgcaaagtggcattcgtaaggaaaaagtttatactgatggtacagttaaatataggactacttttctcactgttactggagagccagaaaatttagatgacgctttaaaagataataattggaaaaaagctatggatgcagagtttatggctttacaaaataataagacctggcatttagttccacctcagaaaggtagaaatgttatagactgtaagtgggtgtataaaattaaaaggaaacaagatgggagtctagacagatataaagctcgcttagttgcaaaagggtttaagcaaagatatggcatagattatgaagatacttttagtcctgttgttaaagctgctacaatcaggattattctttccattgctgtctctaaaggatggtgtatgagacagttagatgttcagaatgcttttcttcatggagttctcgaagaagaagtgtatatgaaacaaccaccaggttatgaggacagttctttgccagggtatgtgtgcaagcttgataaagctttatatggcttaaagcaggcacctagagcttggtactctaggcttagcaagaagttatatgatatgggattccaagggtccaaggctgatacttctttgttcttttataacaaaggagatttgattatatttgtactcatttatgttgatgatattattgtcaccagttctagacaggaagctgttccagccttgcttcgggatttacaaaaggagtttgctctgaaggatcttggagatcttcattactttcttggtattgaggtaactaaagtgtctggtggtatagttcttactcaagataaatatgtcaatgatttgttgagaagagtaaatatgtttgactgcaaaccggttagtacacccctgtctacaagtgagaaattgtctataaatgaaggagatcctttaggaccaaatgatgcaacacattatagaagtgtagttggtgctttacagtatctaacattgactaggcctgatattgcttttcctgtaaataaggtttgtcaatttttacatgctccaactacacaccattgggcagctgttaagagaattttaagatatttgaagcaatgtactagacttggacttaagttaagcaagtctagatctatgttagtaagtgcttattcagatgcagattgggctggttccctagatgacaggagatctacaggaggttttgcagtattcttaggagataatcttgtgtcatggagtgcacggaaacaagctactgtttctagatctagtacagagtcagaatataaagctttggctaatgctacagcagagattatgtgggtacagactttattggcagaattgcaagttgagagtccatctatggcaaagttgtggtgtgataatttaggagctaagtatctttctgctaatcctgtgtttcatgccagaactaaacacatagaggttgattatcattttgttcgagaaagagtttcaaggaaattgttagaaattgattttgtgcctacaggagatcaagttgcagatggttttacaaaggctttgtcagttcgacagttggagaattttaagtacaatcttaacttaggaaagttatga

SEQ ID NO: 34349 - DNA, 1326 bp, Oryza sativa
  Clone ID: PAT_MRT4530_38372C.1
atggatatctctaaggcaaatgaaggctacgcgagttacggctcgatttcatccgcaagcgcacgaacataccactgtagcatttctccttcactttattgtcattctctgcaaaagccaaccctagaagatcaaattagagaagctcaagaaagtgatgaagaaatcaatactatcaaggaaaatatgaagaaagataaagccataagcttttccattgatgaaaaaggagttgttttgttcggtaaacgcatttgcgtacccaacaagaaggaattaaaagacctgatactcagagaagcccatgaatccgcatattccatccaccccggaagtacaaagatgtacctagatatcaagccatattattggtggtctggaatgaagcgggatattgttgagtatgttgccttatgtgatatatgtcaaagggttaaggtagagcaccagaagccagctggattgctccaacccttgaaaatcccagaatggaagtgggaagaaataggaatggatttcataaccggattgcctagaacacctgcaggttatgactccatgtgggtaatagtggatcgactaaccaaagttgcccactttatccctgcaagacaaccaattcagaagattgtatctgatcgtggtactcagttcacctcccacttctggaagaagttacatgaagcaatgggcaccaatcttaatttcagcacagcttatcatcctcagacagatggacagactgaaagagtaaatcaagtattggaagatatgttgagagcctgtgcattggatttcgcaggtacttgggacctctgtttaccgtatggagagttctcctacaacaacagttatcaggccagtatacaaatggcctccaatgaagccctgtatggacgcaagtgtcgcaccccgctctgttggacagatgtggatgagaagaagatattcggaccagatattctgaaggaagccgaagaacaaattaagattattcgagaacgtttgaaagtggcccagtccaggcagaagaactatgcggataatcgcaaaagggatcttgagtttcaagaaggagaccacgtgtaccttcgggtatcaccctacgtggaacgaaaagattcgaaatgtctccgcatcccagaagagcaagttcccttagaggcaatcagcgtacaagacgatctgacttacaaggaacaaccgattcggattctcgaaggaaaggaccattgtacaagaaggaagaccataaagttttataaggtgcaatggagtaatcactcagaagatgaagccacatgggaacgcgaagatcgtctttga

SEQ ID NO: 34350 - DNA, 4350 bp, Oryza sativa
  Clone ID: PAT_MRT4530_38373C.1
atggcagccactaatcctttcggaggaaacacaatctcagagaaattagccaaaaacaactatgcgctatggaaagcgcaagtcctggcgtcggtgagaggagctcgtcttgaagggcatctcactggcaccacagcagcgccggccatcaccatctccgtgccaggcgagaaggaaggcgacaaggccaccagggcggctaatcccgcctacgatgaatgggtggctacggatcagcagatcctagggcttctactgagcaccctgtccaaagatgttctggcgcaggtggccacctgcggcactgcagctgccgcctggagcatgctggaggagatgtatacctccatgacaagggcacgcttcatcaacactcggatcgctctctccaacaccaaaaagggcgatctctccatcacagaatatgtcgccaagatgagagcacttggtgatgacatgacggcggctggcaaggtcgtcgacgacgaagatctcatctcctacatcattgccggcctcgacgacacgtatgaaccggtgatctcctcaatcgtcggcaaatctgagccgatgtccttcggggaggctttctctcaactgctcagctttgagcagcgcaacaatctccgtcacggcggcgagtcgtcagcaaacctggcgaatcgagggcgcggcaccaccggcggcaacggaggccaacgcggacgcggtgggaacaaccgtggacgcggcggcaatggaggcaacaacagcgcaaaccgcggcaagggtggtcgcgggaatggcggcttcaatggaggacgtcaaggaggtggcgtcgacactaggcccaagtgccagctatgttacaagcgaggacatacggtaatcaactgttggtatcgttatgatgaggattttgttccagatgagaagtatgcaggttctgcagccacctcctatggtatcgataccaactggtatgtggatactggggcaactgatcacgtgacaggagagttggagaagctcatcgttcgtgatcgctacaaaggacatgatcaagtgcataccgctagcggtgcaggtatggaaattagccatattggtcactctattgttaaaacccccagtcgtgatattcatttacgcaatattttacatgttcctaaggctaacaaaaatttagtttctgctcaacgtcttgtttctgataattctgcctttatggaactatattctaaatatttcaatcttaaggatctagccacgaagaaacttctgcttagggggccctgccgtggtcgtctctatgctcttccatctacaccgccacatgcacactcaaccaaagaagtttatggagtctccaagccatcttttgaaaggtggcacagtcgtctcggtcatccctcctctccaattgtagagaaggtcattagcaaaaataatctcccatgtttagttgagtctaataaacagtctgtgtgtgatgcttgtcaaaaggcaaagagtcatcaattgccttattctatatcatctagtatatctagtcatcctttggaacttatttattctgatgtttggggtcctgcccccacttctgttggaggcaaacagtattatgtgagttttattgatgatttcagcaagtttacttggatttatttaattaagtttaaatctgaagttatccaaaagttccatgagtttcaggctcttgttgaacgattgtttaacagaaaaatcctagcgatgcaatctgactggggaggagaatatgagaaacttaattccttctttaccaaaataggtattactcatcatgtgtcttgtcctcacacacaccagcaaaatggctcagctgaaagaaaacataggcatattgtagaaatgggtcttgctcttcttgcttactcatctatgccattaaagttttgggatgaggcttttacttctgctgtttatctcattaatcgtactcctagcagactcttgaaatatgcaacgcctttggaacgtctgtttaaacaaactcctgactataatattctttgtgtatttgggtgtgcatgttggcctcatctccgaccatataatgctcgcaaattacaattccgttccaaacaatgtacctttctaggttacagtccccttcataaggggttcaaatgtctagatccttccaccggtcgcgtttacatatcccgtgatgtaattttttatgagaatgtttttccctttgcctcacttcatcccaatgccggtgcaaaattgcgttctgaaattttattattgccatcccatcttgatattcctattattcctggggtgcaacaaatgagtaccactgtggctaatgttcctactaatcctgctaatcaaatttctggagatgaattatcgctacaggaaaatttggcagcaaataatgcagctccagatggtgcggacgcagccacagctgccacgaaagatccagcggctgactcccctcacacctctgacgcagcgtcttcgagcgtcctccagcgtcgtgtggaggccaccgtagagtcctcctgctctcctgatcggttgcatgtcgagctcacaccggcgcactcacccgtggccatgcaatctccagatgccacgtctcctactgcttcctctgactcacaggagccatccacgtctcttgatgcttctgttgcaggggaggtagatacacagcaacaacagcaccaggtaatatctagaccggctacgaggttgcaaagtggcattattcgtaaggaaaaagtttatactgatggtacagttaaatataggactacttttctcactgttactggagagccagaaaatttagatgacgctttaaaagataataattggaaaaaagctatggatgcagagtttatggctttacaaaataataagacctggcatttagttccacctcagaaaggtagaaatgttatagactgtaagtgggtgtataaaattaaaaggaaacaagatgggagtctagacagatataaagctcgcttagttgcaaaagggtttaagcaaagatatggcatagattatgaagatacttttagtcctgttgttaaagctgctacaatcaggattattctttccattgctgtctctaaaggatggtgtatgagacagttagatgttcagaatgcttttcttcatggagttctcgaagaagaagtgtatatgaaacaaccaccaggttatgaggacagttctttgccagggtatgtgtgcaagcttgataaagctttatatggcttaaagcaggcacctagagcttggtactctaggcttagcaagaagttatatgatatgggattccaagggtccaaggctgatacttctttgttcttttataacaaaggagatttgattatatttgtactcatttatgttgatgatattattgtcaccagttctagacaggaagctgttccagccttgcttcaggatttacaaaaggagtttgctctgaaggatcttggagatcttcattactttcttggtattgaggtaactaaagtgtctggtggtatagttcttactcaagataaatatgtcaatgatttgttgagaagagtaaatatgtttgactgcaaaccggttagtacacccctgtctacaagtgagaaattgtctataaatgaaggagatcctttaggaccaaatgatgcaacacattatagaagtgtagttggtgctttacagtatctaacattgactaggcctgatattgcttttcctgtaaataaggtttgtcaatttttacatgctccaactacacaccattgggcagctgttaagagaattttaagatatttgaagcaatgtactagacttggacttaagttaagcaagtctagatctatgttagtaagtgcttgttcagatgcagattgggctggttccctagatgacaggagatctacaggaggttttgcagtattcttaggagataatcttgtgtcatggagtgcacggaaacaagctactgtttctagatctagtacagagtcagaatataaagctttggctaatgctacagcagagattatgtgggtacagactttattggcagaattgcaagttgagagtccatctatggcaaagttgtggtgtgataatttaggagctaagtatctttctgctaatcctgtgtttcatgccagaactaaacacatagaggttgattatcattttgttcgagaaagagtttcaaggaaattgttagaaattgattttgtgcctacaggagatcaagttgcagatggttttacaaaggctttgtcagttcgacagttggagaattttaagtacaatcttaacttaggaaagttatga

SEQ ID NO: 34351 - DNA, 836 bp, Oryza sativa
  Clone ID: PAT_MRT4530_38374C.1
cgcacccgtccgcctaggttagctacttcttgttgcattgaatcatccatcatcaaatcattgggatatatattccacgatggccaaggtaatcacactaatccttgtcgttattacagtgtcaaccatgctagcctcacctgtggaatgcaccaagattcctggtgcctttcctattggaatgtctccatacaactttacgacaatgatagatatcttcaaagtggccatgttagtgccaacggaggattgcacctccaatgttgagatgtgcataagtgagacatgctcctacatcagaaaagccctcgatggtgttgttgatgctgccccaccagcaaaacaggcggaaactaaggaggccacggccaagatggctgggattgctgctactatgctcgacacagccatggcttcaggagaaaagagacaagttgccgcagtttccattgccttcatgcttgctgctgatgcgattgacgcatccgcacctgctgacaagtttagagtaatggatgaaacattcaaagcagccgcttctcctatcgcttgagcaagcaacacctcgtcttatccatccatcaataaaattagcatatgctaccacaaccaccaccagatgtactgagtggcatcacgatacttcatgtaatagccgggtttttccctatagtcttagtcatgctaatgacttggtcacactggctcgaagcggcgttgatcgagccatatggctagataagacctactgatatgttgaattttctcttttgctttgtatagcaatttatgaatggaatatttaatggccaatattaagtcaaaccaacaaaata

SEQ ID NO: 34352 - DNA, 534 bp, Oryza sativa
  Clone ID: PAT_MRT4530_38375C.1
catgtcggcttgcgtcgagtgctatcggctatgcaagttgacaggcagctgggcaagatgtgctcttctcctgcttcattgtttcccccgtttttttttaagttcagagcttctccttgaatatgtacttacagtagtcttacaagcatctaaaaaccgattctttttggaacgaaaaagtacgtgggagaaagtgtttcccacacataggataagaaatgaaactacaggcaggggcttttgccctagaataaactaatgtgggggtggtctccatgggtgtttccgttatccttgtttccagtcatcctacctagatggaaatgttttcgtaagaaaattgctttgagcagttgttgttttggcagatagcagatgctctccacttggacaatttgctgctgtgtgcacgtacagtgcacaaaatggatggagaaacattattttcagggagcaggggagagagtttatagttgctatgatcgatatattgcttatccctcaacgtcctgtaccggatgtgtgatgacttgt

SEQ ID NO: 34353 - DNA, 1389 bp, Oryza sativa
  Clone ID: PAT_MRT4530_38376C.1
atggccattgttctggatgtgttcgcgtcctacgttggcaacctgctcaagcaggtggccaaggacgagctcaacctcctcttcggcgtctccctcgagatcgccaccctccacgacaagctgcgcatcctcaaggactatctcgccgacgccgatcgccgacgcatcaccgacctgagtgtccagggctgggttacgaagctcaagcacaccatccgcatcaaggcgctcaatgccaggctcgacgccatctgcaagagcgcagccaccttcagcttcctcaagctggagtcctacgaagacatggtggcgcctcgacggttcagcgtcgccaaccgcaggacggacccggtgttggagcagtcggccgtggtcggagagaagatcaaggaggacaccagggcgctggtgaggagactcaccgatggcaagcacaagaagcaggacgcggtgatggtggttgccatggccatcaaggaagcgtccgacaagaagatatggctcagcgtgacacaagacgtgaacgaggtgaacctcctgaggacggccatcaagtctgtcggcggcgccagcgatggtcgagagagcaacaagtcactgctcgtgctagcgctcgtcgacgccatcagggacaagaggttcttcttggtgctcgatgacgtgtggagtgaaagatcttgggacaatttactcaaggcacccttcagccatggcgccgccggcagccacctcctcatcaccacccgccatgacgaagtcacccaacggatggaagccatgcaacctttccaccacgtcgacaaactgtaccctcaatatgcatggttactgctcaagaaacaggtagcatcaagtgatgatatggaggaggttgaaattgatgacacactaaaggacatcggaatggaaataataaagaaatgtggcggattaccacttgctgtaaaataccttgagattgagtttgaaaacttagtcaggcttcctaatagccttgtaaagctagggcggcttaggcatccaagccttgtaaagctagggcggcttaggcatcttgaccttttaggtgtaagcataaatggcataccccgacagttctgtggattgacaaatttgaggtatttatgcgggtttcctgcacaagcagatggcttgcaggatgtgagtcctatgcacctggtgctggactgcaacttagagctgctcacatccatagcccttggagaatctggtcctgagtggggcaaattgagccatgtccagcatatcaaggcctatgctgatcaaagagacgatgaaaggaagtggcacatgttgtacacaagagaaccctacagttttgagacaaacatcggtgacaactcttcttccagtactggagtaaattag

SEQ ID NO: 34354 - DNA, 594 bp, Oryza sativa
  Clone ID: PAT_MRT4530_38377C.1
atgcaaacctgcttcgtcagaaaatgcccaaccctaatcctcaagctggattttgccaaggcattcgattccatcagctgggatagccgcctccagatcctcaccgccaggggcttcaacaccacttggaatacatggattcagaatattctttcaacctttaagtgccagatcaatgaaattctcaactgcaagaaggaaagcttccctttgtcgtacctagctaggactacctctgtctctccccataagctgcgagctcaggacctcaatccaacaattgctaaagtgtacaagtacctagctggatgggaggcaagcctgctctcatatgccgagcacatagaagctgaggacaaatcgttggcggatgacttgaaccttggacccctctggcgctccctccaatctctcatcccgacggttcaagacctttcaagcgtccagaggatccccgggtaccgagctcgaattcgccctatagtgagtcgtattacaattcactggccgtcgttttacaacgtcgtgactgggaaaaccctggcgttacccaacttaatcgccttgcagcacatccccctttcgccagctggc

SEQ ID NO: 34355 - DNA, 1357 bp, Oryza sativa
  unsure (1)..(1357): unsure at all n locations
  Clone ID: PAT_MRT4530_38378C.1
aattcggcacaggccctctatccccgactcgaccaccaccgccgccgcgcgccatcgccgtcgaccaccaccacccatggcgttcgcgctcaaggcctcaactgcctccgccgcggcggcgtccacggcctcggcctcggcctcgtccctgtccgtggctgcggccgcgcccgggaggcgcggcggcgcggcggggagggtctcgttccgcggggtccctgctcccatggtggcgatcagggcggaggcggctgccgtcggggaggacgagcgcgtcatctccggcaccttcgccaagctcaaggagcaggggaagaccgcattcattccattcatcactgctggtgaccctgacttggcgactacagcgaaagcgttgaagattcttgatgcttgtggttcggatctgatcgaattgggcgtgccttactctgacccattggctgatggccccgtcattcaggcttctgctacacgtgcactatcaaaaggcaccacatttgaggatgttatctctatggtaaaggaggtgatacctgagctgtcctgccctgtagcgcttttcacatattataacccgattctgaagcgtggcatcgcaaacttcatgactgttgtaaaagaagccggtgtccatggtcttgtggtacctgatgttcctctggaagagacaaatattttgaggagtgaagctgctaagaacaaccttgagctggtgctactgacaacaccaactacaccaacagaaagaatggagaaaattacaaaagcttctgaaggatttatttatcttgtaagcactgttggagttacaggtgcacgtgcaaatgtcagtggcaaggtgcaatctcttctccaggatatcaagcaggtcacggacaaagctgtggctgttgggttcggtatatcgactccagagcatgtgaagcagattgcgggatggggcgcagatggtgtgatcattgggagcgctatggtgaggcaattgggcgaagctgcttcacccgaagaaggattgaagaagctagaagagctagccaagagcctgaaggctgcattgccctgaaacaatcagttccatgaggaaagaaaatacagtccatttttttgtagtcaggtttgaagcatagtattgggagcatgacttttgctattggggttttcggggttactgttgtctgttgaaaataattaagtcattgtgttagttgcttgaacgaataaatcaaggtaagaatgatactaaatgttgcgaaaagggcctaacactgttttcgctttgtcgttggtgcaaatatcgaagagcggatataaacggagaaaataatgtcgtaattcaccatananananncctcn

SEQ ID NO: 34356 - DNA, 174 bp, Oryza sativa
  unsure (1)..(174): unsure at all n locations
  Clone ID: PAT_MRT4530_38379C.1
ctttccgctctccggccgccggtcgctccgacggcccgaccctctcccgttagtggtggagccaaccttaaccatcctactccgggcggggcgaaggcgtccggcggttgcaggagcccgatggacagcggtggcactggcagtcctgtcggcgtanccggcgactgcgcttgt

SEQ ID NO: 34357 - DNA, 570 bp, Oryza sativa
  Clone ID: PAT_MRT4530_3837C.1
atggccgttaccacgacgtgccgaggaggccaccacgccgccgtcatgccgcgcccgccgccgccgcttttcgggcaagccggacaggaccagcggcggcgctacctcggcctctgcaccgaggggctcgggtccgagagctcggagagctccggaggcgacgtcgatcttggcaccggcggcggcgacgacaccggcaacgacggcgtcggccgcgcgctgccgtgcaagcggcagcaccgtcccatcgacgacgaggaggaggaggaggagaagacggtcgtgccagcagcgctggcgccgccgctcccggcgtggacgagggcggcgttcccgccgccgatatcggtgatcggcgccggcgggaagccgtggctgtacctccgggcgcaccgcggggacggccggctggtgctccgggaggtcaggataccgtcgcgggagctgctccatgggcgccgcgaggacggccgcttcaagctccacttcgcccacccggacgaacagctacagcaacaacagctactgctactagcagatgaccaagatccagcagagaagaacgaatag

SEQ ID NO: 34358 - DNA, 1395 bp, Oryza sativa
  Clone ID: PAT_MRT4530_38380C.1
atgaacaaacattccatcaagaacacacatgaacaaacatcaagaacacatatgaacataagaacacaacttgaacatatgcttcttccaccgtcccggccgccgtcgcccggcaacctctgccgcctccacgccatccgtcccctgccgccggatctagcggagggaaggacgtcgtggagacggctgcggcccggcggggtgccgcctccggggtgtcgattgggaaatccggcacctttggaagtttcacaaccggcacttaagggcttttctgtagtagtgtcttttcagcttggaatgctctacgacacagttcagccttcagccttgagcagtctgatgggcggcttctccaaggaagaaacactctttgcaatcaggcagatggacagaaacaacgcccctggaccttatggcttcgggccaagtttttaccaagcaacgtggcatctcctcagcacagaagtgatgaatctccttgaaagattctcgctacaacatgtctatcttgaaaggataaatcggccatacattgttctgattctgaaacctggaaaagagaatacaccagatggtttcaggccgatctctctacaaaactgctcgatgaaaatcattacaaaagtgttggcaaacagacttcatcgtattctgcaagagctaatccattttgatcagagaggttttctcaaaggaagaagtatcactaagaatttcatatttgcgactgaactgatgcaaacctgcttcgtcagaaaatgcccaaccctaatcctcaagctggattttgccaaggcattcgattccatcagctgggatagccgcctccagatcctcaccgccaggggcttcaacaccacttggaatacatggattcagaatattctttcaacctctaagttagtaatccttctcaacggagtctcgggacgctggattaactgcaagcatggtcttcgccaaggagatcctctatcgccacacctgttcattcttgtagctgatgttctccaaagactcctccttcacaatgagaatctcacacccgatgtgcccagacagcccctgtgtgacaatacaatacgcagacgacactttaatcatatgcaatgcttgggtcacaggtgccagatcaatgaaattctcaactgcaagaaggaaagcttccctttgtcgtacctagctaggactacctctgtctctccccataagctgcgagctcaggacctcaatccaacaattgctaaagtgtacaagtacctagctggatgggaggcaagcctgctctcatatgccgagcacatagtccttatcaacttagtcctgaacaatatcccagtctttgctatgttttcctctaagctcccaggttgcaaaacgacacactgctaa

SEQ ID NO: 34359 - DNA, 219 bp, Oryza sativa
  Clone ID: PAT_MRT4530_38381C.1
atgtcggcaacggggacggccaccggcggtggatctgccactgccagcgatgggaggggtggattcgccttcgtcggcctcggagcagccaacctccctcacttcttcctcttcattgttgatccagcggcggcgaccacggatctggcggcggtggcctcaggaggatcggatctgccaccgccagacttgggagcggaggcagcgggctttgactga

SEQ ID NO: 34360 - DNA, 5487 bp, Oryza sativa
  Clone ID: PAT_MRT4530_38382C.1
ttacatatcctgtccgatggatttcttgcagtagaggatggcgtcgcgcacggcggtgtcggcattgccgtggcaccagtactccgccgcgctggcgtagctgctcgacgtggaccgccgcgccggggacgccgacgacgaagcggcggcgaggctacccttggccgaccgcggcgagagcacgcgcagcgggagcgacctcaccttccggcacagcggcacgaggaaccgcaggtacctgagaaggattctcctcgtcgccagcagcggcgccctcgccttgccgctgccggcgccggcgcggcgcgagctggcggtggtgatcacggacgccggcgtgctcagcgccgagtggaacagcggcgacgacgggctcggcgacggcgcgtcggcgtacgacgccgtgcggtcacgggccacaacgacgcccggctcgcacgggaggaggaggtggtggtggtggccgtcggagagggcgcgcccggcgccgaccagcagcggggaggagcactgcgcgccggcgacgcacggcatgccgaagtcgaagtcgtcgtcgtcgtggtcctcctcctcctccgccgccgctgtcaacgacgtccaccgcatcgagaagagctccgcggggtccatgtcgatgaacgacacgacagagccgttgaacgaatgcccgagatcgccgtcgacatccacggcatcgccctcgccgccgacgaggcgctcgaaggacgccgccgccgccgccggccgcgccttccgcctgagccaaccgtgtgagaagctgtcgctgcgtgacggcgaggcctccatggcgagcgtggcgagcgcggcgagtgccttggtggtggtggcgatggtggcttggtcagtgcacgttgttggcgaacgcttcagcaaaatcaccagaacaagaagagtatctgaagatcctgccagtttcttgtccttcattgctctgtgggaatttccggagtccacgaaacacttctcactagccaggtgaaccaccacagggcgtccacagaccaacctgccgttcatcttttccttcgccaactgtgcttcctctttggtggtgtattgaacgaaggcatagccacggggctcgcctcgcttcgggccgcgtgtgtgccacaagaaatcctcagctataatcttcccaaatggagaaaacatcttgataatgtcagactctgataccctaaaatccaaattccccacatagagcctactctccgacctatcgccgtcgaaacccttctgatccattagccctaggaggtacgaggtacggggagcccgagatctatcatcgcgggacataatctgcgagaacacgttgcccgtcgccgtgaagctcgccgtctccgaccagctcatgtcgtctccggcggcgtccgccgaagcatcgggcgcgagcggcgccactcgcctcgccacgacgatgtcccgtggcaggtgcgcgccgctgtcgtccaagtccagcgccgtctcggtgctcggctggctctcctgcagctggaggcagtactcgaggttccacaccacgtcgcccatggacggccgctgctcgccgtagtccgcgaggcacctcccggcggtctccgcgaacttccggagcgagttcgtgctggcgtcgccggcgacggccgggtcgacgatcttgtcgaaccggcccctccggctccactgcatcgcccactccgcgaggttgatctcgtcgggcgggaggctctggtcgatcgccggccgcgcgcacagcacctcgaagaggacgacgccgaaggagtagacgtcggagcggtcggtgagctgccgcgtcttgaagtactccgggtcgaggtagccgaagctgcccttcaccgccgtgctcacgtgcgtctgccccgtcgatggcccgacgcgggacagcccgaagtcggccaccttcgccacgaagccgtcgccgaggaggatgttcgtcgacttgacgtcgcggtggatgatgttatcggagtggccggtgtgcaggtagtggagccccttcgccgcgccgatgcagatctccagccgctgcttccacgacagcggcggcggcgtcgccgccgcggcgtcggagccgtacaggtggctcctcagggtgccgtgcgccatgagctcgtacacgaggatcatctccgaccgctcgttgcagtagccgatgagcgagacgaggtggcggtggcggatgctggagagcaccaggatctcagtctggaactccgggaacccctgcctggacgcgcgcttggcgcgcttcacggcgacgcgggtgccgtcgcggagcacgccgcggtacacgttcccgaacccgccgacgccgaggatgtttgcgtcgtcgaagtcccccgtcgccaccatgatctcggcgagcgggatgtggagcttcatgttcatcctccgcggcgtgaccacggcgctgccgaacgagccctcgccgtccggcgtgaacggcgaccacggcgtccccacgctctccttctcctcctcctccggcacaggcagcgtcgcccgccgcttgctcgtcttgccggacgagctcgccggagtcatatcaacggctctgagcttcatgatctccagcccgttcagtatcgccttcttgctgtcgctgctcgccgccctgccgatgctcaccgtgaggttctcgccggcggtcgggaccacggcgacatagtccatgtagaaagcttgggtcggactgctcagcgtcgcgtagtccttggccttcaattcccgggtacccatggcttgcatcagataaacattgaaatcgacgccttctccgatgacggagctgagctcctcgaaggcgcagaagtggaggcggacgacgtagctgctgttgccgtcgacggcgaacgtccatgtcacgttcgacgtggtcgagttcgtcgtgcgctgcgacttgtacacggcgtccggcgcgaccatctgcgtgtagccctgcgcccggtcgaagatgatctggccctggatgctggccaccgccgagaccgtcgccggggagaggtaggagtcgtcggggagccatgttcgccacatggtgtcgcccgtcggcgtcaccgttggcccgccgacgttgagccggtacagcgtctccagcgcctgatgcgacggcgagacgtcggtgttgaccgccgtcagggggaacttccacagaagctcctgcggcgcggggaacagctcgatggcgttgacgaaggcgagcccccctgattcgggcgtgaaggcgacgtcgaactcgccggagccatcggacgggaggaggaactccctcaccacgccggcgcgcggcggcgagaaggaaggaggcaggaggacgtacctccccatggccgagacgctgaaccgcgccgagaggaggtcgccggactgcgacgcgaaggggaagaagtggaggcggaggacgagcgtggtgttgccgtcgggcgccgcgtcggcagcgtagctgagccggtacgagaagccgctcgtccccgcgcgcgccgcggcgtagagaggggacggcgggctcgcgtcggggttgctgaacctcgcggacttcccggacagctcgccgtcgtccgggacgaaagtccgctgcggcgagtccgacgtcacgacgacgttcccgccggcgccgcacgcgaggtagacggagaatcgcggggagaagggcgtcgtctgcccattggaaaccggcatcaagcccacgacaaggaagagcagcaaaacgatcgcagccatccgcacaactccgagaggtgtggcgggcaccggcgacggcaatcgcgggccgcgcgaggcggtcagctcatcattccccggcccggcggctacgtcgtggtgggaacgccggtggatgcggacaaagggcgcgagagcgatgtgttgtgtccttgtgttggtagctagcgggcagtcatctggagcgggcacgaatatctcgatggtcatcgtccggtttttccctgccttcgtcggcgacgacaccacctggcagcaattcctcctcggcgaccttttccagaggtcggggtcgggtttcttgaggacgacgatgtggtcgacgagggcggcggggtcggggatgcgccaccggcagtcgggctgcttgccgcggtggcggtcgtactccgtgacggtgacgttgcggcggcggtccatccgggagtcgcgcatgtagtagacgcgaggcttctggcacggctgcctcgccacgggccgcgtgttgaacgagtaggccgtgtagtcggcgcgcttgtaccagttgaggaaggagcgcatcggcgtctccatctcccgcggcgacagcacgccgcgcaccaccatcacggcgaacccccacgacaccgacaccgtccagtggtgctcccggtcgtagcacaccgactgctgcgccaccgccgccgagtccagccgcaccggcccgtcgaacagcttgcgcagcgcgccggcgcgcgacggggtcgtcgggaacaccggctcgaggaagtcgaggtggtggagcgtcaccagcggcgccaccgggtgggcgccgaggaggccgagcacgtcgccccacaggtcgcactggtggaaacccgggtggcgcgtgagcggcacgccgagctccgacatgcacgcgtggatgcggtcgtcgctgccgtacagcgccgggtagcggtggaggcaaccgtcctgcatcttggcgagctcctcggcgagcgcgcggctgatggcgaagcccccgccgccgaacgccatgccgtaggagaagatgaggttctggatgtggctctccgacggcgacccgatgtagtacggctgccggtggtcgtactgcgagagcacgtgcaccaggttctccgggaggaacaccgtgtcgtcgtcgcccatgacgaaccaccggacgccggggaggccgagccggaacgtctcggagacgatgcgggagatccgcagcgccgaccggctcccggcgccgtgggtgtaggggaacttggacgtgtcggagctgaccatgatcggcgggagccccgtgcgggagctcttggagtagaactcctccaccggcctgtccatccacacgaacccgcgcatccgccccggccgccaccacagcttgatgtactccttccggctcttccacagcgccgacgacgcgccgatgccgaacgcgatgtgccgcagccccgtcggcgcctcgtccgcggaccgcatcggcctcaccggcgtcggaggcggggacgaagacgacggtgaagagccgttcaccgacgaggcgttgggcatggccacgacgaagcgtgccatggcggcgttggactccggcgagcagcgggggttgtagaacggggtggcggcggcgacgagcatgtacaggaagagcaccggcatgacgacgtagaggaggaggccgtagagaagggtgaacctggccttgccggaaccgtgcacgccattggacgccggcggcttctctccggctcctcctcctcctcccaccat

SEQ ID NO: 34361 - DNA, 2109 bp, Oryza sativa
  Clone ID: PAT_MRT4530_38383C.1
atgcacgaccaggcggagatctgcagcctccccatcgacatcgccttcggccgcctgcaggagtggctggtggaccgcaagcgggtgccgcaggactggaggaagcgcctcgccggcatccgcgcccgcctcgccgccgccttcgcctccctccctcgcgacctcgacccctccctcctcgccctcgggccggacggaactgggggacttgcagcgccgacaatataccgcatcctcctgccgccttcgcctccctccctcgcgacctcgacccctccctcctcgccctcgagccggacgaaattgggtatcttgaagcaaagaaaatatacggcatccttcttggaatccaatccggagagtaggaacatatttggccgcctgactggctcacggtgcccattcctcattcatgggtttgactactcgctcactgtatttgtgcttgaactagctttgcaatggctaactttacttgctgttctgactggatgtagtccttatcagaggaagcagatgcaaaagactcaacaacagctcgcagagctggatagaagggaggctgacattaagcgacttgcagctctgtccgcaaccagatatgcagaggcttgccaggagcttggtctgcagggaattaatgtgcggcaagaactgatagagtctgcaaaaacacttccttcaacgtttacaaaaatcttggaggttctgaacagtgatcctgtctcaatagctaccgagtactatacaactttcgtaagggaatgccatactgaggataaggaaaactgcaaatctgtgctacagaatctgaaacagttgcaggctaatcctccctcccttcatatctcagtatgcaatgaggttgaatcttctcttggagagacatcaaaagctctggagtctaatgtgactggggcagaaaacattgactcaaatatatctgcagatgacattgattgggacatctctttggatgataatggaattgattgggacattggtgctgttgaacaacctgtagaagaatctggcaatggttttggatcgtatgaaattattgatgccaatgtagagttggcaggttctgaaaattataattttggtatttcagatgatccatctgtgaacaagtctagttcatctgagcctggtatttgctgggacatcactgatgttaatcctgaagaaaatgctagtatacagaatgctcctgaatcaggacagtctcaaagtttagctgaagaaagaagccagttactagagaaggaatatagaaataatattcttgatgatttacttgaggtaagagcatttttgacccaacgcttaggggagatgaggaatgctgatacatcatctctacagcatcaagtgcaagctgtctcaccttttgttctgcagcagtatgctcctgaaaatttagagaatatgcttgcagaggtctcatcagctatatctttgctcagtaaccagaaaactcttgaccttataatgattctcaactcaaaaaggtttttagacagattagtatcaacattagaagacaagaagcatcatgaggtgaaactacgagaaggcttaggtgatttgtcagttaagcgaatggagctgcaaaatgcactttcgtcatcctggcctaagcaagaggcagcaattacaaaaaccagggaactcaagaagctctgcgagacaacgctatcaactgtatttgatggcaggccggtgcatataattggagagatcaatactttactaagttcgagtgttagtcaattagctggatgactgtactagccggatgactgtacctgaaataagatgagattgaaagctggttgattacatcaaggttcatactttaacaacttgtctggttgtacttgggttatttttgctgcctgaatcaaatgttcttttgtgtatgattgctgccctggagtgggtgatgaagactgaagatggcgaagttaaatatgttgtggagaaaaattccattgctaacaagcacatatcaatggtttgaatatcaaataattgatatcttaatatcaatgatttgaatagtttatgtttgttgctgtgctatgtagcgagtttgtgtagaat

SEQ ID NO: 34362 - DNA, 490 bp, Oryza sativa
  Clone ID: PAT_MRT4530_38384C.1
ggcatcaaatccgatttaaattcgtattgaaaaggtaaccaaaatcttggaacattttaaaaatttcctgccattgtgtcgtggcttttgacctccttttgtaatcgtgcgccaccagattcctcattataaaggcgactactctgctcatctaccatcgcgggacataatctgcgagaacacgttgcccgtcgccgtgaagctcgccgtctccgaccagctcatgtcgtctccggcggcgtccgccgaagcatcgggcgcgagcggcgccactcgcctcgccacgacgatgtcccgtggcaggtgcgcgccgctgtcgtccaagtccagcgccgtctcggtgctcggctggctctcctgcagctggaggcagtactcgaggttccacaccacgtcgcccatggacagccgctgctcgccgtagtccgcgaggcacctcccggcggtctccgcgaacttccggagcgagttcgtgctggcgtcgccggcg

SEQ ID NO: 34363 - DNA, 481 bp, Oryza sativa
  Clone ID: PAT_MRT4530_38385C.1
catgggtacccgggaattgaaggccaaggactacgcgacgctgagcagtccgacccaagctttctacatggactatgtcgccgtggtcccgaccgccggcgagaacctcacggtgagcatcggcagggcggcgagcagcgacagcaagaaggcgatactgaacgggctggagatcatgaagctcagagccgttgatatgactccggcgagctcgtccggcaagacgagcaaggtcgtcgtcgtagccgtgaccgcggcggtgctcggcgcggcggttctagcaggtgtggcattgtgcgtactgcttgtgcggcggagacagcggcgggcgacgctgcctgtgccggaggaggaggagaaggagagcgtggggacgccgtggtcgccgttcacgccggacggcgagggctcgttcggcagcgccgtggtcacgccgcggaggatgaacatgaagctccacatcccgctcgccgagatcatg

SEQ ID NO: 34364 - DNA, 319 bp, Oryza sativa
  unsure (1)..(319): unsure at all n locations
  Clone ID: PAT_MRT4530_38386C.1
aatttcaaagcacacaaatttttctttctcttgcagtattattattactaccatggcatccaggatcttgtacgcagccgccgtcgtcgcggccgtcgccgtgtcgtcctctgccccgccgtcgcgctcctcctcggcaacctccgncaatgagcttgaagatcatagttgaatcgaatgctgctgtcaaacatgcgtgatgtgctacgcatcggtgatatcttcttcttcttgttcttcttctgtttgagattgctcgttttctgacctgtgtggcatgtatttttatcgattcagttgagacaattcctgcagcagc

SEQ ID NO: 34365 - DNA, 2960 bp, Oryza sativa
  Clone ID: PAT_MRT4530_38387C.1
ggcatcaaatccgatttaaattcgtattgaaaaggtaaccaaaatcttggaacattttaaaaatttcctgccattgtgtcggggcttttgacctccttttgtaatcgtgcgccaccagattcctgattataaaggcgactactctgctcatctaccatcgcgggacataatctgcgagaacacgttgcccgtcgccgtgaagctcgccgtctccgaccagctcatgtcgtctccggcggcgtccgccgaagcattgggcgcgagcggcgccactcgcctcgccacgacaatgtcccgtggcaggtgcgcgcccttgtcgtccaagtccatcacctccccttcatgtcggcgagctgcgcgaacatctcgccggcggcggtggtggacacgtcgggcacggtggagacgccggagccggaggaggtcgccggggccgcgccggcgccgtcgtggtcggctggcttgtcggccccctcgggcgggttggcgtcctgcagctggagcgcgtactcgaggttccagagcacgtcgcccatggagatcctgtcgctgccgaactcggcgaggcacttctcggcggcctcggcgaacttcttgagcgactcctggttcaccgtcccggcgagcttggggtccatgatcttctcgatgaggcccttccgcttccactgcatcccccactcggcgaggctgacctgctcgcgcggcagctgcgggtcgatgggcggccgcgcgcacagcgtctcgaggagcacgacgccgaaggagtagacgtcggacttgtccgtcagctgctggcaccggaagtactccgggtcgaggtagccgaagctgcccttgacggcggtgctgacgtgcagctggttcatcccggggccgtccttggacagcccaaagtcggatacctttgcgacgaagttgtcgtcgaggaggatgttggtggtcttgacgtcgcggtggatgatcccctgcgccgtgccggtgtgcaggtagtggaggccgcgggcggcgccgatgcagatctccagccgctgcttccacgtcaacgccggcaggtccttgccgtagatgtggtcgcggaaggggccattgtgcatgtactcgtagacgaggatcatctcggcgttctcgtcgcagtagccgatgagggagacgaggtggcggtggcggagcttggacagcatctggatctcggtgttgaactcgttgatcccttgctccgactgcgggttcccgcgcttcacggcgaccttggtgccgtcgtcgatctcgccgatgtagacgttgccgaagccgccgacgccgatgatggcgctctcctcgaagttcttggtcgcggcctggatctcggcgaaggagaagaagcggccgaggccgagggtggaggagaaggtgtagccgctcttgctggacccgcccttgctggtggtgaaggattggccggtgtggatggggagcagccacgacgagaagctgttccggcgctcccagtcctggggccgcttgtaccacttgacggccatggctcccaggccggcgaacgcgccgaacatcatcgcgaaccccaccgccgccacggccttgcggctgccgctgccgtcgtcggccttcttcccgtccacgccgaactcgccgtcgaggctccccaccgagttgctcatcttgagcacctccacgccgctgagcagcgcgtccacgcgccccgtgtcctcccccatcggccccacctggatgctcagcttgtccgtcgcgatcgacgagttgacgacgatgtccttgtagtacgccgccgacagctcgccggtcaccgtcgacaggtccagcccggagatggccttgcgcccgttgacgaacacgttgaagtagaggtcgttcatgctcttgctcacgatgtccgcgaagaagagccggaccaggtagccgaacgccgggtccacctccatcttccacgacatgttgaagctcgggctccccacgccggcgtccgccatcttcgcgcagctcgcgtacacctgcgccggcgccaccagcttcgacgtcccgtcggggaacttgatgttccccaccggcaccgacacgtccttcaccgcctccttcgactgcacgtacggcgcgtccacgccccactgccgccccagcgtatccttgtcgggcgcgatggccgggccgccgacgttgatccggtacaccacctggtacgccgcctcggcgagcccggtcatctctccgacgggagcgatccccatggccatgtctgtgatgagctcgtcgggggcgttcacgacctcgatggcgttgatgaacgcggcggagcccttgagcgggtagaacttgacggcgaggtggttctcggtggcgttcacgaggaactccttcatgaccggcttgttctcggcggtgaagctgtggaggaggacgttggtgtcggtggagacggtgaaggtggcggtggtgaggtcgaagtcggagttcttgagcgggaagaggtagaggcggacgaagtgccagcccgggacggtgagcgggaagctgtagacggcctcgtcgcggaagatccgggcggtgaggtagagcggcgagggcacgtcggcgtcggtggtggcgaccttgatggcgtccttggcggagagaaggctgttcgactgcgcgtccgtcttgtacaccttgccgccggtggtgacggggctcgtgctgccgcagtcgatgaggaagttgtccttgggcgtgaacgtcgacggcgtcggcgccgtctgcgcgccgctctcggtgaccggccgcccctgccccgacacggccgtcgcgagcgccgccgccaccgcggcggccagcagcagcgccggcgggatcatcctcccgcggcggcgcatggtggtggggtggcctacgtggcacgcaagacgtggcagtgtattattggaggaggcgcgcggcgccctctcgccctctctctctggttgata

SEQ ID NO: 34366 - DNA, 1777 bp, Oryza sativa
  Clone ID: PAT_MRT4530_38388C.1
tggtggagctagagcacgagggtcaggcaacgcgtttctctctcgctgaaaagtttgctggatttgctcctctccctctctccgccatggaggaggcccagtttgtggagtcaaaggatggaaccatctcagttgcttctgcatttgctggtcaccatgaagctgtgcaagatagagaccacaaattcttgacaaaagcagttgaagaagcgtaccggggagttgactgcggtgatggaggcccctttggagcagtcgttgtccgtaatgatgaagtagtagtcagctgccataacatggttctgaagcatactgatccaactgcacatgctgaagtgactgcaataagagaggcttgcaaaaagctcggaaaaatcgagctctcagattgtgaaatttacgcgtcttgtgagccatgcccaatgtgctttggtgcagttcatctctcccggatcaagaggctggtgtatggagccaaggcagaagctgccattgccattggatttgatgacttcattgcagatgctctgagaggcactgggttttaccagaaggccaacatggagatcaagaaggctgatggcaatggagccctgattgcagagcaagtctttgagaagaccaaggagaagtttcagatgtactaatgtgcaggatagagtctcagatacgccaaagtccccctgatgatctagggaggaataaaactacaatgttcagcttttccattatttctcaaactgccaattcaaatgtattttcatcctgataacatttcaattgtctgcatgttaatatcattcaatgaatgggtacctacagcaacgccgccgacagaaaaccccggaatttatcgtcggagagacgagatcccggcgccctctctctgctcccacgccgtcggagtaatttctccgcgggggacccgatctccagcttcagataccgcctccaacgtctcgctcttcctgcttagatagatctcgggctccccgtacctcgtacctcctagggctaatggatcagaagggtttcgacggcgataggtcggagagtaggctctatgtggggaatttggattttagggtatcagagtctgacattatcaagatgttttctccatttgggaagattatagctgaggatttcttgtggcacacacgcggcccgaagcgaggcgagccccgtggctatgccttcgttcagtacaccaccaaagagtgagcatgcaggaagcacagttggcgaaggaaaagatgaacggcaggttggtctgtggacgccctgtggtggttcacctggctagtgagaagtgtttcgtggactccggaaattcccacagagcaatgaaggacaagaaactggcaggtcggtccaggaagcaaatcggtacagacagaccgtgccgcgaagcaggcggccatgggggacaagttgcaggccttagaggatgagggatgcagtacagaaggaccaagattgaagtcaggtgacgtgccgggcagcggcaagcaatctgataaggagtgcggagatgagattgctcaggatcttcagagacgcttcttggtctggtgattgtgcagaaggtgctcctgactgtaaaatattggtgctgttatgggggacaggtcacgggtgtagcactcaagagttgttcacaagtgtacaccaggctgcaacagctacgtgcgattcaccctagcgatctgttggtggtcagaaagacgcgcaatagtttacgagaattaagtgccagccgagcagcaagaggttc

SEQ ID NO: 34367 - DNA, 384 bp, Oryza sativa
  Clone ID: PAT_MRT4530_38389C.1
gtttttagaagctgacgaggaaaacagaacaaaacaggggagaaacaagcctacagatgatggctcggtctatcccgccggagtccggtgacgagaacgtctcggcttctgccgatggcggcctattttagggacagaagatgacaaaagaacatcaaggaagagggcgtacgtgtagagaaagacggtgaaatattttgccagccagccggccggccggagtccgacgatcgagcacattccgatggacactgcaggcggtacaacaaaccacgcctaaaacctcctttacttaggagggcatggaggaggaaggtgaacgaccacccgatcgaggaggtcccgaacactgtgccggtgaccgatgacccggcggagccctgc

SEQ ID NO: 34368 - DNA, 1150 bp, Oryza sativa
  unsure (1)..(1150): unsure at all n locations
  Clone ID: PAT_MRT4530_3838C.1
acgagtagagtgtccactagttgaggttttgtttaatctagggtgaacaagccgagggagagggcgcgcggaccgggtccacgggagtggggcccacgcgtcagcctctcggtccacggtggaccgggagcacgcggctggcggcggccggcgccgtgggtcccatgcgtcagccgcacccgcgggcgcgggcggctgacgcccgggcccacctggcagccgcggggcgcgcccaaagggggcctcgccggcacggtcgacgggagacggcgcgcccgcgccccgatggtcaccgccggcgaccaccagcgcgtcggatcggcgcccgagagagaggagggaagggggaagcgaacggagcggtccacggctcaccccggtcgacggcgacgacgggaacggcggccgaaacgcaggaaggcgtcggcgcggctcggtacgacgaggacgacggcgctccgacagtcggcgggcgaaacggaggcgcggacgaggtcgacggggacgcggcgaagccgaagaaggtgacgccgagtcgggaggaggtccggagcgacgacggcggcgaaccgaagctcggcggcgacggcggagagaatatgcgacggcgcgagcgcgattccgacggggagagcgagtggcgaacgtcggaaacggaggaggagggcacgggagtggcttaattagggttgggagtcagggaaggcggccggggtgttggtaaccggcgcggaggttccggccgccattgattgcgccggcgtggtttgcggttacgattccgggcgtttttgagggagagtgagagggacaatcggggggatagatagagggattcgtggggtttatttcccccttctttattgcgcgcggggccgccgggagacgccgagtttcgcgtcggcggcggcgctagggccggggcgaccggcgggcccggcgcgagttgggggttgccagttgggccccccccgtcagcgggggtgttggccgggcccgcttgttagcggcgcgcgcgcgggggggacccgttgggccgcgggggaaagtagatagagagaggaagggagaggtttggcccgagccggcccaggagggggtggggggccgggggtcttcttttggggtttttttctttttttngcccttt

SEQ ID NO: 34369 - DNA, 2516 bp, Oryza sativa
  Clone ID: PAT_MRT4530_38390C.1
ccacgcgtccgggaaaacataacaaaacaggggagaaacaagcctacagatgatggctcggtctatcccgccggagtccggtgacgagaacgtctcggcttctgccgatgtgttgctttgctaaaaacatgagggtttgagaacttctctcgcaaagacatgcaggcggcctattttagggacagaagatgacaaaagaacatcaaggaagagggcgtacgtgtagagaaagacggtgaaatattttgccagccagccggccggccggagtccgacgatcgagcacattccgatggacactgcaggcggtacaacaaaccacgcctaaaacctcctttacttaggagggcatggaggaggaggtgaacgaccacccgatcgaggaggtccggaacacggtgccggtgaccgacgacccgtcggagccgtgcctgacgttccgggtgtgggtgctggggctctcgtcgtgcgtgttcctcgccttcgtcaacgagttcttcatgtaccggaccacgcagctgagcatcggcacggtggtggtgcaaatcatcacgctgcccatcggccgcctcatggcgtcgacgctgccggcgaggcgcctccgcgtcggcggctggtccttctccctcaacccggggcccttcagcctcaaggagcattgcctcatcatcatcttcgccggcgccggcgccagcggcgtctatgccatgaacatcatcgccatcgtcaaggtgttctacaagcgccagatcagcccctacgccgccatgctgctcgcccagaccacccagttgcttgggtatggatgggccggattgttcaggaagtacctggttgactcagcctacatgtggtggccgtcaaacctcgtccaagtcaccctcttcagggcgatgcacgaggaggagaagaggaacaaggggcagctgacgcggctgcagttcttcatcatggtgatgacgtgcagcttcgcctactatatcgtacccagctacctgttcccggcgatcagcaccatctcggtgctgtgctggctgtacagggactcggtgacggcgcagcagatcggctccggcgcctcgggcctcggcgtcggctccttcggcctcgactggaacaccgtggtgggcttcctcggcaacccgctggcgtcgccggcgttcgccatcttcaacgtcatggccggcttcgcgctcagcacctacgtcgccgtgccgatcctctactggaccgacacctacaacgccaagcgcttcccgctcgtgtcgtcgcacgtcttcaacgccgccggcggccgctacgacaccgcccgcatcctcgacccggccaccttcacgctcaacctcagggagtacgacgcctacggccgcatcaacctcagcatcctcttcgccatcaactacggcatcggcttcgcgggcctcatggacatttggggcttgtggcggaaggcaacggcggagcaggcgaacggcggcggcaaggagcgccaagacgtgcacacgagaatcatgaagaggaactacaaggccgtgccacagtggtggtttcacttgatgctggccatcgtgatggcattgtcgctgtacacctgtgaggggtttggccggcagcttcagctgccatactggggtctcctccttgcctgtgccatcgccttcaccttcacgttgcccatcggcgtcatctctgccacgaccaacatgcaaccagggttaaacatcatcacagagctcatcatcgggtacctgtacccggggaagccattggcgaatgtggtgttcaagacctacggctacataagcatgactcaggcgctgacgtttgtgtcggatttcaagctggggcactacatgaagataccgcccaggtccatgttcatggtgcagctggcagggacggtggtggcgtcgacggtgcacttcgcgacggcgtggtggctgctgacgacggtgaggaacatctgcgacgtggacagcctgccgctggggagcccgtggacgtgccccggcgaggacgtcttctacaacgcctccatcatctggggcgtcgtcggaccgctccggatgtttggccgtctcggcaactactggcagatgaactacttcttcctcgtcggcgtcctcgcgccggtgcccgtctggctgctgtcgcgccggtacccgcgcagcgcgttgctccgggacatcaacctgccgctcgtcctcgccggcgccagcgggctgctcccggcgaggtccgtcaacttcgtcatgtgggggctcgtcgggttcgtgttcaaccacgtcgtgtaccgccggtgcagggcgtggtggatgcggcataactacgtgctcgccgcggggctcgacgccggcgtcgccttcatgggcgtgctcaccttcgtctcgctaggatacttcgacatatacggggtgcagtggtggggtggcgccgccgatgatcactgccccttggcgtcgtgccccacagcacctggggtgtttgccaggggatgcccgcctgtaccttcttga

SEQ ID NO: 34370 - DNA, 1240 bp, Oryza sativa
  unsure (1)..(1240): unsure at all n locations
  Clone ID: PAT_MRT4530_38391C.1
tcagcgcaactgcaacggagacccagaaaggagcgaaatgtcacatgctgctctaagatgattggaagaagatgttgcagtccagtctctgtttggatgaaacaataattcattgacattgacacaacaaacaagcctagaaggccaggacaacatccatggtatggcattaacattcctgtaaggaaatcggatagacgtggtgctgcgattgcggggctcaagagcgtgcgcgttcaagaagccggatcgatttgtgtcgtgactccgcccaaatcgttgtttatcagaaccttttggaagatcgggaaccctagtgcacatcacagttcccctaaagtttgctcggaaaagagaggtactagtagacctgaaaaggttcaggtgtttataagggaacttgaggaacggttccctcgttttataaaagatgaaaacttgaacatggaaattggttctctcggatgccacaggtagctgcagttctgcaagctcgtacccagctaagaagtggctagatggattagcattctcagaaaataacattccatgataaatccacaaacaaatttggagctttgattgcttttcaagttcaaataatcgacctaagtacagtataacaattgcaggatcaaaggattgcttttctggatcaagaaccagaaggcaaaaggcatctactggaccagctgatggatcaagatgagcatccttaatgagatcatcatccggaataggaagacctgggcatggtcccaagtactgcaatctcgattttactgagcttccaaaccaagctctctctctcagctgtagcttgacaggttcggggtttgaaccatcaatcacatctatgaatccgctgatacggaattgttcccaagtgtcagtaaagtaccaacatatctcaccaaaggagcaattcctgatctcaccaatcttattgcttcgtgcatccgtattaatctgaatcttatcagattgctcctggaaccccctgaatacgacggtgcgattcgccggcctgccgccgccacccaccgtggcgagttggaagaaggtggagtgcttcaagtgggcattgccgtccaacgctcgctgcagcagcgacctccatggggtcgagagcgccgacgcggcggcgccaccgccggccatctactccgccgcccgccgcctctcgtcctctccccctccggcctccgcgcacgcggtcctcntagcgccacgcggggat

SEQ ID NO: 34371 - DNA, 386 bp, Oryza sativa
  Clone ID: PAT_MRT4530_38392C.1
ccatcgttcggaaaccgtgaaaataccaaaaagggggggcgcctttcaaaagaaactaattaaaaagaggggaaaatcccaaaagggggggccgctttcccagggggggtttgcgcaaaagggccgaatccaacaaacaaaaacccccggttcgaccgggggatacccgaccgggaccggaaggaaaaccagggaccccgggagggggcccggtaaaagccccccggaaccctggggggagccagttttccgtgtgggggggtaatcggaaacaggggcaaacaagggaaaaagcggaaccctgaggaaaaaagcctggggggcccaatgaggcaaaaaaatcaaaccgagggcttaaaagtgacggcccggggtccaaaaagggg

SEQ ID NO: 34372 - DNA, 357 bp, Oryza sativa
  Clone ID: PAT_MRT4530_38393C.1
agtgttctgccttcaatattttgtactgttgattgcgtggctgtagcatccaggcaattcttaaatatagctaaacaagaccaatagttgtatgaataactgaagttcccattatttgttaccatgcttgttaatcattcactcagtcatgtatcctttgttctcactccatgcaggtatgccatgactggccagttgactcagaaaagtgatgtatatagttttggagttgttcttctagagcttctaacagggagggaaccagtagatcacacaatgcctaggggtcagcagagtctggttacatgggtaagcattttatgtgtaaattactacaatatttaacatgagagctgt

SEQ ID NO: 34373 - DNA, 2440 bp, Oryza sativa
  Clone ID: PAT_MRT4530_38394C.1
atcaaaagaaaacaatatggtgcggtaacacaagtgatcgatcaaacaccaggagatcttacacagttgactatcttgcgaatgcggggctgaggatgctagcgattaagggatatattaccggttgcctgcagggtgctctagacacacctgaccacattcgacttgacactgatcagatctcatctgagcgagttgaaatctggcagattcctgtagtcgtactgctgcaggacatccatagcatcactcatggtaggccgctttattgggtctttcatagagcaccagtgccccaggatgatcacacgctccatctgcctcttgtcgaactcgcccttcagcttgttgggatcggcgacggcagccacgccggcgtggttcatgtacatatcgttccagatctgctccctgtctttcctggtacaagcgatctctaggaggacgagtccgaagctgtagacgtcggtgctggatattaattcaagctcgccgtgtatcttgtactctggagctatgtactgatcaattgaccccatggccactatcagcagtttgcccttggcgttttccgtgatcctcgccagcccgaagtcggcaagcttggcgttcaaaccttcgtccaggagtatgttacttggtttgatgtctctctttggccactgtagtgtgcccttctttccatataggtggtcgtcgagattgccattacgtaccaattcgtagacaaggaagaatgtgatgttgtgcttctggcggtaccaacacaagaaatcacacaaattccaggcatttatatggcagcaccaaccttctagcttgactaggttcttgtgccttgcttcactaatggtgttgagttcattatagaagtcgtccttgtctccttgactgctccagttttctgcatttcctttacggccacttctggttgcccctctaagcacctcattcttcccttgtagactatcccatatccacctctcccgcccgacgccgccaccagcaccactggagtccccagcccctagccacctaccacacgcagtggcggacccaggatttgaacccagggtaggccagcaccggcaccggcgacaacctactgcttgaccgtcagaggctggccggagcaggacctccatctggcccctggcgcgcgtcgggcaggaccgcgggagccaggaggccgtcgggcgccggccggacgcgccgacgcgggatggagagggcgcggccaggccccccgcgtcggcgaggggcggagagggcgcgggcgcgcgggcgctggcgcggcgcgcgaaggcagtgggaggcgcgtacgcgggaggcgccgccggccggaggcgggaggcgcggcggtgcgagtcacgggagcgccggccgccggagtcgtggctcgctggactaccctctgggtctgcccctgaccacacgctgccatcctccaccctgataactattcctccatagcttccatcctcatggctccagcagtgcccatgctgcctcgcggtccacccattgccacagcccatcgctggtctgtcccaccatcgccagaggaagatctctttgttgcgctgccactgctgcagagtcgccatcactggtgtgttcctccccttcttagcttctccatccttattcccttcccaaaccagtgtaaggttgaaggtgacttcagtcaccaatggtaagtaagaggcacagaagctagtagaggtcgactgctcgcgaggctgatcctcgacagcaactgttgttgagttgaaggaccaggacaggatgcggtggcgctcgatccaagaaccagtggtcgcggagaagccgaaggccacctcctgcgtcagcaacctcttcacgtccgcgcgcgtgctgatgatgtgcgcgggcgcgagggtggcgttgtcgtcgaagcgcagcgtgagggcgagcgcgttcgtggcgccgtcgaactcgatgtccgcggtcatccgccccgtgctgaacgtgctgttcttggtcatctcgatcatcatcccagatgatccctccttcagcgccgcgtcgctttgcagccgcaggtcgtctacgttgaaggtcgacgggtcagagaaatcgaagtcgaaatcgatcaaccaagcatggagggacaacaaacgcaagatgaggcaaagaagcaccaggaggtgaggaaatcttgtcgttgatgaccccatcgtaaagttgtttgtgccagcacccaaatcggcgtactggcactgtttaggtccagtagtttttttttccgtcgatttgaaatgctccgtctccgtatttccatataatccgcgagagaatcaatcatagcgccaggatcgcaagaggcgacccagttgtagctccaacgtctactgccagcttggatgtgatgccctgcgcctgatgagttcagttgggcaagcgagcggacgcgtgg

SEQ ID NO: 34374 - DNA, 250 bp, Oryza sativa
  Clone ID: PAT_MRT4530_38395C.1
atggcggcgcacaccgacgccgaccgctccacccgctgcgccagcgacccctcccgctccgcctcgtctgccgcaggacggggaggaggaggagggagagctatacgggcgcctcctgagctcgcaaagaaggttgcaacggcgaccgcgaccgcggcggaggggatcggcggccgccgccggcggagcagcgcgcgcagcatggtttggttgcggtgcggcaattcgtcgagcagctgccgttgttctg

SEQ ID NO: 34375 - DNA, 2143 bp, Oryza sativa
  Clone ID: PAT_MRT4530_38396C.1
atggagggcggcgcgttcttggcgcgcgcggcggcgatggcactggagttgtcgtcctcgtcggcggagcctgcggtcggggcgctccgactcctgcagctcctgggccagcagcccatctgggtggtagccgcggccgacgtcccggcaggacgccgaggctgccagacgaggtgcggcaacctcgacatcccgttcccgtttggcatcggcgatcagtgcgcgatccacggtggtttcggcctcgactgcaagaacgacagcggcacttataggacattcattgggccgttcgaggtgactaagatctctgtgccggacgccaaagcctggatgaagatgggaatctcttggcagtgctatgacccggtcacaaaacagatgaatgattcgatggttgggcagaacttcaccaacacgccctatcgattctcatacgaggataacaagattttcgtcatcgggtgcaatacaatggcctacatgagaggtgtttcggttgcttatccacatgctcggatgaaccaacaaatggttcttgctctggcgctggctgttgttcggtgcggctacctggtagtaatggaaaaggctgctttcaggtatagcaccacttacattccctcaataaacttctggaatgactacaacgggactgttccggctgtgatggactgggtaatcagaagggagacatgcgaggaagcgaaaagggacatgagttcatatgcatgtgttagcgacaatagcgactgccataattcaacgaatgggcatggttatctctgcaagtgctccaaggggttcgacggcaatcctagcatcgcggatggatgcaaagatatcaacgaatgtcttgatgatacgacatatccatcctctggaatttgtcacaatacgatggggggtaacgattgttcattccatcaaggacaacataaggtggaggatgtctgtgttccagatcagaaaaaattcgactcagaagtcctcttgggagatgcctgttgtagaagcagagttgcagcatgctacaaacaagtttgacaaaaaccaaattcttggccatggaggtcatggcactgtttacaagggacttctcaaggacaacactgaactagctgttaagatatgcatggcaagggttgagcaacataagaaagaattctgtaaagaaatgctaatcctatcccaaataaaccacataaacattgttaaactactgggatgttgccttgaagtacaagttcctatgctagtgtacgagttcatcccaaatggaacactatgtaatctcatccatggcaaccatggccagaacatttctccagttactcgtctgcggatcgcccatgagtccgctgaggcactagcctacctccactcctacgcttcaccacccatcatccatggtgatgtcaagtcctccaacatcctcctcgatgttaacttcatggcaaaagtctccgactttgctttggatcttatagaactgctcacaaggaagaacgttttcaaccttgatgctcctgaaaatgagaaaagtttgtcaatgaggtttctctctgctatgaaggagaacaaacttgagaatatattagacgatcaaattagcaataacgagaatatggagtttcttgaagaagttgcggatttagcaaagcaatgcttggcaatgtgtggtgaggatagaccatccatgaaggaagttgcggagaagctcgatagatgtggcggcggccgcgaggacgacaacgacgatgagggaggcgcgtacggcggcaacggtaagggagaacaagcgttcgtcgtcctcatggtgtcatcagcggccgcgtcggcctccacctccgcgacggacctcaacctggcgttcccgcatcaccacggccgcgccctgcagtcgccggagttcacagcgttcccgagcttggagagtagcaacatgtgcaaccccggaggcaacatggcggtggcgaacggcgttggtggcaggggcagcgtggccgtggggttccatctcggcgagttccgcatgccgccaccgccacagcaggagcaacaacaagctcagaccgtgctcggtttctcccaggacacgcacaacgcgggtgcaggcgacggctccggggtgttcggcggg

SEQ ID NO: 34376 - DNA, 1504 bp, Oryza sativa
  Clone ID: PAT_MRT4530_38397C.1
cttggtattacaatggagaaccttgaatgcacagttgggaaagatggcttaaattttcagtgcaacctgtgtgattcagatgtagtgcattccatggcagaaatcctgcttcgtggattggcaactgcctcagttgacagcactactggtgatatcttcaagagcccatcttctgtagctgttggaatgaagagcgagctagcagaatatttgattcaggggtccatgacgcttgttcgtgaggctgtcgacggaggcgaggatcactcagaacaattaataaaagcatccaccatgccgacggagttcctctcagacttgatcgatggttttgtagcatcaaaacggaacttgttgagccatgtgtctgggtttttgtctagcgaaacccgcttgaacaaaattaaagacttcatacagaagctggagatggagaacttctgggcaccagatgttagagaggctactgcagggactattcttaagagtatagacatgaaatgcattatccattgccctgagagatttgacacacaagataagctggctgaacacaggaatctgtgtagatttaggatagtaaactgcaaaaatgatggatgtttagcttccttttctgctaatcacattgagaagcatgactctgtctgcccattcaaagtcctaccatgtgagcagttgtgcgagcagcatgttatgcggtgtgagatggacaggcattgtgcatcagtttgccctatgaagcttattaactgccctttttaccaggttggctgtgaatcagcctttccgcagtgtgttcttgataagcattgttcagagcgccttcaaatccatctgatgtatattcttgaactaactacaagacatgatgcttttgttaatgatatgaatcaacgattacacctccttgagaaggttagtattaaactctctggggctttagataacagaaccctcactctaacagcaaaggagcaagaagcaaagatcaagaaactcgaacaggatctcaaagtgcaagagacaaagctgaagaaacttgaaagcgaagcattacagatgctcagataatttctgcaaaatcaacagaaaatattcaagctagaataatttctggatacctgtttttcagcttctaaggttgccctgtaactctgcagagcattctccagggcccgaaatgtgcggtttctattccagaatgatgtgaatttgtacctgattcttcctgagaaatcaagccagatccatgtactttacattcaactgtttggagaatacattggagtggaagcacagatgccataaggagatgtacatacgcccatggtgcaggaaagacctctccagagcacaagaataactttggtgaacaatctggaagtacaagagacagatggaatgtttcagcataagaaacatgaatcatcatgaggaagagtcaattctgatgagtatgaaatactgtataagcaattgtaatatcaggaattaatacttc

SEQ ID NO: 34377 - DNA, 1086 bp, Oryza sativa
  Clone ID: PAT_MRT4530_38398C.1
atggcctactccactaatcagataatgatactccaacatgcatggatgctcgtgggtgaagctaacagccagttaataattagtacagtagcacactcttggtaccagagcaacagtatagaagtggtcttatggtggttctggtccaggattgcacaaactccaactgaatatggattcttcggccaagcaatggcttgcagaactgacgaggagaatgatgatgatcctagagcgcttgagcatctggaccctctcagcatgcagcaactcgctgaatcccttgccaacgagctttttaaccagccccaagaacaacaggaagaacagcatggataccataacccatcactgagggtcctcccctttgtcggggatattaacaagcccgagggccacacaccagcagctgctgcaattcgtgacagcttcttctccctcaccaatggctcgtccagctcactcaacttctcggcgctggagcagcagcaggatagtggtcccatgacaaaattctgctcgccgctgtcagagatgaagagaggcggaaggagggcgacctcgagcatgcaagaacatgttatcgccgagagaaagaggcgagagaagatgcaccagcagtttacaactctagcatctatcgtccccgaaatcactaagacggacaaggtctccgttctcggcagcaccattgagtatgtgcaccatcttagggagagggtgaagatcctgcaggacatccaaagcatggggagcacgcaacccccaatttccgatgctcgcagccgtgccggctccggtgatgatgaggacgatgatggtaacaacaatgaggtggagataaaagttgaggcaaatttacaggggacgactgttctgctgagggttgtgtgccctgagaagaagggggtgttgatcaagctgctgaccgagctcgagaagctcggcctgtccaccatgaacactaatgttgtgccatttgcagattcatcactaaacatcaccattacagcacagattgataatgcatcttgtaccactgtagaacttgtgaagaatctaaaatcaactctcagaaatttttag

SEQ ID NO: 34378 - DNA, 471 bp, Oryza sativa
  Clone ID: PAT_MRT4530_38399C.1
caggacgaacagatgaccacttaacatttaaaagtaagtgaatctcaatattacaactaatgcactaataagataatcaatatgtaaatcttagcaaaaatattaatcttgctagacgtacatacctacaacaggcatctcccaagaggacttctgattcttctgatctggaacacagacatcctccaccttatgttgtccttgatggcatgaacagtcgtaaccccccatcgtattttgacaaagtccagcgcatggataagtagtattatcaagacattcgttgatatctttgcatccatccttgatgtaaggattgccgtcgaaccccttggagcacttgcagagataaccatgcccattcgttgaattatggcagtcgctattgtcgctaacacatgcatatgaactcatgtcccttttcgcttcctcgcatgtctcccttctgattacccagtccatcacagccgg

SEQ ID NO: 34379 - DNA, 2650 bp, Oryza sativa
  Clone ID: PAT_MRT4530_3839C.1
ttttttttttttttttgaaccggcaaaaatggcctttctgtggctgcaattatacagtaataataattaagtcaataacaataaccttttcactaatccagtaatccacgttattcgcagaacttgtggaaactgcaggaatgtacaacaaacacaagcacctgaacaagattaaccatgtcttcatctcatatatgaatagaggtttctgtttgaaattggttgcagcaacaagtttgttggcgagaaaataataagcgcaccaacttgatcatctccctctggttccactgccaaaatcttggttagttgatcacgaatggaagcagaaaacaactaaacatctatcagcattctatccgaaccgcgccgctttgtgttgagatgaacttgggcttcctgataacctgctccaagcactggacgatgtccccaacctggaaatcgttacagtcctgaatcaccaatccacagtcgttacccttgtcgaccgtctctgcgtcctgcttctcccgcttcagagatgcgcatggaccctcaaagacgacatctccactcctcaaaagcctcatcgtcccggttttgcttaagtgcccgtcagttattcggcagccggcaatctttatgtcaggcccttttgacttgctacgccctttcagctcgaatatgttcagaacctcggcttcccctgaaacctgggtctcaggggtgcccggtgccttctcgacaatctcccgtcccatttcttcaaggagatgatagatcaccttgtgcagcaaaatctttatgttggcttgtgttgctgctagagtgatagcacttggaggagtacggatgttgaaaccgactatatatgcccggcatgcttgtgccagatcaatgtcatgttggcttattgggccaacaccaacatgaacaatattcacaaacacctgtggactattaaggcttcttaaggcatctgtaactgcttgaacactgccttgtacatcagctttcacaatgatgggcatctcaactctttcaggagtctcttcaccaatttccgcctcctctgtcatgtcttcatcaatctttcgaagcctgtctttttcctgttttttcttccgtccttgactaagcattcttgccctttcttccgagtcaacaaccacaacatcatccccagccattggaaggccccttaacccctcaatctcaacaggcattgcaggttttgcagactctgttattttcccagcagtatctctaagagaccgaattcttccccactctgctcccacaacaatgtgctgcccgctgactaatgtgccagccttgactatagctgttgccaatggccccctgcctctgtctactcttgcctccaccacaaaagcttgggcaggtccatcaattctagctttcaggtccattatctcagcctgaaggagcaaagcctcttccaatttgtccaaaccaagttttgttactgcagaaatttctacaacctgtacatcaccacccatatcctccaaaagcaatccttctgaacccagctgaattctgaccctctcaggatcggctccagatttatcacatttgtttacagcaactacaatgggaacattggctgcttttgcatgtgacatagcttcaagtgtttgaggcatcaccccatcatcagctgcaactacaagcactacaatatctgtgacagcagcacctctagcccgcattgcactaaaggcagcatgccctggtgtatcaagaaatgtgatagaggctcctgatggcatctcaacaacaaaggcacctatatgttgagtaatcccaccagcttccttagccgcaacagatgtttgacgcagggaatctagaagtgacgttttaccatggtcaacatggcccatgattgttaccacagcaggacgtggttcaagtgtgccttcaccagtgtgcattcttctgatattaacaccaagttccatagcaactaactcagcaagatcaatgctgatagcgtcgaactctgattcaaccttttcaccaagatctgtgagtatgtcttgaagtgcaccaattgatgcaccagtccgtttggagagatcaagcaatgtcatcccatcaaaaatgtcaactgttttatctggtgatgatttgatagctatcttttgttttggtgcaacatatggcgcttctacaggaggttgagttctagtttctcttttcactcgcttctcctttttaggtgcttttaaccctgcaacttcttcacgcttcctactccatgctaacatgtatacacctgcatgaaaattcctgatagtgcagtgtttataagccgtacaattagcagcaccttttacaatgggtgtatgagtatcgctaagaacgaagtcagccagctttccaaacgtcccactggaaaaattcttcgctcccccatgatccacacgggaggccaaattcacaaggcccgtgtgaaaatccttccgtcgcagcatccgccacgccattctcggcgctccgccggcggcggctcttccaccctgccccccacggcgagactaaagagacgggataagggaggaggatgggaagggatcctggggacgtacggcgatgggagaggttatcaccggcgacggcggaggagggctagggttgc

SEQ ID NO: 34380 - DNA, 411 bp, Oryza sativa
  Clone ID: PAT_MRT4530_383C.1
ccaagtccaaaaaaattggaacccctggctcctcctttttttacacagttggaaaactcatagaccccggcccacaggaaaattctttttatccccctccctggggctagtccctaagctacaaaaggaacactttcgggggcaagcaacaactctttttttttatttcaaacagggccattcaaaacaaagcctcgaactagaaggggggggttaaaataaaaaaacatgacgccggggcaaacctagccacggttagctgaacaactaaatagcgcttattcttcaagctgcagttgagggttgaagcccaacccgtttttctccgggggggacgagcttttccacgcgggccactatatgcttcccgaaagtatatttcttcagggggttcaaaggagcttttatcct

SEQ ID NO: 34381 - DNA, 3171 bp, Oryza sativa
  Clone ID: PAT_MRT4530_38400C.1
atgacgatgggtgtggtgtcaagggaggtattgcctgcatgcgagaggctttgcttcctttgcccgtcattgcgcacgaggtctcggcatccggtcaagcgatacaagaagttgctctcagaaatcttccctaagtcacaggatgaagaacccaatgaccgaaagatcggcaaattgtgcgaatatatttcgaggaatcctttgcgtgttccaaagattacagtttatttagagcaaaaattctacaaggaattgagagttgagcattttgggtcagtgaaagttgtcatggcaatttaccgaaaggtgatatgttcttgtcaggagcaactatgtggcggcggccgcgaggacgacaacgacgatgaggagggaggcgcgtacggcggcaacggtaagggagaacaagcgttcgtcgtcctcatggtgtcatcagcggccgcgtcggcctccacctccgcgacggtgtctagctcggtccccgtggggctggcggctaagaacctgaagtcgatgcacaagggcgcgcaggacctcaacctggcgttcccgcatcaccacggccgcgccctgcagtcgccggagttcacagcgttcccgagcttggagagtagcaacatgtgcaaccccggaggcaacatggcggtggcgaacggcgttggtggcaggggcagcgtggggatgccggcggagtatgcagccgtggggttccatctcggcgagttccgcatgccgccaccgccacagcaggagcaacaacaagctcagaccgtgctcggtttctccaaggacacgcacaacgcgggtgcaggcgacggctccggggtgttcggcgggcctcttttcgccaatagcttgctaaacatcgtagaagccctattggaacagaacagacaggatgacttgcggacaatagcgtgtcgaacacttttttactttgtaaacaaccaggttgacagcacatacatgttcaatttagagagccaaatccctaaactatgtcaactggcccaagagatgggtgagaaggagaagatatccattgttcatgcagctggcctccaagccctttcatccatggtgtggtttatgggtgagcattcccatatctctgcagagctcgacaacgttgtctctgcagttctggaaaactacgagagcccatatgcaaattctgataatgatgctgccattgaggatagaaggactcagtgggtgagtgaagttctcaaagctgaagatcatgaaccttccgtgaagaatcagaaagtccaaatttttggtcagggatttgtctgcacaaccttgctagaatatccagggaagcaacaacagtccgacgagttctggaagctatatttcgttattttgataacaacaatctgtggtcgccttctaaaggacttgcatttcaagcatcttgaacacaagaatgtattgaagcagacagataagattctggacattattgaggtcacaacacgccttgccgagcactccaaagctcaatcttctactgcactaatggctgcaataagtgatatggtcaggcatttgagtaaaaacatgcagctcttggtcagtgatgtaggtcctggggatggcatggttatgaatgacagatatgggaaagctaccgatgaatgtcttgttcagttgtctagaaaggtaggcgatgctgggcctatccttgatgcgttggctgttgtcctggagaacatttcaagtactacacctgttgcccggtccactattgctgcaacatatcgtacagctcaaataattgcatcattgccaaatctgttataccagagcaaagcatttcctgaggcgttatttcatcaattgcttttggcaatggtctatccagattgctcttcacaaacaagcaagattggtattaaaaggacattgtctaggactacatctgttttctcatcttctgctgctctgtttgggaaattgaaaagagatgtgttttcatttcgtgaaaattcacgcctggatggcactaatctaatccctatcagtgagaattcagaccagataaacgggaatgatccaaaactattcaaatcacagaccattcaaaggatgtatagtgcaaaagatagttttgtaacatcttcatcagaaataagtaatttgagtgggacaactcaggaaacagcactttcacctgaaaatgttccacgaaattatgaagcaatttctcatacttattgcttgatgctactgttttctgaagacaagaaatcatgtcttgaagttcttgttggcagctttcagcttgctttttcattgcaaagcatttcattacaagcaggttttttgccaccatcacgcaggcgttcactctttactatggcaacttctatgcttgtgtttttctcgaaagcttttggcattccatctctcattcctctagtgaaagatttgttgactacaagcatagttgatccatttcttcgtctagttgaagactgcaaattgcagtcaaaacaggcatcagtttctcttattctcgatagtttgaaagatttatcggaggctgaattgtctactataagaaagcaattgcttgaggagttctcagcagatgatgcctgtcccctgggttctcactcgaatgaatctacttcacaatctcctgcatataatgctaagttgcaccaaaaatcgttggaggttattcctgtcggctttatttttgaggatgataccctagttgaaccagctaacagcttagcagaacctcaattgcaacaacctttggacaatggccttattgatgtgaatcagcttcttgaatcagttgtggaaacatctcggcacgttggaagactatcagtgtcaacaaaccttgatttgccttttaaggaggtagcaaaccgatgtgaagctcttttgatcggaaagcagcaaaagctatctgtctgcatgagcgtccaccaaaaacaggttagtgaccttcagaaagatcacagacaacttgagatgtctacagttaaaaagatgaaaatggtacagaacactatttgtggaatggggcagttagactatgttgaatgggtacagcctatgcattcgctgttgttgacacaagacactgtacaggctacaacgcgcagccagccatggggaatgcagcagaacgagcccaaatattga

SEQ ID NO: 34382 - DNA, 1080 bp, Oryza sativa
  Clone ID: PAT_MRT4530_38401C.1
atggctggcaacgagatgcagcgccagggcctggagaagaggatgagcaacatgcaggatcatctcttctccattggcgaccagctcctgaagagcttcaccagcttgcaccagctagcgctgccatgtggcgtggagtcttccgtctcgacacaccccgacgtgacctccttgacgtcggccctggccgagctggcgacgaagatggaggtcatcctacccaaccatgctgccaaggtgtcgaaggagatctccaatgggatccacacgggggtttgtcatgtccttgcttgtgtgaagctcactctcccagacactgatctcaaagagatcttgtctaagggggctgccgatgcctcgtgcaaggatgtgatgttcgatgtggtggatctcggagagactgccctccttatttttgaggaatgtgttgatcccgaggacgtccagcaaggtgaacgtcctaatgtcgcgatggctgactggtccttgtcagctgagatgcccactggcgacgtcgtcatggacgtggtcgtgcctgagggcatcgacacagctcgtgactcgttgagtcttggtgtagtcgggctccttcaagagaactcagatctcaaagatgccaacaccgagcgagatcgacaggtcgtcttttggaggacgaagttcgaggttgcagagctcgaacgatccgtcgtaatcgtgaagaaggaccaggccatcgagacacttcgaggttgcgaggtctggctgaactcgtacttgaagagctgctgtagcgctatgatggaaatctgccgccaactcaagatcgagcgtgcagagcctgaggagacgactgtgggctacttatcttggatgaggggtgcgtgtgcccaactagagggcgttgggcaacgaatcgacaactgcctaaaggaggagtgttgtcgtgccagccgctacgccgggggcgcggcgccgccctcgcgcggcagccgggcggctagcgaccggcgcgcggcgctggccggcggaaggcggaaggcggcggctgggcggcaggcgaaagatggcggcttgttttgtttttttgagaatctgtga

SEQ ID NO: 34383 - DNA, 1521 bp, Oryza sativa
  Clone ID: PAT_MRT4530_38402C.1
atggctggaactcggcagacaacttcagttccgatggataatgcagcagttgttgatgcaaaacccttgcgcacattgactcccatgttccctgcggcacttggtctgcacactttcactgctaaagaaaactcatcttcgattgtctgtattaccccgtttggaccatatgctgggggcactgaacaggcaatgcctgctagtattccaccaatgtttgcatcaccggctgcccctgcagaccccaaccagaggcagccatatgctgttcacttgaatggagctgctcctgctaacggtacagcaaacaacacaggggtcatccctgatttgcaaatagctgtggcaggtacagtggaatctgctaagaggaagaggggcagacccaagcgcgtgcaagattcttctgttccttcagctcatttggttccttcagctccaggaggtaacatcactgctgtccagacgcctccttcagcaaccacagatgaatctggtaagaagaagaggggacggcccaagcgggtacaagatgtacctgtcctgtcaactccttcagctcctcagacaccttctgctgtcaccttaccagaagatggtaagaggaagagagggcggccaaagcgtgtgcctgatggtgcactgattcctttaagtcactcagatgatcctagggaatctgttgataatgtactcatgatgtttgatgcactgcggcggaggctcatgcagttggatgaggtgaagcaaggagcaaagcagcaacataacttaaaggccgggagtatcatgatgagtgctgaacttcgtgcaaataagaacaagaggattggagaggttccaggtgtcgaggttggtgatatgttctacttcagaatagagatgtgtctggttggactgaatagtcagagcatgtctgggattgattacatgtctgctaagtttggtaatgaggaggatcctgtggctatcagtatcgtgtcagctggtgtgtatgagaataccgaagatgacccagatgtgctggtttacactggacagggcatgtctggaaaggatgaccaaaagcttgaaagaggtaatcttgcacttgaaaggagtttgcatagaggagaagttattgacagaaacagtatcattggagaagatgattacatctttgagacaccgtcttctgagcagaatttaagatggaactatgcaccagaattactgggtgaacccagtctttctgactcaattttgtatgatcatggtgacgagggatatccacatatcgcattctttgcaatcaagcatattcctccgatgacagagcttacatatgattatggtcagagccaggaccctgccgccctttatttgggcggcaagctgacgtggcacatgggcgcaggacggacgtttttgggggctatgaattttgcacgtggtccccttgccgtcttctgtctgggcggcaaggggcctccgtgcaaaatttgcaagggcggcaaggggcccagatgcaaaaagaactag

SEQ ID NO: 34384 - DNA, 357 bp, Oryza sativa
  Clone ID: PAT_MRT4530_38403C.1
atgctccatcaccgctcaacctctgccgacatgtgggaccactgcactggcgcccccaccgggcggcctttgtgcatcgaagaccgcgccacacccaccggtagcttctccttgcaccgtggtcgtctcctttaccgccggccgggcctcatcgcgccgcgtcagcctcctccacccccggacgcgtctctcgcgccagtccggcctcccgctatcgccgtgcctctcgcgccaagccggcctccaccaccgccggtcgtgcctctcgcgccgtgccagcctccactgccatcgcctgtgcctctctgcggcaagtcggcctccgactcctcctccaatcattgtcgtgctagctag

SEQ ID NO: 34385 - DNA, 3320 bp, Oryza sativa
  unsure (1)..(3320): unsure at all n locations
  Clone ID: PAT_MRT4530_38404C.1
aagggggcagatgatttaggtgacactatttaagagctatgacgtcgcatgcacgcgtacgtaagcttggatcctctagagcggcgcgggcggtggcgagggcggggactctcctggcggcccagtcggcngaggacgtagggggcagcgagcagaccaattttttctccttccactcctcttcaaatcaagttggttagctcaagatctgtgatgaacgaccaagcttccctccttatcttcctcttcatatcctgcttaacctaaactatgactggtaaacaaacctagagaagatacaaaggaaataacggcataaacttttgttttgcaaaagattaacagtggcttaccatggctggaactcggcagacaacttcagttccgatggataatgcagcagttgttgatgcaaaacccttgcgcacattgactcccatgttccctgcggcacttggtctgcacactttcactgctaaagaaaactcatcttcgattgtctgtattaccccgtttggaccatatgctgggggcactgaacaggcaatgcctgctagtattccaccaatgtttgcatcaccggctgcccctgcagaccccaaccagaggcagccatatgctgttcacttgaatggagctgctcctgctaacggtacagcaaacaacacaggggtcatccctgatttgcaaatagctgtggcaggtacagtggaatctgctaagaggaagaggggcagacccaagcgtgtgcaagattcttctgttccttcagctcatttggttccttcagctccaggaggtaacatcactgctgtccagacgcctccttcagcaaccacagatgaatctggtaagaagaagaggggacggcccaagcgggtacaagatgtacctgtcctgtcaactccttcagctcctcaggtagatagtacagtttttcagacacctgcttctgctgtaaatgaatctgttacgaggaaaaggggacgacccaggcgtgtacaggatggtgcagatacttcagctcctccaattcaatcaaaatataatgagcctgttttgcagacaccttctgctgtcaccttaccagaagatggtaagaggaagagagggcggccaaagcgtgtgcctgatggtgcactgattcctttaagtcactcaggtgtttcgatagatgatgacagtggtgaaataataacagggaaacgtggacggcctaggaaaattgatgtcaatcttctgaatctgccatctttgttttcagatgatcctagggaatctgttgataatgtactcatgatgtttgatgcactgcggcggaggctcatgcagttggatgaggtgaagcaaggagcaaagcagcaacataacttaaaggccgggagtatcatgatgagtgctgaacttcgtgcaaataagaacaagaggattggagaggttccaggtgtcgaggttggtgatatgttctacttcagaatagagatgtgtctggttggactgaatagtcagagcatgtctgggattgattacatgtctgctaagtttggtaatgaggaggatcctgtggctatcagtatcgtgtcagctggtgtgtatgagaataccgaagatgacccagatgtgctggtttacactggacagggcatgtctggaaaggatgaccaaaagcttgaaagaggtaatcttgcacttgaaaggagtttgcatagaggtaatcaaatcagagttgttcgtagtgtaagagatttgacttgtcctactggtaagatatacatttatgatggcctttataaaataagagaagcatgggtggagaaaggaaaaactggctttaatgtgtttaaacacaagctgctcagagaacctggtcaacctgatggcatagcagtgtggaagaagactgaaaaatggagggagaatccttcctctcgagaccatgttatattgcgtgacatatcatatggtgcagaaagcaagcctgtttgccttgtgaatgaagtggatgatgagaaaggtcctagccacttcaactacacaactaaactgaactacaggaattctctcagctcaatgagaaagatgcaaggctgcaattgcgcaagtgtgtgccttcctggtgataacaactgctcttgcactcatcgaaatgccggtgatcttccatacagtgcttcaggcatacttgttagccggatgcctatgctgtatgagtgtaacgattcctgtacatgctcacataattgccggaaccgagttgtacagaaaggttctcagatccactttgaggtgtttaagacaggagatcgaggttggggacttcgtagttgggatccaattcgggcaggcacatttatttgtgaatatgcaggagaagttattgacagaaacagtatcattggagaagatgattacatctttgagacaccttctgagcagaatttaagatggaactatgcaccagaattactgggtgaacccagtctttctgactcaagtgagacacctaagcaactgccaataattatcagtgcaaaacgaactggaaacatagctcgctttatgaaccacagctgctcaccaaatgttttttggcaaccagttttgtatgatcatggtgacgagggatatccacatatcgcattctttgcaatcaagcatattcctccgatgacagagcttacatatgattatggtcagagccagggtaatgttcaactgggaatcaattctggatgtcggaagtccaaaaactgcttatgttggtctcgcaagtgcagaggttcctttggctaaaatgcgaaccctgcaacaaaaacattaaagcataatctgccattgcaagaagtaggcgattgttgtagaactatgaagcagcagggtgcattcagtgtttcaagatgccatgtaataaggttggccttcgtctggatgagaatgcaaaagagggtatttattgcagaaagcattggcattgtaccaaactttattggaataactagtatttagcgtagcatctgaattccgagaaggttggaaccgtgttactatgttcttgtagtgtagttgtttctcctgtttaagagaactttaccaactgtagaatgccatgcatatggttgcatcgcaagattttcctgggcttcgcatgccagtcgtgcactcgccgtatgtttttctgtaatattaatggctacataatgcatcctgtaataatcatggtagtagctccagtcatctgctgaggttgaaaaaaaaaaaaaaactgttgcataaaaaaatcacgctgttaattgctgcatgcctcagtaaaccagcaggtc

SEQ ID NO: 34386 - DNA, 2724 bp, Oryza sativa
  Clone ID: PAT_MRT4530_38405C.1
atggaggatacagggatatcggttgaggaattgttggagtaccaacaaattgtcagcaagacattcaatagtgaggatgaaggaattcacttctacaacaagtacgcttgggataaaggctttagcataagaaaatcatatgctgaaagaagaaatgccgcaaaagaggctgttgttgatgaagtttgtctgacatatttatctagcgggtatgatattggtgtttttgatccagagaagccatggcatgtccaaatgctggagaaggaattcattgagtggaacgtgccacaacacttacgttccaccaatgatcttgtcgttggaggagttctaatagcatacacaatagataaagaagatgacaaatctgaagagggtggatctgcaaacctcattaatggcaagatgtccttcctggtagaagataaaccacatgacattctttgctcttttctgctcgtagacagtctggctactgcagaaagttatcaaagttgctcactaaaagttaaccacaaaagagttgccaaagcatatttcataggctataacagaagcttatgcaagtattttgtctgttatgagcggctgaaccgcttctcctttaaagaggatagaatagatcaccaacaatctagcagtgaaaaaaaacaacagccaaaacaacgctggaggaaaaatatcagtgaaatatttgaagccttggaagcacttcatgtggcgggatatggaaataactatatgaattcaaccatcacttttgcttatggtcagggtaatgatcaggacaagctactgaagatagtcggtggatgtcccttgccatgtgatgatactagaaccaaaaagtctcagcgagtgaaattttgcacattccttcgaaaaatcggggcagaaaatacacttggctatcaagcatttaaggtgaccgtacaatacggtgatgacgtcgaggtaatcatgaaacatccatatatcttggcctcggataaagaaagagtcgctgctattgagcccatgaatgagagattgtatgaccttgctgagagcaaacgtgtcgatctaaacacttctctcaagcaaaactttcgagactgggtgtggcagtcgatgctgaaggagcgccatgattacgtccctccagaagatttcatcacccgagtgttgccgcccgaggctttcgccgacagccgtgacatcccggagtatgaggtcgcgttcatcagagtgcccctgtacgagctccgtgaccccgtcgacaagggcctcatgaggaagcgcattgaggagcagcggcggcgggaggcggagagacggcggcagcttgagaaggatatgcggcggtgggaggaggaggaggaggaggaggaggcatggccgtgggaggacgacgacgacgacttcctgaggatgtcacaacagctgtcagtaatctgttcagaaagccgtgggaagagaggggattggcctaatatgaaggcaacaagaagagggagaagaagaacacatgcattaaccccagacaatgaggaggaggaggagaatttgagtgagctggagctagccgtggagaacacacggcgcaggatacatcactgcaactgcaaccacatcccgcgtcacaccctcttcacgagccacgccgatgtggaggagctcttcctccctttcaagctggaagagccttacctctgctttgcctcgcgatgccagaagtctgcgccctcctacgctcacttcttccccgacttcaaccgttcaccgcgtataacgtctgattggctgcgtccttctacgtttgaaggggacctacaatatatcctattctttcacaagctgatggataccgtggagtgtggtaacacagaagatacagttctagccaaagccatcaccattgcaacacaatcttatcagaagatgctgtacttccaaattgaagctgctgtgcaagattgcttggagcttcttaaggaaatggagaggatgaatgatagatacgacttctatcatttcattgcatctgagatcctcttcaacaacaagtcatatgaagatgtgctcaagcttatacgcgatgggcatgtagagttacactacacgcttaaagagttcagcactccccatgctgatcaccacatggatgatttggttcatcgccttgtgggcaggactcgtgcttatatgcccacagatgcacaacgagagtgtggaatgttcaaggactgggtgtgtcagcaggttgataaggagtatggatctcttggttatctttacatgcattttcttgataacaagatgagagcttggtttgccccatttcctgaagtgctgaaggatctgaagtactctgaaactcatgaatgggttagtgttgaaggcgattatgcaacaattgggatttcagatcatgcccaggaccatttgggttatgttgcgtctgtggagctcccagaagttggccaaagtgtatcccagggaaataaatttggtgttgttgtaagtgtgaagggaaccaccaggggtattaactcaccagtatctggagaggttgttgaagtgaatgatcaactaagcgatttacctggattggtaaatgcaaggccatacgagacagggtggattatcgtggtcaagatcagtgattcaggcgagctcaattcgctcatgaatgacgaggattactcaaaattttgcaagggagaaaaagacaagtattga

SEQ ID NO: 34387 - DNA, 137 bp, Oryza sativa
  Clone ID: PAT_MRT4530_38406C.1
acatcgaatagaccaactcgtccttactagaaagacattcaagatgccgagttgaccttactagaaggagcgtgtctgagcatacctcaagctactgggtgagtatagactgaggtgcacgcgatacctgacaattc

SEQ ID NO: 34388 - DNA, 339 bp, Oryza sativa
  Clone ID: PAT_MRT4530_38407C.1
atgaggataactacccgtctcgcccttctccacgtccaactcgggatagaaactaaaggaaacacgaaacatgccttcccgagcaaggaaacccgagacccgacgaaaacagactcagactcggaccttgcccggtctgaccgcctacatacctgcggtcagaccggccctactagccagtcagaccgcccacacacctgcggtctgaccggccctgaacccaccacatgcttctcgctatccatcgctcccagacacctcgtccctggagcgtacaccgtctccgcactcgatttggaagagaagaaggggaggaggaagggggagaggagcgtatag

SEQ ID NO: 34389 - DNA, 527 bp, Oryza sativa
  Clone ID: PAT_MRT4530_38408C.1
actagtggatccccgggcggctcccttttttgctctccagtcatgcatgctggatgtggtgttagctcagcagctgattgcctaatctgctgctaatgcatgtctacctatctgttctagcttgtttctcctctctttttttcccgggctcttggcgtctctctgtggtgttttggcttgatgaagccggcttaaagggaagttataggtctcccgtttcacctggctggggcactcactcagctgacggcattcaatcaattcaccatcggccagtgccagtacatatataaaccgtactgcaaaaggaaaaataatcactttaatttcctgcacaatgccgagtgcacatgaggagtcactgtatatattgtggttgtgtatgcttgtactgcatgtgtgaaataagaattagggggtggattagctgtaagatgtgcgtgcagtgcatcgctccacaccttacccttttctaaacactcataggctcattgcttatagtgaaatgaagtgaagtagtaattcta

SEQ ID NO: 34390 - DNA, 318 bp, Oryza sativa
  Clone ID: PAT_MRT4530_38409C.1
cagtaaagtaaaatatgtaatcgattaatgggttgggaagatcattgaagggagtatagaggcatgaatatcgtatataaggtatatatgtggtctaaaatcatgtaacacatatggtataggggtgaaagaatataaatatgtagaatagaatactacccaagggttttctgtctaatgaggaatgcagataataaattggcagctgatgattatggtgaaattgaggaatataatatctgagattggtttcgtagagcaaagtagatcaaataaatggggtggtgattgagttacaaggactgtagtatcgatttt

SEQ ID NO: 34391 - DNA, 885 bp, Oryza sativa
  Clone ID: PAT_MRT4530_3840C.1
atggttcgagagaaaaccttctctggtagtatcggtgaaaatccatacctccatcttcaggactttgagctaaagagaccaccgaccaaggtcaattctaatgaacctcttgataaatctatgcttaaagagacggtgaagaggttgaccatcatcatgagtaacaaatggttaagagaaggagagctcttatctgaatcgattcagatccgatgcccctcctcaaccattatgtgtcacattggaggtaattcggtccgtgctctgtataatccctctgttggtgccaatattatgtccgcaacctttgcattcgattgcttaggggacagatcgttggaaccaaccgtcagaaccttccgaatttccacaaactctactaccgaaggtttagggattatctctggagtgcccacacggcacaacagtgttgaggtcatattagattttcatgtgtttgaaatatatgatttcgacatactcatagggcatcccatagaaaaactcttagatgtgcccgaaaccggtgtccttaacctgaaaataggaagaattgccacctccgtccctatgttgcaatcaaccaattctttgatggagtctcttcctgttcctgagccaattgagggagtgatggctatttctccattcgagaccctagagtctattttcgatgaatccatcgaagaattcaatgaaggggaggatgaaactggagaaacgatggatctgccaaaaacggatctgccgtcacgagccccaattgagctaaagcccttaccgtcaagcctaagttatgcctttctgaacagcgatgcggagtctctagtcattataagtgacaaactcctgagagggagatggcccgacttatcgccattttag

SEQ ID NO: 34392 - DNA, 105 bp, Oryza sativa
  Clone ID: PAT_MRT4530_38410C.1
accttttcctgcttgtctactttctttccatgtggtgtatctcctaatagctgaactaaagcaggggcctagctacatcctcactactaatatgatccgctcaca

SEQ ID NO: 34393 - DNA, 523 bp, Oryza sativa
  Clone ID: PAT_MRT4530_38411C.1
aaagaatagtttactttcctggttttgctttaaatatatttttttaaaaaagaatgaagtaatgccacttgcagcaacagggatagacctagagattatcatactaagtgaagttaatcagggtgagagaaaaaaatataccacttatatgtggaatctaataaaagtaatacaaaagaacttataaaacagaaaaaaaatagattagacaaatctgaatttatctactaggaaattaatcttcactttacaagccaaattatctaaaatatattaaactttcaattttctagtgaattttaggaataaaggagaaaaaataggaaagaagattagaggaccagatcaccaaaaatatcattcttttttagtcacactgatgtaacataactttgactctgtttaaatgcatccctcagtttattttttgtctgcagccacccagatagtcacagctagagaaaagcaaaccatcttacttatttcacttaatattcagtaccattgaattttggcagcactt

SEQ ID NO: 34394 - DNA, 398 bp, Oryza sativa
  Clone ID: PAT_MRT4530_38412C.1
gggggggggttccaaacgcgggggggcggcaaaaaataaacaatccacaaacagatttttaaattgcttatgatttatttgaaaaccatccttagcaatccaagcctatgattgacatttcttggttatgcactcacacatataaatagatacctataaaaaccatggccaatataaaacatgcttaaaacacacaaacctgccaaggaacaatgggaaacttcaaactccaaacttcgcacacggaaaaaagaaccaatctcacatgttttttccgcaaattttaaaatcacaaaacgcggtaaacggaatactgaaaagaaaaattgacctatggaccacttttttttccaaaacaaagttaccacaccacccccctttgggaccaccccacccct

SEQ ID NO: 34395 - DNA, 1572 bp, Oryza sativa
  Clone ID: PAT_MRT4530_38413C.1
atggcgggccctcccggcccggcaccgggcacctcctcctcctcctcctccctgcccagccgccgccgccgccgcccccctccgcgcctcggccgacgccgcggcggcgatgatcaacagcccccgcatcctccaaaggcctcgtcggaggctctcccctgcgcggcctccccgcccgcgcggtgccgcggcggtgatcaccagcccccgcatcctcccgaggccgcgttagaggctctccgcggcgcggcctcccctcccgcgcggcgccgcggcggtgatctacatccctcgcatcctcccgaggccgcgtcggaggctctccgcggcgcggcctcccctcccgagcggcgccgcggcggtgatcgacagccctcgcatcctaccgaggccgcgtcggaggctccctccggctcggcctccccgcccgcgcggcgccgcggcggcgatcaacagcctccgcccgctgtggcggtggcggtgactagtgaaggcggcgtgggtccccgccgctcgttccgcatcagcctgcggcaccgcgtgcgtgtggtcccgtgggtgaagccacccgtggcgaggaagcccaaggaccccgcgaagcccccgcgcccgtcgatcgaggcgctcgcggcggaatgggcgaaggagaaggcagcttccggggcccccgaggaggagtgcgtcctgcctttcctccagaaagatgcgcctaagaagctcgacattgtaaaagttcttggactagatggatttggatatatggatacagtgatattgagcttgaagagttacaggaaaaacattcccattacagtaggaaatttcgtgattgtgatgcaaagctgcataaggcttgttctgaaaaaggtgatggatgctgtcctcgacatgatgcaggtccaacagatggaagccttccggcgcttacccctcccacacactttccaagagttcaacattgaccctataaagaaagaggaattggacaatgggacagaaccacctccatataaaattaagataattcctacaggtctctattggttagctgctctcgggcttgtcactgctcagatgagtgcactaacaaaccatttcgccgacagaaaaagattgagatcgttaagtggaatacttctgcagacacaatattgtggatggggatctagagcactggaagccattgagaaagatgattttgtcatagaatttgttggagaagttcttgaggatgagacttgtgaagaaaggcttgaggacatgagaaggcgtggagataagaatttctacatgtgtaaagtcaaaaaggactttgtaattgatgcaacattcaaaggaaatgattgccgcttttttaaccacagttgtgaacctaattgccagttacagaaatggcaagtcaatggcaagacaaggctaggtgtgtttgcttcaaaagctatagaagtgggggaacccttgacctacgactacagattcgagcaacattatggtcctgaaatagaatgtttttgcggggctcaaaactgccaagggaatatgtctactccatatatcctaaactttgagtga

SEQ ID NO: 34396 - DNA, 316 bp, Oryza sativa
  Clone ID: PAT_MRT4530_38414C.1
ggggccaaaaagaaacttggaacccctttattacccacgaacactgccttccctttttccactatgcaagggagaagaagtacccccttggttattcattcacaagcatcaaaattttgggtaatatttaccaactcctcccgtggggttggccgatgagatccctcataagattccatggttcattcacgtcagggaacattttggattccgctgaaatacacctcggcttgggtcttggcctatgaggggggtacttctatggcgggaggccactgggagaggggggtatcctacctccctgcccctacttggc

SEQ ID NO: 34397 - DNA, 546 bp, Oryza sativa
  Clone ID: PAT_MRT4530_38415C.1
aagcacaccacactccaaagagttgaatagagccatcgaccagtgaaggctgtggccatgccggtgatggagctaggcatactgctcatcccactgaccctcgtcttcgtgccttgccggcggatcgtcctcttcctcaagaggctccaggagttccaccggagcatcacccacccgagcttcacctccgccgacatgctcagccgcttctccagcttcaactccatggccctgatgctgtgaaggacttggaggcagcaggtactccctgcagagctgaactgattcttaactgttctggaggcagcaggtactcctgcagagctgaactgattcttaactgttctgaagaactcgtctgttcgtgaaaattgttctctcttttgactattcggctgttcatccttccttttttgtacaataagaacagtatagtagtttgagactttgagatgtagtagacttacttcagaacttgctgaaagttgtatatattggtgttatgagagagataaaatttcaggctgcatatgacagaatttcctg

SEQ ID NO: 34398 - DNA, 559 bp, Oryza sativa
  Clone ID: PAT_MRT4530_38416C.1
atggagaagttcttcccgacgtctcttgtgcttcgagttcctcctcctctgttcttgcgctgcagaatccttccctggttctgttcacctgcgcgcacaggtgtacgggatgagcaggtgcctccggaattccgtccgcttgagaacctgtacgggtaggcgggcgatcaagtttttgggtagcacttcaagcgcgactgctccggttcttcgacgacaacgttgcatcttcctctgcttctgcttcaccatagcttctactggagagaacaaaggagacaacatcaacagaggcaatacgaattcctcaacatcttctgcacctcttcttattatttacatgttcacaatgttatccataggatttcaatcctatgtgaatatcaacgatgtctatacttattttaccttaaacatctcatcaccagatcgtttctcattgtgtatgccatatttattgtcataatattttggattaaaatataccgaattatgaccaaattttcaacaatatactctaacaaaaacacctctagcagttctggtttctcatttgaag

SEQ ID NO: 34399 - DNA, 219 bp, Oryza sativa
  unsure (1)..(219): unsure at all n locations
  Clone ID: PAT_MRT4530_38417C.1
ggggcaaaaaatggccgaccaaacggggggcatcccctcggaaaatcaccaaaaacccccttcgccgggggggcgggggacctaaaccctggccaggggcaaaaacccccccctgtctggagggagtaaacccggaaaccacaaaaattaacagggggggggggggaaaacaaaaaacttggttaacccttccccagccaaaaggcnncaaccccaaaa

SEQ ID NO: 34400 - DNA, 462 bp, Oryza sativa
  unsure (1)..(462): unsure at all n locations
  Clone ID: PAT_MRT4530_38418C.1
cgtattctcgcgcggtgtcggtgccggcgttgngctggcggcgacggcgagcctgtgggcgctggtcccccaggcgagggccgccgaagctgtggggggtgcccatggtgcccgtggctgccgtcggcgtccatcgccatcaacgtcttcctgctgggctccatcgactccanagtcgttcatgcggttcgggatatggacggcggcgcgtgctcgtcttactacctcttcgtcggcctgcacgcgtcctacgacacggccaaggcgcttcgccgccgacgccgtcgccggcaaggtggaggacggcgacgccaagaccagcgcgccgcccatgtaaccctctctctatagtcgatttattatattcttctccattttttaatagatgatttcaacacatgtttaaccattcgtcttattcaaaccttaaaatatgtgtgataaaaaaaaaaaaaaaaaaaa

SEQ ID NO: 34401 - DNA, 431 bp, Oryza sativa
  Clone ID: PAT_MRT4530_38419C.1
gctgaccacgaccgcactccatctgtccatgtacatgactccatctacatatgagcaacagcgctataccaacaatatggccactcttcatggcctccatgaaagaatcggacaccctcggtagggactgatctcatggccatccacgactttacagaggtacaacagggaaagacaaaaaagtcaaccccaacagcggccaacttttacaatgaagattgaatttttttccaaaagagaaaataaaggccaaatccaacggctgcatgcccctaggttatggaaaattgaatccatacctgtttgaaacattcacatgacaccattagccgcaagaacattatcagcacatgggccctcatcagaccttgcagggcgtgccgcaattcacgcatcccacagatgatgagattgggtcatcagcactccga

SEQ ID NO: 34402 - DNA, 906 bp, Oryza sativa
  Clone ID: PAT_MRT4530_3841C.1
atggccgggccccacgcggcagccactcggcgcgcccgagggcggccaagccggcgcagccggcgggaggcggcgcccgcgcccctatggtcgccggcggcggccataggcacggcgaagcggcggctgagagaggggaagggaagggggaaaagaagcgacggtccacggctcaccctaggtcgacggcgacgacaaaaaaggcggccggagcggaggaaggcggtggcgcggctcgggtcgacggggtcgacggcgttccggcggtcggcgagcgaaacggaggggtggacgaggtcggcaaggatgcggcgaagccgaaggaggcggcgccgaggtgggagatggtctgaggcgacgacggcggcggaccggagctcggcggcgacggcggagagagggagcgacggcgcgagctcgattccggcggagagagagagcggcgagtggcggaaacggacggaggagggtggcggctcggcggtggtccacggcggcgccaccgctatgccggagacccacgggggcgtcgcgcaagtgaggcccaaggcggcggcggggcgaggaggcccacggcgcagcgaggaggcctgcgacgccgacgcggcagggagcagcgaggaggcccgcgacgctggcgtgacagggagcggcgaagaggcccgcggcagggagcggcgaggaggcccgcggcggcagcgcgacagggcgtgtcgatgcggttcacgacagtgcggtggtcgcaggttgcggcgcgggggccgggcggcgcggagcttcgggaaggccgcggcggcggcgaggcgaggggcggcggatctggcgccgccaccaccggatccggtgcccagcatcggccacgaggcgagtggcggctggatccggcgtctccgctgccggatctaa

SEQ ID NO: 34403 - DNA, 156 bp, Oryza sativa
  Clone ID: PAT_MRT4530_38420C.1
atggagaactttcaggccaaggacaagtttgagacatcaactctagaggatgcgaactccacaaatgagcatgaaagcctctctttcaaagttccccaagatacatgctctcataaggaatccccagacatgatgtctcaatggttgagcttgtga

SEQ ID NO: 34404 - DNA, 293 bp, Oryza sativa
  Clone ID: PAT_MRT4530_38421C.1
tatactacatccgcttcgcttgctcctctggggaagtcgggaaagctacgcgcgggaccatggcggcagtggcaggaggcgcagcgcggtcgctgatgcaggcggagcaggacgtgcagatgatgcttgtcgccgacgtcttactctggcaccaagaactgtgactttcagatggagcgctacgtctacaagcgccgctccgatggtatctacatcatcaacctcggcaagacatggggagaagctgcagctcgcggcgagggtgattgttgccattgagaacccccaggaca

SEQ ID NO: 34405 - DNA, 910 bp, Oryza sativa
  Clone ID: PAT_MRT4530_38422C.1
tcacccggggtcgccgacaggtggggcccacctgtcgggcccgtctcccacctcgcgcccgcgccgcgccgcccgcaaccgccgccgcgcccacatccccgcctcctcggggccacgtcggccacgcccgcgcatgcgccgcacctcccgcacccactccccctccctctcgcctgcgcccgcgcccgagatggccgggattcgaaattcgaatcccgcctctctctccacctccacctctcccacgtcggccggcgaaatcgggccacccccggccgttcccgacctctccgcccctataaaatccatccccgcatcctcctcttcacttttctttttttcgccggcctctcctgagctctccatcgctcccgcaccgtgcacccacccgccgccgccacttccgctgctccggccgcttctagccgccgctaggctcgccgccgcaccgtgccgtcgccgtcatcgggtttgcgtggccgaggtccacctcgtccacccctcccccgtcgagattcgccgccggagcctcatccccgccgcgcgccggtcgtcccggaccccgtccgccgcttgtcgacctccctccgtcgctccttgtcgccggtcgccgtcgcccctctcctcgccgccgccgtccgccagtgccgcgccgccgtccaccggtcgccgccggtgccgcgccgccgtcgcgccatggccccgggccggcttgagccgctcgcgcgcgccggccgctcgctctctgctgccgtccgatctacccaagggtagattggggccgtcagttcggccgccgcgtggccgccacgtggccgccgcgtgtgtgccgcgtgtgcgcgacgtggtgcgccccttctccccggtccgtggacccgatccaccatggaccagcgcccgcagccgctga

SEQ ID NO: 34406 - DNA, 134 bp, Oryza sativa
  Clone ID: PAT_MRT4530_38423C.1
ctcggacattctggcccgagcattgactattcaaaggtgctacctcaatttgctcgctgttgacggatccaaactgagaccatggtccggatgccacatcgatgacgggcagtcagtcacgcaggctgaccgat

SEQ ID NO: 34407 - DNA, 909 bp, Oryza sativa
  Clone ID: PAT_MRT4530_38424C.1
atggcggtcgtcagcggcgggaagcgcgcgctcctcgtcggcgtgagctacaagggcgacaccagcagagagctgacgggcgcggccgaagacgtcaagaacatgaacagcctcctcaaaaaattcctcttccccgaggaatccatccacatgctcaccgaggagttgggcgccaaggacccgttgaaggcgccgacgagggagaacattatgaaggagatgcggtggctggtggaggggtgccgcgccggcgactcgctggtgttccacttctccggccacggccggcagaggaaggacgacaacggcgacgaggtggacggccgagacgaggagctctgcccagtggactacaaggtgagcggcaacatcttggacgacgacatcaacgatgccatcgtcaagccgctcacccaaggcgtgaagctgcacgccatcatcgacacctgccacagcggcaccatgctcgacctcccctacctctgccgctttaacagaatgggtctatgttcaagatacaagtgggttggccaaacgcgttggcgactatccccaaagaaagagtgggcgatggtccccgtaggcggccacgccatctccatcagcggctgcaaggactaccagaattctctagagccagacaacaccgccggcggcggcgtcatgacatggagcttcctggaggcagtgggatcgcggaggacgatgacgtatggggagctgctggactcgatgcgggcgaaggtacaccataggttgcagcaaagcagctccggcaagtgcctcgtaacgggctgcctcggctcgctcgccgccaagtgtctcccctgctgcttcctcagcgtgcaggagccgcagctctgttcgtcgaaggagttcaacgtctacgaggagcagtttatcctgtga

SEQ ID NO: 34408 - DNA, 2877 bp, Oryza sativa
  Clone ID: PAT_MRT4530_38427C.1
ctttccatggccaccacagccgccgccccccgcctcccccccctcccccgccccccccgggccgctcctcccccgcgacccgatggcgacgaggggaggaggcggaggaggaggagggaaggaggcgaaggggaaggtgatgggcccgctgttcccgcggctccacgtcaacgacgcggccaagggcggaggcccgcgggcgccgccccggaacaagatggcgctctacgagcagttcaccgtgccctcgcatcgcttcagcggcggaggaggcggcggcggagtaggaggcagccccgcgcactcgacgtcggcggcgagccagagccagagccagagccaggtttatggacgtgacagttctctgttccagccgttcaatgtgccttccaatcgacctggccattctactgaaaagatcaattcagataagatcaacaagaagattagtggttcaagaaaagaactggggatgttatcctctcagactaagggcatggatatttatgcttcaagatcaactgctgaggcaccacaaagaagagcagaaaatacaataaagagttcttcgggaaagagattggccgatgatgatgaatttatggttccttctgtcttcaattccagatttcctcaatatagtactcaagagaatgcaggggttcaagaccaatcaacaccccttgttgctgcaaatccacacaaaagcccttcaacagtgtccaaatcatccacaaagtgttataacactgttagcaagaaattggagagaatccatgtttctgatgtgaaatcaaggacccctttgaaagacaaggagatggaagcagcacagacatccaaaaacgtggaagttgaaaaaagttcatcctttcatgcttccaaagatatgtttgaaagcaggcatgctaaagtatatcctaagatggataagacgggcattataaatgattctgatgagccacatggtggaaatagtgggcatcaagcgacaagcagaaatggaggttccatgaaatttcagaaccctccaatgagaagaaatgaaatttcctctaatccatcttctgaaaatactgataggcattataatttaccgcaaggaggcatagaggaaacaggtacaaagagaaaaaggttgctagaacaacacgatgcagagaaaagtgatgatgtgtcaaggttgctagaacaacacgatgcagagaacattgatgatgtgtctgattcctcggtggagtgtataactggttgggagatttctccagataaaattgttggagccattggtacaaagcatttctggaaagcaagacgtgctattatgaatcaacagagggtgtttgctgtccaggtttttgagctgcataagttggtaaaagtgcagaagttgattgcagcatcgccacatgtacttattgaaagtgatccttgccttggcaatgccttgttgggtagcaagaacaagctggtggaagaaaacctgaaagcacaacctcttttagtcgcaaccatcgatgacgtggagccaagtctacagcaaccggaggtatcaaaagaaaacactgaagacagcccaccctcccctcatgatactgggcttggcagtggtcaacgtgatcaagctgcaacaaatggcgtctctaaaagcaatcgtcgagctacacctgttgcttctgataacaaacaaaataactggggcgttcaacttcaaccacctcaaaatcaatggcttgtccctgtcatgtctcctttggaaggccttgtctataagccttattctggtccgtgccctccagctggtagcatattggccccgttttatgccaactgtactcctttgagtcttccatcaacagctggagatttcatgaactcggcatacggtgttcctatgcctcatcagccacaacatatgggtgctcctggccctccttccatgcctatgaactacttcccgcctttcagcataccagtgatgaacccaactgcaccggcacctgtagtcgaacaagggagacatccttcgatgccacagccttatgggaactttgagcagcagtcgtggatctcatgtaacatgtcacatccaagtggcatttggagatttcatgcctcaagagatagcgaggcacaggccagcagcgctagcagtccttttgacaggttccaatgcagtggaagtggtcctgtatccgccttccccacagtatcagctcagaacaaccagcctcagccctcatatagcagccgggacaaccagaccaatgttatcaaggttgttccacataattcacgaactgcttcagagtcagcagcacggattttccggtcaatacaaatggaacggcaacgagatgattgatagccatgagaactggcaattttatgctggatgcatttgatgacttggtaaatgtagagaagaggtttgccagattatggtgacccctatatttatcctgaccgtttatagacagatgatgatactgtatattctcaagggcgggctccgtcagggtgatgtcgccccttcgtcaatttgtaatgtattttgtacagtaggacaggacagtatctgtttaactttaacgctatgtaaagccattgctggtcagttaagcagaataatactaaagctaatgagctggggaaaagaccccgctctttttatcaacaaaaaaaaaaaaaactgagggcgtctttaggcccccccccattcgtcggggttcgctcttatacgtgggtgatctcttttgcgaactcgctcgaggtgtctgtctaggaaagtgctttttgatcaaaatcacatgtatgattttcatgtatcaaatttatatatttaaaaagatgttgaccccaaaaaaaaaaaaaaaa

SEQ ID NO: 34409 - DNA, 789 bp, Oryza sativa
  Clone ID: PAT_MRT4530_38428C.1
atgggttacgttgaggacgacaaggattacgccgaggaggattcagcccattcccaaccagcagctttttacaccaacaagaagatggtttacgctgcaacggctcaacttccaaggcttatgcgacccagccaatcaagagacgggaagcatggaatacatgattggaaagagggacaattcagctgcaccatattgtgtggattagtcccggattgtggttctgtgattgctcggtttgacgggtcggagtccagggggcttcggatcattctcaccctcaccacttggtcgcatccaaccttggtaggtataaagctagttattccggatcgtggttctatgattgctcggtgtgacggatcggagtccgggaggcttcggattgttctcaccctcaccacttcatcgcatccgaccttggaattgatagttatatttggtattaaaggactatcaacaattccgaaacatgagaaggatgataatattagagtagtatctggtagtttaagcgtggtgtctagattattgggtatcattatttggggttatatactgcggataagaggtatcggagatgaagataaaattgaagcggaatccaagatggagatcattccggaaacagagcaagaatcggctaaagtccgaatcggctacgatcaagatcgacagagttcgagtcggagaagagataagtttgggcaaaagtctgccgcaaagacttatggtatcttagagtttgttagagatgagagtcgtgtccgacatggacatattttgtaa

SEQ ID NO: 34410 - DNA, 889 bp, Oryza sativa
  Clone ID: PAT_MRT4530_38429C.1
tctagccctcccgtacaccgcagttagccaagccgctccgcctcgtttccatcgccgccaccaccgcctccccgtccgcctgccgccgccgccgtgtgggaggggatgccagacttgggaggtgacggcgacgaagcagagaaggcgcccaccctctcccctgcggctgtggcttgtgctcggggatggatgcggcgacgggcgacggcgacggactgcggcaatggcgagcgacgggctcggcggggctgtcccccgctcgaatccggtgacgacggtcgtcctccgcccggatccagtggcggcgggcgtccctcgcctgacctcgcacggatccaccggcggcggtgggaggagagcagcgtgcggcaggccaccttgcagtcctctcctcctcttcctcctcccgcttcttcctgcccgctgccgtcatcgtggttgtcctccaccagcttgccgcgtggccgccgccgtctgccgatggacgtcgactctgacccggccgccaagggcaagcccacccagatggacctcgaggaccagggaagcatttagctctcagagcattcatgagacttccatctataatcctactaaacttctggctgctgacgatcatgggggaggctgcaactccagagaggcaggaggatgttgtccaggtggcgggtcacgcctcgtcgacagcatagatcacacatgggcagaggaagctgtggatagcatgatgggtctgctagctgcaaggggtttcaaggtcagggttagtgtcgaggctggtgcatttcatcgaacacttccaaggtatgactttgggaaggtgcttggtgacaatgtaggtaacgtgatccttgtccttaccatcctcaagctccaaggtgacaattag

SEQ ID NO: 34411 - DNA, 1239 bp, Oryza sativa
  Clone ID: PAT_MRT4530_3842C.1
atggagcaacccacaattcaaaacctttctgctcctcgggttgatctttttgagccatcctgttcttcacaaccaatcctatccgatggctacgaaatcagtcctggctttatagcaagcgaagcaatcccagaggtcgagattatccatgaggaacctctgcacgtcgagtcggaatccgactctactgctgaatcctcatcccagtcgcaggagccggaggaaaaagaaattcatcctccggaaaatccattcaattcgaggaggatctttttgatgattgttggaacacctcgaattattcctacgacaagagaccaccgaccaagatgcatgatgtctattttctctgacatgatcgaggatatcatggaagtcttcatggacgatttttcagtctatggtaaaacttttgatcaatgtctggagaacttagacatggtcttacaaagatgtcaagaaaaggacttggtacttaattgggaaaagtgtcacttcatggttcgtgaaggaatagtcataggacatcaaatctccgaaaggggagttgaggtggacagagcaaaaatcaaagtaattcaacagcttccacttcctgtcaatttcaagggagtccgtggcttcttgggtcatggggggttctacaggcgcttcataaaagatttctccaaaatcgctagacccctaactactttgctagctaaggatgttccatttgactttgatgatgagtctgttcttgggcaaactaaggataggaaacaccatgctatcgcatatgctagtaaaacgttgactggagctcagcttaattatgccacaactgaaaaagagctcctagccatagtgtttgccattgataaattcagatcttatttagtgggagctaaggtaattgtttacactgatcatgctgcactaaaatacctgctcactaaaaaagatgcaaaatcttggctaattaggtggattcttttactccaagaatttgacattgaaattaaggataaaaaaggagtagagaattctgttgcagatcatttgtcgcgtatgcaaatcactaacatgcaggagctaccgataaatgactatctgcgagatgacatgctgctgaaagtaacatactctgacccgtggtatgcaaccattgtgagcttcatggtcgcggggcatgtgccaccgggagaaaataagaagaggttgatctacgagagccacaggcacttgtgggttagatag

SEQ ID NO: 34412 - DNA, 1107 bp, Oryza sativa
  Clone ID: PAT_MRT4530_38430C.1
aaaagattatgattcatattattaacctaaccacaatttaataatttctttacaaacatgaattgtttgatccagtgtcggtgttacatcaacaatctgataatgcacgcaatgatacatcggcagaaaaacacaaaactaataaacaaaatcaaatcaacaccacccgctaatacatatgccgataccgatcgatgccagcactaatatagcaaatgtagatcagggccgacgacgctgattattaactacaaaagacagtaaatcctgatttctgatttcatctccatccccacctagccagctgaagcctcatcccatcttgctggccttaccatggcaggcaaaagcaccccccaagagaaagctccacccaatgaacttgcagctagcagacccatcatgctatccacagcttcctctgcccatgtgtgatctatgctatcgacgaggcgtgacccgccacctggaaaacatcctcctgcctcgctggggttgcagcctcccccatgatcgtcagctgatgatgatgctattggcagttttccaaatattgcacacacaaatatatcactgaacaaatgaaattcagatgggagcacttttctggtcctcgaggtccatctgggtgggcttgcccttgtcggccaggtcagagtcgacgtccatcggcggacggcggcggccacgcggagagctggtggaggacaaccatgatgacggcagcgggcaggaagaagcgggaggaggaagaggaggagaggactgcaaggtggcctgccgcacgctgctctcctcccaccgccgccggtggatccgtgcgaggtcaggcgagggacgcccgccgccactggatccgggcggaggacgaccgtcgtcaccggattcgagcgggggacagccccgccgagcccgtcgctcgccatcgccgcagtgcgtcgccgtcgcccgtcgccgcatccatccccgagcacaagccacagccgcaggggagagggtgggcgccttctctgcttcgtcgccgtcacctcccaagtctggtatcccctcccacacggcggtgtacgggagggctagatccgaaaataatgggagacgcgggggaag

SEQ ID NO: 34413 - DNA, 442 bp, Oryza sativa
  Clone ID: PAT_MRT4530_38431C.1
acccaacgcgctgctggggcgacgaacaggggcggcccgacgcgggttaggtttttgcgccgccgccgcccgtccggcgccgccctgcgacgccgacctcacctccaacggcggcgcccgacgcatccctgctccgacggcggcgcgacgccgcccgtgctcaagccggccggccgccgcccgtccggcgccgcgtctcccgtcgcccttctggctccgccctgcttcgactgctgattgtcaatcattgatgtgtgtggatctggacaggagaactgagcttgaagaaacagatgaacaggacaatgggaatggagggagttttgagaatgccttggagatagttgagaaaggaaggattagaatccaggagaagggaagtgactttgctgcatggctggaacttgaggagcataaaccaaaaagttgtttatctgcctga

SEQ ID NO: 34414 - DNA, 441 bp, Oryza sativa
  Clone ID: PAT_MRT4530_38432C.1
atggctgattcattgggcagcgtgaggcacatcgcggaattagcgctcaaaatcaggcaggccgtggagacggttcgccagaacaagcaggagtgtgtccagatcagaaggcgagtggtcagggtgagcagcatactctcccagctcgaggacacggtgatcatcaggagcaaccccgccatggcagctgctctggaggagctcgactcgacgctccgccacgcccacacgctcatcgcggcgtgccaggagaggaacatcgtgtgcctcttctgcgcggccactgctctttccaagaagttgcgccgggtgcaagatgacatctcggatcagatgatggagggaatgcttgcaacgagtgttcatgttactattgttcttgcgcgaatccaagacgacgttgactacacccggcggccaccaaggctaatcatggactaa

SEQ ID NO: 34415 - DNA, 420 bp, Oryza sativa
  Clone ID: PAT_MRT4530_38433C.1
atggcagcgaccgttagactcttagagtccagggattgcttcaagattggtcaaactgactggcacgcccgtatctcatcaagatttggacctgcactgaagctaagcagatctcctagaccagtccaccgccgcagctgccggctgcccaacgtccgcgaggaaggccattcctacagtgtccgcatccctgccgacagcgccaacccttcctacaacctacaggagcctgcattgcactgtcacggccccaacatcaaagaagactaccgtgtgttcttccagcatgtgtgccccgttggaaatggcggctttgtgctggagcatgagggcaaggtgatcaggtactatgcttcgggcgcaacagtcagctgggatgagtctcccggaggatcaggaggaggaggatatgaagaatga

SEQ ID NO: 34416 - DNA, 1698 bp, Oryza sativa
  Clone ID: PAT_MRT4530_38434C.1
ctgcaggcgcccccgcccaaagtgcgaccgaagagagagagagaaatcctcggcgcttcttcatggcggcggcggcggaggaaccggagccgaagcccgaaatcgaaaccccaccgccggcccgcgagcctccaactgagccaccagccgccgcccccgcccccgccgccgcagccagcgaccgaccgctgcagccatgggagcagcacgcggcggtgataaacctcccgcgctacgactaccgcgcgtcgggctccctcctcctccgctcccactccggcttcctcatcacctgccccatcaaacgtgagaaaagcgcaacaaaggaagccatttccattcttgaaaattccattggtcatgcaaacagctatagttctgaaaagtcagaaccaagtgatacggaagtttcagcaaagaaaaggaaaatatgttccgagacaccagatattgaaaattcaggagatgcagtaacatatgagaagggtgatgcttcagaaacaactggcagtgtagaaaaagactcagtttcacctcactccaaaacaagtaaaaatgttgacgacacttcaaatctctcactggttaaactgtcaagaagtggcttgcttttcttttcgtttcctagcggaggccttcgtgttgttcaaatgcttacacaaatgtttcattcactgcattctggcaagcttaaatctccacaatggtgtcatcgcatatttcctattcaggaaacatgtgttctgtcagaagcagaactacatactactgtgtcaaagttatttcttgactttgtaaagagtaaggaagaccaagatgagcctatcaagttcgcagttgggtataatagaagaggcattgatgaaacagagatgaaagggcagaagaatggcaatgaaggttcaaaacaacaaactttaatggacagggaccaatgcttcaaggtcgttgctggtgccgtcaaatcagttgctgagaactcaattgtggatctcagatctcctgagcacgtttacttttggatgcagcagatgtcagtggcagtactagtggagatgctccctatttctggggtatccctgggatcttcagtggctggggtgtccgttctcccgtctgaactcatctcgactaagcctcgtctctgtgtcaaggctttggtgcctgatgcaaaagcggcaaagaagaagtgatgcctccttggttgatatcaatcagatggcaccgtgatgtccataatacagatgatacaatttgatcagtctgctcatttcaagtttacaactctgcggcagcttgaatcttctatggtcgagatggtttaacaaacatcaaacccttccatggttgcgtgctgttctacgcatcatatcatctgtagtccccaccaactgctgtttggctggttttgggtaggtcagtgtataagttgcagccctgcagagttcgttcatgcagctcttggagggtacttcttgtcgttatttttgcctgttgcgatgtcaaaaccatgaggtcgctggctattatggtgttctactgttttctgaactttatctattatggccagttcagacaaaagcatgcatgttgctgaagaagcagctactgagatggcttttgtttcgtccaccgtactttttccctgcaatctactgtggtgctcatcatggtaataaaaaaaaaaaaaaaaaaaaa

SEQ ID NO: 34417 - DNA, 390 bp, Oryza sativa
  Clone ID: PAT_MRT4530_38435C.1
gcgaccatgcagaacgcccgcgtagaccgctaacttacctttgcaatcttgctatcccgctgatgcaggcatcacatcatcacttgtatgcttaccgatgcatacatctagttgcttgcatacactatatggattgattgcattgacagtggaagaagtgggcctttcttggcggtcttagcagactagtagaagacagccagatgcattattgaagacgcccacatggaagcgtgtcggacgtcagtggcacatctcatggctggctgacaggcggcagagagaacgctgctagtgctgtagggcacgggcgcggtcgcacatggatgtacaggggcaaggcattggaccaactgtattaggagaaagcagcgacagctcgtgcgatgg

SEQ ID NO: 34418 - DNA, 452 bp, Oryza sativa
  unsure (1)..(452): unsure at all n locations
  Clone ID: PAT_MRT4530_38436C.1
cgaggggaagggctccgggangggaagggggatccaaccttttatcccagggggcgcggcgcggcgccctcatgaagccctcctccaaaaaatcgtcgtcctccgccgcggcggccaccgncggtacaactncgggantttcaaangaaattgaacggatcgaccaacttttctatacctatgctgacagctcntcgggcatgattgatccagaangcatccaaacactctgttctcaccttgaanttcctcntacagatgtccggattctgatnttagcatggaanatggggtgtgaaaagcaacggtatntttctttnnnttaatggcggtcagattgaanctctgccnanctgatacnntccacaaattgaagaaancatttccccaactggtgcaagaanttactangnccccaatttccngaattcnntccacatgcctttcgtttc

SEQ ID NO: 34419 - DNA, 652 bp, Oryza sativa
  Clone ID: PAT_MRT4530_38437C.1
cctggatacgtttccatatgctggaactactactacatgtgaatctctatacatgggggttccatgtgttactatggctggctcagtccatgctcataatgttggtgttagtctactcactaaagttgggctggggaggctggttgcgaagtctgagaatgaatatgttagcttagcattggatttagcggcagatgttactgccttgcaagaactgagaatgagcctccgagggctgatggcgaaatcaccagtgtgtgatggagagaatttcacacgtggtctggaatctgcatacagaaacatgtggcgcagatactgtgatggggatgcacctgccctcaggcggttggatctgttacaggaagagccatgctccaataacaataagcaagattttgatgacaatcaggtcgcaaagctcgcagatctgaaagcacagagagtggatgccgcggtagatggagacaagcaatcccagttaacagcgcatgctgcagtagtaggggaagttcagcaggccccaataatggtgaatggtgtgagttcacctgtctcttctgggaaagttgaagcaaatgggcacataagccggtgaccaaggggagtcgagcatactccattgccgtgggaaacactgaccccctgtagc

SEQ ID NO: 34420 - DNA, 780 bp, Oryza sativa
  Clone ID: PAT_MRT4530_38438C.1
aataagaggtgcttccattgtaagtcaaaaaaccaggtgaaaaaaaaccaggcagaaaaaaccaggtttgtccgataaaaaaaccggaacggaaaaaaaagtccgatcaaaaaaaaaaagaagcgaaaaaaacccaaaaaaaacggacggagtccaatccagaaaaaagggcgaaaaaacaaaataaaccggatggaaaaaaccaggtttgtccgataaaaaaaccaaaaaaaagagaaagagaacaaagacagaaaggtgcataaaaggaaaaagaaaagccgtacaaaaaaaaagaaaataaagaaaaacaacaacaacaaatgttttttccctgagtggcgaaaaaaactgtagatccgaccgaaaaaaaatctgattcatataaaaggaaaaaaaaagtggtgacaaaaaaaaaacgctagatccgaatcctttaaaaacaaaaaaaagtctgattcctataaaggcaaaaaacatctaaaaaagttcattcgattccctaagaaaatggtgaaaaaatggttcgtaaaaaataaaaagctggttcatataaaataaaaaatgcaagagagaaaaaaatggaaagggcgaaacaaaaaaaaagcaaaaaagaactttcaaaaaaaacaagcaaaaaaacgtgcgagaaaacaagaaaaaaaaacacacgagaaaagaaaagcaaaaaaagagagaaaaatatggttttcttcataagtaaaaaaagcaaaaaaaaacatggtaggaaaaaactattagaaagaaatgtgccatttc

SEQ ID NO: 34421 - DNA, 1743 bp, Oryza sativa
  Clone ID: PAT_MRT4530_38439C.1
atggatctcgacaagtccacctccaccaatgcgtccctgaagaagctgcaggacgacggtgccctccctggtcgcgggaccatggagagagaaacaggaggtactgaaccagaacctgtcttgagccgcatggttgcggttgaggattatattctttgcagttttcttcctccgccttccgagtttcttcttcttgtcttgaatttctacggcctttccttgctccatctgaaccccaattccatcgccttcctcagtatcttctcttgtctttgtgaggcctacattggggtagagccatttgttgatctctttcgcttttactatgagttgcgctggatggaaccaaaaaaggtatctggatgtgtcggtttccgacttcaggatggcctgaagtcgcgattcatccccttccagtgcccctcttctcgtagcaaatggcgggcgaggtggttctatcttcagatagaaaactcggatccagtctttgttgtccctgaggagcaaccagacaagatttcagagtggaccgccaaacccgccctaactccctcctttcagtctttcatcgacattatcgatgacctccgaatacgagggttgtcggggtatgaagtcgctaccgacttcatcagtaggcggatccaaccactccaggcccgagcccacccggcctttgattattctgggccggaggacacgacctgggtttctcatcggggtatttttcttgtatttcagatttcattctttatgtgcatgttcctcctgacttatcgagttctggttctcgatcctacaggtttgaacagcgaaacagtggagtgttgcgtcagtcaagtaatgatcagcggccctacaacggcgagcaatgcccccgtccccctttgcgagaaggggacggccgagcgcgaggctgcaatcaacgctctccctctgacggacgttatcgggccgctcgcggatcaccagacggcgacgtcgttaaaggagggcgttgccaaggaggcatctgacattgctgctgctgctgctacaacgagtggcagcaacgttccgaagaaagggaggaagttctcctctgtactcggaaaccgtcggaaagcggaaaccgtcggaaagcgcctactccgtcgggcggcgcgggcgaaggcggcgcaagacgggtccggcgcgacatccagcgtgtcacctatggcagcttcgacggatgtcgtggtcacaactagggaccgggaggcgacgccgagtggacccgctggcgatcttgtgcccgctcggggcccacctgttgatgccctcacctggagggagctccaagctgagatggagcgcatcctccaggggctcgagcaccggatgtcggagttcgagaacaacctgccggagatccgcggctcgctgcgggtgtcttacaccaccctacaccaactcgccggggagtgtggcgtcacgaccaccatcccggcaactctcgacgagttctcgctgacgtcctcactcgtggagctggttgtggcgatggatgagatcccctccaagcatgcagccaggatcggcgaggatacgtctaatgggatctataccggggcgtgccacgtcctcgcgtgcgtgaggttggcgtaccctgaccttgacctccagaggattctggatcagggggccgccaatgacgcgcgcaaggacatgatgggagaagtcgatgacttgggagagtctattctccatctttttgaagagtag

SEQ ID NO: 34422 - DNA, 496 bp, Oryza sativa
  Clone ID: PAT_MRT4530_3843C.1
atcaaaggcatgcacccgttgtggagaaattggacacgttgctagcatgtgtctcacactctgcactcactaggaagaagaccatccaccaggggagtgtcccactcgcaaggtgacatgttttctgtgcgaaggaacaaaccatgtgcccaaggattgccaactcagtgtgttgttgaccaagaccgcagaaatccaacgaacaaccctacgattgtctcatcagctagtcagctccaacagcaacatcgacgatatcatccacagcaccaatgctccacctagctctgcaataaatcatagcaataatacctttagcaccaaccattctctgcaccgacagcctcagcaaagaattgtcgtcgatggaagaagttgtgtctctccccgacctactccaggccgagcaaagggcaatcaacctccggagggcgataccaagcagaagaccgtcatccgcttcaacccacaatcagaaggaagcttctcctgtgaa

SEQ ID NO: 34423 - DNA, 175 bp, Oryza sativa
  Clone ID: PAT_MRT4530_38440C.1
ctctgatcctgacaaaggtatcagagcaaggttcaatccttggctctggaatccatcgggtacggaggagctcaacgaattccgggttgatatggcggcactgaagaaggaggtggccgatctcaaaggtctgaagggggaagtaaaagagattaaaggattggggatcctctag

SEQ ID NO: 34424 - DNA, 358 bp, Oryza sativa
  Clone ID: PAT_MRT4530_38441C.1
aaaaaacattgttataatggattgggggagtccccaggttacaaaaaaaagtttaaagggttttccaaagggggaaatgatacaaatggcccacccccgttggacgattttggaaacaaaatttttagggggaacaacaagggggtttaaaaatttatgggaccccaaattccacaaggaacgggaacaaaaataagggggaaccccaccttttaagtttgccccagggacatttttcgccaaatgcgatgcaaaagtttaggcctggtttttttggggccctggggggcgcccccggaaataattttccatgggccccaagccttcacgcaaaacgattttgggctccaacccaaaa

SEQ ID NO: 34425 - DNA, 431 bp, Oryza sativa
  Clone ID: PAT_MRT4530_38442C.1
gagcaagggggtactttaactgcatttatttacatttatatttggccttggccttgcattcaaaaaaactcactcttggatttatgactaaatatctaaccctaccattagattggccttggccttgcattcaaaaaaacttacttttggatttatgactaaatatctaacccttccattagattggctaactaccacattctggccatctggccataactaatcacttagaaaaaaagccaccatctacttccatgggccaaaatttcaaccgggtattactggttaccgggttttgaattcaaaaatttggaccttaacctttattggattttttattttaaaaaaattggaccttaacctttattccataaaaacccacccacaccggttacccggctggaaggggacctccccggtgggtttttggt

SEQ ID NO: 34426 - DNA, 303 bp, Oryza sativa
  Clone ID: PAT_MRT4530_38443C.1
aggaaccatgtaagtattagatcatagatcgttaccactcaacgcgctgtgcagcggaagaagacgctgagaagtcgaaggaactctcgcgtagtagcgcgcgtcgatgtagaggaagtagtcgatagcaccggctcgaccttctcctccttgtgcgttctcctcgccgtactcccacggtgatgcaatgcctccgccggtcacacccctcacgaatatataggattcatcactcgggcctccaaggcccgtaggactcctattcggatccctatccgaattaagctcatattggatctctat

SEQ ID NO: 34427 - DNA, 565 bp, Oryza sativa
  Clone ID: PAT_MRT4530_38444C.1
atccgcgtcctcaacatcaaggcccaagtccccgtcacgctcaacgttgccgccgccaactacactcagaggcatggcttgttcttggttgccctcggcaagtacgcgttgacggatcacgtcctctccaactccttccacttcgactgcgttgattggatccaaatggactgcgtcgtcctcgcgtagttgttcagcatcatctccaccaacctccttcaagacgtcctcaccgttgacacgaccgcccgcatcgtctggcaagagcacgaacaccaatttctagggaattgtgagcaacacgccctcaacttgaagagcgagttccacatgctacaacaaggcgaccttaccgtctccaagtactgccgcaaatatgaaggcccttgccgcggcgacctcggtgaacccgtccgcgcccgcacactagtcctcaacacactaaacggtctgtccaacaagttcatccatcttcggtatctaatccctatgcagcatggttctcgacagctttgcgagtccaaagtcagagatctttggggtgagatcaatgtcaagaaggata

SEQ ID NO: 34428 - DNA, 166 bp, Oryza sativa
  Clone ID: PAT_MRT4530_38445C.1
aggcatacgaacagccaaagcctattcaagatcatactgaatagcacacacaccgaagggagaccataaagccatccaactatatagataagctggtaaacactatggagatcaaacttaacgaatgtattcttaacgtggatggctgcaatccttacacttctat

SEQ ID NO: 34429 - DNA, 1398 bp, Oryza sativa
  Clone ID: PAT_MRT4530_38446C.1
atttcactcctactgtgcgaaatggcgtaccaaaaaggaaacgtaaagcagggtaagctacctgatggaagagttatagctgtgaagcaactttctcaatcatctcatcaggggacaaaccaatttgtgacagaagttgcaacaatttcagctgtgcaacaccggaatcttgtgagattgcatggatgttgcattgacagtaaaacacccttgttggtctatgagtaccttgaaaatggaagcctggatcgagcaatctttggtcagaatagctttaaccttgactgggcaacgcgcttcgagattattttaggcatagcaagaggactaacttatcttcacgaggagtcaagtgtgcgcattgtgcatagggacatcaaagctagtaatatccttcttgacattgatctcaccccaaagatctctgactttggactcgcaaagctctatgatgagaatcagactcatgtgagcacaggaattgcgggcacaattggttatctagctcctgagtatgcaatgagaggtcgtttgacagaaaaggctgatgtttttgcatttggagtggtatggggcctatatgaaaaggatcaagcgctcagaattgttgaaccaagtctcaaggattttgataaggatgaagtatttagagttatatgtgttgcactcctctgcactcagggctcaccgcaccaacgaccaccaatgtcaaaggtcgtggcaatgctcactggtgatgttgatgtggttaagaaattggtgttcgtgctcttgccagacgatgcgggcggtcgtgtcaacggtgaggacgtcttgaaggaggttggtggagatgatgctgaacaactacgcgaggacgacgcagtccatttggatccaatcaacgcagtcgaagtggaaggagttggagaggacgtgatccgtcaacgcgtacttgccgagggcaaccaagaacaagccatgcctctgagtgtagttggcggcggcaacgttgagcgtgacggggacttgggccttgatgttgaggacgcggattgcttgggcatggagggcagctacgccgtgggtgagtcacgccgaggtgaagagggtggcgagggctggcgcatgagtcgtcgcctcgggaagataagtggtgggcaccgtggcctagagtacggtgaccgtcgtggtaggggcgccggaggagggggtcagtgcagccggcgccaagaggagcccactgaggatggtggagagagccatggggcaccatcggaggcacgggtcgccgtggagtcggagacagtgtttgttgtggtcggcacaatatccaggccaggaggaatagtgatggtggcacggacagcatccgcaacagcgtcggcagtggaattgattgctgccaaggtggactag

SEQ ID NO: 34430 - DNA, 154 bp, Oryza sativa
  unsure (1)..(154): unsure at all n locations
  Clone ID: PAT_MRT4530_38447C.1
actactcacctttgatgtagggtcacggttgtatcacccttgcatgatatgaattgtggtatcttcagttcaggttctgatgtaaatctagtatttttnagaaattttttgataagaactttgttncaatacctcaataaatgaagttacaaat

SEQ ID NO: 34431 - DNA, 1120 bp, Oryza sativa
  Clone ID: PAT_MRT4530_38448C.1
atgggcttcgccaaaacaacaaccgaaacggatatcaaattgtttcttatggggccgtgcggggcatcaaagcaaaacaattcgaaacggggcggctcgcgcacggtcgcgcgcgccgaagcttcatccaacgactcgagccaggaagctcgacggctcttcggcgcgtgtcacgtaagagagtcggccaacccacatgcacgtgtaccgatgtacatggcggcggcggctgcgggagcaagcacacccttcaatttttgccgccacggctcgcacgccgagtacgacgccgtcttcagcggcagctggatggcgcgccgcccctccgcggcgccgcacggtggcggcgcctccggctccggctccggcagcggctacggcgccgcctcgtacgttgctcccaccttcggcgcggcgtttaggcagcagcatctcgacctcctcgactacctgtccgacgatcagggcgttccggcgccaccaccagcggctgtgcccagcgcgtcgtacgtgacgccggcgccggcgatggcccccgctgaaccggtcgtgccggatgctgttgccgccgccggcggctatccgaggagcgtggctgcggcggcggcggccgtggccggcgagggaagagatcggacgacgacggacaagatcgcattccggacgaggtcggacgatgagatactcgacgacgggtataagtggaggaagtacgggaaaaagtccgttaagaacagccctaatccgaggaactactaccggtgctcgacggaggggtgcaacgtgaagaagagggtggagagagacaagaacgacccgcggtacgtggtgacgatgtacgaggggatccacaaccacgtgtgccccggcactgtctactacgccgcgcaggacgccgcctccggccgctttttcgtcgccgggatcagtcacccagaccttaattaagctaggatatgctttgccggcccagctgtggcttagcttgatgtgcagctctagttattgtatgggctgtacggttcagttatttgaagcgggttatacttatatgttgttaatgtttgcctactgattttaattaatttcttagagttagactcaatttggcggagggatt

SEQ ID NO: 34432 - DNA, 465 bp, Oryza sativa
  Clone ID: PAT_MRT4530_38449C.1
ttggttttttttttttttttttttttttttttttttttttttttttttttttttttttttaaccaacaaaagaagggcattaattaagccgggataggtcaggggttgaagaatacaggccgggttttttttgggggggtttagggggggttagactggattccaacacaaggggaccacggggggccaggggcaacacggccataatttacattcaggtttttcagggggaagtaggggggggaggtaaaaacggggggaactaaccaacacaggggttttttaggtttaagggaaaaaaggccccacccacctaccgggggaggcaggcgctacaaaacatggccatgggggggaggcgccctggcaccataagggattcagctcatgggcatttcatggggtttgacggaacctaccgggagaaagcctgggggggaaagggtggggccattggattggtgt

SEQ ID NO: 34433 - DNA, 1140 bp, Oryza sativa
  Clone ID: PAT_MRT4530_3844C.1
atggccatttctccactcgagcccccagagtctattttcgatgaatccatcgaagaattcaatgaaggggaggatgaatatggagaaacgattgatttgccaaaaacggatcagccgtcacgagccccaattgagctaaagcccttaccttcaggcctacggtcatatttagtgggagctaaggagctaccgataaatgactatctgcgagacgacatgctgctaaaagtcacagactctgacccgtggtatgcaaccatcgtcaacttcatggtcacggggcatgtaccactgggagaaaataagaagaggttgatctacgagagccgcaagcacttgtgggatgcaccttacctgtatagaaacttggcacctgacgcgaggctgcatcggctttcgatctccggcgaaggggatcaaactgactggcacgctcgcatctcatcaatctttggacctgcacaggagttaagtctccaaggccgggccgcagacgccaagcatgcccgctggatgtttcatgagattatcttccctcgttttggaactccgcggatgaagactgagatggggaaggcatggaagaacaagctacttgatgcactttgggcatataggactgcttataagacgcccatcggcatgtcaccgtaccaacttgtctacgggaagacttgtcactttccagtagagttggaacatagggcgcactgggctatccggacttggaacatggatttaaagggagccggacagcataggaagatgcaactctctgagctggaagaatggagggacaaggcctaccacaatgccaagatatataaggacagaaccaaaagatggcatgataaacgaatcaagcacgagttcaaagtaggggacaaggtgctgctgttcaactcacgggcgaagcttttcggacatggaaaacttcaaattaaatggatgggtccatataccgtcgtcgatgcttcatcacatggagccgtcacgctgcgcgacaatgaaggtaacatctttaaggtaaatggccatcgtttaaaagtttttcttgatccgttagaagttgatcgtgacttagatgttgtgaatctagtctcttttagcttctacccggagtctttaggtcccccttga

SEQ ID NO: 34434 - DNA, 1077 bp, Oryza sativa
  Clone ID: PAT_MRT4530_38450C.1
tcacacactccactccactcctagcttacccttttgcatgctttccccctgcctcgttgcctcctctgactttgcaaaattttttccaagctttattttcctcgttccctgacgaaaaactgttgcacgcagcagcttgacattgccgtactgcatcctcgcagagcacacaacacactctacacaaccttttttctcaaaagcccttctatttaagcacgcatgccatgccacccgcactctctggagctccactgctgctggctgctgctgcgtgccatggacatggagacagcgcaagaaagagagacgcgcgcatggcggtggcctttggacaccatggcctgtggcctgggcgacactggccgcttcctgttcgaatgggttccacagcttaggtgctttggtctgggagtagtgggagtcggcgccgccggtgatcctattcctcatggtcatggtcacaccccccatggccgtgagctcgagctcgagctcttcttccccaagtgtagggtctcgcccgctccgcatgcggtggtgacgggtttaccggcgcatcaggataccatggtgatgtacgacgagtttgatgaactgctccagagtttccgggacgggaatgaggagcagcagctcgtaggcttcgattccagctgctttctgaacgagaagaacagtgacgttacctgtttcctagactatgatggtgacgatcttcctctggctctgagctctgtctcaccaatggagccccttgataacaccgtggggcagcctcaagcagagcttgagcaccctcccagctctgcctcctcccacggcaacgtgggcccacatgccagtgacactggcgccagcgccgacaaagactgttcgtccaagcgtccagctacaccagaagggaatgagacggcgagcagcaagaggagcaggacgacggcggcgccgccgccgctctccggtgccgggacatcggtggtgtacccgttcgccgtggtgaagcccatcgggctggacggcggcgcgacgctcgccgacatcaacgcgcggatcctcacgaggccgcccaggccg

SEQ ID NO: 34435 - DNA, 233 bp, Oryza sativa
  unsure (1)..(233): unsure at all n locations
  Clone ID: PAT_MRT4530_38451C.1
anggagaaccaggaaacgacttaaataacagaacagtaaggtagaacaaagctccagactgaaacggccttcacatgggagggtccatatgagcacaactgggcacaacagccctcaaaagaccattcatacttatttggggggagaatgctgactgcaagcaactataagtgagaacgtggttgttgaggaacatggcgaccattattgatagatttgacctagcgaagtac

SEQ ID NO: 34436 - DNA, 957 bp, Oryza sativa
  Clone ID: PAT_MRT4530_38452C.1
atgtcccaggaccccagcgtgccatgtatggttgggtgcaagcaaaagctcagcaagacgccctgcgccaatagcaacaccatcctattcgtgctcctccccttcatcggaagcgagcgaaaggcgaagcaagtagggggcagcggcagagcggcggcgggcgagcacggcagcggggcggcgggctggtggtttgctgccagattgcgccacggcggaagagggggagagacccagccggcggcggagctgggatggaggcggcgggagagagggagagagaggcggtcgtcgcgacgacggcggctagagaggaagaaaggtggcgactggcgcgataacgagtttggcggcggagaggaaggatatggggaggccggtcgtctcttggtagttaccatttcacaccgggagaggatgaagatggagtcctcgaaccagggaaagaggaaggtgagggactttgatctgaacaaggagcccagcccagatccagtacctgtaaacgcggggaaggaggctgagggcaagaatgtaatcaagcaggctgacaatgccttggtagagaagagtgctgccgatgaagaacagccggcgggaggacgcacacccggctaccgcatgtgcctgaagcacatcaccgagagccgcgaatgcttgcgaaggtggcggcagctgaagaagaaactgctcaaagctagcgccgccgagtccgagaccgccgtcgtgtcgaccaagacggtggcaggaggaggaggccggaaagatcaggtggcctccacggcgatggcttctgcatcggctagtagtagtaggccaatcctgaacggtgcgacgaagaagaagaggatggccgtgccaacctccggtgaggatgcaaccggaggatcgtcatcgggcggtgagagcagtactaactcatcgtcgccggcaccggcaccggcgctggcgccgtag

SEQ ID NO: 34437 - DNA, 504 bp, Oryza sativa
  Clone ID: PAT_MRT4530_38453C.1
gcacgagggctctctcggcgacgactctccccctctgccgctccttctccccctccccggcggcgtcgctcccgctccacccaccggcggcgccgctcaccctccgcccaccggcggcgccgctccatctccctttcttcctcccgaccgtcgttcccctcgccctctctcttgcctctcgcgcgatgggtccggcgacggctaccgcgggtggatccggtcgcggtggtggcgggtgaggacaaatccggcgccggcggctccgtccgacccctctcgcctccctcccgcggcggatctgatggcggtggcggcgtcggccccatccccggtgtgacgacgcggccgggagcggcagtgggctcgggagccggtcgcggcggaaggcagcgatgcggacaacggcaacgacgacggcggcgacggacgacgacaacggtcatgacgacgacgacggcgccgaccatgaggagggcggctgcgggaggcggctagggttagggt

SEQ ID NO: 34438 - DNA, 434 bp, Oryza sativa
  Clone ID: PAT_MRT4530_38454C.1
agcaagaaaccaatcactggcatcgattgatcctttgaccatcatattaaaccacagaacattaatgaagaaatttaatacaagaaaaaaaatgtaaacaactggaaaaagcagtcacttgaatgttttacatgcaactaatcctaacattctgttcctagttaggtagagttgctcgaaaagccttttgcagacagaatatggctcatgaaattactacacgtcaggcccgtaagatctggttgacgaaattactgctgacctgtggccgtgcttgcttcagctcctgcaacagcaacatctgcagttttctcacttgaggctgctacttcttcaggtaccgcagcaggttttttatcctcagactcactacttgcagttactggaaccttttttaatttaaacaatttttggggttcatcaggcttatccta

SEQ ID NO: 34439 - DNA, 804 bp, Oryza sativa
  Clone ID: PAT_MRT4530_38455C.1
ggcgaccatgagatcccgcggccatgccgccgccgccgccgccgcatcccctcccctcaccatgccgccgacgccgctgcctcctgctcctcctgctctccaggctgctgctctcttcagcaagcagcttggaggaggggagggtcctcaccgtcggcgaggagctgatgggtgagacgatgccgctgcgccacggaagccggctgtacaggctcgacgggacgcggccgtccgcgtggtacgaagtcaagatctcctacccggcctccataccgtcgagcttctcgatccggcttgtggacgatcctcactctgtggaggatttggggagcatgaacaggaggttgctcaacacggagaagataattttcaaggctcagagcagcaggccagtttatgttcttgtcacggtggagcctgaaggggtagttgcaaagccaaatgtgccggagagagagcttgcgatgttcaacattgtttgcgacgaacttatgcttgggatcccacattttgcctggtgggttggaattggatctctgttctgtattgcgctggcatctgtggctccctattttctccctctgcacaagctacttaactacgaagccacagaactgagtgatgactttgcggctaagctctcatgatagatggaagtgtgctgaatgatagaaatgtttcattttgcagagtaggctattgtacaggcacctagctcttttttcctttccatcagatgcagctgtgtacaagtatttactgtaccttgcaatacaatggtagattcattcatttcgatcttgt

SEQ ID NO: 34440 - DNA, 420 bp, Oryza sativa
  Clone ID: PAT_MRT4530_38456C.1
atggttgcgctgaacgcctgcccgcttgccctcgaagacgagcctgatttggctctccggctctccgcgctggccgccgggcgagtttccgtgccgtctgatgtctggccgacgacggtggcgaggccgacaccatcagtacaaatcgatgtagaatcccggcagtgcaaggtcacgggcattggccggccctcgccacgggcacagttgggcgaagaggcgggcgatgttgtgcctgaggtcacgctcaccgggcttgttggcagcggtgaagaggcaattgtcatcagcgtcgacctcctcagtgtggtcaaggcggaagacgagggggtgggagcaagagttgggaggggggtttccaggcgattccatgctcccagatccggtggatggggcgacgttgttggtcctcgagcgtga

SEQ ID NO: 34441 - DNA, 398 bp, Oryza sativa
  Clone ID: PAT_MRT4530_38457C.1
atgggcaagctcttctgcgacgactctgccaccaccatcaccaaggctctccgccgctcccatgcccctgcgcgcccgttcctcacttggcccaccctgacctcgtgctgggccgctgtcatcacgctcgaggaccaacaacgtcgccccatccaccggatctgggagcatggaatcgcctggaaacccccctcccaactcttgctcccaccccctcgtcttccgccttgaccacactgaggaggtcgacgctgatgacaattgcctcttcaccgctgccaacaagcccggtgagcgtgacctcaggcacaacatcgcccgcctcttcgctgatgtctatgccgcccaaatcacacgccaaaaccagcagccacctccccaacacactcatttggtcg

SEQ ID NO: 34442 - DNA, 275 bp, Oryza sativa
  Clone ID: PAT_MRT4530_38458C.1
atggccatctgggccgcccggcacggcacggcccaagcccggccgtgcctgggccgaggcttgtcgggccggcacggcccgaccgatgcaccgggccgtgccgtgccagcccacgggcggcataaacggcccaggcacggcccaatactagtcgggccgtgccgggccggcccgaaggcacgatgggctattgtgctgactcacagaaagagtttatatttggtccctcaactctgtgggcttatgtaatgctacagtaaacattctctaattat

SEQ ID NO: 34443 - DNA, 1140 bp, Oryza sativa
  Clone ID: PAT_MRT4530_38459C.1
tatgcggtgtgaaataccgcacagatgcctaaggagaaaatacccgatcaaggcgcctttcgccattcaggctgcgcaactgttgggaagggcgatcggtgcgggcctcttcgctattacgccagctggcgaaaggggtgtatttgctggctgcactagtggtgcaccggtgctgagcgctgacacggtttttctgttctctttgctttgaggctggccgcattgcatctgcaccagaacggagtcgtcgaggcggccgccgccggcgacgtgcgaattgccggcctcgatcttcacctgggcgtagggatggggcatgaagtggtggtgcccggcgccacggccgagcggcggcggcggaggcttgccgtcgacgagcacgccgaactgctccgagacggcggcggcggaggaggaggagtgcgcggtgagcacggacggcggcggcgacggcgaggggttgccgtggtcgtcgtcggggaggttgacggtggtgatgtcgtggatgctggagcggcgcttgtccttgccgccggagttgagccggatgaagtacttctgcgcgtggctggccacctgcgtcggcgtccggctcgtcacgaagttgcgggagatgttcctccagtcacctctgccgtacttcttcagccccatcaagaacaacttgtgctcctcctctgtccacggcacgcccttcttgcgctcctggtcagggccgcgcgcgcgcttgccgccgaccatgtagcaggagcgcttgaacccaaggccggcggggtcatcgccgccgtcccagtcaagagtgaacccggagccgccgccgccgccggcggcgccgtagtgggggaaggggacgaggccggcctcgatgaagcagacgtcgttctcgaggtcgtcgtagtgcgtcatgacgtcggccaccgtcttgccgggcagcagcagcgccacccgctcccacctctccgggtcgttccggtcgagcgccgccagcgcctgctcgaacaccttgttctcctcctgcgaccacgctccgccgccgccgcgccggtccggcaagaaccacccgcccgccgccgcagcctggccgacgaagtagtgcgccggcgccggcgggagcacctccatgtacgactccttcatcat

SEQ ID NO: 34444 - DNA, 526 bp, Oryza sativa
  unsure (1)..(526): unsure at all n locations
  Clone ID: PAT_MRT4530_3845C.1
cggactgngtgggtggaagctcacctccggccgctctccgccgctgctctcctcctttcccccgctgcgccgcttcccaccgccgatgctgcttctgcgaggagagcatcccccggtggcaggaggaggagcagcgtgagggccagcgcgggcggcgggggctggctgtcgggcctgctcggaggcaagggcggcggcggcgcgccgacggcgatgacggtgacgccggggaccgtgaaggcgggggaccccgtcctgcacgagccggctcaggacgttgcccccggggacatcccctcggagaaggtccagggcgtcatcgaccggatggtcgccgtcatgcgcaaggcccccggcgtcggcctcgccgccccgcagatcggcgtccccttgaagattatcgtcctggaggatacccaagaatacatcagctatgctcccaagaaggacattgaagcgcaggatcgccgtcctttcgatcttcttggtatcatcaatcctaagcttaagacgacgagtaaaaaga

SEQ ID NO: 34445 - DNA, 361 bp, Oryza sativa
  unsure (1)..(361): unsure at all n locations
  Clone ID: PAT_MRT4530_38460C.1
ctagagacttccatcgccaccaccngancncccnncgcnggcatnnccnccggaaccaaggcccnggcngncgccnagngatnctcacttcctccacagnagcccgcantgttagaaancacttnannataanccccgggggnggtngaagtatntgtgnaaccagtcgntnnaanccgtcaanctnatnagactncaacacctgtgganntgaaccctgaaacttctnaantgcaacaagttgcntnacaagtcagaanttnaanacaccaancctncancanannaaacnaattanacttctnannaannggcttannanaaaccaganattagagatcgaaacgngtccagcnggttt

SEQ ID NO: 34446 - DNA, 478 bp, Oryza sativa
  Clone ID: PAT_MRT4530_38461C.1
aagaaatcaagaaatccaaaggcagcagcaatggcagcgaggtgcctctcttatctagccctcctctccccctacctctccaactacgggaaggtgccggacaagacctccccgcacgtcccctcctacgacagccctcgccgtcgtcccggaacacgcctttcgggaaccacacgggcgcgagcaacatcacacagaccacgacgcgggccatgaacctgcatatggagttggaagcactcaccatgtcgggatactatgtgaaaatcctgaaacgccactacccttctacaaagatctgcttggtcttaaagtgaaacctgctacgccaaccgacaagctctgcttacagaggagcttggctctgggttcgttctgacataattcacttgatggagctgcacaaatcctgatccatcgacagggcgcccagaccataggggacgtgatctggataccctgatggccatcaaagatc

SEQ ID NO: 34447 - DNA, 3218 bp, Oryza sativa
  Clone ID: PAT_MRT4530_38462C.1
ccaaagccaacccaagccaagctcacgagtgcagagctagacgacgtgtagatacgtagtctcctccgatatctctctctctctcgatcgacgcctctgcatatataatacccataccatgttgcgtcctcagctcaatccatctagccacacgacgacgacgagcagcagcagcagcacgcagctgttcgcatcctcgtcgtgcatcgctagccttcgccggccgtcgtcgtcgtcgtcgtcggtggtcgccgccgcacgccggacgcgggggcaaggtagcagtcgggttgttgttgtgtgcgcgtcgtcgtcggcgacggcgagcaggggagatagttcttcggacatggcggcggcggcggcggtgcgggtgaaggcggtggcgacgatcaaggtcaccgtcggcgagttgatcaacaggtcgatcgacatcagggatctcatcggcaggtcgctctccctcgagctcgtcagctccgagcttgacgcgaagaccgggaaggagaaagcaactgtgcggagctacgcgcacaatgtggacgacgacgatcatagcgtcgtcacctacgaggccgacttcgacgtgccgagtggattcggccccatcggcgccatcatcgtcaccaacgaactccggcaggagatgttcctcgaggacatcaacctcaccgccagcgatggcgccggcaactccactgtcctccccatccgctgcaactcctgggtccaacccaagtccgtcggcgatgagggcacgcctagcaaacgcatcttcttcgccaacaagacttacttgccgggacagacgccggcggggctccggagctaccggaagaatgacctccagcagaagcgcggtgacggcactggcgagagggaggccgacgaccgtgtctacgactacgacgtttacaacgacctcggtaacccggacagcaacggcgatctcgcccgccccgtccttggcggcaacaagcagttcccctaccctcgccgctgccgcaccggccgccccccctccaaaaaagaccctaagtcggagacgaggaagggcaacgtgtacgtgccgagggacgaggagttctcaccggagaaggaggactacttcctccgcaagacggtggggtcggtgctccaggccgccgtgccggcggcgcagtcgctgctcctccgacaagctgaaatggaaccttccgttcccgtccttcttcgtcatcgacaagctgttcgaggacggcgtcgagcttcccggcgtcgacaagctcaacttcctcgagagcgtcgtgccccgcctgctcgaacacctccgcgacacccccgccgagaagatcctccgcttcgaaactccggccaacatccaaaaggacaagttcgcatggctcagagacgaggagttcgcgagggaaacgctcgctggcatcaacccgtacgccatcgagctcgtcagggaatttccgctgaagaccaagctcgacccggcggtgtacggtccggcggagtcggcgatcaccgccgatttgctggaggagcagatgaggcgcgtgatgacggtggaggaggcgatcaaccagaagaggctgttcatgctcgacttccatgacctcttcttgccgtacgtgcacaagatccggtcgctggatcacaccaccatgtacggctcgcgcaccgtcttcttcctcaccgacgacggcacgctgcagctgctcgccatcgagctcacccggccggcctcgctgtcgcagccgcagtggcggcaggtgttcacaccgtcggtggatgccggtaggctcggacgtggctgtccacccactcccccgacgaggagtacctcggcggcgagcagacgaggccgtggaacagcgacgcggcggtgcaggcggcgtaccctgggttcacagctcggctcaaggagatcgagggcgtcatcgacggccggaacaaggacaggaagctcaagaatcggtgcggcgccggcatcctgccgtatcagctgatgaagcccttctccgacgccggcgtcaccggcatgggcatccccaacagcacatccatctgatgggaggacatctacttgcaattgatcgttcatgtcatcatgtgtgtgaagctctgaattatttgtgtcagtagtagcattgttacataatttttaatctgcatatatttgtctgtaaaaataagaagtggttgttgttgatgttatttattgaaaatcttatgaataatgtattcttttaccgaagccaaaagcatagccggcgacgaggagctccaggcgttctggaccgaggtgcgcaccaaggggcacggcgacaagaaggacgccccgtggtggccgaagttggactcgccggagagcctcgcccacacgctgaccaccatcgtctgggtggcggcggcgcaccacgccgccgtcaacttcgggcagtacgacttcggcggctacttccccaaccggccgtccatcgcgcgcacggtcatgccggtggaggagcccgtggacggcgccgccatggagaggttcctggacaacccggaccaggcgcctccgcgagtgcttcccgtcacaggtgcaggcgacggtggtgatggcggtgctcgacgtgctgtccagccactccaccgacgaggagtacctcggcggcgagcagacgaggccgtggaacagcgacgcggcggttgcaggcggcgtacgacgggttcgcagcccggctcaaggagatcgagggcgtcatcgatggccggaacaaggatagaaagctcaagaacaggtgcggcgccggcatcctgccgtaccagctgatgaagcccttctccgactccggcgtcaccggcatgggcatccccaacagcacatccatctgatgagacaaaacgctccaaaactacttgcaaattgatcattcatcatctactgttttaaccaatatgtcactcccaaatctttattgatttttatcatgtttgaaaagataatcgagaggtatcataccatttttatagtctaaaatttagatattatgtatctcaaggtatcacaatgtttaatgtaaataaattttgttacctcaagatattttcttagcgactgtaatttttttcctctgttggcaccattcttatctgccttttaacagagctagtactttctatatgaagatcttttaaaaaaacaaattaataaatctatttttaattaaaaaaaaaaaaaaaaa

SEQ ID NO: 34448 - DNA, 191 bp, Oryza sativa
  Clone ID: PAT_MRT4530_38463C.1
cgcttaaggggctctaggggtcaaagaatgtgtacactgttggcattgttcggataataggctttgtcaacgttaggcaccggcatgcaaagagctacgtcgcgtataagccctcgcgttgcaaggaggcaggcggttactaaacccttttatttcgtagggcctgttctatcttctccattttgtttttg

SEQ ID NO: 34449 - DNA, 407 bp, Oryza sativa
  Clone ID: PAT_MRT4530_38464C.1
gctgtttgagttcgagtgcttccttgacaagacctggactgtttgaaatgtcttcctatcgaactcagctggatatgcgactttaacacgaactgctcgcgatgcacaggctaggaatcagctcgagcgctttactgaatgtctcgagagagagagttgtgagacattccaagattgtattacctgtgaccggctcaagctcgcggagtatatgtacacccgtgtgaagcatctgacatacactactactgaagatgctgtgaccagctctggagctcctttctggtctgctccaaatcgtttaccacgaccactggagttcttgacgtctgatccaaggcagcttaacttctttttggatgctgcaatcttaaggctagagacatttgggatacccatacctgact

SEQ ID NO: 34450 - DNA, 1182 bp, Oryza sativa
  Clone ID: PAT_MRT4530_38465C.1
atgatccgcctccgggagcgcatcctatctctgctcctccagccagcatcccctcgcccaatcgccggaattttcccgccgccttgccccctccgccgcctcctctccaccaccgcgccagtttcccccaaacccttcgccgtcgacgagtacctcgtcgccacctgcggcctcacccgagcccaggcagccaaggcttcggagaagctctccaacctcaggtccccctccaatcccgacgccgtcctcgccttcctctccgacctcggcctctcgcgccccgacggcatcgccgccgccgtcgccgccgacccaaggctgctgtgcgccgacgtggggagcagcctcgccaggcgcgtcgacgagctcggcggcctgggcctctcccgctcccagatcgcgcgcctcctcccgctcgccggcaggtgcttccggagcagctccctcgccacaaggctcgccttctggcacccggtgttcggctcgttcgagaatatcctcaaggcgctcaagatgaacgccgccctcctcggctccgacctcgacaaggtggcgaagccgaacctggccttcctcgcgcaatgcgggataaacgcctccgatgtcactcgcacaaccttgtccctgtactcctgccggctcttcaccgtgaaccctaggttcctccaggacgctgtggcaagagtggaggagttaggcgtggcccgtggttggaggacgttccaccgcgtgctcagtacagtggctttcttaagcagggagactattgccagtaaaatgcagctgctggatgatcttgggttttcgcaggatgatttcctggtaatcgtaaggagggcgccacaagtgctgcgtttatccgatggaaggatacggcgatctgttgagttcttgataagggatgtcggtctggagcaaagctacatcgcacaaaggccaacgttgttggcgtatagccttgagcggcggttgttgcctcggcattgcttgctcaaggtcctcaaggcaaagggattgctgaactgtgacttgtcttactactgcatagccgcgatgagcgaggagaagtttgtgcaaaggtttgtggatccttttaaggacaaaattcaaggccttgctgatgcttatacctccagttgttctggggaagcaaatggagttcgttcattggtttgcctgtag

SEQ ID NO: 34451 - DNA, 351 bp, Oryza sativa
  Clone ID: PAT_MRT4530_38466C.1
atggacggcgcccaccgttgcgccgccgccgacgccgccacacccctgagaatcgaggatgcccacgccgtcgcctgcctcgctagtcgcccctctcgccttcctctcctcgcggcggcgcaggtgaggtggagtccggcgccgaggctggtgcggcaaggtggcggcgacaacggcggtggtggagtaggctggccagcgcggttgctgacgactggaggagcctcgcccctctcgccttcctctcctcgtggcggcgtgggtgaggtggaggccggcgccgaggatggcgcggcgagcgcgggtgaggtggaggccggcgccgaggcaggcgtggcgaggtggcagtga

SEQ ID NO: 34452 - DNA, 231 bp, Oryza sativa
  Clone ID: PAT_MRT4530_38467C.1
atggcttggagaaagcggtggcggtgcaggaggagccgcgagctgcggcgtgcacgcgagaaagttccaggcctcgggtgaggattattctctcatccgtgggtcggcatggatcgagccgcaatacacagcaatacacgaacagccaaatgcacatttgggccagatgtgggaattgatccaggcgtgggctgcattccacggaagggcggttcgttctagaacctaagg

SEQ ID NO: 34453 - DNA, 491 bp, Oryza sativa
  Clone ID: PAT_MRT4530_38468C.1
atggaagcaaaaaaagaggctccagctgacgctccaaaacatcctccaaaaatagacatccgccaaaacaggagagagaaacgccctcctcacgctatccggttctcccgcccccatccggatcgatcccaccttcgccggcctgatcccaccttcgccggccgccgtcgcacgtccctgtcctccctcttcacttggcgcggcggtggggtggcgtgcagcatcgctgccgacgcagcaggaggcggcgatggtggtgggggaaggaggaggtggccggcggccaaggcggcggctgtgggcgacgacgccgcagcgagtgagtcaggcggcgactggattgacagccaagggcggcggggatggcagccgagggcggtgcgtgcggccgtgggctggcgcggcggcgcttggcgtctaggaggcggcgggacggcgtacgccggagggaggggatcctctagagtcgacctgcaggcatgcaagcttga

SEQ ID NO: 34454 - DNA, 215 bp, Oryza sativa
  unsure (1)..(215): unsure at all n locations
  Clone ID: PAT_MRT4530_38469C.1
cgggtcgccaccgcgtccggcagagctgagatancctgcgactgcgaggggaggaggcagcgatgtggcggcggcaagtgggtgcccttcttctccggcaccgatccacgccttcctccaccctccgccaccatctccccctccccgtccccgaccagagcccacctctcgctaccaaagtagtgcaccgcctgtagactagacaaagtgagaag

SEQ ID NO: 34455 - DNA, 1602 bp, Oryza sativa
  Clone ID: PAT_MRT4530_3846C.1
gcaaggtgttcgatcgcgttcatggtcatggcgagctgcctgtccgtcgtcgtctccggtgggcttcccggcgatctcttcgcgcacagtgtcgcctcgaagctccgcgtcgaccgcgacacgacggcgagggcgtcgtcggacttcggccgcatcgtggcggccgcgccggaggcggtgctccacccggccacgccggccgagatcgcggagctcgtccggttctcggcgtcgtcgccgtcgccgttccccgtggcgccgcgcgggcagggccactctgcccgcgggcagtcgctcgcccccggcggcgtcgtggtcgacatgcgtgcgctggcggcgcgccgcggccgcgtcaacgtgtccgcgggcggcgcaggcgcggcgccgtacgtggacgccggcggtgagcagctgtgggccgacgtcctccgcgcgacgctggaacacggcctggcgccgcgcgtgtggacggactacctccgcatcaccgtcgccggcacgctctccaacgccggcatcggcggccaggcgttccggcatggcccgcagatcgccaacgtgctcgagcttgacgtcatcacaggaaggggagacatggtaacatgctctagggacaaggagccggacttgttcttcgcggttctcggtgggctgggccagtttgggatcataacccgggctcggattgggcttgagcctgccccaaagcgggttcgatgggtccgcctcgcctactcggatgtggtgaccttcaccagagaccaagagctgctcatatcaaagcgagctagtgaagcagggtttgattatgtcgaaggacaagtccagctcaatcggacactcacagagggtcccaaatcaacacccttcttctcgcgtttcgacattgataggcttgcgggacttgcgtcagagtctgtgtcaggagtaatatacttcattgaaggtgccatgtactacaacgagtcaactactgcctctgttgatcagaaactgacgtcagtactagaacaactcagttttgacaaaggctttgtgttcacaaaggatgtgagctacgtgcaattccttgatcgtgtgagggaggaggaaagaatactcaggtctatcggcatgtgggatgtgccacatccatggctaaacctcttcgtgccccagtctcgcatccttgacttcgacaccggtgtgctcaagggtgtttttgttggtgccaatcctgtcggtgtcatcctcatgtaccccatgaataggaacatgtgggatgaccgtatgacagcggtgtctggtaatgatgacatgttctatgtcgttgggctactccggtctgcggttgtccccggagatgtggaacgcctggagagggagaatgaggcagttctagcgttctgtgataatgagggcatcgggtgcaagcaatatctaccacactacgcatcacaagatgggtggcgaagccatttcggggccaaatggagcagggttaccgagctaaaggtaaagtatgacccatatgggatactttcaccagggcagaggattttctcgtcaccatctctttctctaatcagtccatcacctgagctgagcagcaaagcatctgag

SEQ ID NO: 34456 - DNA, 873 bp, Oryza sativa
  Clone ID: PAT_MRT4530_38470C.1
ttaaagggaaaataaaagaattggagagattaaaaattcacaattgataccagcatagcatccctcgccggcggcgaacccgtcgccggccatccatggcaggcactcgcaccggtggccccagttgccgctcggggtctgcatagggatgcacgtggcgttcgccgcgcaccgcccgaggtcgtcgacgccgccgccgcagctcccgttgacccaccaccccatctccgccgccgcgaactccagcgagaacaccccttcccgtgtatcgccatacacggatgtgagcaggttctcgcacctaggctcctccaccttctcccactgcgcgaacaggccgcccaaacccctctccgccggcgtcgccggcgagagcgaggcgatgcacgtcagggaggaggacgcggtttcgttgcctcctccaccgctgcacctcgtcgtgcgaagcatggtttcgacggggacgctgcagtcgctgctcgtcgcgttccggcagccgcggaggaacaggccggtgcgcgacgacacgccgtagttggcgccggagagccaccgcctggcgtcggagacggtgcggttgcacgacggcgggacggagacggtgaaggtggaggcggtcgagttgaacgagccgtcgacgacggtgtacgatcgatccgtcgtcgtagcgtcgttgccttggaggatcagcgccgcggtggagttgctgccgccgtcgacgttgcaggacagcatgatggggcagctgccggagaagccgaaagggtaggggacgaccaagccgccgcaccggcggctacacccatcggcggcgacggcggaggtttcacgagctagcagcaaaaagaggaaggagaagaagagtagctgcat

SEQ ID NO: 34457 - DNA, 291 bp, Oryza sativa
  Clone ID: PAT_MRT4530_38471C.1
tttggattagtccctgctcggacttgctcaccgggaagcgcctgtccaatcgtgtcttcagcacaaaacacttgtcgagtggctgccacggagatgatatctgaaggaaattatattgaggtccttggatccaactctcgcggaggcaccaggatatgaaaaccaagatggtgaagtgttctttgaattgcatcgcccagtggtgtaaatctataatcctggagattgagaccactatacaagaggttgtctcctgcctggacatcataggcacccgagctgcagacccca

SEQ ID NO: 34458 - DNA, 437 bp, Oryza sativa
  unsure (1)..(437): unsure at all n locations
  Clone ID: PAT_MRT4530_38472C.1
acgtgcaatgcaaacacaatttcatcgcggagagagagatctagtacaatctgggcgccactgccagcgcccagcggcaacggacacacacactccgacgtcaacgacacgtacgtcgtcggcagcaacagcaagaagcgtcacgtacgaggaagagcccctctgctccacatcctcctgagcgacccgcccaccctcgccgagtcgccctgcggcttcgtcgtcgtcgtgcccgggacctcgacgacgaccagcaccgctgctgctgcttcgtctccgccggacgacgaggcggcggcgctggtggtggtggtcaccaccgcgccctgcgatccccagaacaggacgttcgtcggcagctgggcggtggtcgtcgcgctcgcgtagttggccggcttcggctgcncangagggaaagcgagcggaagaggggcggc

SEQ ID NO: 34459 - DNA, 270 bp, Oryza sativa
  Clone ID: PAT_MRT4530_38473C.1
atggaggagatcgacgaagagatcaagcagagtgaaaggtgcggccactggtgggccctaagttgctggtggttctgttcatggtggctgggttcctccggaagggccgggaaggggcgagggtgcacggacagcgggacagggatcgagatcggtaggggcggcgctccaaggagcatcacatcggtagagacggtgacgaaggagatcacggcaggctcccgctcatatagaaggaatctcgggggtccatgtcacgccccgaactag

SEQ ID NO: 34460 - DNA, 413 bp, Oryza sativa
  Clone ID: PAT_MRT4530_38474C.1
atggccggtcagaccgtgtactatgccggtcagaccgtgcccaccatagctggtcatgctactacacatatccctaatgcttataatgatcctaatagaggatatcctcatgacattggatatggccaatataataatattgtgccacaacaaccactttttaggccaccaaatccaccaaggcctgaaactatggaggatcggactaggactattattagggaaaattttggtatcaagggtagcagtgtagaatccaaagtagctatgcatacatatcaaaggccatatcctgaatacgtagattatgtcccatacccgcaaggatttgaggtgctcaacttcacgaaattcacaggtgaagatactagaacaacaattgagcatatcggccaatttattgaacaaatgtg

SEQ ID NO: 34461 - DNA, 198 bp, Oryza sativa
  Clone ID: PAT_MRT4530_38475C.1
ttttattttgggggtacaatgaacagatcctcttatgctttgtcttaatagttttacatgcttctacaatacattgaacaggttcttttatactttgaattacatgctacaaaacatttaaccttactttacatacaattaaaagttctcgagagaaggttcaaggcactcaaagctttattgagttcacacatttaa

SEQ ID NO: 34462 - DNA, 744 bp, Oryza sativa
  Clone ID: PAT_MRT4530_38476C.1
gtgaaggacaggattgaatcacagaatgaagtaagggctaaagagaaggaagaaaaagatcttgttgctcagcagaacatgtatgcccaattgcttcctcttgccttgcctgctcctcctggtatgggcggtcctccaccgccaatggggatgccgggcatgcctccgatgggcggaatggggatgcctccgatgggtcctggacctatgccagcatatgggatgcctccaatgggaagctactgagttatcatccacttgtgaagagttcatttagataagaatttcaatttacacagaagaggaggcatctttcaagttgtagatgtgctattattggttgtttaaactgattcttttggtaccaggacaattttggcgagtgaaatctctagccaggtcgagttaattgctggttgctatatatattatattacgatgggataggatgagggatggttgttaggttgagcgggagctgcaaaggctggtaccattatttgtataggttgtgtgataaaaaagcttgtagacattttgcatgtacactttgccgtagtggttggcgttggcagccataaacaggaacaccattgtctgtatgttacttgtttacggtctcatgtccagctgtttgaattttgtacctgaaatatttttttctttggacaaaaagatggagtatttgaatatttcgctcttgccaaaaaaaaaaaaaaaaaaaaaaaaaaaaaaaaaaaaaaa

SEQ ID NO: 34463 - DNA, 575 bp, Oryza sativa
  Clone ID: PAT_MRT4530_38477C.1
ttcactgaatatcacactttccctacttatagcttgggatcagaaagttttagctaggattcgtagtggatcaatagatatttgcagattttactttttatgcttaacttgttgcgatgttcctacactctctatttttttggtaaaacacatttagttccatggaattagttatgcacctgaggaggcttataaatgtttcactgatcttatttgtatcctatcataaatgtttagcccgtgctgctggaaagtttgattactcagacaaataccacaagtttgctctaagatcatgctatgacaaagtaggacattccaaaaatgctcaataggcagtaaaagaactctttgaattatttgtatactgttaccagacaattgaattttaggttacagtgaaatattgcatgcaataaaatgtgatatgtaccatataaaaaattgttatatatggatatagatctcctaagctgaaagcatgagtatttacttaatttacttggtatttataacatagaacataattagttattatagttaaagtttgatatgtatatttctcaatctgtgga

SEQ ID NO: 34464 - DNA, 573 bp, Oryza sativa
  Clone ID: PAT_MRT4530_38478C.1
gggcaaaacaaaagggggtcggggaacattttattttcgttccggggttcattttgatttgaagttttaggctcccaaaaaataacttttggaagcccccccgctggcgatcgatttcaaaattttaagccgggccccggatgatgtgaccccccctggcaggggccacagggtcacttatttcaccaaccttgaaagcaaatgtcccattttcaaaggggttttgcatttgccccctcccaaaagggcccaggtcccccccccggcccgcgggggaccaatcggagtggcgggcggccaggtccccaaaattggcccccccggaaaggatctggtcccggaggtcggcaaggcccccgggggcttccgcccccgtggtaacggaaataacccggcccccggaatccttccaggaggccttggggggggagccctcgtgcttgatcaggatgtgcaaccccctcaccgtttccgtttccggggccgacgaccccattttgaactcctcctttactcctccgcctaaccaataccctttttgggaatacccttttcgagcggacccgtgggtcc

SEQ ID NO: 34465 - DNA, 933 bp, Oryza sativa
  Clone ID: PAT_MRT4530_38479C.1
atgccgtcctccccgtggatccccaccgccggcgctccgccgccgcgggcagcgccggccgtggtctactcctggctgtcggagcgccaccctgtcaaggtatcgtgccttcccctctcggaccagcgtgaagtggaaacccgagagcatgaagagaaggtcaacaaatatcaggctgtccttgcagctcgtttgaaggccaaatacttttctggcaaggcttttggtaaagaaaatgtgtttgaagaaatgactatccagtctgagaccattctgttaagcaggtgcccgttttcaagtttatttgcagatccagcaaaattttgccgggagaagagctgtactaaagaggacatttatccatctttgacaaatgcctcctttgccaagcataaccatttatctctagttcgtgaagactcgtcgaataccaacattccagggcctccattgccgattattccggtgcatctgtcaacatacatggcaagcttcatctgcaagtgcccctggaatcatggtggacagatgtatgaccaaacacacctgaactgcatctgcagccattcttatcttcgtgcaactgtacctgctaacctgcaccagttgtttcctcatatttgcaaaagagatctccattgccaccaccgtgagacattgcatggtgcactggtgcttcttccaccgtgcgccgcacaagggcaggggccatgcccttttaaccactgtttgcttgggtcctgcgatgtgagcgtccaactatggtggggcctttctccctcaggttcacacgtagtaccctggactggacatcctttggctgataccgcacttgcaatggcaaatgcatcaccggtctctagatttgttttttttagttctgatctggtgcacagctgccgttcctatcttcagcaacacaatttgcaatag

SEQ ID NO: 34466 - DNA, 2076 bp, Oryza sativa
  Clone ID: PAT_MRT4530_3847C.1
atggggatgggtgatgagaatgggcagctaagagtgagcacactgctccgacgacttatagagcacacgcgggtttcctgcccgccgcacttggcatggagaggccaaacgatcttcggtgggtacgctgaggtaccctataaccgaaggatccccacagtggagttagctcatgggttatatggctacgaaatcggtcctggctttatagccatggttcgagagcaaaccttctctggtggtattagtggaaacccatacctccatcttcgggactttgagctggtgtgttcatgcctatccatcgtaggcatgacacatgaaactctaacgtggaagttgtttcccttttctcttagagatgatgcgaagcaatggtacactctgtctgtcaacaaattccacggtgaatgggaggaactaaagtgcaatttgtgccttactttctttccattaacttgtgtaatcaatcttcgattagacatcctctctttccgacaaaacgagaaggaatctctcggtgcagcctgggctaggttctcactgttaactcagtctggcccagacttgtctttacccgaccatgtgttgttacaacattttcgatacgggttagacaaggagtctgccgaaaatctcgatatttccgccggagtatcgttggcgcacaaaacaaccaccgaaggaagagaactcttagatctgatcttagagaatgattctttcggccgaagcaaagccatcccaaaggtcgagattatccatgaggaacctctgcacgtggagtcggaacccgactcaactgccgaatcctcatcccagtcgcaggagccggaggaagaagaaattcatcctccgaaaattccattccaattcgaggaggatcttttcgaagattatgggaacacctccaattattcctgcgagaagagaccaccgaccaagggagtctgtagtttcttgggtcatgcggggttctataggcgcttcataaaggatttctctaaaatcactagacccttaactgccttgctagctaaggatgttccgtttgactttgatgatgagtgtctgaaatcctttaaactccttaaggaatcattcatctcagcaccaatcatccaaccccctgattggttgctgccgtttgaaatcatgtgcgatactagtgattttgctatgggagctgtttttgggcaaactaaggatagaaaacaccatgctatcgcatatgctagtaaaactatgactagagctcagcttaattatgccacaactgaaaaagagctcctagtcgtagtgtttgccattgataagttcaggtcatatttgtgggagctaagatgccagaagcatggagggatcactgctcgagatgcgatgccactgatatacaaccttcaagtcgagctatttgatgtgtggggcatcgacttcatgggacctttcccaaagtcctatgactgcgagtatatcatagtggtcgttgactatgtgtccaagtggaaaattgtcaacgagatgggaaaggcatggaagaacaagctacctgatgcactttgggcatataggactgcttatgagacgcccatcggcatgtcaccataccaacttgtctatgggaagacttgtcaccttccgatagagctggaacacagggcgcactgtgctatccggacttggaacatagacttaaagggagccggacagcacaggaaaatgcaactctctgagctggaggaatggagggacaaggcctaccacaatgctaagatctataaggacagaacaaaaagatggcatgacaagcggatcaagctcaaaaaattcaaggctggggacaaggtgctgctgttcaattgctgggtgaagcttttcggacatggaaaacttcggagtaaatggatgggtccatataccgtcatcgacgcttcatcacatggagccgtcacgctgcgcgacaacgaaggtaacatctttaaggtaaatggccatcatttaaaagttttccttgatccgatagaagttgatcaagtctcttttagcttctacccggagtctttaggtcccccttga

SEQ ID NO: 34467 - DNA, 657 bp, Oryza sativa
  Clone ID: PAT_MRT4530_38480C.1
gtgcaggatcctccagaatcccaatatcacttattaacatgggatgtcgtacatatattaactcattttccacagtaaaggaaaagaaatggaggtacagtttgtattgcaaattgtgttgctgaagtataggaacggcagctgtgcaccatatcacaactaatgaaaacaaatctagagaccggtgatgcatttgctcattgcaagtgcggtatcagccaaaggatgtccagcccagtgtactacgtgtgaacctgagggagaaaggccccaccatagttggacgctcacatcgcaggacccaagcaaacagtggttaaaagggcatggcccctgcccttgtgcggcgcacggtggaagaagcaccagtgcaccatgcaatgtctcacggtggtggcaatggagatctcttttgcaaatatgacgaaacatctggaaagtacaagagcacctcaacataccgtctctcataggagctattttacctggtgcaggttagcaggtacagctgcacgaagataagaatggctgcatatgcacctcacgtgtgcgttggacatacagtctgtacaccatgattccacgggcacttgcagatgaagcttgccatgctatggtgacagatgcaccgtaataatcggcaatggaggccctgga

SEQ ID NO: 34468 - DNA, 837 bp, Oryza sativa
  Clone ID: PAT_MRT4530_38481C.1
ccggccgggagcgacccccacgcctcccctgagcttcagctccagcggcggctctcttggcgtgctcctgctcagctgagctcgggttgaaccggagagcgggaggagcgagtgagtggtggtggaggccatggcggaggatgaggcggccagcgccaagaagctcttctccgcctccgatgtcgtagggcacgcgtccaggaaggattgctgggtcgtcatccatggcaaggtgtatgatgtgaccaagttcttggaagaccaccctggtggagaggatgttctcctgcatgcatctgcctctggggatgccacggaggcatttgaagatgtggggcacagcacatcagccatcagcatgatgaacaactacttgattggaagcatcaaggactatgtgcctcctagtgcatcagaggctacaaccattggcggcaatgatgtgccgccaaacttcagaaggatgccacagaagaaaggacctcctgctcccaacacctttctggacttcctgctccctctgtttgtgctcggccttgcctttgccgcttggtactacctgaccttcattgccaaggcctagtaaatttggtgaaggtttgaagtattgaacattttactatgccacgtctgcttcagcgacacatggagatatattctggtcagttctaagttttattatgaggtttctggctgtgaattagaaatgtcatcgtattattatttgttaccaaattgttggctttgcttcgaagttggtaccactcttacatgtaaatggcgatggctgcatcagtaaaatgtatggatggggcattttccctttcgctatcggac

SEQ ID NO: 34469 - DNA, 835 bp, Oryza sativa
  Clone ID: PAT_MRT4530_38482C.1
tctcgttagtcatcgccggccttccaaatgccgtcctccccgtggatccccaccgccggcgctccgccgccgcgggcagcgccggccgtggtctactcctggctgtcggagcgccaccctgtcaaggaggcaggagcaggagcaggcgcttccaacgcgcaggagtccaggccccgcgtttctccggcggagaactctgaagtggaaacccgagagcatgaagagaaggtcaacaaatatcaggctgtccttgcagctcgtttgaaggccaaatacttttctggcaaggcttttggtaaagaaaatgtgtttgaagaaatgactatccagtctgagaccattctgttaagcaggtgcccgttttcaagtttatttgcagatccagcaaaattttgccgggagaagagctgtactaaagaggacatttatccatctttgacaaatgcctcctttgccaagcataaccatttatctctagttcgtgaagactcgtcgaagtaattagcggacagtttgtctgcagaaaactcttaacacctgccaagtggcacctgtctatcaataccacctaatggatgagggttgggtagttacattattaactacatatgttatccttaaactaaatgaactgaaacatgtaaaatatcaacaggcctaatttaacttgagagtttagtttcttcttgtaggcctgttgagcatatagatagctatgaacttaactctatgcaaaacaatgctcatattgagattattcctctagggggatgtctccaacattttacctgtcaaaatagtactaaaataagggcggctcgcgatctagaaccaa

SEQ ID NO: 34470 - DNA, 180 bp, Oryza sativa
  Clone ID: PAT_MRT4530_38483C.1
atgaaagagtgccatgacaacgcctccaaggagggaaacgacacccacgggcgcgccattgtcgaaccggccaaaagcacggtaaggctttcgccagcatcttcacaacacccacacaagcacccccacatcgatggccgcagaatagttcatgacgtctcagaagcaatcataccttga

SEQ ID NO: 34471 - DNA, 267 bp, Oryza sativa
  unsure (1)..(267): unsure at all n locations
  Clone ID: PAT_MRT4530_38484C.1
tattctcaacttgtcatggattagtggagaccggaggaagaagagggagtaaatagtgtagttggggtgacaagaaaatcaacggccgggtgggcggacaataatttcatggtcctccctccntccctcgccaactccgccgccgccttcttcgcctactcttcttcttcttccacctccactccattcctccacctccacccacactagccactagactactagagctgtgggtgtagtagctaagaatcaagatcgatggggaag

SEQ ID NO: 34472 - DNA, 2735 bp, Oryza sativa
  Clone ID: PAT_MRT4530_38485C.1
gagtattccaaggtattgaatttccacggggaacgtgttgtttttcgttgctgtactcgtgttggaagcagtggttcgtgcagccggctagccaggtctcttcgtttttcttcgcgttgatttttttttcagtggctgtatttattcgtgcaatagtcaatgtttcctaagcatcgattgcggtctggaaggagacgacagctacccggatgaccagaccggcattacttatgtccctgatggtccatatgtcgactctggggagaaccacagggtaaccaccgtgtacaggaactactggggccaggactaccgtactctcaagacgctcaggagcttcccttccgcttctggtaagcggaactgctacagcctccctaccaacgtcggggacaagtaccttgtcaggctggaattcttatatggcaactacgacagcatggacagctctttgcttaaattcaacttatctcttggggtgaaccactggaacaccgtgaatttggacaccaccgacgaccaagatggttataacttttatgaggcggtgttcgtggcatgggcgagctgggcgccggtgtgcctcatcaacattggccaaggcataccatttgtgtccacagtagagctgaggctgctcggcactttgccctacccggctatcatcggcaatcagtcactctccctctatgtcagaaggagcataggatcgagcgctgacgatgatatgaggtatcctgatgatcagtatgatcggtactggatcatgggagaaacaacaggagctgccgacatgtccaacatttccaccccgacgatcatcccgccgagcgtcccttttgcagtgccctcgcctatactccagaaggcagttgtgccagctgacaactcaatgaaactagttttccactcagaccaattagatgcacagctccgtgaccaccttgtgatcctacacttcgccgacttccagaataacaagtcccgggaattcactgtttcaattgacagtggtgtacagagcggcccattcagtccaccatacctgaaagttttgtccatcaccacagattggtccagcgataccgaaggcaagtataacttcacactcacggccacatcaacgtcttccctgcccccgatcctcaatgcttacgaggtctacggtcgcatcatccatgacaatccaatgacattctcccaagattttgatgcgatcatggctattaaatatgagtatggaataaggaagaactggatgggtgatccgtgtttcccacctgaatttgcttgggatggtgttgaatgtagcagtgacggaaaaactatgaggataatatctctcgatctctccaacagcgaactgcacgggttaatatccaataatttcacattgcttactgccctcaagtatttaaacctgtcatgcaatcaactgaatggagcaattccagactccctccgtagaaagaatggatcaatggttctaaatttgtcaggaaaccagctgagcgggacaattccatcctccctgtgtgaaaacaacgcaggatcatttgttttcaggttcagctatttgtttaagcaacacagcaggaactccagtccagtcaaaaaaacgatcagctattttagcccttgcagtagtgattccagtgctggtagcggctatccttattcttgcatatttgacctggagagctagaagaaagcccaatagtgcgtatgctgtgctcttaagtaaaacatgcatttatattaatcattgggaccatatgcaaaaaactgaaaatcgccgatttacatacgaggagcttgagaagtatactgataactttgaacggctcattgggcatggaggctttggacaagtttactatggttgtctagaagaaaatattgaggttgctgtcaagatgcgatcagaatcatcacaacatgggcttgatgagtttttggctgaggttcagagtttgacaaaggtgcatcaccgaaatctagtgtctttggttggctactgttgggagaatgatcatttagcacttgtttatgagtacatgtctggaggcaatctttgtgatcatctgagaggttttagtgttggtgaatccttaaattgggcaacacgtctacgtattttacttgaagctggacaaggcctggattatctacacaagggttgcaacctgccaattattcatggagatgtcaagaccaataacattctattgggtcaaaatctaaaagcaaaaatagcagattttgggctttctaaaacataccatagcgacacgcagactcacatatcagccacagcagctggatccgtgggatacatcgatccagagtactacaacactggaaggctcatggagagcagtgatgtttacagctttggtgttgttttactagaggtagtcaccggtgagcctccaataatacctggacatggtcacattgttcagcgtgtgaagcagaagattgtcactggtaacatcagctcaattgctgatgcgcgtcttgatgcctacaatgtcagctctatgtggaaggttgttgacactgccatgatgtgcacagctgatgttgctgctcaaagaccagtgatggccactgtggttgcacaacttaaggaaggcctggcattggaggaagctcatgaggaaagggtcgacctcgaaaacatagcaagtgatatcgtgtcttccgtgtcaacatttggtccatcaccaaga

SEQ ID NO: 34473 - DNA, 1494 bp, Oryza sativa
  Clone ID: PAT_MRT4530_38486C.1
atggtggatacgaggaggagcgcggcggcgaagcgcccggcggcggaggaggaccaggaggaggagaaggcggcggcggcgccggcgccggctgcggctgcggcgggggagggggcgggggcgcccgcgtcggcggggcgaaggccggcgaagcgcggcaaggccgtggcggtggaggtggatagcgggaaggaggatgaggaggcggcgtcggcgtcgggggtggcgtcggcggcggatgctacgcctgtggtcgtcggaggcgggggcgcggcggtgccgccgcttgacacggctgggctgcaggctctgaccggcgcggtggataggctggaggccatcctgaggcccggcgaggcggtatcgaattcggccggccataagcgcagtgctcttgctaaggatttacaagcaaagttgaaggaagtgaaggatttggcggatggcgtggccaaaaagcggctgcccccggtggccaacaggcgccaggagccctggtgcagattaatatctcaacatgctaagaatccttccattcctattaatgcctcgcattttactgttggttatggagctcaccataacttgagactggaagggtcatataccaactcacttgtttgtagattgaagcatgctaagcgaggtgctcttcttgaaatctacgagtccaaagttgttcgtgtaaatggaaagtcttttgacaagactaataaagttacgttatgtggaggggatgaagttgttttcaatacacctatatttgagcaacttccagaggagaaatcaagcacatcgccattttcctctacttggtgtagtgttcagccggggcagcattcgcttatcaaagattttaaggatattttttcatctaaggaggccaaagtaacatccttttactttggaaagagtcgacctcctttgatgcctgttgaaaaagatgctaatgtaagcattattgcaggatcatcatcggatccagatctggtcagtagtctatgtaaaacaatggaggaccagtttaactctgaagaaaacacaccatttgcttggtgtcaattattggaggaggatttgaaaaatgcaactattgatcctagtgaaatctccgagacatttgatagctgtccatattatctaagtgagaacaccaaatctgctctccagtcatcagcatatgtaaatttgcactgcaaggactatatcaagttcacaaaagatatttcttctcttagtcagcgagtactgctgtctggtccggcaggaaccgatatctaccaacaatatctggttaaggcacttgcaaaacactttggtgctaggttgctcaccatagactcttccatgctatttggtgtgatagagtgcggtacattggttcgttacagtcaacaggtattatccttgatggagaaagtcataagcttgtcttagccagcaggtgcttttattattggttctcatgtacatcctgatgatcacaaagagaag

SEQ ID NO: 34474 - DNA, 450 bp, Oryza sativa
  Clone ID: PAT_MRT4530_38487C.1
ccggccgggaaatcttgatcgaacctatatttgctcaatggatacaatcggctcatggtaagacgacatatgggtttgaactgctcttatcttcaacgagcggtcccgctttcaatgcgggtcgaaccctatggttacccggatggttgaatgctgttaacgagaatagtaattcgctttccttaccggtaggacccggagatttcttggttcatcatgctattgctttaggtttgcatacaactacattgattttagtaaagggtgctttagatgcacgcggttccaaattaatgccggataaaaaagattttggatatagttttccttgcgacggtccaggtcacggcggtacttgtgatatttctgcttgggacgcgttttatttggcatttgaaatagatgtccgagttattacgtatatcatgtttaggatgcatctaaacacca

SEQ ID NO: 34475 - DNA, 423 bp, Oryza sativa
  Clone ID: PAT_MRT4530_38488C.1
atggggttcaaacgatacattttgaatttgaggggaatgggagcacattatggtgaagttgaggtttgggaggaaagcggatggcatgagggggaggatggaggagatgaggttggggaggaatggaggcggcgtgagatggggttcaaacggtccattaagccacaaacttccatgcgtacatcggtgaaggtgcataagttgacgacagaagatgcaatgaattacattcttaccatcaagaataaatttttgcgtcaccctgagaagttccatgcattcatacacaccatgattgatttctccaggggcaggattaacactcatactgttattgaacgtgtgaagatcctttttgatgggtatcctgatctactccttgcattcaacaagttcttgccaagaggcataaatgcaatatga

SEQ ID NO: 34476 - DNA, 185 bp, Oryza sativa
  Clone ID: PAT_MRT4530_38489C.1
aaggaaggaattttatttagggggccacggcgggaacatgacatacatgaaaccctaagggagctagctagctagctagcaacaaattaaggacttgcatgcaaactagggagctagtacatggcatatgtagggggactggtagctcgttgatgaagggatgaattggatggaaatgaacgtca

SEQ ID NO: 34477 - DNA, 387 bp, Oryza sativa
  Clone ID: PAT_MRT4530_3848C.1
atgaagaagatgatgacgatgacgatgggttactcagctccggtgtccgattccgaggacgacgttcgggttctcgagagtcctgccgtcgtccaccattgttgtcctggcaccgactcccattatcatcaccgtcatgtcggtgtcctcgaccagtatcgtccggcgtccaatgttcgtgatcgtcgcggtcgtggcggttgtgacgattatcatggtgtcggtcttcgttcgagcggcctcctcgctgttcattctcgcaacgtcgtgaagagacatgatgtcgggaacgattctcgttgtctcgcgcgcgtcgtgcttctcggcggccattcaaatggtcgcggagatcgccggtgccgcgaggtggaggggtggctcgtctag

SEQ ID NO: 34478 - DNA, 294 bp, Oryza sativa
  Clone ID: PAT_MRT4530_38490C.1
atgcaccgcgtggctctaccgctggtgcggacagcagcgcgacggccgtccctcgcctggatccatgcggatccagcggtggtggcggtctcgggcgcagatgacggtcgcggcggcggaggtcgggtgcggcggcggcgcgatgacggtggccaggagcggcggcgggtgattccaggtttagggcggtataattttacagcactggataatcggttatcccgtgctgtccacttaaaccggtcgcacgggaagaagaatttcctgtgcggtgcccgcacgtggaaatattga

SEQ ID NO: 34479 - DNA, 1338 bp, Oryza sativa
  Clone ID: PAT_MRT4530_38491C.1
ggtcacatgaattttcttgcatatatcaaggggcacattgcattactgcattacacaccaatcaacaatacaattatacagaagagcaatccaccatgtaactaacatcagttttattcaccatgtacacacatactgatgaatctgttgcagaggcagcactgacactacccaaaacacacaagtctgccaccaccaatgctcatgtgcaatacagaagttggtgccatctacaaatgttttgcctttttgaaaatggcaggacagggaatggagggagcagcagttctcaggaacacaggcctcgcagggttctgatcgagcttgagcaggtcgggcatggctgctgcggctgctgcttgacgtagagaccaaactggttccaggcctccatgtactcctttctccactcctctcgcagctccgcggagtcgcggtaccattgcctgatgattcacaagtgatgagtaaagtttcaggtcagaaggggtactgaacaaattgcttgaggtaacatgagaagaaaagatgagtaattttgtttcagtattaacttctttttaagaaagacacagcttcagaatctgctaaggtcttttaactgatcaagcagtgattgaactcatgtgtagttaaaactaacatcagttttattcaccatgtacacacatactgatgaatctgttgcagaggcagcactgacactacccaaaacacacaagtctgccaccaccaatgctcatgtgcaatacagaagttggtgccatctacaaatgttttgcctttgtgaaaatggcaggacagggaatggagggagcagcagttctcaggaacacaggcctcgcagggttctgatcgagcttgagcaggtcgggcatggctgctgcggctgctgcttgacgtagagaccaaactggttccaggcctccatgtactcctttctccactcctctcgcagctccgcggagtcgcggtaccattgcctgcacacgagcgagcagctgaggaggtcgacgcagtccagctgcgagaacacccgcgcgatcacgtccgccggcgcccgcagcgccgccgcctcgcctccgccggcaaccatctcctcctcctgctgctgcttccgcggcggcgccatcgccttcctctcctaggaaatccccacctggccggttgaatttaagcgatcttggcataaaaatttaaggggaaaacaacaaatttgcagcgatttgtttaaagcccgagtggatcgggatgatcgattgcttggcccaggtcaagagagatgacgcgagatttggggataacacgaaatgaattcgggtgattgcgaaatcgcgg

SEQ ID NO: 34480 - DNA, 3150 bp, Oryza sativa
  Clone ID: PAT_MRT4530_38492C.1
tgaacatggatggtacatgatggtcacctgtagcaaagagaaggccattccttgacggtaatagcctttcgcccagtccggttgcatcttgctgcagatctgagcatctgagagtgcctcatcgcctatgccaaggtttaaccagcaagcactcctgtttgaatataactttgcgtcggtgttgtcgaacttcattgcaaagcagtattttgcaccttttgaactgaaaaaacatttgcaaccaaacatgagcatgaaaaatcgggaatgagcaaaagttgttaccatgctgtatagcagtattgcagcatcgtagtcctcgttgttgaaagaggagttgccttgtagtttgagttcatccttccttttacatgatgcatttcttgcccattccttgtaagcaggatattttacatatctgatgatcccaccaacactccaatctagaagagtaggtacttggtgggtcaatggcaatagaacctcaatgacttcccgttcggcatggattgcagcaatttctattggtaacctatcaagttcgtctggaatgtttggatctgccccagattccaccaagcacttgatgaatccaatggacccggtacgactacatgctgaatgagcaacttcatgcattccaatgatccccccaaaagtgaagaaaccaacggtgtgaagacgatattggcaatcttgttgggcgcgtccgcgtacatcagcgccgtggttcagcaagacgctgacgacggcggcgtgcccccgtgcagcggcgacatgcagcgccgtgccgcgggggttcgccgcgcccacgtcggctcccctgagcagcagcagcttcgccagctcgcgatccccgttgtaggcggcccagtggagcggggtgtcgccgccgttggggtccggcgtggacgggtcggcgccgcggtccaggaggtaggccgccgttgaggtgtgcccgaacgtggccgccagcagcagcggcgtctcacctgcgtgcgccgcggcgtcgaacacgaagcacgaaatcaggcgctccgcgagcatagacgagacgtgcgaggaacgagcggcggccgccggccgggaggggggcgcacctgaggcggagagcgcgtcgacggggaggccgaggcgctcgagcaggaagcggcagacgtgcgtgcggccgttggccgcggccaggtgcagcgccccgcggccgcaccgcgatcggactccgccggcaccctcgccgccgccaggcgccgccgcgtccacctccgccgccatcctagcgaggtggtggaggtcgccgaggacggcggcgcggaggagcgcgccggcgcagcggtagtagtaacattgccgccgcctctcttcctcccgcgcttcgccgccgacggcgacgccgacgcctggtgcgccggcggccggcgccggaggaggaggagtcgccgccgacgaggacgggcagagcacgttcatctccgacgaactgcttccattggtgacattctcacccgatacgaacgagtacacgacaatgcaattatgcaaaccgttctctctggtccgacagcccatgcccaagccagcacggcgccgagccgccgactcgctgacgacgcgccgtggggcgccgggcagattggcagccggcatggccatgggcgacatggcttgcttgctaggcgcctggagagcgagacaggaggcggcggcggcgttgtgatgtcgccgccgtacgtcggggtcaggcgtggacgggccggcggcgcgctccaggaggtaggtaggccggccgccgcgtctcgcggtgtggccgaacgtggccaccaggagcagcggcgtctcacctgcttgcgcgcgcgcggtgtcgacgtcgaggacggcagcgcagcggtagtagactagtagtggtacgctgccgcctctcttcctcccgcggatcgacggcgacgcgtcaggctcctgaccagctatccccgaggcttgtaaaagaatttgaatgtagtggtcacgctcaatccgcatcattgtcctttgaattacttctacaaatagcattgcaaaatcaggtaagagacctcgaaccataattgttactatgacaagaagtacgatctccacaacattgaggacaaaccctactccagaagtgatcagagaagtagtgtgctcaggatgatcatgaaaagttatgatgaaagtcaccaagttcgttatacaacttagaataaggtcaaatccagtagcaactttctgagatcttttgggaacactcccctctttagtggctcttttacaagcacagatacacatcaagtaagtgaatgtcgacatgcaaagtaatgcatgcatcaggataagagcaaggttaagatcctttttgctggccattattgaatacgtcaaccaaattatgctgttaattgatccagccaacatggcgggggcaccatacacttctattgtcctctcaaaatttcctgtgtagacttggtagaaatatggtactatagataaagccacagggaccaccgtgccaatagatgatgcgagcttgacaatggttggccagtggccaccgcctgacgcctccacactgctgcggtcaccattctcctctcggaggccggcttccccaaccccgccgtgccgcgctactaggtcttcggtggcgacgccggtgaaggaccgggaggtggcgccgtggagatgtgccgatgaggtagcggaagcccgtcgcagagcgtaggcgacctgcggctgctgcttgcgtgggggaagttgtgcagcgcgggcgcggtcgccataggcgtcggggaaggagctcccgggggcggcagatgcgggcgcggcatcggcgtggagggcggcggcgagaagcgccacggcgagaagcgccatggccagaagaaggccgtgagcttggtggagaagccgtagcccatcgcgcttgcgttgcgcctcccaccgtacgatggcctgcccgtcggcgtacgcgtcgtggtgaccacgccacgcgcggtcttcatcagcgccaagcggatggcggcggcgcggcatgtgcgggaaggtgcccgaccgcgtgttgaactcgacgcgccgtgtggcggccggaagccggcaccagtggaccgggaggaagagagtcggcgacaccat

SEQ ID NO: 34481 - DNA, 1068 bp, Oryza sativa
  Clone ID: PAT_MRT4530_38493C.1
atggcctactcctcatccagcacattgaggtcgccgctggtgcgcgccgccgtcgtgctgatgctgctgctcgtcgtcatgtccgccgccgtctcgcgcggcgagcctgatcatgatcatgtgcagctccagctggccgtgatcaccgggcggagaatgctcgtcgtcgccgggagcaacactgccactacgatcagctcgcagacggcggtggcggcggcgatgccgtactccgagtcgaagaggtcgagccccggggggcccgatcctcagcaccattgattgatcctgtgggaattttgcatgaggctgtccaactcccctcagcgctcgtgcaaacttttctaggttgaacacccctagcccttcataagctgttggcatacaagttcttgcccagttggccctgcatttttcgcctgtgatgttatcggcccttcctgggaccccattgaggagtatcttggagcaagaggttgagaggagggctgcgacccaatccctccatttctgcgggaagccccacatgttctgtacataatggaagttatcgtggatgctcctgccacggttgaaagcgctttggttgaccgagattagggattgcatgaccaggtgaagtcgcagggctagcaccttgaagagaattttcacaatgctgtgtatgaggcttattggcctattgtcggtgctactctccacgccttccttttttggtaatagaacagtattagccgagttgagaaggtttagatcattgcatctctgatcatggatggagtgaagctttactatgccccagcaggttttgaagaaattgaccgtgaagccgtcgggtccaggagctttgtctactgcattgcatttatggctttccaaatcccctctggtattggtgccctcttctttgatgttggtgattcttgaggcatgtcttttccttgctctttcgattactgccagccctagcagcctgtgttttagggcggttcttaggctcagctcggtggaggtaagttgcctttgcttttgcaccatctctagacgttggatggcgtctaaggccat

SEQ ID NO: 34482 - DNA, 243 bp, Oryza sativa
  Clone ID: PAT_MRT4530_38494C.1
gcacgaggcctcgtgccgaattcggcacgaggctccaccacctgctcccacttcacttggaattcgaaatccacacgagcgcggcggcggcggcggcggcgatggcgagcaccattaacgtggcgtcggccacctcgaggttcctgctggccggcgggaacggctgtgcatgctgtgctgtgctgtgctgtgggccagccgcgtgagcttcgctggctgaacagggtcgggaggaggatggtg

SEQ ID NO: 34483 - DNA, 322 bp, Oryza sativa
  unsure (1)..(322): unsure at all n locations
  Clone ID: PAT_MRT4530_38495C.1
ttttttttttttttggaaatcagtataancgggggatggggggattatagaggatagggtatacttattgtatattaatatatcagatataaagacgtaaaaaagaaaaaaatcgatgataccaagaggaggcgtacaacgttgtgggcatgggtaattaaaaatatatactcatactcacctccatacatatataattaaaaacttggattgaggaaacaattacccaaaaacaaactataatggaagtatgatgataaaatcaatttttttttttatcgggtcagaaatgttataaaattttttcatgggatagggccac

SEQ ID NO: 34484 - DNA, 390 bp, Oryza sativa
  Clone ID: PAT_MRT4530_38496C.1
atggccggaggacgggcgctgagcggtggtggcggggcgcgggcgagggctggagctgcggtagctgcggcgtcggtgagaggggtgaggtgggaggccgggaggaggaaggggaaggggagattggtcggggtcaggtgcgacgccgccatcaccgagaagcccaccggggaggaggaggcggccagcgaggagttcgagtaccagactgaggggtctgaggatgcttcggggttgaggatgctgctagtgctgtggcgggctggcggccacgtcatccgacaacggcgggggatcgctacagccagccctaaccgctcctgcggtctggccgccgccaccgttgttccggttgccgccgccgtctttgcaccgccaccacggccatag

SEQ ID NO: 34485 - DNA, 1831 bp, Oryza sativa
  Clone ID: PAT_MRT4530_38497C.1
gctgaacaccaatctactgaaccctattgtgatgaaactgaatacctttgtaacccaaatccaatgtatgagcatgtgggtgttgatgatgaaggtttgtacattgatatgggtccaaaccagccccctcctcctactaatcctcagaaccaaggtgggactgaagaaagggaaggtgaaagttctggtgatgatgatgatgaaattaaagacaaggagccagaaaatatgcctgatgctttttatgataagaatgaccctcctatgacagtaggaactgtttattctgatatggatgcttttaagattgctttagctagccatgctatcaaacatgagttcaactatgacattgagaagagtgatacagggagatatagggtgaaatgcgcacaaaggagtgatggctgcaagtggagacttcatgcctcaactggaaagaatggaaacactgtgaaggtgaaaaaagtccccttacctcacaaatgtcagagcactaggaggcaaggaatatgtgttggggtcactcaattctgggtgtgcagtcaggtcattgattggctgaaggaagatggaaatattggcccaacagaactgcagaggaggttgaaggagcaccataaaattgtggtgccctacaagagagtgtacaaaggtaaatatcttgccatggataagatttatgggccctggacaagagtttcaataacctgtataggcttaaggctcagttagaagaatctagtcctggatcctttcttgttattgaccatcacaccataaacaagaaaatcaggggacagttgtgcatagcttgtgcagtagatgggcacaactggatgtatccagtagctgttggagtgattgagtcagagacaaatgagaattggatctggtttatggagagattgaaggaagtaataggtaccccagatggcctaacatttagcacagattgtgggcaggcaatcatgaagggggaaactcacaagaagttgtggaccaggagccaatacaggactgcatcaaaggtggattatgtgactaacaatctggctgaatcattcaataactggttcaatggaaaaattctacctcacatcttgcaaaggcttaaggaagagagctacaacctggatattgaagtgatcatagcctctccagaaggtgtggcagaactgtgtgcaaaaggcagcaatggctctaggtttaggtatgtggtcagcctaaaagatagaacctgttcttgtagagtttggcagggctcaggcatcccatgcaagcatgccatagctttcattacatccattgctggtgaaaagctagaagaccatgtggatgactacttctctgtcaatagatttagagccgcatatgagggttccatccctagcataccagacaagagcatgtggcccaaagctactcatgacttcttcatgcaccctcccttgcttaagtccacagctggaggtaggcataagaataggatgaagtcagcacttgagggaggaagcagcagccagaagaaatcatcaaaaaaacatgaggccttccctcacgtgcccgcgccgtgccacccatcccgccgccgcatgactgtcttcgctggccgccgtcgcgctgcctccccatcttccgagccggtggatggaaccgcctcgaccccctctggcctccagtgcccgcatccccctccgattcgccgctgctcgccggaactcgtcggctgccgtgcgccgtccgatctccgggcgcgcttcccctcccctctcatcatgccagcgcggatgtcacgtcccaaaacgactctaaaatatatcctttaaat

SEQ ID NO: 34486 - DNA, 1440 bp, Oryza sativa
  Clone ID: PAT_MRT4530_38498C.1
atgacgattcaacggcgggaagctatccttgggatcacaatggatgggattggtacgaataaacacagaagatttccgatttccaaaaatcgggggtcttacaaagacatagatgatgaaattaaagacaaggagccagaaaatatgcctgatgctttttatgataagaatgaccctcctatgacagtaggaactgtttattctgatatggatgcttttaagattgctttagctagccatgctatcaaacatgagttcaactatgacattgagaagagtgatacagggagatatagggtgaaatgcgcacaaaggagtgatggctgcaagtggagacttcatgcctcaactggaaagaatggaaacactgtgaaggtgaaaaaagtccccttacctcacaaatgtcagagcactaggaggcaaggaatatgtgttggggtcactcaattctgggtgtgcagtcaggtcattgattggctgaaggaagatggaaatattggcccaacagaactgcagaggaggttgaaggagcaccataaaattgtggtgccctacaagagagtgtacaaaggctgtagaccatatcttgcagtagatagcactttcttgacaggcaggtttaggggacagttgtgcatagcttgtgcagtagatgggcacaactggatgtatccagtagctgttggagtgattgagtcagagacaaatgagaattggatctggtttatggagagattgaaggaagtaataggtaccccagatggcctaacatttagcacagattgtgggcaggcaatcatgaagggggaagccaatacaggaactgcatcaaaggtggattatgtgactaacaatctggctgaatcattcaataactggatcaagctaaagaagggaaagcacttggatgacttgttggacactataaggcagaaaattttgataaaatggaaccaaagaaagaaggtagccaagaagttcaatggaaaaattctacctcacatcttgcaaaggcttaaggaagagagctacaacctggatattgaagtgatcatagcctctccagaaggtgtggcagaactgtgtgcaaaaggcagcaatggctctaggtttaggtatgtggtcagcctaaaagatagaacctgttcttgtagagtttggcagggctcaggcatcccatgcaagcatgccatagctttcattacatccattgctggtgaaaagctagaagaccatgtggatgactacttctctgtcaatagatttagagccgcatatgagggttccatccctagcataccagacaagagcatgtggcccaaagctactcatgacttcttcatgcaccctcccttgcttaagtccacagctggaggtacgcataataataggatgaagtcaccacttgagggaggaagcagcagccagaagaaatcataa

SEQ ID NO: 34487 - DNA, 2727 bp, Oryza sativa
  Clone ID: PAT_MRT4530_38499C.1
atggcgtggaacggcgccggcgggtgcccggattggttcctggacgggatggacccggacagtagcttcaacttagaaatccggattgttgctcgaaattgtcgtgcgcggtggttttctttgaaccaagtagtggatgcagaccgcactcagttcagggacctgcttgctaatttggtcgagaagtatcctcatgaatacggtgacaaagtcagtttgttctttttctgcactgagactaaatctcacatcccagtttgcaatgaccaagatttggttgaaatgtttgcgaaacatagggctataaaaacatgtttgttgaatgttgcgtatcatagcccaagtagtgagcctcctgtgattcctgattgggattgttctaaccaaagcactgtgaacccagttcaacccccattcaccccttctattgcatgtccaagcttagttgaagcaacaagtggcacactcaatcaatctgctgaacaccaatctgttgaaccacattgtgatgaaattgaatacctttgtaacccaaatccaatgtatgagcatgtgggtgttgatgatgaaggtttgtacattgatatgggtccaaaccagccccctcctcctactaatcctcagaaccaaggtgggactgaagaaagggaaggtgacagttctggtgatgatgattgccatgagactgactttgattatgaatcatctgatgaggaagtagaagacattgatgatgaaattaaagacagggagccagaaaatatgcctgatgctttttatgataagaaggaccctcctatgtcagtaggaactgtttattctgatatggatgcttttaagattgctttagctagccatgctgtcaaacatgagttcaactatgacattgagaagagtgatacagggagatacagggtgaattgcgcacaaaggagtgatggctgcctgcggagacttcatgcctcaactggacaggatggacacactgtgtaggtgaaaaaagtccccttccctcatgaatgtcagagcactaggaggcaaggaatatgtgttggggtcactcaattctgggtgtgcagtcaggtcattgattggctgaaggaagatggaaatattggcccaacagaactgcagaggaggttgaaggagcaccataaaattgtggtgccctacaagagagtgtacaaaggctgtagaccatatcttgcagtagatagcactttcttgacaagcaggtttaggggacatttgtgcatagcttgtgcaatagatgggcacaactggatgtatccagtagctgttggagtgattgagtcagagacaaatgagaattggatctggtttatggagagattgaaggaagcaataggtaccccagatgggctgacatttagcacagattgtgggcaggcaatcatgaagggggttagtgaagtttttccacgtgctgaacatagagaatgtatgtaccacctagttcagaattttaagaagaggtacagtgggaaggtatttgatgaacatttatgggcttcttcttattcatggagcccatacatgtttgagaagcactatcaagcaatggctgccgctaaaccagaagcaatgaagtacttgcaggaaactcacaagaagttgtggaccaggagccaatacaggactgcatcaaaggtggattatgtgactaacaacctggctgaatcattcaataactggatcaagctagagaagggaaagcacttggatgacttgttggacactataaggcagaaaattttgataaaatggaaccaaaggaagaaggtagccaagaagttcaatgaaaaaattctacctcacatcttgcaaaggcttaaggaagagagctacaacttggatattgaagtgatcacagcctctccagaaggtgtggcggaactgtgtgcaaaaggcagcaatggctctgggtttaggtatgtggtcagactaaaagatagaacctgttcttgtagagtttggcagggctcaggcatcccatgcaagcatgccatagctttcattacatctattgctggtgaaaagctagaagaccatgtggatgactacttctctgtcaatagatttagagctgcatatgagggttccatccctagcataccagacaagagcatgtggcccaaatctactcatgacttcttcatgcaccctcccttgcttaagtccacagctggaggtaggcataagaacaggatgaagtcagcacttgagggaggaagcagcagccagaagaaatcatcaaaaaaacatgagtgcccaatctgccatctgttaggccatcaccggtacacatgtaagaatggcaacccagaagatatagctgcaatggaggcagaaaggggtctaccaaagaagaggttgaagaaagctctaccatgtaacactgagaccagtatagtgttggctaatccctcccagatggtcttcccagccaatgaagcagtggccaatgcaacccacaaaaaaaggaagacttcttcttcatctggtgccaacaagaagaaaaagggatcatctaccattactacaactacaaccacaaccacaacctcagaaccaatcagtgtgtccaacatcacaaggtctgcaactggttcaaatgatccagttctactgcaatgtgtggcaccttgccctgatgagaccattgaacaggatacccagccactgcaggttgtgctgccaccctag

SEQ ID NO: 34488 - DNA, 425 bp, Oryza sativa
  Clone ID: PAT_MRT4530_3849C.1
cttgtgttccatgatggcctcatatttgcctggcggggggttattgaaataaaaaacttgtggaataccacaaaaaggagaaaacagagatgtgggtcgcctctgcatccagaatatatgctttctcagcttagtcataaagacatggactgtgaaactcctggagaatcacatggcaagaaacggtcaaatgagtgctcaaaagaaaaggttgttgatgtgcaagaacttgtggatgagctaattgtatttgagcaccttgactatggtaaggatacagtgtttccaaccagacctttgaaatgccatgcatctactagtagtgtgcaaattcctggtgccatcgagaaaaccttttgtcccactgatttgaaactatgtaatgacaaagaatcagtcggtgcatgttggtagtgccattggca

SEQ ID NO: 34489 - DNA, 326 bp, Oryza sativa
  Clone ID: PAT_MRT4530_384C.1
tttgtttgttagttataagaggacttaaggacttggacttacccacaatacaaacttttcgagcttattactattcaaatgaacctgccttacggtattcaaaactatcggacgagggtaccaatttttttgctactcactgacatacgtggacccggattattaattttgggctataaaagtgggtagatcactggtgcttctggcgtccttatcggaacaatgtctatggtgtcatagaatcggattttaacgctataatatccgaagaggactttcatggtccaatttgggactagttaaacactcgcaggattactgccctt

SEQ ID NO: 34490 - DNA, 273 bp, Oryza sativa
  Clone ID: PAT_MRT4530_38500C.1
atgaggatggagtggcggcggcggcagccggggggaggggatgaggaggcggccgctcagcgcggcttccccttatttctcagcggcgtgcgggcggacgggaggactagggcagcagcttctcccacctgcaccgccggccagctcctccgcggctgctgcctcccgcccacccagatcccgcgccgacgatggacgcctgccgccggctacagggacctctcatccgtccttgaccgccgccggctacagggacctctcctccgtccttga

SEQ ID NO: 34491 - DNA, 201 bp, Oryza sativa
  Clone ID: PAT_MRT4530_38501C.1
atgccagaggatggacggcgggacggggacaacaccagcaaacggacccgggggaaggggagggggtgccggtggacggacggggtcgcagcagtgacggtggacgaatgggaacgcagcggcaccggcaccagcacgggcagatggaaggggatgcgggcggcggcagacagagggacgacgacgagaactgacgattga

SEQ ID NO: 34492 - DNA, 173 bp, Oryza sativa
  Clone ID: PAT_MRT4530_38502C.1
ggagaaaaacaggagcaacgtttgcaacaccagactcaggaaccttggaattcaaagggtgaaacggggtggtgcactgtaacggggaagtgaaacaaattacaaatcggggccccaaacattgcaacgatttaacgaatgtgcccccccccccccaaaaccaaagcttaaaa

SEQ ID NO: 34493 - DNA, 368 bp, Oryza sativa
  Clone ID: PAT_MRT4530_38503C.1
ttttggtttttttttttttttttttttttttaacggaagcatttattccattatattgaccagagtcgtatgcaaagcttcaagagattatttcaaactacagctaggacagcgttgctccagagttccctcgagttgttcccagaaggggggggggggacgaataacttcttaacgcttacaagggggggtcatcaaaattggcgatcttgattggagggatgccatcagccaccttgaagggccccactaatctagcgaagaacaccatctggtgctccaagggaaacttgatgttctcggccttgcggaaaccatgtgtggtccccttcatactccgaccaaagcaacagggaagggcctttgta

SEQ ID NO: 34494 - DNA, 342 bp, Oryza sativa
  Clone ID: PAT_MRT4530_38504C.1
tttgcttgacagagtaccatgggaggaagaacttccccttctcagagacatatgtcccatgatccgcgaagaacggatacttctcgacagtgtcattggactctccagcatcttcggacactggccatttgtgatgcccaacgcttgatgcttctgctttgaaatctgcctccatgtagatatcataaagctgttgactattcttctattgtgataacggcgggagcagcgaattactaccatgtgccatgcgtactgccccatggcatatctgatgaccatatttagaacatgctctcctccacctaggttgtcaaatccaagtaagaggcttgcttctac

SEQ ID NO: 34495 - DNA, 548 bp, Oryza sativa
  Clone ID: PAT_MRT4530_38505C.1
aactgaaactatcatgtctgctttcttccatataccttgtttgtcaaataattgttatttgacaagaaagtgtgtaactaaacttttgtaacaaatagaattacatcattgaattgcaagaacaaaaattctgagaggagttaaaagttcagatggaatccccatcgatgaatttttctgataatgaatgcggaaaataatgccttgaattaaaggggaaaaaaaatgccctccgactaaacatctattggtctgcatcttcctagtcatggagtactagcactaaatagcagtcattcctgcgagttcacgaagcttctcacacacaacgaaggtgattgctgtctgaggacctaatcttgcaaaggtggcaaacccacctttataaagcgacgttacaccctctgtcaccacaacctgataaccacaatggaagccattcctgtatactctggcacctttgcactcacgctgcaacattaaccttgttttgatcatgtctataggtgcagtcacaagagtactagctgttcccgctacgcaactcg

SEQ ID NO: 34496 - DNA, 291 bp, Oryza sativa
  Clone ID: PAT_MRT4530_38506C.1
atgactactacggatacaaccgttgctcacatcatggaaaaacacgatgatatcaagatcaagtcctccaagtgctggaatcctattcggccacctgctacactgctgaattcaatcgggcgccgaatctgcatacaacctccgtttttgacccgtgggtacttgatggaaagctctcggagtcctctttccaacggatccggcctcatctccaaattccatctcagtcatccgcaaatgaagaaacaaggaataaggttgatctgcaccggcaagatcaataacctgtag

SEQ ID NO: 34497 - DNA, 590 bp, Oryza sativa
  unsure (1)..(590): unsure at all n locations
  Clone ID: PAT_MRT4530_38507C.1
gaaaaatcagatgtaaggtttcattaattaattgcatctgcaacgtatgggtatggtcaaagatttgcgcatattacatttagtcgttggttttaagaatatttagctgtgccaacatttagtttgcaacatgttcaatctaggttcgttgcgaaaagtcaccatcgccgtctctctctaatctagcctaatagttgagctttgtactacgctgctgcgtaactcgctattgacgttagcatacatcagatgatcagacagaccgctcgtacaggtaaaacaggaaaaaagaagaggaaattcctactagctgcctaggagtactaatttggacggcagtaagcaccacacaagctcaggggatcaccaggaatgtaaggctgtccgctccagaatcaggcttccaacatctttttaaggacaagtgatccaacgtcgccaacgagttattcgtaccgatcccttattggtgacaaaatcttcttcgcanactagggtaagcgaaatgtccatgaaccacgaattctnctgatttggcccanactgaatcttcgcanactagctgncactcccaatctcataatctgagc

SEQ ID NO: 34498 - DNA, 280 bp, Oryza sativa
  Clone ID: PAT_MRT4530_38508C.1
cacacgaccagcccagaatacacatttcgctgccaggacactacgcaggttagagttgtccccaggggcatagctgctttttgcagtcccatctgctgtccattttttgtccaagtgttttccggctgtcccagggcttggcccagttttgggggcggcctgaccaggcccttcttggtgctttgccgtgggtcacccccaggggctcgtgtccttgtgtggtcccgggattgcggagaggcctggcctttctcttcattgggagcattgggccccggtc

SEQ ID NO: 34499 - DNA, 232 bp, Oryza sativa
  unsure (1)..(232): unsure at all n locations
  Clone ID: PAT_MRT4530_38509C.1
tgataatnagttgagctgagtgatgtgatattgaatcgccccaagtggatggagagaggtgctttttacgantattttggtgtcgtncccgtggggacattccggagtccngattgcgacctgcgttgggactaactgctgtgtgtaacccccacctggtgtgtgntcggaaatnattgtanaatttgattgaaanggatgtgtgttgtcccaaaaaaaaaaaaaaaaaaaa

SEQ ID NO: 34500 - DNA, 2685 bp, Oryza sativa
  Clone ID: PAT_MRT4530_3850C.1
atggctcaagagaaaaccttctctggtagtatcggtgaaaacccatacctccatcttcgggactttgagctacacgagaaggaatctctcggtgcagcctgggctaggttctcactattaactcagtctggcctagatttgtctttacctgaccatgtgttgttgcaacattttcggtacgagttagacaaggaatctgtcgaaaatcttgatatttccgctagaggatcgttcgcacacaagacaactgccgaaggaagagtactcttagatctgatcttagagaacaattctttcggccgaagcgaaactgtcccggaggtcgagattatccatgaggaatctctgcgtgtggagtcggaacccgactcaactgccgaatcctcatcccagtcgcaggagccagaggaagaagaaattcatcctttggaaattccattccaatttgaggaagatcttttcgaagattatgggaacacctcgaattattcctgcgagaagagaccaccgaccaaggtcaactctaatgatcctctcgataaagctatgcttaaagagacggtgaagaagttgaccaccatcatgagtaacgaatggttaagggaaggagagctctcatcggaagcaattcagatccgatgcccctcctcaaccattacatgtctcattggagttaatttggtccatgctctatataatccctctgttggtgcaaatattatgtccgcaacctttgcattcaattgcttaggggacagactgttggaaccaattgtcaaaaccttccgaatttccacaaactctactaccgaaggtttagggattatctctggagtgcccatacggcacaacagtattgaggtcatcttagattttcatgtgttcgacatctttgatttcgacatcctcataggccatcccatagagaaactattggatgtgcccgaaacaggtgacctcaatctgaaaataggaagaattgccaccaccgtccctatgttgcaatcaaccaattctttgacggagcctcttcctgttcttgagccaattgagaaagtgatggccatttctccatttaaggccctagagtccattttcgatgaatctatcgaagaattcaatgaaggggaggatgaaactggagaaacgatggatctaccaaaaacggatttgccgtcacgagccccaattgagctaaagcccatagcttcaggcctatgctatgcctttttgaatggcgatgccgagtctcaagatatcatggaagtcttcatggacgatttttcagtctatggtaaatctttcgatcagtgtctagagaacttagacagggtcttacaaagatgtcaggaaaaggacttggtacttaattgggaaaagtgtcacttcatggttcgtgaaggaatagtcctgggacatcaaatctctgaaaggggagttgaggtggacagagcaaaaatcgaagtaattcgacagcttccacctcctgtcaatgtcaagggagttcgtagcttcttgggtcatgtggggttctataggcgcttcataaaagatttctccaaaattgctagacccctaactgcgttgctagctaaggatgttccgtttgactttgatgatgagtctgttcttgggcaaactaaggatagaaagcaccatgctatcgcatatgctagtaaaacgttgactggagctcagcttaattatgccacaactgagaaagagctcctagccttagtgtttgccattgataagtttaggttatatttagtgggagctaaggagctaccgataaatgactatctgcgagacaacatgctgttgaaagtcacagactctgacccgtggtatgcaaccatcgtcaacttcatggtcgcggggcatgtaccaccgggagaaaataagaagaggttgatctacgagagccgcaggcacttgtgggatgcaccttacctgtatagaatcattaagaagtgtcatgctgccctatatggaggtcactatggagcattcaggacacacgcaaagatctggcagagtggattcttttggccatcaatgtatgatgacacaaaagaattcatccgaagatgcacaagttgccagaagcatggagggatcactgctcgagatgcgatgccactgacatacaaccttcaagtcgaactatttgatgtatggggcatcgactttatgggacctttcccaaagtcctatgactgcgaatacatcctggtggccgttgactatgtgtccaagtgggtagaggcaatgccatgcagggctgcagacgccaagcatgctcgctggatgttccatgagattatcttccctcgttttagaactctgcggatggtgataagtgacggagggtcacatttcgtcgataagaccttccgaaactttttgaaagagcttggggctcgacacaacagtgccactccatatcatccccagacaagtggacaagcagaaacgagcaacaaacaaatcaagaacattctgcagaagactatcaatgagatggggaaggcatggaagaacaagctacctgatgcactttgggcatataggactgcttataagacacccgtcggcatgtcaccataccaacttgtctacgggaagacttgtcaccttccagtagagttggaacacagggcgcactgggctatccggacatag

SEQ ID NO: 34501 - DNA, 531 bp, Oryza sativa
  Clone ID: PAT_MRT4530_38510C.1
cccacgcgtccgtgcatctcactctctgcatatttcagcttctaatctatgaagatttttttgtttgtttgtttggtgtgttcttgttgttctctagaggagagagctatgttcttttgtgtacaaaacgatgtgtttttttttcatgtttttgtatcaaaaggacaaatcttagcaaaacatcgtgccatgttgcaaaaatttgagaagattcgattttttttaaaccatgttcccctcaaatctgcttgaactctccttttatcttcagaaaacactctagctcgagtaaatctgagcaaagattcaaaaatttttagtcaaaatctcacaaatcctccgagaaaacctttagatctaccacataatctctcgaatacttcaatatttcactctctaacgatctctcttgcgttccttgttcttgcagggtttgtaaaaattttttggatctaatcgactaactcaaaaaaaaaaaagaaatcagcgagaaagaaaaaaaaaaaaaacagagcggccgccctcgtgccg

SEQ ID NO: 34502 - DNA, 296 bp, Oryza sativa
  Clone ID: PAT_MRT4530_38511C.1
gcgcccttttttttttttttttttggggcaaatgaaacatatgagccatgacaccatccatccacaaacacatacgcagttttccccacaccatgggaagcacatcctggggtttcaatttacataactcctcaaataccgggctgtattaagtttctacagtgagggacgcttgctagtcaggcatgggctggatgaggagtgtgccctgcccatggctggtgcagtatgcgtgagcagcacagctgcagcaggagcggaggacgagagctgacagcatgccgcatgaatgatga

SEQ ID NO: 34503 - DNA, 2522 bp, Oryza sativa
  Clone ID: PAT_MRT4530_38512C.1
gccaccagtaaacctgaggcttctattgattgatgtgttcaaacataaatacaagttatagtcatctgtgtagaattggcacacaggtcccaattgttgcgcacctaatagttgtggatataaaatgcaaagttcgacatttcgacctagggagcctactatacactttccaaacagtattagatccatttttaaaaatcaagacaatattgtgtactaacacttgacgttgcatgaaaacaatatatgggattctcataacagaagcgccagtatttggaaagatacaaactgcagccttcagagaattgggcatgagcaatagaatacgtggacattaaagctctagtctttcttgtacactattgttggataaactggactccacatgttctgctggacatactccaactgtttcttcctcactgagtcttgcaagttcacgtgcatccatgtcacgatatccctcagctagatcctctgcaacagcttccttcacaactgctgctgccacctccttggtgatatcacgtattctggagattggagggtatactatcccttcgagaacttcctcttctttcatatacgaagccaagcgttcagctgcagcctgaagcattccgtctgagataacccgtgctccagatagaagggttccaagccctattccaggaaagagatacatgttattcccttgatttgagtggccaatctttccattaccaagatccacatcactaaatgggcttccactggcaaagatgatcttttcaccaagaattgaaaaggcttcttcaggtgtacattcagcattcttagttggatttgacatcgcgaaaattgctggtcttgaagaggatgagtcttttaatgcttctaaaacctcctttgagaacaaaccaccaacagcagataatccaagtatgacatcaggcttcacctttttaaccacttcaaccaagctcgccccttcacttaggccttggtgacctagttcactctttctcctagcaaaaggccgtgcatctgggtcaatgtttgtgcgctcctctgttattagaccatgggcatcgactatccagaattgactcctggcactctcaaaagcaacctcattgtttcccagcatccttgccatagtccggcttgcagcattcacaacaccaatcccagcactgccagcccctgcaacaacaatcttttgctttgggaaatctaacattggccttccttgtgctcttacagctcactaagagacccgctatagcaacgccagcagttcactgaacgtcatcattaaacatccgataagtcttcctgtaacgctgcaacaacctgaaggcccacttgctctggaaatcttcaaactgtacaataacattcggccagcgagcgaaaaccgcttccataaattcatcgataatcgctacatattcttccccctccagacgatgttcttgtaacccaagatacagaggatccttgaggagcttctcattgtttgttcccacatcaatcatgaccggaagaaccctctggggatttattccagcagcagcaacatatagatccaactttccaatggcaataccaataccatgcaccccgagatcacccaggcccaatatcctgcttccatcagtcactactatcatgtcaacctggtcagctggccagttgtacaccatggacatcatttccccacgatcttctgcactaaaatacattccccgaggccgtctaaataaaccactatagttttgacaaacaagtccaacagtcggcgtgtaaacaataggtgcatgttcctcaatattatctattaagacctcagccttgtaatacattgtttcatttctgtcatgcagcctgttaaggatacgccattttgctaacgggtaagtatccgatgggccatctctcgcatatttatcagcattcacgcagtattgtgatgattcacagatagctggtgaaatgttcaggtaatttagtgctaaaccctttgcatctatatgctgtatctctgagtggaacttgtactgatacttcagagttggtgtgaatcggtcgatctgctgctgggaggagacgacgttgggcgggagcaggccgcggaggccgaggcggtccctctccgtcatcgagaaccccgtgccccggttgaaccatgggtcgtggaggatgtcggagccgcgcttgtggagcacgacggggcggtggcactccgccgtgacgaagccgcgcgccagcaggaggaggtggtgctccccgccgccgcagcgggatcggcggaggaggctccgcgagatggacgccgccgccatcgatctcactctcacactcaccagcgcgatgccgcgttcgaattattctctctctctctctctctctctctctctcttccggctttttgggggaggagatgagagcgagacgacgcggcgcggcggggggatctgctctagctgcgcggttgcggtctgcgcgacgaggcgccgacaccgcgacgcgagagg

SEQ ID NO: 34504 - DNA, 543 bp, Oryza sativa
  Clone ID: PAT_MRT4530_38513C.1
atggcagtggcgctcggagcgtggatggcgacagcggcggcacccgggccggtggtgaaggcgtggctctcctccatgctgcttggcgaggagcttgagctgctctgggccaagctggtcgtggccaagaaggaggcggcggggaagaagcgggtggcggtggaggagctccgccggcgcgttgactatgggcgtgacgagttgcagcggctgcggtcagatgtcgccgcaccgaggaaggagaagcacgcgttggagcagcgtgaggcggcggtccacggtggtggcactgttatgcttgatgtccgcgtggcagtcccagatggcgacgtggcggtccatggtggcggcgctatgcccggtgtcggcgcaacagtcgcagggagcagcggcgtggaggtcacgggaggtggcatggggtccgaaggcggcggcacggggtccgcaagtgacggcatgatggtcacaggaggcgaggaggccgcaagcggcgaatcgacgatcactgggggcggcgaggaggccacagttgccggtccctga

SEQ ID NO: 34505 - DNA, 620 bp, Oryza sativa
  unsure (1)..(620): unsure at all n locations
  Clone ID: PAT_MRT4530_38514C.1
gccccttccgatcgccttggactccaccgcggtggcggccgctctagaactagtggatcccccgggctgcnggaattcggcacgagcacaagcccaagtcgcgtcgcaccgaagcacactacacaacgacaggacggatcgccatcagccgtccgatcgagtgatccgatggctctcgctctctccacctctgctgctgctgccgctgccgccgcggcgcgggcgctcgcggcgagggtgaccaccaccaggggttacgccgcgtcgcggcgtcctccgcataagcgggcggcgcgcgtggaacggaaaggccctccgggattacccatccatccatgtatatctgctccgcgtcagctactcatcacctctcgaacgcgcccgcgccgcacgccgcttccgcctccgccttgcaccttagacaacacaacgaacctcctcccccgggccgcggatccgcccggcggcggcggcgcatcctaaccgtttccttgctgcttttggctgggatccctgctcctttnccngttcctcctcccccctccttttacnccaacagggcncctctataatacttttttgtttttaacttcccgttcccccttcccggttttgatgtt

SEQ ID NO: 34506 - DNA, 561 bp, Oryza sativa
  Clone ID: PAT_MRT4530_38515C.1
atgggcgtcgggagggcgcgatggggcggggctggggtgatgcgagggtgtgacgatctggggaccggcaactgtggcctcctcgccgcccccagtgatcgtcgattcgccgcttgcggcctcctcgcctcctgtgaccatcatgccgtcacttgcggaccccgtgccgccgccttcggaccccatgccacctcccgtgacctccacgccgctgctccctgcgactgttgcgccgacaccgggcatagcgccgccaccatggaccgccacgtcgccatctgggactgccacgcggacatcaagcataacagtgccaccaccgtggaccgccgcctcactgccattgccaaccaggataaccacgccaccgttgagagagccacctggatcgggcataagaggaggctcacttttttacatgaccaaattgctcctcctttctctctctccctcctttctctcttctccggtgaggttgtcgacgtgttgctggccggtgagccctgtggttgtcgaaatgttcctggaagcggccaagagcacagcggtgtcggctgctga

SEQ ID NO: 34507 - DNA, 249 bp, Oryza sativa
  Clone ID: PAT_MRT4530_38516C.1
atggcggcggggaagaacacgaacacccgcgccgcccacagcatggcgctccccattatgccgcgcgaccacctcttcttgccaccgtggctaggccttgtccaccccaagacgtgcgcctgcaggaggcttaaggttgtggtcgtgccagaagacgttgcgccgctgccgcccactccggctaccgccgagaggacacctgtttctcacggtcgcgatggcattgtccagcagcagcgcagccgctag

SEQ ID NO: 34508 - DNA, 1530 bp, Oryza sativa
  Clone ID: PAT_MRT4530_38517C.1
caagaaccggccatttcttggcagcttcttcttcttcttcctcctcgcgctcgctcacctctccattgttgtcgattgtgttgtactggtaggaggatgaggggccgggcggcggtgttcgcggcggtgctggtcgtgttcctggtggcgtgcaccgccgcggcggcggcggcggcgattaccatatcgaggaagcaccagcacaggccggcgtccggggcggcggcgaaggcggcgtgcgacgtgttcgcggcggggagctgggtggtggacgagtcgtacccgctctacgactcggcgacctgccccttcatccgcgccgagttcgactgccgccggtacggccgccccgacaaggagtacctcaagtaccggtggcagcccagcccgccgtgctccacgcccaggttcgacggggtggcgttgctgaggatgtggagcgggaagaaggtgatgttcgtgggggactcgctggcgctgaaccagtacgagtcgctgctgtgcatgctgcacgccgccgcgcccaacgcccggaccaccgtcacgccggcgtcggggaaggtcgatcccctcaccaccgcccgcttcgaggagttcaacgtgacgatcgtgtactacctgacgcactacctggtggacattgtcaacgagaaggccgggcgagtactcaagctggacgccatcgaccaggcacgcaactggctcagcgccgacgtgctcgtcttcgattcctggcactggtggccgcgctccggcccgacccaaccatgggactacatccaggagggcaacacggtggtgaaggacatggacaggacggaggcgttcagcaaggcgctcaacacctgggctagatgggtcgacgccaacctcctccagaccaacaccagagtcttcttccagggcatctccccctctcactacaggggccaagattggggcgacacggcgagtgcgacgtgcatggggcagacgcggccggtgaacggcacggcgtaccccggggggccgatcccgcagcaggcggtgctgaggagcgccctcgccggcatggcgaagccggtgtacctgctggacttcacctacctgtcgcagctgaggaaggacgcgcacccgaccaagtacaacggcggcatcttcggcgacgactgcacccactggtgcgtcgccggcctcccggatacctggaacgtcctcttctacgccgcgctcaccggccagcactgatggccggctgctgacctgctgtcatcacggccggtgatatgattgagataggatatagtggaaataattaatcaacaggaaaaaagaattatagatacagattgattttatataggtctatatggaaagaatttttctcgaaaaaaaagaaacagaagattattgttaccaagtgacagaagaaatgcctgattctctctcagaaatgggggtgaattaaagatgctgtaattggttggcaaagaaggataagaaagaattaattgttctcatgtggttataaagataaaaaaaaaaaaaaaa

SEQ ID NO: 34509 - DNA, 1440 bp, Oryza sativa
  unsure (1)..(1440): unsure at all n locations
  Clone ID: PAT_MRT4530_38518C.1
catngtgtcatggctccatcaccacctagcagctctacacctctctcttatattagctctctctctctctctacccccattcatgctcatctccttctagcttccagcttaatcccttccttgtcaatgttaatggacaaactctgagcattgcactacccatcatctcctagctagactcaccttagcttgtctcttngcgtcnctagtgtgtgattctttctcccatttcctgtttggtttgcactgagtgaacaagcaattaagcttggtagtagtagtagttgttgtattgatcgatcgatcgatctagagacgacgatgagcatatcggtgaacatggaatcatgcgtccctcctgggttccggttccaccccaccgacgaggagctcgtcggctactacctccgcaagaaggtcgcctcccagaagatcgacctcgacgtcatccgcgacatcgatctctaccgcatcgaaccctgggatctccaagaacattgtgggatcgggtacgatgagcaaagcgagtggtacttcttcagctacaaggacaggaagtacccgacggggacgaggacgaacagggcgacaatggcggggttctggaaggcgacggggagggacaaggcggtgcacgacaagagcaggctcatcggcatgaggaagacactcgtcttctataagggcagggcgcctaatggccagaagaccgactggatcatgcacgagtaccgcctcgagaccgacgagaacgcgccgccacaggaagaaggatgggtggtgtgccgagcattcaagaagaggacggcgtatccggcgaggagcatggtggagacgtgggactactccttgcacgagcgcaacatcatgagcgccgcggcggcggcggcgttcgccgatccgagcgcggcgtacgcgcagatgaggcggcagcacaggagcgggcggttcaagcaggaggcggagctggacggcgccgccacagccctcctccactactccagccacctcgccgagctgccgcagctcgagagcccctccgcggctgcggcgccgctccagcccaacccgagccagctggccaccgccggcgaggacgacgactgcaagggcgataatggcggtaggagggccaagaaagcccgcgccgccggcgacaaggtggcgacgaccacggactggagagcgctcgacaagttcgtcgcgtcgcagcttagccccggggagtgtggcagcatggaggcaacggcggaagccgcggcggcggcagtcgccggtgtgagctcgccgctggaccacggcgatgacgacatggcagcattgctgtttctcaacagcgacgagagagacgaggtcgacaggtggacggggttgctcggctccggcgccggcgcgagcggcgtcgacggcgacctcggaatctgtgtgtttgacaaatga

SEQ ID NO: 34510 - DNA, 1119 bp, Oryza sativa
  Clone ID: PAT_MRT4530_38519C.1
atgccgccgtcgagcgtcgccgccaatggcgcgcgcgcggcgaggcggaggcggcggctgctgctgttcgccaactacgccgcactgctcggcggctcggtggcgtccagcctcctgtcacggtactacttcgcgcacggcgggcacaaccggtgggtggccacgctggtgcagtcggtcgggttcccgttcctgctcgtgccggtctacgccggccggtcgccgtcgcagccgcggccgttcgcgtggttcacgcggcggctgctcgcggcgtgcgtggtcatcggcgtgctcatgggcgtgaacaacctgctcttctcgtacagctcgtcgtacctgccggtgtccacctcgtcgctgctgctgtccacgcagctcgccttcacgctggtgctcgccgccatcatcgtgcgccacccgctcaacttctccaacctcaatgccgtcgtgctcctcacgctcagttccgtgctgatcgcgctccggtcgtccgactcgggcgagcagcccgggggcgggagccgcgcgaggtacttcgtcggcttcgccgtgacgctcggcgccgcggggctcttcgccgcgtacctgccggtgatggagctggtgtaccgcaaggccgtgtccggcgggttccgcatggcggtggaggtgcaggtgatcatgcaggcggcggcgaccgcgctggcggtggcggggctcgccgcggcgggcgggtggaaggaggagctcgcgcggtgggacctctccccggcggcgtactgggcggtgctcgccgcgctggtggcgacgtggcaggcctgcttaatgggcaccgccgggatggtgtacctcacgtcgtcgctgcacagcggcgtgtgcatgaccgccgtgctcaccgccaacgtcatcggcggcgtggtcgtcttccgcgacccgttcggcgccgacaaggccgtggccaccgtgctctgcgtctggggcttctcctcctacctctacggcgagtataccacgcagaagaaggtggacggcgacggcaaggtggccgccgcgtcgtccgccgccgccgccgcctccgcggacaagatacccacaggtggcggcgcggcagaaggcgacccagtacatgaagccgtttga

SEQ ID NO: 34511 - DNA, 5175 bp, Oryza sativa
  Clone ID: PAT_MRT4530_3851C.1
atgtcatccagcttcatcgacaacaacgtcaacaccaacctcaaccagggagttcttgcttcaacaatgctggtgtggactcaagtcggcgaaatcgtcttcccggtttgcaccacggtgccggtctcagccggtccatcaatgaccggaaacgagaacgcagtagctacaacccaggacgactccatgtcgaatgatcctcccgccgaagcggagaacggaacgtcgacgacatccgagctcgagaaggattgtaatgcggccaaaccttgtcgttccgacaagaaccacgagccgacaaggataacttccgaagcgacaaagtcctggtgtcctatccaccaaactaggaaacacactttgcaagcctgctgggtctttctcaacgtccacgctgaaattcgcgcctacaaagagcgtggaattcagcgtgtttttccaactcgtgatgtctattgtcctattcacaagacaaagaatcacgacctctcaagctgcaaggtctttctcagcgccatgaagacgtcatctcctaaggactatggctcgtcgccaacgagtactccacgcgaggtattggctatcgacgggaccagcatgtcagcacgcgctaatgcggaagcggaaaatcaagtgactacaccggctcagcacatcaggaccatcaacgcaatactgagggagaccccctacgatcccgttctgaacgatgatctcgcacagtggacagaacgactacgggaatcggtgaccaacctcagcaacgcgttcgaagaggccgctgctgcagcactcccggaacagccacccactggcgacagacatccacgaagaacatacgatcgccgacaacccaccgcccccagcgctgggtgtagagctttcagttgttcactgcgtgatgtccgatggcctgagagattccgaccaggagcaatagagaagtacgatgggagtaccgacccagaagaattccttcaagtttactccacagtactctacgctgccggagcagacgacaacgcgttggcgaattatttgccaacttcattgaaaggctctgcgtgttcatggctgatgcatctcccaccctactcgatttcttcgtgggcagacctgtggcagcagttcgtcgccaacttccaagtaacttacaagcgccacgcgatcgaagatgacctacaagcgttgacacagaacccgggtgaatccttgagggaatatgttcggcgctttaatgagtgcagaaatacaatccccgaaatcaccgacgcttctgtaatccgcgctttcaagtccggtgtcagagattgctatactacccaggagttggcaacaagacacatcacgactaatcggagattattcgagattgtcgatcgatgcgcccacacggacgatgcactgagacgcaagaacgataagccgaagaccgggagagagaagaaaccggccaaggacgcacctgagtcaagcaagaagaaaaatcgcaagaatgggaaaaggaaagctcaagcagaagctctcgcagcagaatacgcgaaccctcccaagcgcctaggcccacaaggtagcgacgcgaagaaagcatggtgccctatacacaagttggacagacattctttggaagattgccttgttttcaaaaagtcgctcgagaagcacatggcattagaaaaaggcaagcgagggactgtacccaagatgaagttgtctgaacagaagatagaattctcagaagaagaccaccccaagactgccgtcatcccaggatgctatccgatcgtggtcgaacctaccattcagaatatcaaggtcgcgcgagttctcatcgacggcggcagctcaatcaaccttatcttcgccagcaccttggatgcaatgggaatcccacgaagcgagttgacacccaccgatcaacccttccgtggaatcactccccaatcctcgtccaaaccattgggcaaaattacattgcctatgactttcggccaagcaaacaacttccgaacggagcagatcacctttgatgtcgctgaattcgatacagcatacaatgccatcatcgggagaactgcactcgcgaagttcatggccgcatctcactacgcgtatcaagtgctcaagatgccaggaccgaagagaacaatcactattcaaggaaacgctaagctggcagtgcaatgcgacaagcggagcctcgacatggtcgagcacacgcccagcccacccgccacagctgagccacccaagaaaccgtccgacatgccgggggtccccagggaggtgattgagcataaactcatggtgcgacccgacgccaagtcagtaaagcaaaaactgcggagatttgcaccagatcgaaaacaagccatacgagaagagctcgacaagcttctcaaagcgggcttcatcagagaggtactccatccagagtggctagccaatccagttatggtgcggaaggccaacgggaaatggagaatgtgcgtcaatttcaccgacctcaacaaggcgtttcccaaggatcacttccctcttcctcgaatagaccaactggtcgactcaacagccggttgtgagctattgagctttctcgacgcttactccggctaccaccaaatcagcatggcaaaagaggacgaggagaagacaacattcatcacgccgttcgggggcgcacttagcgaccagcttggaaacaatgtcaaagcctacgtcgacgacattgttgtcaagatgaagacaagcgactcattgattgacgatctgcgggaaacgttcgacaacctccgacgatatcgcctcatgctcaatcgagagaagtgtacgttcggagtaccgtcgggcaagctgctcagtttcctcgtctctggcagaggaatagaagcaaatcccgagaagatcaaggcaatcgagaacatgaagtcgcccacaagactcaaggaagtacaaaagctaaccggatgcatggcggtactaagcaggttcgtcgctaggatgggagagcgaggacaacctttcttcgctctactgaagaagcaagacaaatttgaatggacacagcaagccgaagaggcattcattgcactcaagcgctacctatcaaatccccctgtacttgttgctccccaacctaatgacgaattattcctctatattgccgccacgccatatttcgttatcaccgtcattgttgtcgagagagaaaaagtacaacgaccagtctactacgtcagcgaagctctccacgacgcaaagacaagatatccacagatccaaaagctgctctacgcggtaatcatgacatcgagaaagctacgccactactttcaagcccacagagtcacagttgtctcctccttccctcgtggtgaagtcgtgagaaacaaagacgttgtcggccgcattgcgaaatgggtagtcgagctaagccagtttgatgtccactttgtgccacgaacagccatcaagtcccagccaagaagcaggggcaggattcatcttgacatcaccttcaagcatgcaatccacctcaacttcagggcaaccaataacacagccgagtacgaaggactactcgccgggataagagctgcagtcgcacttggaatcaagcggctgatcgtgaaaggggactccgaactagtcgcgaaccaggtgcacaaagattataaatactctaaccccgagttatctaactatctcgcagaagtcaggaagctggagaaaaggttcgatgggatcgaggtccgacacgtataccgcaaggacaacatcgagccggatgatctagcacggcgtgcgtccagacgagaaccactcgagcccggcacttttctggacgtcctgacaaagccattagaaaaagaggttagcagcgaaggtaacccagtcgtccccgacatcagctcggaggctacagaggtagaacgctccgttgccgatatcgagaccacagacgattggcgcaccccactgattaaattcatcaacaatgaagagttgcccgaggacgacgcagtagccgagaaaataacccgtaaagcaaaaatctactgtacgatcggcaatgatctatacaagaaagcgccaaacggggtacttctcaaatgcgtctcatccgacgacggcagacacctcctccttgacatatatgaagggatctgtgggtcacacgccgccgatcggacattggtcgggaaagcttttcaacaagggtttttctggcaaaccgccctcaaagatgcatgcgacatgggcggctacaggttcctattcgtggcgatcgacaaattcactaagtggatcgaagcgacacccacgggggaaatcaaggccgacaacgccatcaaattcatcaaagggatattttgcagatacggactgccgcaccgcatcataaccgacaatggctcccagttcatcagtgccgacttccaggattactgtatcgggctgggagtcaagatctgcttcgcctcggttcctcaccctcaaagcaacggacaagtcgagagggcaaacggcatagtactacaaggaatcaagacccgcgtgtatgacaggctcatgtcacatgacaagaaatgggtcgaagagctcccatcaatactatgggccatacgtaccacactgacaacgtctaacaaggaaacacccttctttctcatgtacggctcagaggccatgctccccagcgagctacgacatcaaagtacacgagtacagaagtattccgatgaggatcaggaggagcagcgaaacgacgatgtgaatctactcgaggaacatcgtgaacgagttgccgtccgagcagccagctaccaacaggccctccgccgttaccacgagaagcgtatcagagcacgcatactttcgatcggtgactacgtcctccgacgggttcaaagccaagtagggcgaaacaagctctcacccaaatgggaaggaccgtacacgatcacacaagtcttgcggccaggcgcattcaaaattgcagacggtgatggtcgcgagttggcaaattcttggaacattgatcaactacgtaaattctatgtatatgtcaatagtatccatacctgtaagacaccttacagcctcaataaagcctattttcaggtgcagattacaatcaaagtgctcctgcccaatgatctcttacccagatga

SEQ ID NO: 34512 - DNA, 360 bp, Oryza sativa
  Clone ID: PAT_MRT4530_38520C.1
atggtgcctactcgtctcaagcgcagctccaacaatgctagggttcatccactcctcaacttcctcataatgcctagggttgatctagacaggctagagttcaaccgccgtcatcctattcctctcttggttaaggatggctgggttttgaaccgtgcgccgccgccgttccggtcgtcgtcgtcgctcggggaggtcgccatcgtggtcgccaagtcgccgccgtcctcgtccaccgctttgccgccgctggagaccgccggagcaccgtcgccaccgtcgacccgatcttcgccgccgcttcttcctcgtcgccggcgccgtccgttgcttttccgccgttgttttggtcaccggtga

SEQ ID NO: 34513 - DNA, 3641 bp, Oryza sativa
  Clone ID: PAT_MRT4530_38521C.1
tcaactaattttactctctagactcgattgatgtatatctccaactcaatctgtcatgagcgtgttctacatagttgccaatgttcatctgtattataaatgtttgaacgcttaatgtacttctcaaaacttcaaacattctattaatattacatacatagaaacgatcccatgacaccttaagataacacatggaagagtaaaaacttcgatgtttcaggtggatcaactttccgttacttttgcttttagctgtcagcagcattcaatacatgagagcctctccacttccgatatataggattatagagaagctttttctcgcagatcaatgttccctgcaagtaagcactcctcctgcagaatctccaagactgatccacgctgatgagcatacacaatgttgataaattttactccgccaatttccctattttctctctcagtaatccttctgaaagaggagtgaatatgttgaacagagttgctatcacgatggtttatattgtcatgatagcatctgaagctttctgaaaacaacccagtatgactacaggccgatatcagcctcaaaaatgtgctagcatgatgagaacaggttccatcatcctgcagctcaagatggatagcaaaatccctttgatcatgtccctaatgaagagccaaatagtttgcttgttaaaaccatgtttagcttcaataacaaatgttgaataaagagagaatggtaagtctgtgatctgtgaccaaatcatgacacctgctaagaatgcaagagtgtgtagtatctcattttcagcatttaggccagcattggttgctagctctccagatttcttccaaacccagggaagaactctatagtacagaattgtggtatccattaatatagttacagcttcatggataaaatggaatttgcttttatcaaggctataagctctggagcgctcaaacttttcaccactaattactcctaccaggggttttggcagtgttggttccttaagggctctatgctgacggatgtcaagatatgtctcaaatatgtacatgagaatcataaagcacagcacggcctccaggtaaggaagcgccattggagcaggatgggtggcggaggaggcgctcagggaatcgctaggcggcgggagacgggggcgaggacgaatgggggcagcacgggcatcggaattagggcatacatctcctctcctcaggtacaaatcctcaaaaagacctgtggcctcctcaacaaatccattcttagcatacattatgatgagagaattcaccactgaaacatcattctcgagccccaagcgaacaacaagcgcatgcaatgaactgaacaatcctgactctcccatcaaagagcacgcctgaataacactcaacattgtaacgttgttgggaaggacgttatcctccagcatcatgacgaacactttgagagcttctgctagcatcccattaagcacgcaccctgaaagcagggcagtccaagaaaccacatccctggaatccattccaagaagcagcttttctgcgctcaccacatccccaaccttggcgtacgtattgaccaacgagccaacaacaaacgggtcacagcaaaacccacttgtcacgaggtggccatgcaccatcctccctagcctcgcgaccttggctagcccacaagcctgaaggagagcggccgccgtgaactcgttggggcggaggccaccgtcctcgtcgtcggcatcctgggtcagcatgtccatgtaggcgcggatggcgtccaggggcgcgccgaggcggcagagagcggagacgagggaggcgcaggtggcggcgtcgcggcggggcatttcgtcgagcaggcggagcgcgtcggagaggaggccgcattggaggtaggcgtgcaggagagagttcgacgcggtgagaggctgggtacggtcgagcgcgccggacttgaggagggcagcgtggagcgcggaggtgagcggcgcatcccgccggtcagctgccccgcggaggaggctgacgggggtgggagcggtggtggcgcggcgaggaggaagaggaggcggaggcgacgacggagtggagagggagagcatcggagcttggagtgagaattgtgaaatggaaggagtatatgtcaatatagtacttctcatgtactcacacattccattaacatcccgaacattgaaacgattccatgacaccgtaaggtaacccatggaagagtaaagacttcggtgtttcaggtggatcaactttccgttagttttcctttttgctgtctgcgtcttcaagagcagagagcctttcaacaaggggtggatgggagtagtggtaggctgaataccacggatctgtagtttaacaagggctgcacggagctgaggagcatacccaaggttcttggcaaaagcatcagcctgaaatatgatcagcccaattattacaggctgatcctcgaaaccaaaactttcaaaaaggtctttggagttccttactagcgtatatcctccaaattgtaggaacataaggagctggacagctacaaaggaatacacagtgtggttgagtttccagtgcccaagttcatgtgcaataacagaaactatttcatcctcactactacactgctgaatcaacgtgtcatagagaacaatgcgcttgttcttgaaaaacccatacatgtaagcattactgtggcttgatctggtagacccatccaccacgaaaagctttttcaatggaaaactgagtgaagctgctaatttctctattttctctctgagtactccttctggaagcggagtgaatttgttgaacagaggtgctatcacgatggggtatattgtcatcatcacaagagataatgcaaacataaaaccccatagatatattgccaggtagggccctccattctgtactatgatgataatagcagccacaataggaggtccaagtaagatggatagcaaaatccctttgatcatgtccctaatgaagagccaaatagtttgcttgttaaaaccatgtttagcttcaataacaaatgttgaataaagagagaatggtaagtctgtgatctgtgaccaaatcatgacacctgctaagaatgcaagagtgtgtagtatctcattttcagcatttaggccagcattggttgctagctctccagatttcttccaaacccagggaagaactctatagtacagaattgtggtatccattaatatagttacagcttcatggataaaatggaatttgcttttatcaaggctataagctctggagcgctcaaacttttcaccactaattactcctaccaggggttttggcagtgttggcaacttaagggctctatgctgacggatgtcaagatatgtctcaaatatatacatgagaatcataaagccattgccccacttcgcctgcctgctctgcctgacgccgccccgctggctttgcgcgtcatcgtcccactcctcctcctcgaacttgtcgctatcgccatcctcatccgccatcaccccgctccgcgccgctggcttcgcgcgttgtcgctccgccaccatcgccccactttgcctgcctactctgtccgctgccgccccgctgacttcgcatgtcat

SEQ ID NO: 34514 - DNA, 339 bp, Oryza sativa
  unsure (1)..(339): unsure at all n locations
  Clone ID: PAT_MRT4530_38522C.1
tttttcacccttttttttttttttttttttgtggtttttttaaatttttgggggtttataattttngaaacacatgatttaccataacaataaaaaacaaaaaaaaaggcaaaaaaaaaaaaagaaatgcccacaaacaatttaaaaaggctccccaaccccaaaaaaggcctggttcaaaaaaccccaacctgttttgtaaaaaaaagctaaaaggcaaaatttaaaaacatttgttagaaacctaaaaaacggggaaccccaaaatttccgaaaaaaaataaaagcaaaaaagggtcaattaaaaattacaaaacccttagttaaaaattttaaggg

SEQ ID NO: 34515 - DNA, 2796 bp, Oryza sativa
  Clone ID: PAT_MRT4530_38523C.1
atggcggctgcggaggttgcacgacgcgggggcgatgggaggctcgagagagtgcggcgaaatggggaaaaaagctctgaaaattccactaaaaatcctgttaatgaatttcgacctgtagaactcaagaaaaagtcccacatgtcaaatccgattattatttgcattactttcttagggttttctcctgatttgcaccggatcaaatcaactggttcttctaaggatggagtggtgcaacaagccccggctggtacagctgaaccagggaaccaaggcattccagagggctcaggagataaagctgagtatcaagccacaggaccggtttatttaccaggaggtgttttcccgaactatcggcccttcattacagataatcagctgactgcttccaatgtaccaccagttcagctgactgcgccgatattagctcctgcacctgctgcaccagcatcggcaccagggcaattgatcaatcctcggttgttgccaaactttcagaattatcaagcaggcaatttaaattatcaatatcagcttccatcgccacaagttcagtatcaggaaggagggtcagctcagcctcaatttgctcctcagatcaatcaattcgagcccatgctgcaacaaacgcaaggagtacctcagccgagaccatgggctgatatgattgcagatgtaatgagagagcagttcgggcttaaaccaaaggacgctagaaatttgtatcagcatacataccctgagtggtttgaaagggttcaattgcctaaccgatacaaagttctggatttttcaaagttctcagggcaggacagtgtttcaacctatgaacacgtcagccgattcttagctcaatgtggcgaggcatcggctactgacgccctgagggtcaaattgtttcgccctgagtttagaaccaagttgatagatctattaaaagaatatagagattgcttcgcttgggagtattatgagatgccaggactcagccgatcaatcgttgagcatcggctacctattaaaccatgggttcgaccgcaccagcaaccaccgaagagatgcaaagccgatatgctcgaacctgttaaggctgagatcaaacgtttatatgatgctggttttattcgtccttgtcgatatgctgagtgggtttccagtatagttccagttatcaagaaaaatggaaaaattagggtgtgtattgatttccgagacttaaacaaggctatcccaaaagatgaatatccaatgccagtagccgatcaattggttgatgctgcttcaggacacaagatattgagttttatggatggtaatgtagggtacaatcagatttttatggccgaagaagatatccataagacaacttttacgtgtcctggtgcaatcggcttgtttgaatgggttgtgatgacttttggcttgaaaagtgttggagctacgtatcaaagggccatgaattatatataccatgatctaatcgactggttggttgaggtttataatgatgatgtggttgttaagtcaaaggaaatagaggatcacatagccgatttgaggaagattcaacctccggagaacaagacagaattgcaggaaatgatcggcaagataaattttgttagaaggtttatctctaatttgtctggaagattggagccctttacaccattgttgagattgaaagccgatcaaaagtttacttggggggcagagcaacagaaggctttggataatactaaggaatatctaagttctgctccagttttgattcttccacaaaaaggaataccttttagattatatctgtcggctggtgagaagtcaatcggctcggtactgattcaggaggttgaagagaaagagagagttgtgttctacctgagccgtcggctgttggatgccgagacaagtcaattggctagagaatatgagtccaagaatgatacattaatggtttatagtaagaagtgccagaagttgatgaaagaatttcggctagtgaccttgaagcatgtatctcgagagcagaatgttgatgctaatgacttggctcagggggcatcaggttacaagccgatgatgaaagatgttaaaagtagaagaggttggggaattgatatgatcggcatgattaatccaccatcgagtaagggtcacaagttcatattggtggcagcagattattttaccaagtggatagaggtgattcctttgaagaaagttgactctggggatgctatccaatttgttcaagaacatattgtctaccgatttggtattcctcaaacaattacgaccgatcaaggttcaatctttgtgtccgatgagtttgctcagtttgccgatagcatgggtatcaagttgttgaattcttcaccatattatgcacaagctaatgggcaagccgaggcatctaataagagtttaattaagctgattaaaaggaaaatttcagattatcctcggcagtggcatactcgattggccgaagcattgtggtcctatcggatggcttgtcatggttcgattcaagttcctccttataagcttgtttatggacatgaggctgttttaccatgggaagttagaatcggctcaagaagaacagagttgcaaaatgttttgacagccgatgagtattataatctcatggccgatgaaagagaatacttggttcaatcaagattgagagcacttgcaaaagttactagggataaggaacgtgttgctcgacattataacaagaaagtagtgcccaagtctttttcggaaggtgagcttgtttag

SEQ ID NO: 34516 - DNA, 433 bp, Oryza sativa
  Clone ID: PAT_MRT4530_38524C.1
atcttgagcagtattcattagaaatatcttttgaaagattgaaatacaaggaggaatgcaaaaaaaaagagaagaccttgacataaaaagaccatcactttggaggatgagagctctgacaccattgataatgtgcaggccaagatccaggtacatggaggggattccccctgacctgccgcgtctgatcttcgctggcaagcagctggaggatggacgcaccctctgcgactaccacgtccataaggagttcaccctccacctggtgcttcgccttcggggtggtcagtaatgagccagttaggtggagctgccgctgtgtctggacgggccgagcctctgttcgggaagtttatgcgctgctgatgtctactcgtgactggtttaatggaccatcgtttcccgatgatttgctagttttatttaacatttt

SEQ ID NO: 34517 - DNA, 4495 bp, Oryza sativa
  Clone ID: PAT_MRT4530_38525C.1
catgggccgatttggaaaagcaattccatagttacatttatagtgggattcatgagatgaaattgtccgaccgacagcaatcaaacaaaggcatgatgaacccgtgcaagattatattcataggtttagggagatgaggaacaggtgctacagcttgagtttgaccgatgttcagctagccgatttagcctttcaaggtctgatagctccgatcagggagaagttctcatctcaggactttgatagtttatgacatcttgcacaaaaggtgaccttgcatgaacagagatttgcagaagctaggaagaatttcaagaaaatcaatcacgtctgtccttacatgtatggatctaatgatgatgatgatgattctgaaatagcagcagctgaatgggttagaagcaagaaggttataccatgccaatgggtgaaaaattctggaaaagaagagaggtataactttgacattacaaaggatgataagatttttgacttgttacttcgggagaagcagattcaaattcctgctggttacatcataccatcggctgaagaactgggcaagaggagttactgtaaatggcacaattctggttctcattctactaatgattgcaaagtgtttagacaccaaatccaggttgccattgaaggggggaagattaaatttgatgactcaaaaaagccgatgaaggttgatagtaaacctttccctgttaatatggtgcacacatctgggagaatagctgatggagggaaaaataggaattttcagatgaattcggctaggatttttgacaagtaccagaaaaaatatgacaagcaacagcatgtaggatgttatgagcaagataatggtggttttgatccacattggtgttgtgagtttttcagattttgctggaatgaagggatgagattgccatctatcgaagattgtcctggatgcagtaatattgcagaaagttcaagccgatcttataatagaagtaatcggctaaggcaaacaatagtttcggttcatcaaaggttgggcccggtgaatcaagatcaaggggatgatgaagacggaaaaaatcaatggtgcccttccggtattttcacaaagaaacagaaaaggagggttccacgattaaggaatagagaacgtttccaagaggtcgagcaagagattaatcatcggctgaagaagacaaagccgaggcaggagtggagtgttaagaaccaagttgctacagccgatgaggtcaaagctgatgaagcaaaaacgttggctaaggggaaaagtgttgtgactgcgtcagttaacatggttttcacgctaccagctgaatttggagctaatcaagccgatgttgacgaaattgaagaagcttctgctaggttggttttgtcacccgagcaagcaatttttgagaagccagaagggacagagaatcggcacttgaaaccattgtatataaacggctatgtcaatgggaagctgatgtccaagattttggtcgatggtggggctgtgcatgctaattgttgtattccttcaaccatgcaccaatgcctgattcaatggcaaggcgacaagattgaaattgggacagccgacagccaattgaagatggagagcccaagctattattttgagggcatcatggagggttcagacgtctacatcaaggacacggtagatgatctcgatgacaagcaaggacgagggttcatgtctgccgatgatttggaagaagttgatataggtccaggtgacaggccaaggccgacatttatcattaagaatttgtcttcagactttagaaccaagttgatagagctattaaaagaatatagagattgcttcgcttgggagtattatgagatgccaggactcagccgatcaatcgttgagcatcggctacctattaaaccagaggttcgaccgcatcagcaaccaccaaggagatgcaaggccgatatgcttgaaccggtaaagggtgagatcaaatgtttatatgatactggttttattcgtccttgtcgatatgccgagtgggtttcaagtataattccagttatcaagaaaaacggcaagattagggtgtgcatagattttcgagacctgaataaggccacctcaaaagataagtatccaatgccagtagccgatcaattggttgatgctacttccggacacaagatattgagttttatggatggtaatgcagggtacaatcagatcattatggccgaagaagatatccataagacatcttttaggtgtcctggtgcaatcggcttgtttgaatgggttgtgatgacttttggcttgaaaagtgctggagctacatatcaaagggccatgaattacatataccatgatctaatcggctggttggttgaggtttatattgatgatgtagttgttaagtcaaaggaaatagaggaccacatagccaatttgaggaaggtttttgagagaacagggaagtatggtctaaaaatgaacccaacaaaagcaacaaagggccttagtattaaagaatatcttagttctcctccggttttgattccttcgcaaaagggaataccttttaggttatatctatcggctggtgagaagtcaatcggctcggtattgattcaggaaattgaaggaaaagagagagctgtgttctacttgagccgtcggctgttggatgccgagacaaggtattctcctgttgaaaagttgtgcttgtgcttatatttttcttgcaccaagttaaggcattatctgttatccaatgaatgcaccgtgatatgcaaagccaacgtgatcaaatacatgttatcggctccgattctaaaaggaagaattggaaagtggatattttccctaacagagtttgatcttcggtatgagtcaccgaaggcgatcaaggggcaagctatagccgattttattgttgatcatcgtgatgattcaatcggctcggttgaggttgtaccttggactttgttttttgatggatcagtgtgcactcatgggtgtggtatcggcttggttataatttcccctcgaggggcaaattttgagtttgcttatactatcaaaccttatgcgaccaacaatcaggctgagtatgaagcggttctcaaagggttgcaattgctcatgggggttgaagcagatgctgttgaaattatgggtgattcgttattggtgatcaatcaattggctggagaatacgagtggaatgatacaataatggtttataatgtgaagtgtcaggagttgatgaaagaatttcggccagtgaccttgaagcatgtatctcgagagcagaatattgatgcaaatgacttggctcaaggggcatcgggttacaagccgatgatgaaggatgtcatagtagaaattgccacgattgcagccgatgattggaggtatgatgtgcatcattatttgcagaatccatctcagtcggcttcacgaaagttgcgatataaggccttaaaatatacactgctggatgatgagctctattatcggacgattgatggggtactgcttaaatgcttgagtgccgatcaagctaaggtggcaatcggtgaggtgcatgaaggtatttgtggaactcatcaatcggctcataagattaagtggttgcttcggcgggcaggatatttttggccgacaatgttggaagattgtttcaaatattacaagggatgtcaggattgtcaaaagtttggagcgattcaaagagcacctgcatcggctatgaatcctatcatcaagccatggccattcgggggttggggaattgatatgatcgatatgattaatccaccatcaagcaaaggacacaagtttattttggtggcaaccgattattttaccaaatgggtagaggcgattcctttgaagaaagttgactctggggatgttatccaatgtgttcaagaacagattatctaccgattttgtattcctcaaaccattacgaccgatcaaggatcaatcttcgtgtctgatgaatttgttcagtttgccgatagcatgggtatcaaattgttgaattcttcaccatattatgcacaagctaatggtcaagctgaggcatctaataagagtttgattaagctaatggtcaaactaaggcatctaataaggaaaatttcagattatcctcgacaatggcatactcgattggccgaagcattgtgctcctatccgatggcttgtcatggttcgattcaagttcctccttatatgtttgtttatggacatgaggctgttttaccatcggaagttagaatcggcccaagaagaacagagttgcaaaatgatttgacagccgatgagtattataatctcatggccgatgaaacagaagacttggttcaatcaagattgagagcacttgcaaaagttactagggataaggaacgtgttgctcgacattataacaagaaagtagtcccaagtctttttcggaaggtgagcttgtttggaaattga

SEQ ID NO: 34518 - DNA, 2396 bp, Oryza sativa
  Clone ID: PAT_MRT4530_38526C.1
atggaggcgccggggctcgtcgtcggatcggcgctgcgagccgcgcaaccgccaccgccacctcctctcccgcgctccccgcgtggcgctgcggatcgcctcctcatcttctcgcgggagcctcgacctcgactcgcccctctcacccggtgctactgttccagggaggggaagggcaatgctcgcagcaaaccccatcgcgagggctccaattccgttcgcgagtggttaatttttgtgagtttgtctaggctgaacgtgaaagcaaacaatgaccagaggatcatgaatttagagctgatgtcgcaggaaacatatttggctgatgaacgacacgaaggggttgacatctgggagctattcagccaggctcagagaaatatcctacaccttaacaagcagcggcttgtggccatggaagagctcaagaaactgcaggatgaaaataaatcgcttctgcaggacatagaagtactggaaacagaaaggcaaggtttttccatagaaatagcagaatcatcaaggttctctgagttgcttctgcgtatagatacaatgaccatttctggtatggttggcatgacagaagcgtctgatttaagaaagaaagttattgacaaccgatacatgatacatagcgtcttttctgatattcatcataaacaagatactgaactactttcagaattgagactctttctgcgtaaaccagcagagaaacctctacacgttgtgcacatctgcagtgaaatggatccaataacatcacgtggatcattagcaacctatgttactggattatcttccgcacttcaaagaaagggtaacttggtggaggtcatactgcccaagtatgctggcataaatgaagatgtaattcatttcctgaggaaagctgaagcagactatgaatcttattatggtggttgttggcataaaaacagaatatggacaggtatatcaagtggtgttagtcttacactcatagaaccggtgcagctgtcatattttgatcgcgatatgttacgtggctaccccgatgactttgagcgattttcctatttttcacgtgcatcattggattatattgtaaaatccggaaagcagccagatgttttgcatgtacataactgggaaactgctatagtggggcctctattctgggatatatttgctcaccagggacttgggaacactcggatattactgacatgtcaagacttgacttcgcaatgcctagaggttccaaatatgctggaattgtgcggacttgatcctcataaacttcatcgacctgatcgtctgcaggataatagcgaaacaaatcttgttaatgttctaaagggaggtattgtatactcaaataaagttttgttaatgtcctcaaccctcccaagagatatggctatccaaggcttaggacatgggttggaagcaacattaactacacacaaggagaaggtgttggttgcttctcatggattggatggtgaactttgggatccatccaaagacatttatcttcctcagaggtattctccaaatgacattgaaggaaaatcattttgcagaaagacacttaagcgatgtgttggactccacagtggttcttccgttgttgttgggtgtatctgcaatggtgattcgaatactgatggtcttagggaagctgttcgtgttgctctgcatggaggtgctcaggtcatcttcatggaaaacaaagggcctgtgatgaactcaactgtgcaggcattaaaggaagaactgaagggagacagagtaatgtttgttgagatatacgatgaggccctggaacatttgatatttgcaggctctgatatatttctgtgctcttccttttatgacccatcgctacaaatagcgattagagcaataaaatatggatctgcaccagtacagataaactttcccagtaatggatccaggcaaactgagtggcatgactaccctagcacagccctctctcagtacatcatctcaacatatggggacatgtccctttctcaagctctcgatggcattaagaacaacccttcccagtgggattggcgtattaaggatgcgatgtcaaaagttttatcatgggatgctgagtgctacgacctacattgggaggcttattccgttattaggaagctgtgaatgatgcatttatctggggactgcctgatacatcatcagctatctaaatacaaggcacagtttttgcccataatcaatcttgttgatttcttgcaactgaacggacaacggagggacagcaatatttcctgagtgtgttttggagaaagcatagtaatgatttgtaccacgcacattcaaggtaacatctgtctatccttatttctacacccaaaaaaaaaaaaaaaaaaaaa

SEQ ID NO: 34519 - DNA, 195 bp, Oryza sativa
  Clone ID: PAT_MRT4530_38527C.1
tttttagtgaactgaaggggcgggggacaagcatgattgcgacgacctatcatctcctgatccagcgacttctagaactggggacgtcgaacaagtccatgcctgtcttagatcaactgttgcacagtgatacggtctcttacatcacctctttctggttgttgaggatggttttcatggaaattaactaccacc

SEQ ID NO: 34520 - DNA, 531 bp, Oryza sativa
  Clone ID: PAT_MRT4530_38528C.1
atggcggcgagagccagcgagattattacgcaacgcagccccggttcctgcaatttgacgcgggaaaacggcaccaaagaaagccagaaaaaggagctcgaggtgacgagatgtgtggcacagtaccacggagcagagaggcgcgagaaaaagtgctcgggaaacatgtgtgggtgtggcgtggagcagcaggcgcacccggcccgcccgcgccggtggtgcactggtgcgacggggggtccaaccggtgaagcacgcggcgcgccgcgcgccggtgaggtgaattgggcggggagggtggcacatggcaaaaaggcgccggccgtcgcatgggcttgtcttgacgcggagaggccaaccgccgacgcggacgctgcagaggataatggatcgatgcccggtgatgagattccgcgcaggtggtgcgcccggccttctgatcaacattcttgctctttttctgtcactcggctcgtcaccacggtgtccggaaaatgtggcttcctctggttcttgaattgccccgtgtaa

SEQ ID NO: 34521 - DNA, 290 bp, Oryza sativa
  unsure (1)..(290): unsure at all n locations
  Clone ID: PAT_MRT4530_38529C.1
cccagcgcagatcgctcgcctgccttgcctgcccgtccgcctaaccgacaccgcaacaaaccacagccacacagcttctctctgttgctcgctttactgtgcgtgctgtatatacacccggtggatgagggatctagctaactagcttagctagacagcgtgtgttggtggtngtggtggtgtgtgtgtgtgtgaggagggtgatcgatcgatcgagcgatggagagcccggactcgtcgtccngctcggcgccaccgcgagtactacggcggcaacagcagcagccggg

SEQ ID NO: 34522 - DNA, 2346 bp, Oryza sativa
  Clone ID: PAT_MRT4530_3852C.1
atgagtaacaaatggttaagagaaggagagctcttatctgaatcgattcagatccgatgcccctcctcaaccattatgtgtcacattggaggtaattcggtccgtgctctgtataatccctctgttggtgccaatattatgtccgcaacctttgcattcgattgcttaggggacagatcgttggaaccaaccgtcagaaccttccgaatttccacaaactctactaccgaaggtttagggattatctctggagtgcccacacggcacaacagtgttgaggtcatattagattttcatgtgtttgaaatatatgatttcgacatactcatagggcatcccatagaaaaactcttagatgtgcccgaaaccggtgtccttaacctgaaaataggaagaattgccacctccgtccctatgttgcaatcaaccaattctttgatggagtctcttcctgttcctgagccaattgagggagtgatggctatttctccattcgagaccctagagtctattttcgatgaatccatcgaagaattcaatgaaggggaggatgaaactggagaaacgatggatctgccaaaaacggatctgccgtcacgagccccaattgagctaaagcccttaccgtcaagcctaagttatgcctttctgaacagcgatgcggagtctctagtcattataagtgacaaactctctgagagggagatggcccgacttatcgccattttagaaaagcatagtgctgcttttggctattccctccaagacttaaaaggcatcagtccgaccctttgcactcatcgcattctcttagaaccgtctagcacaccatctagggaacctcagaggaggctaaataatgcgatgagagaggtcataaaaaaggaagtcttgaaactcctacataccgggattatctatcccgtaccatatagcgagtgggtcagccctgtccaagtagtgcctaagaagggaggcatgacggtcgttgaaaactcgaacaacgagttgatcccgcaacgaaccgtcacgggatggagaatgtgcattgactataggaaactcaacaaggctacgaagaaggatcacttttcgctgcctttcattgatgaaatgcttgagcggttggctaaccattccttcttttgtttccttgatgggtattctagttatcaccaaatccccatctatcccgatgatcaaatctatggtaaaacattcaatcattgtttggagaatttagataaggtcttacaaagatgtcaagaaaaggacttggtacttaattgggaaaagtaccacttcatggttcgtgaaggaatagtcctgggacatcaaatctccgaaaggggagttgaggtggacagagcaaaaattgaagtaattcgacaacttccacctcctgtcaatgacatgggtgtccgtagcttcttgggtcatgcggggttctacaggcgcttcataaaggatttctccaaaatcgctagacccctaactgccttgctagctaatgatgttccggttgactttgatgatgagtgtatgaaatcctttaaaatccttaaggaatcactcatctcagcaccaatcatccaaccctctgattggtcgctgctgtttgaaatcatgtgtgatgctagtgattttgctgtgggagctgttcttgggcaaactaaggatagaaaacaccatgctatcacatatgctagtaaaacgttgacgggagctcagcttaattatgccacaactgagaaagagctcctagccgtagtgtttgccattgagaaatttaggtcttatttagtgggggctaaggtagttgtttacactgatcatgctgcactaaaatacctgcttactaaaaaagatgcaaaacctcgggtaattaggtggattcttctactccaagaatttgacattgaaattatggataaaaagggagtagagaattatgttgcagatcatttgtcgcgtatgcaaatcactaacatgcagaagctactgataaatgactatctacgggacgacatgcggttgaaagtcatagactctgacccgtggtatgcaaccatcgtcaacttcatggccacgggtcatgtaccaccggtagaaaataagaagaggttgatctacgagagccgcaggcacttgtgggatgcaccttaccttttcagagtctgctcagatggtctactgcgaatatgcgtttcgacagacgaaggcatcatgatcattgagaagtgtcatgctgccccatatggaggtcactatggagcattcaggacacatgcaaagatctggcagagtggattcttttggccatcaatgtatgatgacacaaagtaa

SEQ ID NO: 34523 - DNA, 493 bp, Oryza sativa
  unsure (1)..(493): unsure at all n locations
  Clone ID: PAT_MRT4530_38530C.1
ccggccggagcctctgcctcctctccacttattctagaaccttccgcgcttccgtgctccccaccgccacctcgcccgctcgctgtccccagatggccccctccctcctcgccgacggcgactggcccttactcctccacggcgccgccgtcgccagtggcagacgcaggccgctcgtcgccgccgacgccaccggccgccgcgccgncttctacctccgcgtcgacgacctcaagtacgaccctttcaaggtggcgccgtagaccgacacggaagctcgtccgcctcgaacagattcctgagaaatgtgttggaggggtcctgctgacaaaatctgctgataagttagagaggtattggatgggagagattgtgtctgaagcagcagacgctaacgaagttgaagctggaaagaatgacgtctcttgtgacataaatgcacatgaggtggacctgggtaaagacaagaagcactgtatctgccgagaggctg

SEQ ID NO: 34524 - DNA, 197 bp, Oryza sativa
  unsure (1)..(197): unsure at all n locations
  Clone ID: PAT_MRT4530_38531C.1
gcacacacatatatacaacaaagcatatacacttctaaaaaggcaagaaggccccaggcacagagctttatgcggcactcgatacataagactgagctaagtacactagactgctntaggcacatgcagaaaaaacatcgtgaaatacaagggaaagaacagccgcggcaagctagctcacgagtgtataccagaaa

SEQ ID NO: 34525 - DNA, 1098 bp, Oryza sativa
  Clone ID: PAT_MRT4530_38532C.1
atggggtgcaaggcgtgccagaagcccaaggtgcactaccggaagggcctgtggtcgccggaggaggaccagaagctccgcgacttcatcctccgctacggccacggctgctggagcgccgtccccgtgaaggccgggctgcagcgtaacggcaagagttgcaggctgagatggatcaattacctgaggccggggctgaagcacggcatgttttcccgagaggaagaagaaaccgtcatgaacctgcacgctacaatgggcaacaagtggtcacagatagcgcggcatctgcctggccggacggacaacgaggtgaagaactactggaactcgtacctcaagaagcgagtcgaaggcgcggaggctgcggccagaaaatccgccgagccggccgacgtcgtcaccggcagcccgaaccgcagcgagaccggccaagaacgcgtcgccgctgaccggccggcgagctccgagtcttccgggccggtcgagtcgtcgtcggccgacgactcgagcagcctcaccgagcccgcggcggggctcgccgccgtccggccgcacgcgcccgtgatccccaaggtcatgttcgccgactggttcgacatggactacgggactagcctcgccgggacggcgccgggcctgagctaccagggctcgtcgtcggtgcaggtcgacgtcccgtgcggcggcgccgtggactccctgcacgggctgggcgacggcggcttctgctgggacttcgacgacgcggccgatcacatgcagggaggaggagggctctgcgacctgctctccatgagcgagttcctcggcatcaactaggcgggagcgtacgctctttcttccgtacagttcgtcgccgaagtgtaaattcgtcagtttcttttttttccccctctttttcagaggtgtaaatcgtgccgtgcatgtgtagtagttaaacttactggcttgtagtgttgagtttggacttcgaagccatgagttgtgcgtcgaagtacagtcttagctttctcttcataaggttcgtgacttcgtgtatacagctctggttttccggaaaacggttcagaaagaataacagaaacagagcgtcac

SEQ ID NO: 34526 - DNA, 279 bp, Oryza sativa
  Clone ID: PAT_MRT4530_38533C.1
atggggttcgtgggggcactgggcggcagcaagatgggctccaagcgtttgcccatcttttcgcttgttgcgccggccagcgcccagcggcatcttctgcaacgttggccatcggcgtcgtgcacggtgctctcgctctccggaagagaaggtggcgagagtggaggaggaagctattgcggcgtgttcaggccgacgtggacgtatgggattgaggtggtcatgcttgttgacgttcgctacccggttcctagttgtctccgaggccattttttgtag

SEQ ID NO: 34527 - DNA, 2000 bp, Oryza sativa
  Clone ID: PAT_MRT4530_38534C.1
tcagatcatctcagacaagatatgccggtatcttccttattcctctgtcgttttcactgagcaccttcgctccgataattaaatcatacttaaatcgtctgaactttacaccattcctcgtatcaagtttcttctgtacgggatttgcataaaacgtgccaaatcgtttcaggcagttcaccctgtctactgaaatttgttcagatcatctcagacaagatatgccggtatctgccgtagtccgacgtcgtcttgaaggtcggcgtgaactcggagaagaagctcagcatggcggcgaggttctgcgcgctgtttatggccacagctttctccaagaacaggacaggctgcacagttattaccttgtattttctagcgtagcgaagagcctccaggtggtatccgtcttgcagtaacgcagtgacgtagtcatggtgcaagccccgctctctcagcatgtccacgcccatgcttccttgtcggagagtgttgtcgacctaattccatgagttgcatagcaagttcacagactcaaacattgcacttggtgagattgccacactagcaacatgtgatacatgctgcgttgatgtaccagaagccaatggtctgctatcctgccccaaaacttgtggttttctgtcaggagcatcagatgctcctgatgcatcgataatatcatcagaatcagatgatgtatttaacagtgtcctatctacatgttctgccaggttagcaattccatgctcaacttctgaatttgactgcacaggtctatttccatccccacttgctgaatctgggttcacaccgggctgaacaccgggctgttggttttgctcagatgttctcctaactgcaggaagaccacctcccattttcatcagacgagaataggaatcaagaacaacatccattgcctttgcaaccatagtaattggtctcctctccaggatgatagtccggactatagcaaggcttagagtcttaaccatgctagggtcagactttcgtctctgaaggaattccagaatcaaaggagcatcagatgtactagcggcaatagcctctaggtctaaatgaagtttccataagagcccgttctcaacatcacagacgaggtcaggaatgagaaagctccaaccttctccatagagagtcccaccatatgcactagattggctatctggaggttgagctgattgcttattattgctaggcagccccctcacaagcagcgggagtggtgcagaaattggtgcataagagtccataaaaacatcatatagtatgacaacctttgcatctatttggtgaaccatgattatgttgtcaaccgcactaactgcaattctacttgaataagttggcagagtaccctgttgtacaacagcatcacggtagaaacgatacaagttcaatgtcatactaactctgtcaagctgcaagcaataaatcctaccatagctgatatccagtaaatagtgtgcattgcattcattgatcttctttgagtctaccaagtgaagagcatttgattgaggttcataagcaaacagatccaggccacttgtttttattattatgacatcacaagtggggcagtctgtccaaaaaaagccaagtatagtttcagaatcagctctgcactttttattacaggtttgtcctgtttccctatttataaattcaacctcatgattggatcgttgtatccctatggctttcagatccagggaatatcgaactgataaaacaggtccatcatttacaggatcagagttcggaggtccagctggagtagatggaactatcttccagtataatatcacagtctgcatgcatgatctgagtgctagaaactccttagcacacatattttgttcaatctcagggaccttttctgctatgcacctcccataatcttttgcctgggacgcgcaggcggcgaggatccgggccagcgcggaggatgcaaccgccgggttcctctccttcat

SEQ ID NO: 34528 - DNA, 657 bp, Oryza sativa
  Clone ID: PAT_MRT4530_38535C.1
tcacgagtttctctgtttggtcccgggtcttagcgccacgtcgacgaaaatcctacatagcacaacaaggttctgcttcacgtcctcgcactgtgaagggccctcaaagcctccagctctcccctcagcttcaatggaaccaggtttttccatggagctaagccttgacttggactgcagcgggaacaccactccacaggcatcctcgacagcacggacgaagccgacggcgaccgacgacggggagcaatggagggcggcggcgacggcaggacgatctccggaaccaccggcgaacggcacggagtaggttccggcggcggacggggtggcccgtacgatggcgaatgcggcggcgtcgtcggcgcggatctgcgcggcggctagcggcgaccggagcggtggcggcggcggcgaagaggagggcgacggcgctagggcgttagagggcacgggagggctcggcgagatggggaaaaagagagaggggtggcggtgacgcgcgcggtacgggtaaccgtacccccgcggtacgggcggtaaccgcggtaaccgcgcggttaccggcggtttttcacacctgttgagataatttctatcttcgctcttcagtttcctcacttcctccacatcttcaacaatctccctttgtgccat

SEQ ID NO: 34529 - DNA, 147 bp, Oryza sativa
  Clone ID: PAT_MRT4530_38536C.1
attggcactgttgccagccactcactcgccgtcaccaagatcagtgcacccactgccaccatcatcgttattgtccaccccaagttgctaccgatgcctgcggacatcaagccgctgccctccacccctctcctttcatggccgtga

SEQ ID NO: 34530 - DNA, 424 bp, Oryza sativa
  Clone ID: PAT_MRT4530_38537C.1
gtaggctaagctagccatgccgtgtaggtaacccttaatataagcccttgagcaataggaattaaccattgatcatacatggcaaatttatgttatctataagcctttaaatgccttaatctccacggtaagacaatcacattggcatggccgtgatgtcatcgaaattccacatgagcggagccgccacctcttggctctgtccgtacgtcatcgccggcgccaccgccgacaccggcacgacgacggcgccaccgccgacggcgctgaactcgtaagcaaccgccggcggcggcggctggaagtaaacgctggccacgtcgacggcgtcattaacgctgtactccaccgccgtcgtcgtcatcagctgctgctccctcagtccggcggcggcgggcgtcatggccatcgggtagaggtagga

SEQ ID NO: 34531 - DNA, 330 bp, Oryza sativa
  Clone ID: PAT_MRT4530_38538C.1
atgaagatgcgctcgtcggcgttctcggtgtccagggcgccgccgtgcgtcgcttcgccgttcccgtcgactcaagccatcgttgaccgagccactgcgccaaaagcatcgccggcatcccagaaggagcccgaaggccagaaggagccgacgccgtcgacctgccgttctctgccgccgctggagcatttcgaaggtcgccattgccgtccatccatcgccgaacctcagacgaccttcaccgcatcgtcagaaccgccaccgatcgccgccggcatcggcaacaacgtcgccgggcgccatcggctctgccgctgctctttctaccga

SEQ ID NO: 34532 - DNA, 470 bp, Oryza sativa
  Clone ID: PAT_MRT4530_38539C.1
ctccccaaccggaacacccactccgacgagaacgacatggacgccggcggcgaggaggagaagcaggagcgccaccgggttgatggtgcttcgccttccatggtcgccctccgctccgacgtcctccacgccaattgctgacgctgaagagaatttgggtgaggttgaagtgcgtgaggcccatatagccaaatccttgtacttcataagggttggggagaaggtccttggagggaagtctcataatcaggacacttctgaattggtcacactgtcatgcaagaatatgataaaagatcacatggtattgacttcctcaatcgggactttgttgtccgaggtaaattgatatacatgctcggtgtctgtatgaagtgcatggcaatgcatccggaagcatcagctgttgccccaggtcttcttgatatgatcagatctagagctgtttgacaacatcctgaagcatatgt

SEQ ID NO: 34533 - DNA, 711 bp, Oryza sativa
  Clone ID: PAT_MRT4530_3853C.1
atggagccgagatctccgcgcccgtttcctctctctccggccgccctctctccctcccgttgctatataattgctccccgagctccgctcttccgtttccgccgctcgccgctcgctctcgccgtcggaatcgtgctcgcgccgtgctcctctctccccgccgtcgccgccgagctccgttccgccgccgccgtcgctccggtcctccttccgactcggcgacccctccgtccgcttcgccgtgttgccgccgaccccgtccgccgctccgcttcgcccgccgaccgtcggagcgccgtcgccatcgtcatcccgagccgcgccgccgtcttcttccgctccggccgccgttctcatcgtcgtcgttgtcccggggtgagccgaggaccgccgttcgccttcccccttccctcctctctctcgggcgccgctccgccgcgccggtggtcgccggcggtgaccatcggggcgcgggcgcgccgctcccgtcggccgcgccggcgaggccgccctcgggcgcgccctcgcggctgccaagtgggcccggccgtcagccgcccgcgcccgcgggtgcggctgacgcgcgggacccacggcgccgaccgccgccagccgcgtgcgcccgacgctgcagcttcggaagatccgttcttcgtggaagtcgaagccggcgtttgggaaagcgagcaaggcaagtcacatcatccttga

SEQ ID NO: 34534 - DNA, 258 bp, Oryza sativa
  Clone ID: PAT_MRT4530_38540C.1
atggctaaacaacttaaccaaaacggcaaaaccctggttccagattttcatcgaaaacaagaagctgttctgctcaaggcaatttcatacgagcaccactcacagaacagtacatctttggtcgctcacttcgccttcgatggctccggcaggaatggatggatgaagataaaccatggaagggctcaaatctaccatgtggctacagggatcctcaccaaaggaattaacgccttccctctactagttggtgactag

SEQ ID NO: 34535 - DNA, 186 bp, Oryza sativa
  Clone ID: PAT_MRT4530_38541C.1
tgaccatgattacccaacgctgtgaatacgtactcactgatgagggtaaagctggtacgcgctgttcaggtaccgggtccggaattgcccggggtcgacccacgcggtgccgcggacgcatgggggtgttggataagcatgggactacatgctggcgcctagtgatacattgcctagccagtcttc

SEQ ID NO: 34536 - DNA, 346 bp, Oryza sativa
  unsure (1)..(346): unsure at all n locations
  Clone ID: PAT_MRT4530_38542C.1
tgcccccgccctttttttnncggggggttgggggggaattcggggttctcattcctgcgccaaacagctacccaccggtactagcgcaacagaggggaatgcatagaacagaagaagtcgcctgcgaaaaccgcgaaatgtgggagcacccgaaagagggaatgccctattgcttattatacagtgacgatctgcctacaaaaagtatagcttgcaagctaggagccgccatgggatctgaaagatgacatggactgcgctggactgggccgagggctgtttctcctgctccttggcgcttcccttcctatctgcgcacctcgggctctgccacgccccgggccgc

SEQ ID NO: 34537 - DNA, 411 bp, Oryza sativa
  Clone ID: PAT_MRT4530_38543C.1
atggacggcgacggcggcggcggatgggacgatcagggcaacggcggcggcgagacgaccaagtaccgtggcgtgcgtcgccggccttctggcaagttcgcggcggagatccgtgactccagcaggcagagcgtccgcgtctggctgggaaccttcgacaccgccgaggaggctgcgcgggcttacgaccgcgccgcctacgccatgcgcggccacctcgccgtcctcaacttccctgctgaggcgcgcaactacgtgcggggatcaggctcgtcgtcctcgtcccgacagcatcagcagcggcaggtgatcgagctggagtgcctagacgaccaagtgctgcaagagatgctcaagggtggcgacgatcagtacaggtcagcagctgggagcaagaggaataactactag

SEQ ID NO: 34538 - DNA, 556 bp, Oryza sativa
  Clone ID: PAT_MRT4530_38544C.1
aatagctgccaaaattttggcaacttactatatcatctcgtttggcgttggacgtctgaccagcgctactctgcgcgttcggcataccaggcattcttccatggtcagcattcctttgcctgtgctgatcttctatggcacgcaaagggtcctgctaaatacacgttcttcctttggtatgcattctagcagcgctgctggacggctgatctcctccataagtgtagcatcgatagtcacttggcctaccttttttgtgcttaggatcttgagacggcgaaccacatcctccttgactgtgtgtttgctcggcaggtttggctccgtgtgctgtcacctcctggctgggctgccctctctcccccgtggcagctggttacaggactggtggctgtcctctagggcctgcttacttgagcatctctgtgctggcttcgactccctggtgctcctggtctcttagcagctgtggaagaaacggaactctagggttttcgactctgcgctctctttagtctcagtggttctggagtccatccactcagagggctatcta

SEQ ID NO: 34539 - DNA, 1392 bp, Oryza sativa
  Clone ID: PAT_MRT4530_38545C.1
atgggctacaaggtgaaagagtcaagtttgaatgagggggataatgaaagcttgatgaaaccttttgagttgtcagaaattgatcatgtcatgaagagtatgaaaacaaatactgcccctggtcctgatggttttccagtgggtttctataagaaactttggcctgaatttaggggtttgatcaaagagatgcttgatgatcttcagagaggaattttagacagtgataggataaattatagggtgatttctctgctgccaaaaattaaggatgctaatacaataaagcaatatagacccatttgtcctcagaatgtgattctgaaaattctaactaaagctttaaccatgaggataactggtgtgattggggggattattaactggacacagactgcgttcattcctgggaggtatattttggatgggtgtgtaattctccatgaggttttgcatgagctccataaaaagaaagaatcgggtgttatctttaagatagattttgaaaaggcttatgatagggtgcagtgggggtttctttatgaggtgatgcagaagaagaattttaacatcatttttattgaatggattaagaagatcactgaagggggggatgctttgtcagttattctggatggtgctaatagtaatggggttttggaggggttggttcttaatctggttccagggggtcttactcatctccagtatgctgatgacactattctttttactaaagctactaaggaaaatgtgttaaccttgaaattcttgctgttctgttttgaagagatgtttggaatgaaaatcaattatcagaagagtgaggtttatgtgttgggggttccaaaggatgaggaggaattgtatgctgacatgcttaattgtaaagtgggctctcttccttttacttacttgggtttgcctatgggggttggtaaggaggttatgggtgcccctaattgggttttgtcctttagaagaaatctagatcagtctgacaaggctcaattagacgttttgaaaagtttgctgcaggatgtgaggctagatgttttgcctgacagcttaatttggcctcatgagaagaataagaagttcactactaaatctatgtataggttgttaaagtttgggggtgttgtggacaaagagatgaaagagatttgggggtgcaaagttcctttgaaagtcaagcatttcttgtttttggctgggagagggagaataccttgcgctaaactcttagttcagagaaattggaagggagggaaggtgctgctgtcaaaggaaagagatcgcgaagctctgaacgcgctgcttgagaagctgaaggctaagctggagtctctacgtccagtgaatgtgctaccggacaatattagtgtttaa

SEQ ID NO: 34540 - DNA, 400 bp, Oryza sativa
  Clone ID: PAT_MRT4530_38546C.1
cgccgccgccttcgtcctccctcgccaccaccgccaccgagcccgccgcttccaccgagcctctacaccgaccagcgtcggccttcctcgtcgtggtcgcctgcctcttcaccgacgcgaatagctgacccccaccgagcccggcgatgtccttcctcatcgtcgtcgcctactcctcaccgacgcccgacgccgacctgcctgaccggcgccgccctccaccgagcccagcgctaccgccgcgaactccttcgccgagcccggcaccaccgccaccgagcccagcgccgcctccaccaaccagcgacgccctccaccgaacccggcgccaccaccaccgagcccctccccccccggctgtcctcaggtgagtcctccatcgcgccgccctctgctacct

SEQ ID NO: 34541 - DNA, 2653 bp, Oryza sativa
  Clone ID: PAT_MRT4530_38547C.1
atggcgttggagacgtgcttcagagcctgggcgactctgcacgccccctatcctctttcgcctcgacgcaaaaaattttctcctcctctttctcttctctctgtgtcactgcgtgtgaggagcgtagcttagagtgagaaaataatggcgttggagacgtgcttcagagcctgggcgactctgcacgccccacagccaccgtcctccggcggcagtagggacaggctcctcctctccggcgccggcagcagccagtccaagccaaggttgtccgtcgcctcaccgtcaccgctccggcctgcctcccgcttcgcctgccagtgcagcaacgtcgtcgatgaagtggtggtggcggacgagaagaactgggacagcatggtgctggggagcgaggcgccggtgctggtggagttctgggcgccgtggtgcggaccgtgcaggatgatcgcgccggtgatcgacgagctggccaaggagtacgtcggcaagatcaagtgctgcaaggtgaacacggacgactcaccaaacatcgccaccaactacggcatccggagcatccccaccgtcctcatgttcaagaacggcgagaagaaggagagcgtcatcggcgccgtccccaagaccaccctcgccaccatcatcgacaagtacgtcagcagctgattgcatcatcatcgtcgtcttcttcctcttcttcttcagctgcatcaatcaaatcagacttgatcgatcagagcttcgtttgtaagttgtaactaagctaccccctgctttgcctctctatgtgtatcgccagccacccctttctcttcatcgtccttaattgttgtaatcctactactccatggaatcaatactgtaactattattgattgatgataccatcttttgactagcaaagaaaaatatgaatggaatcaaactgtgctacatatacatagatgattgggatcaagcggccttgtctttaagaatggtgattaaaaataagaaggatggacagaattgggagctaattaacgtttatggtcctgctcaacaggcacataggggggagttcctagctgaaattggcaacaaagtacagcaaggagtttatcctatgattctggggggtgatttcaatctgtatcgatatctagatgagaaatctggtggtggtggggtggatgtgagaagaactgaggctttcaataattttattaatcattatgagttgcaagaactgtttaagttaggggggaaattcacctggacgaataagcaaatcaatcccatcagatgtgttctagatagaatcctggtgacctctagttgggatcatttataccctttggccatagttagttctcttttgagggttggctcagaccattgccctttgctgttagacactagggagggggagagagttaggggaaacaattttaggttcgagatgggttggtttgagctggagggttttaagaaagaattgcttgagaagtggcctgccagaatacagagcaaaataatggattactggcatctccttatgccttatctgaggagatggttaagggggtggagtgctaatatggtgagcaaacagaaaaagagaaggaaagagatagaacaaaagctgactgaaattgataacattgctaaggagagggatttgtttcctcaagaatgggagttgtttgggagggaagaactgagaaacattcatttggagcagggggtttgggctaacaggttaagtttgaatgagagggataatgaaagcttgatgaaaccttttgaattgtcagaaattgatcagacttttaggggtctgaggcagggggatcctctgtctcctatcttatttaatctaataggggatgctttgtcagttattctggatggtgctaacagtaatggggttttggaggggttggttcctaatctggttccagggggtcttactcatctccagtatgctgatgacactattctctttactaaagctactaaggaaaatgtgttagccttgaaattcttgttgttctgtttcgaagagatgtctggaatgaaaatcaattatcagaagagtgaggtttatgtgttgggggttccaaaggatgaggaggaatcgtatgatgacatgcttaattgtaaagtgggttctcttccttttacttacttgggtttgcctatgggggttggtaagcatgtgaggctagatgatttgcctgatagcttaatttggcctcatgagaagaataagaagttcactactaaatctatgtataggttgttaaagtttgggggtgttgtggacaaagagataacagagatttgggggtgcaaagttcctttaaaagtcaagcatttcttgtttttggctgggagagggagaataccttgtgctgaactcttagttcagagaaattggaagggggtagtgtacaaggcaatttccttgatgcagaggtggaaggtgctgctgccaaaagaaagagatcgcgaagctttgaacgcgctgcttgagaagctgaaggctaagctcgactctcttcgtcctgtgaacgtgctaccggacaatattagtgcttcagtgttgttgctcttggggttgaggtctcttagtcgtttggatgtctttcttggcagggcttgtacgcattga

SEQ ID NO: 34542 - DNA, 820 bp, Oryza sativa
  Clone ID: PAT_MRT4530_38548C.1
gagtgagaaaataatggcgttggagacgtgcttcagagcctgggcgactctgcacgccccacagccaccgtcctccggcggcagtagggacagactcctcctctccggcgccggcagcagccagtccaagccaaggttgtccgtcgcctcgccgtcaccgctccgacctgcctcccgcttcgcctgccagtgcagcaacgtcgtcgacgaagtggtggtggcggacgagaagaactgggacagcatggtgctggggagcgaggcgccggtgctggtggagttctgggcaccgtggtgcggaccgtgcaggatgatcgcgccggtgatcgacgagctggccaaggagtacgtcggcaagatcaagtgctgcaaggtgaacacggacgactcaccaaacatcgccaccaactacggcatccggagcatccccaccgtcctcatgttcaagaacggcgagaagaaggagagcgtcatcggcgccgtccccaagaccaccctcgccaccatcatcgacaagtacgtcagcagctgattgcatcatcatcgtcgtcttcttcctcttcttcttcagctgcatcaatcaaatcagacttgatcgatcagagcttcgtttgtaagttgtaactaagctaccccctgctttgcctctctatgtgtatcgccagccacccctttctcttcatcgtccttaattgttgtaatcctactactccatggaatcaatactgtaactattattgattgatgataccatcttttgactagcaaagaggaatcaaactgtgctacatatacatatatgatggccacatctgtttgg

SEQ ID NO: 34543 - DNA, 441 bp, Oryza sativa
  Clone ID: PAT_MRT4530_38549C.1
atggccgtgggaggcggcagaccggcggtgggcggcggcgccgccgccgaaaccgtggggtcgggagcgggcgcgccgttaacaccttttgaccagccggcgaggccaggtgggacgacggcggcggtgcaggaggtgtacggtgctgagaggaggggagctctcgaggctcgaaagatttatgttggcatgtacgcgtcgtatgcaagcactaggccaaatgctcctattagtttattgaagccaaagaccaaatggatcaggccaggcctcgtgtttcctgtcaacagtcggccaccgcctaccccgccgctcgctgcagcctgccggcctccgctcgtcgtagccgtcgtcacgccgcccattgagatgccgcccatcgccctgccgcctcacctccacccgtcgccccacctccgcccgcctcgccgcttgttgtag

SEQ ID NO: 34544 - DNA, 573 bp, Oryza sativa
  Clone ID: PAT_MRT4530_3854C.1
atgattcgagagcaaaccttctctggtggtattagtgaaaacccatacctccatcttcgggactttgagctagtgtgttcatgcctatccatcgtaggcatgacacatgaaactctaaagtggaagttgtttcctttttctcttagagatgaagcgaagcaatggtacactatgtctgtcaagaaattccacggtgaatgggaggagcttaagagcaatttctaccttactttctttccattaacccatgtaatcaatcttcgattagacattctttctttccgacagaacgagaaggaatctctcggtgtagcttgggccagggatgatctttatgaagattatgagaacaccttgaattattccagcaaaatcaaggctcatcccaagcatgagccattcgaggagagcgatgtcctcaaggtcgagcttgtgaccataaacaaagcactgccaggagataccccggattatcatgatgtatcctacgtctctatagtattgtgccatcggatcacgccttcaaggcacatggttcttgcacccaaggaaaattttccaattgacgggtga

SEQ ID NO: 34545 - DNA, 162 bp, Oryza sativa
  Clone ID: PAT_MRT4530_38550C.1
atgcaaatgtctgaaaagaaggcgcttaccttggcacccgacatccagccgacggccatcagcgtgttcctcccggagaaggcgaacggcgtcccggcaagaggcagggtgtcgaccgccgccgacgctgctgcaggcgtcgacacgttgctctatcgatga

SEQ ID NO: 34546 - DNA, 423 bp, Oryza sativa
  Clone ID: PAT_MRT4530_38551C.1
atggcggccacggcggacggggagggcgaggtggcgccgacgtggcgccacgagggcaccttcgtggggcaacacgtggacgacccagatcggccagagcagccgatcgggcggccacgggcaagtgcggcacggcaaggggccaggtggccaggggcgagcagggcagcggcagccggccagaaggcggcggcgctcagccatatggtcgccggtggtgggcggcggcgacacacacgggaggcggcgtggaagggagagggggctcaccaagaggacggggatggtgaggcaaagacgggaaggcgactgacgacgaggattggcggcggcgtttctcgggttggggtcggggacggcgcttcggcgactcccgaccgcggcagaggtgcggccgagggccagcgggacctggggagctaa

SEQ ID NO: 34547 - DNA, 813 bp, Oryza sativa
  Clone ID: PAT_MRT4530_38552C.1
tcagacgcccccaagtccgagcatgccgtcgtcatcgtcgtcgacgaagtggtcggggcgccatttgcggtggctggcctcctccgcccgaatcttggactcctcctcctgtttcccctcatctgcaatgagcctcatcctgaaaacatccagaagatgcttctcgtgtttacccacgacgaggcgggtaccctgggaagcatacatcgcgactgtgaccaaatccttggcccacgcctccttggggagcttgtcggccttgatgccgaaaatgttgaggtagtatggcagcgcgtagccatcggggccgcaagcgaaactgatgcagctgtgcaggaaactgaggagcccgtccgggaatccccttgtgactgggtcgccgtggtagcactgccaaaggtaccaatggtacctcagcagcgtgcacgtcgccgccaggggctccatcggcacctcatcggaatcagcaagctccttgaggttcttgaacgtgccgattatttcctgcacgtcctggcttgcggcgctcccggccgatggcggcggagtctgctccaggaggtccagcgcctctgcagctgaccatgcgatggccttgtacggcgtcactaccttggtggagtcgtcgtcccaggccagccatggacctgggttagcagccgcctgtgccaccgtcagcctgaggggacggccggcgccggcgaagcgcgcgaccggcggcggcaggagacggccacggccagcaccaccaccatggccggcgcctccaggcaggcacaggacggggcacccgaggatgaacaacgacgacat

SEQ ID NO: 34548 - DNA, 1287 bp, Oryza sativa
  unsure (1)..(1287): unsure at all n locations
  Clone ID: PAT_MRT4530_38553C.1
atggatctgcaggaggcggcgatggaagccaggaacggccatcggatcccgccgacggaggagaaggtcatcatcgacacggatccagggatcggtacactaattctgatttctccacttctcctacctgcatctgtgactgtgatccatccatccatcttgacaattactaattcatatcaattcccagatgacagcgtggcgatcatgatggcgttcgaagctcccggcgtgaagtgcgacagagcaggccgtcctgaggtgccggtagcagagggcagcgctgagcctctcaagggagggaaacctcacgttgctgattttgttcatggatcggatggacttggtaacacgtcctttcctgatcctaccaccaccaacaaagttgagcagtcagctgcagagtttctggttgataaggtatcagaatctccaggagagatctctgtactcgccttgggccctctcactaatatcgcattggccatgaagaaagactcctcctttgcaagcaaggttaagaggatagttgtgctgggtggagctttctttgcagctgggaatgccaccccttcagctgaagcaaatatccatagcgacccagaagcagctgacatagttttcacttctggggcagatatctacgtagttggccttaacataacaacccaagtctacttcacagacaaggatatgttggagctaaggaactcgaaagggaagcacgcacaattcctttgtgacatctgcaagttctacagagactggcatgtccactcctacggcgtcgatgctctttttctccatgatcctgtgagtttcaccgcgctagttcaccccgagtacttcacgttcaagaagggcgtggtgagggttgagacccagggcatctgcaaggggcatacttccatggacatgggactgaagaagtggaattcagacaacccgtggactggttactctccgatctcggttgcttggactgttgatgttcctaaggttctggcatatgccaaggagctactcttcaacgcacaatgaaaatgtaaccggatcagtgtcatctctctctctctctctctctctctctctctgaactcttgaactctgatgtgattgtgtcagaattggcatgcaaatatatctttttttttgggcacaagcagagatatcttggcattgttgtgtactgcagaaattgtatcatatcatttattctgatgaattgcaaattattgatannngttttgnngcaaaaaaaaaaaaaaaaaaaaaaaaaaaaaaaaa

SEQ ID NO: 34549 - DNA, 402 bp, Oryza sativa
  Clone ID: PAT_MRT4530_38554C.1
tgccgccctttttttttttttttttttttttttttttttttttttttttttttttttttttttttttttctttttgagcacaacaatttgcatcattatttttttccaggcgaaggcggtcacccttcttcggctcccttcttctttccccggggttggccatgggagcctttgccaccgggaccccctggggggggaactccggggccccctggggcatgggggtgtttcgggccgggtttcccttccccacccggggcttcccgggggggaagctccggggggcgttctcgcccggggggggggccacgggggggtcgggcgggtggcttaattctttttcggggcttacccccatttggcctttcctttccctcggggaagagactttaagctttgagc

SEQ ID NO: 34550 - DNA, 470 bp, Oryza sativa
  Clone ID: PAT_MRT4530_38555C.1
agggatttagctttgcgaagatttcaaagtaaaaaccgctcctcaccggttttccaaatctgataaaaaacccggtaaaaaccaatgactttgggttgacgcccgtgcgaaaaccgtctaataccaatcggttttcataaaccaagacctagcggtttcacgaaagtcgatcggttctcgctaaattccatcggttgggtgcataaaaaaaaaacagaagggcgaaacagccatcagcagggaaacctgattaactgacagctccaccccgttttgctattccaggggggccctctgcaacaacacaaggtttgcctccacctctcttgcatttcctattctctcaaatactaggacgcgcaccccgcgcgccattccgcttccccctcccctcctctcgctctcgctgcgccgctctagaggatccaagcttacgtacgcgtgcatgcgacgtcatagctcttctatag

SEQ ID NO: 34551 - DNA, 294 bp, Oryza sativa
  Clone ID: PAT_MRT4530_38556C.1
atgtcatttaaggataaaaactcattgagcacctccctcacagaagaaaacataacaccatttccagctgaaagaacacaactatatgatttgggcaccatgaagttttgctctgattcgtcaggcggtgatgagccccgtgctccgattgctggtgatggcggctccgacgagccagccaagaggcagtggactgatccgtcctctaattcgagccagggtgaggcctcctcttccttgctaagggtgaaaacaggtcaggttcggtcggatctcacccttcccatatactaa

SEQ ID NO: 34552 - DNA, 1095 bp, Oryza sativa
  Clone ID: PAT_MRT4530_38557C.1
atgtgcccctgttttggttcaagaaggaaggatgggagcgaagaccctgttcttggaagggatggaaattccttgaattcttctgagctgaggtcaatgtctgatagagttcctccaagccctcttcgagtacctgcaagtccatctagattttcattgtcttcatcaccaagtagaaatgagccattgaacctgagtcttgaacaagttattaaactgacacataactttgcaccagacctgatgattggtgaaggttattttggaaaggtctacagagcacagctgcgagatggccacattgtggcaattaaaagggcaaaaatgtctcgctggttgatccatttttgtgtagatcagtacggtaatgaaacagtaatgcactggaatttggtccaattacttggttatatcgacaaaagaaatgaacgaatcgtcataactgagtatgttccaaacggcactcttagggagcatctagatggtcaacgtgggcttgttttaagctttaatcagcggcttgaaatagctatagatgttgctcatgggttaacttatttgcatctatatgcagagaagcccataatacacagggatgtgaagtcatcaaacattctactaaatgaaggcttcagggccaaagtggccgactttggatttgcaaggactggtcctacagagccagaccagtcacagattcagactgatgtgagaggaacagctggctatgtagatccagagtatctcaggacaaaccatctgacagtcaagagtgatgtattctcttatggagttttgctcctggaaattctttctggtcgtcgtcctattgaggtcaggagagctgcaagagaaaggatcaccgtgagatgggccttcgagaaatacaacagaggtgatgttaaggaaatattggatccaatgttgaccgagtcagtaaatgaggatatactgaataagattttcgatgtagcattccaatgtgttgctcctactcgtgctgacaggccaacaatgaaagaagttgcagagaggctgtggaagataagaagggattatgcaaaaacccaacgcagagcagaaatggctctgtaa

SEQ ID NO: 34553 - DNA, 141 bp, Oryza sativa
  Clone ID: PAT_MRT4530_38558C.1
tatgacatcccgtgcagaccagaacgtcctacgaatgtgctgcctatggtggacctggtggatggaatgcactcgtcgttcgcagctcagggtcagcattggtggtgcctcatgactgcaagcgtcttgacaccaaactaa

SEQ ID NO: 34554 - DNA, 207 bp, Oryza sativa
  Clone ID: PAT_MRT4530_38559C.1
tgaccccgccagggaccgtgccggaaggcccggggcgacccacgcggccgaaagaggggaaggggacgcaaaaccaacgggacgaaaagcagcagagccacgaagcaacagggcgccacgccgcactggaagagccagcgatggggagcccgcggaaggggaggttgaaagaaggagcaccagacagcgggggcacacagggacggg

SEQ ID NO: 34555 - DNA, 5173 bp, Oryza sativa
  Clone ID: PAT_MRT4530_3855C.1
atgtctttcgtgattagtctcacacctctcatcataataaaagaactgtgcagccgggatggttgttcagaacggttgggcctatgcaacaggatgccgcgctacaagcctgagtacttgtttggtgttgagggatttgtccaagagttgtgtacgatgtcctttgccataggatttgggactgcccctttttatgcccagattcctcatgatcgtcatgaagagaagtgccgagtcaaagtcactttgaacagtaatagtgatgaaatcccctcagtgatgttcgaagctggaggaagaaactacatccatgcgtgtcaggaggtggcaaggatcgccataggagagctccgcgatcgctattgtgatcagttggccgacactgagtatcgctaccatcctcgccaaccacagggaagtgatcgtggcagctaccttgagactgaaggaattgagaatgatgctaccacaaggcatttggttgagatgctgtgggctatggatgaaacccgtgcggagactgtgttagcagctcaagatcgtgaagaccggaatcgtggtaagatttgcaagctagaggacaaagtggatcgtttggagaaggaactagccgcattgaagggagaagcaccaccgcagaaggccagggttcgtcttaccgcaaggaagagagctctatttgtccctcgttaccaattggcgccaaagttttccccggtttctcttcttgtgctcctgtccatgccagatggtgctcactcgtagcaacgggaatggccccaacaacaacaacaataacaacaacaacaatggagagaatcccacacttgcccaagtcctggctcaacagacacagcttatgaacataatgatgcagcaactccagaaccagcagaaccagggaaataaccatgcacctccccagaacaagttagcagaatttcttcgtgtgaggccgcccactttctctagcaccactaatcctgttgaagctggtgactggctgcacgccatagaaaagaagttggatttgcttcagtgcactgatcaggagaaggtctcatttgcatcacaccagctgcatggccctgcctctgaatggtgggatcatttccgccttaacaggactactactgaacctatcacttggcttgagttcaccgctgctttccggaagacgcatataccatcgggagtggtgtctctcaagaagaaggaattcaggtcgctcactcaagggtctcgctctgttacggagtatctgcacgagttcaatcgtctggctcgttatgctccggaagatgtgcgcactgatgaagagcgccaggagaagttcttggaaggacttaatgatgagctttcttacccactcatgactggggattatcctgatttccagaagttagtggataaggctattcgtcaggaggacaagtacaaccgcatggaacagaagaaacgtcagattgctcaattcatggcacaacaggggaatagtcagaggccgcgtcttactttaggaccccagtccatgcctcagggaggttcttcgtctgttgttcgtccgcagcgtcagttcttcaacaacaatgctggcaacaacctccgtaatcaagctccacgccctgttgcagctccaacacagcaacagcctgccaagagggagcaaggcagcaagcccgtggtgtgtttcaactgtggagacccaggacattacgctgacaagtgtccgaagccccgacgcgtgaaggttgtccctgcccagagcaactctaccgcaccagcatcaaaggcccgtgtcaaccatgttgctgctgcagaagctcaagatgctccagatgtgattttgggtacgttccttgttaacctagttcctgcaacagtgcttttcgattctggtgctacacattcattcttatctatgagttttgcgggaaatcatgggatggaagtagaagatcttagacgtcctttgatggttagtaccccaagtaatcaagcactctctttgcaacgtagcccctctgtcagaatagaaattcagggagtaccatttctggccaatcttatcctgttagaatccaaagaccttgatgtcatcctagggatggactggttagccagatataagggtgtgatagactgtgctaacagaaaagtaactctcaccagcaatgatggtcgagttgtaactgttcatgcattgtcttctgagtctttaaggtcaagactgaaccaaataacgttggaagagattcctatagtccgggagtatcctgatgtgttcccagacgatttacctggtatgccgcctaaaagggatatagagttcagaatagatttggtaccaggaacaactccaatccacaagagaccttatagaatggcaaccaatgagtttgcagaagtcaagaggcaagtagacgatttgcttcagaaaggatacatcagaccgagttcatctccatggggagctccggttatttttgtggaaaagaaagatcatacccagaggatgtgtgtggactatcgtgctctaaatgatgtgactatcaagaataagtatccgctacccagaattgatgatttgtttgatcagcttaaaggtgccaccattttctccaagatagatcttcgatcagggtatcaccagttgagaatcaaagaggaagatatacctaagacagcttttaccactagatacggattgttcgaatgtactgttatgtcttttggacttaccaatgcccccactttcttcatgaacttgatgaataaggtgtttatggaatacctagacaagttcgtggtagtctttattgatgacattcttatctactcccgaaccaaagaagagcatgaagaacatcttcgccttgcactggagaagctgcgagaacatcagctgtatgctaagtttagcaagtgtgaattttggttgtcggaagtgaagttccttggtcacgtcatctcagcaggaggagttgccgtcgatcctagtaatgtggaatccgtaaccaactggaaacaaccaaagacagtttcagagattcgcagtttcctaggcctcgcaggatattatcggaggtttatagagaatttttccaagattgctaagcccatgacacgactgcttcagaaagatgtgaagtacaagtggtcagaagaatgtgagcagagttttcaagagttgaaggatcgcttaatatcagctcctattttgattttgcctgatccaaagaagggttttcaagtgtattgtgatgcatccaagcttgggttaggttgtgttttgatgcaagatgggaaggtggttgcctatgcatctcgtcagttacgtccgcatgaggagaactaccctactcatgatcttaagttagccgcagtggttcatgcgttgaaaatttagcgtcattatcttttcggtactcgtacagaggtgtataccgatcacaagagtttaaagtatatctttactcagccggatctgaacatgagacaacggagatggttggaattaattaaggattatgatatgggaattcattatcacccgggaaaggctaatgttgtagcagacgctcttagcaggaaaggctattgcaatgctacgaaaggacgacagttgccattggaattatgcaaggaatttgaaagatttaatttgggaattgccagtagaggtttcgttgcagccttagaagcaaagcccattctaattgatcaagttagagaagcccaaattaatgatcctgatattctagaaatcaaaaagaatatgagaagaggaaaagctatcggtttcttgagggatgagcaaggaactgtatggttgggcgagaaaatctgtgtccccgataacaaagatttaaaagatgcaattctgaaagaagctcatgatactttatattccattcaccttggtagtaccaaaatgtaccaggatctcaaggaaagattttggtgggcaagtatgaagcgtgaaatcgcagagtacgtagcagtatgtgatgtttgtcagcgagtcaaggcagaacatcaaaaacctgccggtttgttgcagcctttgaagattcctgaatggaaatgggaggaaatcggtatggatttcatcactggtttacccagaacgtcatcaggccatgactctatttgggtgatagttgacagacttaccaaagtggctcatttcatcccagtaaacacaacatattccggaagtcggttggcggaattgtatatggcaaggattgtgtgtttgcatggcgtccctaagaaaatagtgtctgatcgaggcagtcagtttacttcaaatttttggaagaaacttcaggaagagatgggttctaagctgaactttagtactgcttatcatccgcagacagacggacaaaccgaaagggtgaatcagattttggaagacatgttgagagcttgtactttagacttcggtggaagttgggataagaatttaccttatgcggaattctcgtataacaacagttatcaagctagtcttcagatggctccttacgaagcactgtatattcggaagtgccgcactccgcttttgtgggatcaaacgggagaacgtcaggttttcgggacggatatcctgagggaagtagaagaaaaggtgaaaatcattcaagaaagattgcgagtggcccagtctcgtcataagagttatgccgacaatcgccgcagagatttgagttttgaagaaggagattatgtgtatcttcgtgtcacgcctcttcgaggagttcatcgttttcacaccaaaggaaaattggcaccgcgttttgtgggaccttataagattgtcagtagaagaggagaggttgcttatcagttggagttacctcaatctttggcaggagtccataatgtgttccatgtgtcgcaattgaaaaagtgtttaagggtacctatcgaagaagctaatcttgaacaaatagaagtccaagaggatctgacctatgttgagagaccaatccgtattttggaaatagatgagagaagaaccaggaatccagttatccgtttttgtaaagtccaatggagtaatcattcggaagaagaatcaacttgggaacgagaagatgaattgaagtcagctcatccgcatctgttcgccagttcttccgaatctcgaggacgagattctgtt

SEQ ID NO: 34556 - DNA, 1200 bp, Oryza sativa
  Clone ID: PAT_MRT4530_38560C.1
acggaagcagaccccgtgtgtcaaccgaggcgagtggctgacaaacggactccactagtcaccatgtgggctgcacacgtggaaaccacatggctaccgagcgggcacactaacacggtcaccacacgcacacacgaacgactaccgacaccggtacacgggtaccggggtcgacagccgcacaacgggcacgggacgacaccgaaaggacgaggacgggagcagcgaaggagggatccttaccaccacgcaatgaggtgtgggaacgacaacgacgaacgggcggcggtgacgaacgggaacgacggagacgacgacgagggaacgacttcggcggttatccttggacgaaggcgagacgcggccggcacaaggcttgacgacgcggagccgaggatgaagacgacgacggggctgcagcaaccttgacgaaaggcgggcgacgaacagcacggcttgacggagggatgaacgccacgatgaccgggaacgacgagaggacgacgacgaccgggccggcgaggaggcgacgagggcagccggcagcagctgcacggaggcaaggacggcgtggaacacgccgctgcgatgctgacgacggtggcggcgcagcgagatgacgagccggcgaggaggaacggccaatcggaggagtcgacgaggaggatggagaagccggcgcggcagcaacgtgcggaggcttccgggcgaaaccgaggagcggccggggtggagggcgacgctgcgacttcgacgaaggagacggcgacgtcggccggcgctctggcgcggcaaccggggcgactggaggcggtacagtggcggcaacaccactgtttgccggcgaggatgcgcctccggtgatttccccacgaaacggagacgacgccggggaagaggaggcagctgcgacgtcgatcggcttaccggcgacgaacaggagccggccggatgaggggaggtactggacaccggcgagggcaccgttccggcgagctttgagcgaggaggaggtgatgccggggaggtggatggcgtctcagtgcaggggaaggcggtggtgacgtcagccgccgcacgggcgaggcggcacaggcggctggaggatggccggcaccgaggaaagagaaggaggaggcggggagaggtggtgcggccacgggagagttcgggaaggggctaaaacgatagaacggagcg

SEQ ID NO: 34557 - DNA, 186 bp, Oryza sativa
  Clone ID: PAT_MRT4530_38561C.1
atggcgtctgctgaatcggttgtagaggctgttgctgagctggttgaggtggcagaaacgtggcagcaacctgatcttgggccagccgattcgcaacctacccactatgctgtggccgctctctcactaacaactgagggttcaccggctggcctggcaccaccgctgacagagcaagtagggtag

SEQ ID NO: 34558 - DNA, 649 bp, Oryza sativa
  Clone ID: PAT_MRT4530_38562C.1
cttccccccccccccccccttcttccctttcttttcctctatttttttttttacttttttttttttttttttttttttttttttgtttttttttttttttttttaaaaaaaaatcccccctttttttttttaaaacccaaaaaaaactttttttttccccccccccccctaaaaatttaaacttaaaacaagaaaaaaggggctaaaattccccccacctttttttgaaaccggggtaaaaaaaaaaaacttcgggaaaaaaataaggccaaaaaaccttccttaccaaaagttttaaaacccagcccccccaaaaaaggaaaagggccccaggaaacgggaaaaggggaaaaatttgggcaaaaacccccaagggggggttaacaaaacccaatttttttcctaaaggggaaattcaccccccggaaaaacttttcctaaataaaaaatttggggggggctggaagcccccaaaaactttcttaaggggaatgggggaaaaaaaaactccctggccccccccaaaaaaaaaaaggggggggcccccggccccccttgatgggcgcttgaaaaccgcccccaccaaaaatggtttctttgggagaaaataaagtaaaaggccacctaaaccgggggggcctttatgggg

SEQ ID NO: 34559 - DNA, 480 bp, Oryza sativa
  unsure (1)..(480): unsure at all n locations
  Clone ID: PAT_MRT4530_38563C.1
tttttttttttnngcacagacaagaaggaattatncatgttttatttggcattgcatgtctgcacccancataaaactatcactggtccttttcaccttggaggcatgaaccaccattccagctgctaaggacttacaattagctgataagagaacgtaacaaagccatactattggatcacacgttcaacacataacccgtgttaaccaaacaaatcaagattggctcactgctatgaaaacattatattaacgtaaattatttcaaccaaaaagaaggaatagaaacaaccagtaatnctctttaatgcatagtagacaacatgcagatgccatggtgtcctcctgaatggatttgctacgacagcctacacgtttttcatggcatttttgtaaaccncagntgtgaatnccagaaccgcangctctaacncatgcaatgtcaancatntaaccaacnantggccttttttgccttga

SEQ ID NO: 34560 - DNA, 214 bp, Oryza sativa
  unsure (1)..(214): unsure at all n locations
  Clone ID: PAT_MRT4530_38564C.1
tcatcctggtagagacagggttcagggaggtgactgtttacctattcaatcacaacacctaaacagaagtttttatcaacagatgactcaaatatcttacactccnttctatataccaatcatcctcaatgtccacctttcccccctcatgggggggggcaccccttttttaaaaatantcccctaaaaaaaaatcaaaacaacccacaatatc

SEQ ID NO: 34561 - DNA, 450 bp, Oryza sativa
  Clone ID: PAT_MRT4530_38565C.1
atggcggcggcaacgatatgggagcaggagggcctccccccacgccgccaccaccgttgccgacggaggaacacggtgagctgcctccggttgttcgtctccaacatcatggccgcgcccccacgtgctccgatctctcgccggctggaagaggagctcgcgagcggaggagacgacgtgcggctgcggcgacggcggctcgggttaggagagggttatgagagggcgagagatagtgggggtgggagatgcatggatggacgacggcgacgacacgagagaagggaggtggcggcggctgcaacgcttgagaagggaggcccgggctccgacgccgaataccacctccttcgccgcatacccccgcgcccacagccgctgggagccactgccatagacgactctgcgccgctcggcctcggcggcggcggcggctccgggcagggatag

SEQ ID NO: 34562 - DNA, 706 bp, Oryza sativa
  Clone ID: PAT_MRT4530_38566C.1
tacgaattattacatcataagcccgcaggcatagtcttaaatcatcggaccgagcggtccggaatacatccaaaagcagaaacaggtaaggcagcggaatttaggcagcggcatgccattgccacaggcaacgaccgtactaagacctactgggcgccatcgtcttcatctcccttctgcggcggcggtggacgcgacgggaacggagggcggctcaccggcggcggcagcggcgacgacggaggtggcgatggtggcgcacggcggcgcgggagcggcggcacggcggcacgggaacggcggcgcggcggcacgggaacggcggcgcagcagcacgaaggcggcggtgtggcagcactacggcggcggcgcggtgaaaagggaggagatggaggggaatggcgcggggcgcgaggcggcaatgggacgcgcgcggcgatgggacggcgcggcgcgacggcgatggcgacggcggcgtagggctcgaggcggcgacggcaacggcacgtggcgacggcgacggtgatggcgacggtgcgcggcgcagcggcgggcgatgggacgcgcgcgcgacgggacgggtggtgacagggcggcagcggtggcgcgcggcgtgaggcgggtcgcgatggcaacggcgacagcgccgcagcggcggcacagggcgcaaggcgacgtgacgtcctcgcgccgccgtcgtcaccgt

SEQ ID NO: 34563 - DNA, 1100 bp, Oryza sativa
  Clone ID: PAT_MRT4530_38567C.1
ccgctgtcgccgtcgccgctcgcccgtcacatcgccttgcaccccgtgtcgccgctgccacgctgtcaccgtcgccgtcgcgacccgcctcgcgccgcgcgccaccgctgccgccctgtcaccacccgtcccgtcacgcgcgtgtcccatcgcccgccgctgcgccgcgcaccgtcgccgtcgccacgtgccattgccgtcgccgcctcgagccctacaccgccgtcgccatcgccgtcacgccgcgccgtcccatcgccgcgcgcgtcccgtcgccgcttctcccccacacccattcccctccatcacctccctttttaccgcgccgccgccgtagtgccgccgcaccgccgccttcgtgctgccgcgccgccgttcccgtgccgccgcgccgccgttcccgtgcccccgcaccgccgttctcgtgccgccactcccgcgccgccgtgcgccaccgtcgctgccgccgtcgtcgccgctgctgccgccggtgagccgccctccgttcccctcgcgtccaccgccgccacaggagggagatgaagacgaaggcgcccaataggtcttagtacggtcgttgcctgtggcaatggcatgccgctgcttaaattctgctgccttacctatttctgcttttggatgtattccggaccgcttggtccgatgatttaagactatgcctgcaggcttatgatgtaataattcgtagcgacgacgacgcgaggaggaggacgacggcgaccgcgccgcgaagcgggcggtgggggcggcggcggcggtggcggcgagacgtccctagcgatgtcgggagcagctcccgccagcaccggtcgccgccgccgagctcgacggcggcggccggaatcgcaacccccgcctccgccaccgtccactccgccgttgaccaccacggggtattccaccgacgaggaggaggtgcgcccccctctcttcaccccccccccctccattcttccacattacccccatctctctgtttcaagaagatgagtaagcctgtttggtttctggggcaaaaaaaattctcagaattaccttactgctatcagagaaggaaatgaaagatgagctaaatggga

SEQ ID NO: 34564 - DNA, 942 bp, Oryza sativa
  Clone ID: PAT_MRT4530_38568C.1
aaagaatccccttcctcccctcttccctctccactgcgccgccgctctcgtgccaccgagccgccgttcccgtgccgccgcgccgtcgctctcgtgccgccgcgccgccgttcccgtgctgccgcgctgtcgttcccgtgccgccgcgccgccgttcccgcgccgccgtgcgccaccgtcgccgccgccgtcgtcgccgctgccgccgccggtgagcagccctccttcccccttgcgtccaccgctgctgcaggagggagatgaagacgatggcgctcagtaggtcttagtacggtcgttgcctgtggcaatggcatgccgctgcctgaattccgctgccttatctatttctgcttttggatgtattccggaccgctcggtccgatgatttaagactgtgccaccggggacccaccgccaatgacgacgaggcacgacatggtatggggcggtgcaaaggtggaacagcgtcggtgcccgaaggtgttcgacgcctgattcttggcattcgggatgcgacgttgagagcgagattctggcgacagtgacgacggtgcggtggagcaaggccgggtggagctcgaggccgacgaggaagaggaagaacgtcgccgctgtgctcgtgtgctcggtgctgccgcttgccgtcgcgccgtgcgccgggtggccgctgcatctcatcgtcattggcggtgggtccccggcggtgcaccgccgcttccttggccgcgcgtcgagccgtcccggttcgagccgttgcgccgaccgtgtgttgtgccgctgctcaccctgttcatcttcgagagattcctcccaatcccgagcagaatcccccgccccggcgaatccgcgcggcgctcgaggtaatccaatccctcctcttcctccgccctccccctccctcgccgcgtcggctcgccggacggacggtgggttctccat

SEQ ID NO: 34565 - DNA, 318 bp, Oryza sativa
  Clone ID: PAT_MRT4530_38569C.1
atgttcacttatatgattgttctatgtcatgacgatgattttagagtagtatttggtagcatacgtgaggtgcttaggctattgaatatcattattaggtgttatatgccgcgagacagtagaggtgggtcgctgatggtcacagctcagtacgggtattcctctacgttagtatataatcctaagttactttcctggggaggatactcctccgtatttagccccggttggatggccatgatgggttgtcgcaagaaactcggcaaccaggggtggtctctcgaaataccatgagggaattgtaaagggggtattggc

SEQ ID NO: 34566 - DNA, 1032 bp, Oryza sativa
  Clone ID: PAT_MRT4530_3856C.1
atgaatcagaaagagatgtggatgctcacaggtcagcaggatcctatcccatcccctgctatgcttgccgcaaatgaagatcgccgcccctcctatgttcagccgcgactcgtcttcacgacggagacatcacgaaaacgtgacacagctgatagacactacaaaaaccgtgtaattggctataagacaccggtcgtattattttattattttcgggtcaaaagagggcagttgacggcatggcgcgaccatggaggcgcggcgtccggccagatcaatgacgggcggctgacggcaatgccgatgtggcgaggcgtgactgagcggaggaggagctcggccgggcagcggcaccaagcgcagggggaggcgccggcgcaaggtggccaggctgcagcgctagtcgggctatcctctcatgtgcgctagctggagaggcggttggatcggaggaagagatcacccagaggccgcgtgagcagacgagccgaggccaaaaggccccctgtctccaactccctcatggtcgtcctcgatgaccccgtcgtcagccgcatcttcgttgaggccagattccacaacagggatatcaagctcaccatcctccgcccggctccactcctcggccacctgcccatgcacacccgccgccacctctcttcctctgcaacttcgccgccgtggacgacgccgacgctagagagccatcgaggaggcctagttgagatgcgttgcatcatcctcgctaatgttgagtcgctgagtcatcccttgccgttgaaccacatctcgatttacacacatgacggcaaaatccgatttttactggatttttgcaaatactatatcctttttaaaatgtatgacatcattttcaaaatgaaaaatgattttttatgggacgaagtggtgcacatgcggcagacatctatctattatattattaaaacaaccttgaaaggaggcaccacgttcgctgtgaaagctagaaattctcacattaatcggagaaaaagaaaagaagagtccaag

SEQ ID NO: 34567 - DNA, 1119 bp, Oryza sativa
  Clone ID: PAT_MRT4530_38570C.1
tggccgtcgccgtcgccgctcgcccgtcacatcgccttgcgccccgtgccgccgctgccgcgctgtcgccatcgccgtcgcgacccgcctcgcgccgcgcgccaccgctgccgccctgtcaccacccgtcccgtcacgcgcgcgtcccatcgcccgccgctgcgccgcgcaccgtcgccgtcgccgtcgccgtcgccgtcgccacgtgccgttgccgtcgccgcctcgagccctacaccgccgtcgccatcgccgtcgcgccgcgccgtcccatcgccgcgcgcgtcccatcgctgcctcgcgccccgcgccattcccgtccatcacctccctttttaccgcggcgccgccgtagtgccgccgtaccgccgccttcatgctgccgcgccgccgttcccgtgccgtcgttcccgtgccgccgcgccgccgttctcgtgccgccgtgccgccactcccgcgccgccgtgcgccaccgtcgctgccgccgtcgtcgccgctgctgccgccggtgagccgccctccgttcccctcgcgtccaccgccgccacaggagggagatgaagacgaaggcgcccagtaggtcttagtacggtcgttgcctgtggcaatggcatgccgctgcttaaattctgctgccttacctatttctgcttttggatgtattccggaccgcttggtccgatgatttaagactatgcctgcaggcttatgatgtaataattcgtactcccgccgtcgcccatgggagcccactgccactgcctcccctcttgccggatctggcggaggggagcccgtcgctgccgctgcctcccccgctggatctggcggaggggagggcaccgcctgccgctgccgcctctcctcccgtcgtcgcccgctactgctgccgccgccgctgcctcccctcgcgccgaataacactcggcgaggccagtgttgagctgtgcccgtgccctggccacgccgcttcacggccatccgatcagccctggccgatccggaccatcgatccccgcggactagccgtgtggaccgctgtggtttccttggtaatttgaaaattttgaaaaatttgagtgattttttgtatttgataccatggtgcccgggcaccat

SEQ ID NO: 34568 - DNA, 645 bp, Oryza sativa
  Clone ID: PAT_MRT4530_38571C.1
atggacagcggcgcacaggggtgggcgcgcctggctgggagagttgagcgctgcaggcatggcgctgagacggaaggcgcaagagggcaggcggtggacggcagcgtggcacgtggaggcgggagcggcgaacacttagtggtgtcaggatcctccttccccaccgtcgcggcgcgcacggagctcggacacgctaggccgacatggccgctgttgcggccgccgtcttcctcccgctggacttggcccctacaagcggcgtcgggaggaggtggaaaagagacggaagagggaggaggctgcggcggaggaggaggccattcttgctcgccaccgacccccgctgacatgttccccctcctcgtctcatgccgccgcccacccctccgagtcacctccaccgctgcagtcctcgcgctgctcgccatcgcaaccacattcctcctcacaagccacgcgcgccgatcgtcggcccacccccgtgcgcagctgcccaccttcgccttcgctgcctccgccttcattatcggctgcacgagcgacctccttctccaccaccaacgcccgagcgaccttcgccttcgctgccgaccgcccgcccccacgctgccacccacctccccgcccctgcgtgctgccctgtga

SEQ ID NO: 34569 - DNA, 2387 bp, Oryza sativa
  Clone ID: PAT_MRT4530_38572C.1
actagtggatccccggagccaccgggcacgggggccagccttatcctcttctcgcctctgctgctcgcggggaggggtcggggtaaccatgtcgaggatggcggcgccgccgccgccgctctccggcaccggcaagccgcccacactccccttctccctcaagaagccgccgcccatgccggtgtacaaggacctgcacttcaaccgcgacctctccgccaccaagaagctgcaggccggcgtggacctggtggcacggctggtcggggtgacgctggggcccaaggggaggaacgtggtgctgagcaacaagtacggccctcccaagatcgtcaacgatggggagacggtcctcaaggagattgaattggaggacccgttggaaaatcttggagtgaagctggtcagacaggctggtgcgaggacgaacgatgttgctggtgatggttgtaccacttccataatccttgctcaaggcctcatcgctgaaggaatgaaggtgcttgcagctggaattaatcctgtccagattgcgcggggcattgagaagactgcttctgctttggtgtctgaactcagattgatgtcccgggagatagaagaccatgaaattgcacatgtggctgcagttagtgcaggagatgattatgctgttggaaatatgatttctgatgcttttaaaagagtaggcaggaaaggcatggtgaggattgaaaatggaaggggcacggaaaatggtctagagattgtggaaggaatgcaatttgaacgtggttacctctcaccgtactttgtgactgattgtacaaatatgtccgcggagtttactgactgtaagatattgttggttgacaagaaaattactgatgcaagtgagattataaggatattggatagtgctgtcaaagaagattatccattgttgatagttgccgaggatgtggaagaaaaagcaatggctgatttgataaaaaataagctaaaagggacaattaaagtggctgcaatcaaggccccttcctttggggaacaaatgactcaatgtttggatgacattgccatcatgacaggaggtacactagtgcgtgaagacatgggatatacactagaaaaggcagggaaagaggttctaggttctgcttctaaggttgtagtcgggaaagactcaacactaattgttaccgatggaagcacccaacatgtgatcgagaaaagggttgctcagataaagggccaaattgagaactcaagtgagaggtaccagaagaagatattgggtgagagaatagcaaggttatgtggtggaattgcaatcattcaggtcggtgctcaaacaatcattgagatgaaagacaagaagctcagaattgaagatgcccttaatgcaacaaaggcagctattgaggaaggagttgtgataggtggtggatgtagcctattaagattatccatgaagattgatagaattaaggaatcattggataatatggagcagaagattggcgctgacatcttcaaacaggctttgagttaccctactgcattgattgcaaacaatgctggggtgaacggcagcttcgtcatagaaaaggtgttattaaatgaggacagtagatatggctacaatgctgccaagaaccgctatgaggacttaatggccgctggaatattagatccatcaaaggttgtgagatgttgcatagaacatgctgctgtggtcgccaagtcttttctcacatctgacgtggtgattgttgaggcgaaagaaggcaaaccagttcgcataaggcccccgatgcctcctaaaagtttgatacccccaatgcctgcttctgcttcaggaattcgagtgtaggatacatcccttccccagcactgatactcaacacaaaagaaagaaaatttgggacatgattcttttgcaaatatacccagatattaacaaagtgcagaaattcctgacgaataaatttacctcaaacattgctctataagttttctcgaggaagctgtcacaaaaacatggctttcttggtatgggcagcgtgttcatcgacgaaagcagcaataagaggggtgctgtagaatagaaaatactggaaatttcaactgatattcttgtttcccacactgttcttttttttgttttgtttttttttgcctctattaatagcctaagccagttttaaatggcttatcaatatgtatatgtaagttgtatgtccagattgttaccttgtaaatatgacaagttgtatcaaaatgtaatttttttactaaaaaaaaaaaagaaaaaataaagagtatacaaaataaaaaaaaaaacaaaaaaatcaataacatagggtgggctttctaaaggacttctgccttctttctcttgcatt

SEQ ID NO: 34570 - DNA, 933 bp, Oryza sativa
  Clone ID: PAT_MRT4530_38573C.1
atgggagattccttgttggtgatcagtcaattggtagaagaatatgaatgcaagaatgatgtgttgatgatctacaatgagaagtgccgggaattaatgaataattttcggttggtgactttgaggcatgtctctcgggagcagaatgttgaagctaatgatttggctcagggggcatcaggatacaagctgatggcaaaagatattgaagtggaagtcgccacgattgcagccgattattggagcaagggacataaatttatattggtggcaaccgattattttaccaaatgggtggagacagttcctttgaagaaagttgattctagagatgcaatacagtttgtcaaggaatatatcatctaccgatttggtatccctcaaaccattacaaccgatcagggatcaatttttgtgtccgatgaatttgttcagtttgccgatggcatgggcatcaagttgttgaattcttcaccatattatgcgcaagctaatggacaggtcgaggcatctaacaaaagtttgatcaaattgattaagagaaacatctttgattttcctcgtcaatggcatacaagattagccgaagcattatggtcctatcggatggcttgtcatggatcaattcaagttcctccttataagctcgtatatgggcatgaagcagttttgccatgggaaactacaatcggctcaaggagaaaatatttgcaggataaattaacagctgatgagtattataatcttatggtagatgaaacagaagatctagttcaatccaggttacgtgctcttgcaaaagtgactagggacaaggaacgagttgctcgtcattataataagaaaatggtgcctaagtctttttcggagggagaactggtttggaagttgtttttgccgataggaactcgggacaataaattcggcaagtag

SEQ ID NO: 34571 - DNA, 189 bp, Oryza sativa
  unsure (1)..(189): unsure at all n locations
  Clone ID: PAT_MRT4530_38574C.1
cccagcccactggcggtaggaaatgtcaaacgtggtgatacaccccgtgtgtgtgtgtgtgtcacccgttcaccangtgcgtggtaccacgcgtntccgtcgtaccccacgtgggccgtgtatggtgtgntgtgtgtgtgtggtagggccgtgtgttaggtcgtgagtggtaggagcccacccacgaac

SEQ ID NO: 34572 - DNA, 1004 bp, Oryza sativa
  unsure (1)..(1004): unsure at all n locations
  Clone ID: PAT_MRT4530_38575C.1
cgcaggaccgccgggcctcgaggtgaaggagcgcactgcgaagcgaacccttctccgccgcctccgctcttcgctgcacggtgctagctcgccgccgtccgtctcgcgcgcctcaagggttatcacaagatgtatacagcaaggaggaagatccagaaggacaagggtctggagccaactgagtttgaggacactgttgctcaggcattttttgaccttgagaatgggaatcaggagctgaagagtgacttgaaggacctttacatcaatggagcagttcagatggatttacctggcaacaggaaggctgttattatttatgttccatacaggctgcggaaggcatataagaagatccatgtgaggcttgttagggaacttgagaagaaattcagtgggaaggatgtggttctggttgcaactagaagaatagtgaggcccccaaagaaaggctcagctgttgttcgccctcgtacccgcacacttactgctgttcatgatggcatcttggaggatgttgtgtatccagcagagattgttgggaagcgtgtcagataccacttggatggtagaaaaatcatgaagatcttcctggacccaaaggagcgcaacaacaccgagtacaagctcgacactttcagctctgtctacaggaggctctgtgggaaggacgtcgtgttcgactaccccatgaccgagactgcgtaaaccatgtcatagttagtcgacggctatctttggccgcaaatgctgctactcttcctaaaatagactataactgtggtttcctatatgcgaaaagttttgacagtcctgtgatctgcatatctgattgctagaactggtttaaattgttcaggtgttttccaactgcagttgtagaacttgttgctttgttcaatggtagtattttcaacgtgcaaaaaaaaaaaaaaaaaaaaaaaaaaaaaaaaaaaaaaaaaaaaaaagtaacatgcagctgagcttngaaaaaaaaaaaaaaa

SEQ ID NO: 34573 - DNA, 723 bp, Oryza sativa
  unsure (1)..(723): unsure at all n locations
  Clone ID: PAT_MRT4530_38576C.1
gggagggaaaaaattattactttttttttaaaaacaaaggccattgaaatggtacataaccaaactgtaaaataaaaatatataccatattatatattgatatatcatcaacataccccaaaacaaagctgcatactattattataggcagcaatccaccagcgcaaagcttgatcttagcttatttgccaccaaactcctcccaacctgggggctttttggcaaaaaagctaatcaactgcacctgcctgactttttcaaaaccgataatacggacaaaggcttcggggttgggcttcttggcctcccccaactccttgaacccctgggtggcctccgtgcacccgaaaatggggcacttccccatggtccaaatacntgccncctttttacccnggnaaacntttgttccccnggntaaaaaaaccncccttgttaaaccnagggagggcccccttggttttaaaaccnttcccaaatnccngncncccgggggntccttnttttntaaaacgcccccccccgggggaaccccccctttnttccctttnttaagggttattcaacctnggtttncngggcnanctttccctttttaaattttccccccccancccccnaanaaaccgaaaaaaattttaccnggnccaaaataancccctttgnttcccccccccccccgaaactttccccntttaaaccccccgggaangttttttttnt

SEQ ID NO: 34574 - DNA, 643 bp, Oryza sativa
  Clone ID: PAT_MRT4530_38577C.1
ctagaactagtggatccccgggctgcaggctcgccgcgcaattttctccgccttcatcgccgcctccttccccttccgcgcggtgcctccctccaccactgccgcatcggctcctgcctcctatcgccgcttccgctgctcctgtcgtcaccgatgccgctcccgtcttcgccgacgacgccggtgactccctccaccgccgcctggtccccgcctccgtgccgctcgccaccacaattgggccggctggtccagggttccgttggcgccacagccccgtcgccgaccagtggttcagccttccgccagtgccgctgctccatcgttctccggtggtctagccttccgtcgcgcctcccgtcttgccgccattacgaggggcatagtctgccataggtacttccagccgtgcgccaaaatttcttcttgctggcgagatcctgtcaggacccgtgcacgcctggtgactcggcgatgcatcaggcggtggctggccggacaggtgctaagcaagagcatgcgtgcagctgatcagtataatggatatgctggggatgggtgaacaggatggaaggcattttttataggcccttgtcagatgatggcttttggctttaagatgctctatgagaagggtcaagga

SEQ ID NO: 34575 - DNA, 123 bp, Oryza sativa
  Clone ID: PAT_MRT4530_38578C.1
atggccggccggccagttgatggcaacgactatggcgcatcagagatcacattgattcccacgggcagcagccatgccctagagctagacgatgggctcctcatggtcactgcagctggttaa

SEQ ID NO: 34576 - DNA, 177 bp, Oryza sativa
  Clone ID: PAT_MRT4530_38579C.1
ataatggatgatattgtcctacttcgataagttcactgaggaatcgaggaacctgacgattgtaaaaatgtatgatccattgggtcaaagcttgcaacgtagtaatgcagatagtcagtaaccagtggaatactgaaacagttcgctcatgctcttgcttttatgggtttgctggat

SEQ ID NO: 34577 - DNA, 2445 bp, Oryza sativa
  Clone ID: PAT_MRT4530_3857C.1
atggaagttgagctgacgaacattcagaaagctacatcaagtgactattggagtttggccagcaatcaatatccatgtggtaaattccctaaggtatcagttggcgtcacaattccaaggacgagttctgtatcaagaggcagagatgctgctagtaccgctgcatttgagaagaacttgtctcagggaactgatggaagatctagacctcccaaaatggataatgcttcacttcaggtctctccagaagcagcaaaccacggcggatctgctaaagaggttcctaaacctgtccctgctaaggtttctgtatcacaacctgatgataatgcaattgagcaaacaggaaccttttcctttggaacaagaagagaacaggacagtcatcttgatcaattagataggccaccacttgtgagttcccaaggaaagcgtcaagtggaatcagctgataaaaacaagcccaacagtgaaatgctcaggatgaaactgtgggagatccttggtggtacttcacaaaacaaggaggctgttgcctcaccaaatcctgaagatattgagacgccatgccaacctaaaagtcaaattgccaatggaccatcttcaggaagacagaaggttttcacttcacctgttccatataatattaagacaccagctcagtttaatagtcaaacagcgaacaaaccatcctctgatccaattgagtcagactccgacagtcctcaagtagttgaagtaagacctattactcgttcgctggggcgcaagaaagaaccaacaggctccacacatcaggataagagcgggagtgcaaagaaaccattgtctactcatcgttctacacccaagcagaaaatattggacaatgtgtttgccttcaacgataaatgcacacctaaaacagtaggaaaatctgcaaatggtgaatctggcagcttgaggaatcttagaagcttgagtaggagggctaaagttgagccaaagaaggcacattgttcggacaggatttctcataagactacacaggatgatatggaaagaaaggtaccttctaaatatataccatcagagaaaaaaggaaaaactgctgagagttgttctagaagccctaaaagggagagaagggtgaacacgatggctaatgttggggctcgaaagatgcagttatctgaaaatttactggtcaagactctaaatgatggtgaacacaagctctcttctcctcagcttacttcctttaagagcaagggaaaatgttcttctatatcgcctcaacagaaggagaatgataatacccacatccctgaagcttcagacagaacagcagcaagaaatagttttaactccacaccttctcctgctgctaatccatctcctgtactgaggaagtactcatgggaacatgatgagaatcctgcgataaatggtaaatctggacagaaggatgccagtccgttggcagacagattcagcgacatgccagatgattttgcaagtcctacttttgcagcaaacataaaaatatccccccacagaagtaaaatgctagacgatgacctatttagctccaaatatccaaaaggtgtgaacaggtcaagatcaacttcctttacctcggatccagaatcggagccattggacaaaatggagaaaaccaacgagttacctggcagtgaatctcctaactctcaggaggaaagacagaacagaaaacaaccacatctttcacccctttctcctattgagagtgaaggggctcaaatttctattccaagctttagaaaaggatataaatctcataaatggctttcagatgttgacagccctgataaatcttctattgagcatctgggccgaaaatcacatctaaaagaggggacgcaagaaacaatgtcagacaaagaaccagaaaaagtcccagaaaactacctaaccagggcttttgatcagttagtagtggtgctaggaaggttccaaaccaaaatcaagtctgaaacaaggaataaaagttctaagatacttgcagctactggagagataatacgccagcaccttgaaggggttgaggggcagatgcaggctgatgtggacaagctggtcaatgcaggaaaatctaaaaggaaacgtctagagtcaacatttgaagagcaacaagaaaagttaaggattcttcacgagaagttcaaggaggaggtcaaccagcagttgctcggttgcaagaactctgttgaggattttgaggcttaccatgcagaacttaagggagttgctgacaagcaaaaagcctcacacaagaagctccttcaaaatgctgagaagacagtcggcgctcagctgagcgacgcggaaaccaaaatcgctgaggtccagaagagggcacggaagaggatgaagggcctcaaatttgtgctcaaggagctcattgcagaaactgcagagtaa

SEQ ID NO: 34578 - DNA, 524 bp, Oryza sativa
  Clone ID: PAT_MRT4530_38580C.1
atttcataagattgcatacagctttactccatggtaattagctctaatatatatttttttcatgcatacagtttactgcatgagctctatttgtttttcagataatgagctctaatatatgctcctacaaaatgcttaccttttccctccatgttaagtagctgtaccggtgttggttcacagcactggagagaagggctgcattctcaacaacaatgttggaatcttggtcaattctgtatgacacatcaatgccttctagatgaaggtggtagaccacgctagtggacgggtcaacggattggcgatcctcatcgttgctgcaaccgttgtcaattttgctgccgccattatcagtgacatcttttatggtcacatcatggggacggatccgctgagacagcgacctgatgtcccaggagagcacttccttgacaagatcctgaaactcatctgctgaagcgtagagtgattgcttttttacatgcatccagcaatcagaaagtgaagaaatgaagtgctca

SEQ ID NO: 34579 - DNA, 1006 bp, Oryza sativa
  Clone ID: PAT_MRT4530_38581C.1
tttttttttttttttttttttttttttaagccgttgtgggtgtcgacctcgccgcatcctcgaccggaccgggttaacgcatcctcctccccacttcgacggcgcgccggcggcgatggcgtcgcggaagctcgtcctcggcctcacggcggcaaggcggttgaggtctcgcgctcccgtcctcgtctcgtcctctcccttcctggaagcctccacatcgacttctgacgccaccgccgccaccgcgacgcggggttcggggttggggccgtgggggctgttcctatcttcgagggccctctcgtcgactcgtccggtgtctctgtccgccggtgatgcgcctggctcgtccgctgcggaccacaggtcgatactaccagaggatgagtatcacaaattagcagatgagacaatacatgacctgcttgaaaaacttgaggaatatggtgactctcttcagatggatggctttgacatagactatgggaatcaagttctaacactaaggttaggagagttggggacatatgttgtaaacaagcaagcaccaaacagacaaatttggctatcttcacctgtgaggctgtctacttttgttcgcagtgggccttctaggttcgattgggatgcaccaacaaattgttggatatacaggcggacaggagctaatcttgttgaacttctggagaaagagattggtgagctctgtggtaccccagtagaactttcataacaatgaagggaaaataccacggaactaagttggatggtgcatatgacaaatgtgtcaatgtatgttaaatcaggtgacgcttggtatggttagttcttttgatggaaccaaaattttgttgtactagacacgtccgatcactgcttggaagttggaataaatacctgtcctcaataaccagctcataataaaaataataatttattataaaaaaaaaaaataaaaatataataaaaaaaaaaataatatatgaatttaatgaaataagaaaaa

SEQ ID NO: 34580 - DNA, 726 bp, Oryza sativa
  Clone ID: PAT_MRT4530_38582C.1
atgggaacagaagagaagaagcatcggcaacagagcagaagcagaagcagaaggaaggacgtgacaggcaaaggcagcagatgcgaggtcgcaagtaaagcaagcgaggacggaagggtgcagaagagacacaagcagggatacacacgaacaacccttccttcttttcctttgctttatgtcctcgatcggccgacgctgcagcctgacgcttcgcttgccgctgccttccacccgtgcctgcctgcctgcacgcgatcgagtgcgagatcctcggaactcatcgcacgctgctgctgtgcttgcggtttcggcggagttggtcaagtaggggagtacgagcgctgccacagcgtaccgggcggtgggctcgagctcggcgatacaaatccaccaactaggaccttggcgatggtagggacatcgagcgggaacgggcttagcaacggagacgacaactacggcagctctatattctctctcaaatcccctttggcgtggacccagccgccgccttccctccgcacaggatcatctaccatgcggcgctgcgacgggatcgatctgcccccaggtgaccctacgacagacagatccaccgccaccatcggggtgtggaggggcagtgctagaggtggtggaggcgcgagaagaggcaacgacagcctcgatgatgatgagctattgggcctcggtgatggagccaccgctgatgagcggcgataa

SEQ ID NO: 34581 - DNA, 224 bp, Oryza sativa
  Clone ID: PAT_MRT4530_38583C.1
aacccgttctgcttatatcaacgcaaaccaccctctacgccgcgcgcgcgaggcagattctcgacggggagcgcaatcgtcgccgccagatcccgccccgatcgaccgcgactcgttcccacggtcccgcgtataccggtctatctctctctctatctctctctctctgggatcggagcgattgcctttctttttgcgcggaggagatcggcgagaatgggagc

SEQ ID NO: 34582 - DNA, 172 bp, Oryza sativa
  unsure (1)..(172): unsure at all n locations
  Clone ID: PAT_MRT4530_38584C.1
aattccccccacgccccccacaaggtttaccacgtccacgactacagattcaatatactgtgctgcgtcccagctccngggagtatgactatacagcgcagcaggtctcctgcttatagagctagcagtactaccttggaaggagaaaggtatatgtctttcgatactcaag

SEQ ID NO: 34583 - DNA, 629 bp, Oryza sativa
  Clone ID: PAT_MRT4530_38585C.1
atactactatggtcgccgccgctcgtcgtcaaccacagaggtggcatggccgccgccttgtactccggcatcagccgcccagacatgaacctcaagccacacgcgttgcagagggtcttgggacccaggggacccgtcagcagctacgacgttttctccgacgcgcagtgcatgcaccgccacgtacacgccggcctccatgcccaccttcacccccgcggggccggggctcttcttgccgcggctgccgctggagccgttcagccttgtggccgacagctttttagaggacgggaagtcggacgacgggcgggacgatgacagcgacgactaaaatgtcggatgtgggccaagggtgtgccacgcagcggcggtcgcggccgtcgcgcatgacctcttgctatgcgcgccgcgcccaggcgctgccgtgagacagctgtcttgaccaggccagttgccgccaccgttgttggccgcggaagcaggcgccgctgccgccgccattgcggcatgtgcagacgactagtaatcgagctcggcagcttccttggtctgaacccatcggtgtcgtacagctaaaaccgcgaagtcacgatatcctatagcaaattttggggctgcaggaattc

SEQ ID NO: 34584 - DNA, 255 bp, Oryza sativa
  Clone ID: PAT_MRT4530_38586C.1
atggccgccgccttgtccgccgcgcgccaggaggcggtggccccttcctcggggcagcctagcttgtcggcggctgctgcccgtacctccgcaacaccgactttcgcgccgtttccacaacgacatcaatgccgctatcttcccctacttcgcgcggtggcgccaagcgtttggcaagagaggaatagaggtggcatggatggcggcagcatcttcgacgcggcgtggaggagggccgacgtggccggcagctga

SEQ ID NO: 34585 - DNA, 231 bp, Oryza sativa
  Clone ID: PAT_MRT4530_38587C.1
atggggatgcgcatgggcgcttctatcgttgtcgccggcctcatcctcaagctccatcattgctatcatcacccatcacagccgcagtctccgccgttgccgtcgtgcgccacatcctccgcctccgttgctgttaccatcggccccaccgagcgcgttgcaggtggtggcgacggcgaggacgcggaagtgacggaggaggatggtagcgggatcggcgacggcgactag

SEQ ID NO: 34586 - DNA, 465 bp, Oryza sativa
  Clone ID: PAT_MRT4530_38588C.1
atgatcaagaggtggcactcgtcgagcaggatctcccgcacgccgtcggggtgctcggcgtcggcggggtcgacgtcggcgcgcagctcgcacggcggcggacgcgtcggcggggaggaatgggggcgcagcgtcgtggcgagcggcggcggagggggaggaggaggaggagggcgcggcgggtcggtgtcgttccacggcgcggacggcgtgcccccggggctccacccggtgtacgtcggcaagtcgcgccgccgctacctcatcgccgccgacctcgtcggccacccgatgttccagaacctcgtcgaccgctccggcggcggcggcgtggggggcggcggcggcggcggcaccgtcgtcggctgcgaggtcgtgctgttcgagcacctcctctggatgctggagaacgccgacccgcagccggagtcgctcgacgagctcgtcgagtactacgcgtgctga

SEQ ID NO: 34587 - DNA, 1208 bp, Oryza sativa
  Clone ID: PAT_MRT4530_38589C.1
atgactacgcaaggatttgctcccgtgcttgcagtagcattgctccttgcagcatttcctgcagcggttcagtccattggcgtgtgctacggcgtgatcggcaacaacctgccggcggcgagcgacgtcgtgaagctctacaagtccaaggggatcgactccatgcgcatctacttcccgaggagcgacatcctccaggcactcaccggctcgaacatcgccctcaccatggacgtcgccaacgagaacctcgccgcgttcgccgccgacgccaccgccgcggccgcctgggtcaagcagaacgtccaggcctacccgggcgtctccttccgctacatcgccgtcggcaacgaggtcaccggcgacgacacgggcaacatcctcccggccatgaagaacctcaacgccgcgctcgccgcggccggcctcggcggcgtcggggtgtcgacgtcggtgtcccagggcgtgatcgccaactcctacccgccttccaacggcgtcttcaacgacgactacatgtttgacatcgtggagtacctggcgagcaccggagcgccgctgctggttaacgtgtacccctacttcgcctacgtcggcgacacgaaagacatcagcctcaactacgccacgttccagccgggcacgacggtgacggacgacggcagcgggctgatctacacgagcctcttcgacgcgatggtggattccgtctacgccgcgctggaggacgccggcgcgccggacgtcggcgtggtggtgtcggagaccgggtggccgtcggccggtgggttcggggccagcgtgagcaacgcgcagacgtacaaccagaagcttatcagccatgtccaaggaggcactccgaagagaccaggggtggcgttggagacgtacgtgttcgccatgttcaacgagaaccagaagaccggggctgagaccgagaggcacttcgggctgttcaaccccaacaagtcgccgtcctacaaaattagattccactagacaagagtgatatactaatattacatttggatttggaataagctagctgctcatgtcaaatgcaaaaccgcatgcatgcatgggaacgtacggccagcatatagttttgtggtaataagcacagctgctcaagattcagcaacgtacgtgtaactctgccttggcactttggcagtgaatactgaacaataacggaatttataccaaaa

SEQ ID NO: 34588 - DNA, 690 bp, Oryza sativa
  Clone ID: PAT_MRT4530_3858C.1
atggagcaacccacaattcaaaacctttctgctcatcgggctgatctttgtgagccatcctattctttaaaaccaatcctatccgatgggtacgaaatcagtcctggctttatagccatgattcgagagcaaaccttctctggtggtattggtgaaaatccatacctccatcttcgggactttgagctagtgtattcatgtttatccatcgtaggcatgacacatgaaactctaaagtggaagttgtttcctttttctcttagagatgaagcaaagcaatggtacactctgtgtgtcaagaaattccacggtgaatgagaggagcttaagtgcaaattctgccttgctttctttccattaacccatgtaattaatattcgattagacatcctctctttccgagagtctgccgcaaatctcgatatttccgccggagcatcgttcgcacacaggacaaccaccgaaggaagagaactcttagatttgatcttagagaacgattctttcggccgtagcgaagccatctcggaggtcgagattatccatgaggaacctctgcgcatggagtcggagctcgactcaatagccgaatcctcattccagtcgctggagccggaggaagaataaattcatccttcggaaattccattccaatttagggatgatctttatgaagattatggaaacacc

SEQ ID NO: 34589 - DNA, 332 bp, Oryza sativa
  Clone ID: PAT_MRT4530_38590C.1
ctacggggcgaggttggagtccatccacaggaggacgacgtgagagtggccgcagctggagccaaggccaaaaaagaagccgaagctggtgggaatgtcagcggcaagcagagcacagccgggtaggggaggggcgccgtggtcctccatcatcccgtgcgtgcctcggaactagggtcaactactatgtcgactgttgctcgcacctccattgacatcaatctcatatccaaggtttgacacctttggatcgcataccagaattttccatgttcagctcgcaataattcatctttagcaaccatgcggtcggtggtaaacaattataggtg

SEQ ID NO: 34590 - DNA, 623 bp, Oryza sativa
  Clone ID: PAT_MRT4530_38591C.1
cgctcgccgggttgccgtctccttgtctcctccgctccttgcgccgccgccgcgacgagtcgcggggaggggcggcgatctccatctccatctgaggcgaggagagcaggggaggtgaggggatcctggtgaggtttgtgattactggacaatagaaatatttacacaatatggctggcggctctgctgatgcagtgaccaaggagatggaggcgctactcgttggacaaaatccaaatgcggttagtggagaaacatgcgagacctcatcaaaagaaggcaaagttgcagatagcaatggatctcattcttcaccaccagaagatgatgatgatgaagcgcaaggggatggtccatcaattcccatagacgaacttttcccatcaggagatttccccgagggtgaaattcagcaatataaggatgataacttatggagaacaactagtgaggaaaagagggaactggagcggctacaaaagccgatgtacaatgctgttcgccgagcagcagaagttcatagacaggtccggaagcatatgaggagcattttgaagcctggaatgctaatgattgatctatgtgaaactttggaaaatatggttaggaaacttatcaaggag

SEQ ID NO: 34591 - DNA, 103 bp, Oryza sativa
  Clone ID: PAT_MRT4530_38592C.1
gccgaggctcctcttcacaagcaagcgcgagtaggagacacctccatcgatccatggccgcgacgcgcgtaccgccgttgcggcgtctctgtccgtggccggg

SEQ ID NO: 34592 - DNA, 1954 bp, Oryza sativa
  Clone ID: PAT_MRT4530_38593C.1
ttaatatgggcctcctctttcaagcttcttctcttctattgtaaatttgctattgcatttttctctggaaactctattactttttgccaacatccatcacaatgaagatcatctttttttttttttacatatttcaaagtttcaagaaagacaacagatagttggtatctcgtgtaaacaacaaaacaaaaaactgaaaacgtctctcgattatttatctgatgattccgccatatgatcccatacatagcatgatagtacacaggttgcccagaatggtgcacaatgatctcacaaacaaccggtacatgacaagctacagccgcaatcagtagtcgtcgcctctggatatgacttccttgcaggttggccggagtaagatggtgtgctcaaattgtgacacatagcttcccctcacgtcgcacaatggaggatacggctgaacaataccaacgtcgcatagatttttcagtgccatgagatacttggtctcaccaaggcggtccaagtaccggcgacaaaaagcaagcgttccgaaattgttgttaatcgttccaagtagttgcttagcctttgctaccctcagaggtacatgtccaacatcaaagttcttcatgtaatgactgcattctaaatcctcccttacaaatccctttcctgtagatccaaaagtttcaatggcataaaattccccctcttccatttttgtttgctctccacctttcacaattggaactgattttccagcgtggatttggtatggtccaatgctgtgtccattgaggttccgcacacttttgatttggaaaacttttccattaatctcaacctcgtacgactccatgacttcttggattgctgcaccaacatcacatagccgtgcatctattccagcttccttgactccagtattagtggcatcttttgaggcttgaagcaatgaatcaaacatgggattgaatgcaacagtgaatgcacaatcgactatgtacccatctatgtgtgtcccaaaatccaacttcattacatcatcatattgtagtacagttttatcaccagaatttggagtccagtgagctgcaacccaattcaaggaacaccctgttggaaaggcaataccagcttgcagaccattctccttgataagtttcctaaccatattttccaaagtttcacatagatcaatcattagcattccaggcttcaaaatgctcctcatatgcttccggacctgtctatgaacttctgctgctcggcgaacagcattgtacatcggcttttgtagccgctccagttccctcttttcctcactagttgttctccataagttatcatccttatattgctgaatttcaccctcggggaaatctcctgatgggaaaagttcgtctatgggaattgatggaggatcagtctgctgaagagggcctttcttctttttggatttgcttttttttttttttttttttgcagcttctgatcctccatcttgagatggaccatccccttgcgcttcatcatcatcatcttctggtggtgaagaatgagatccattgctatctgcaactttgccttcttttgatgaggtctcgcatgtttctccactaaccgcatttggattttgtccaacgagtagcgcctccatctccttggtcactgcatcagcagagccgccagccatattgtgtaaatatttctattgtccagtaatcacaaacctcaccaggatcccctcacctcccctgctctcctcgcctcagatggagatggagatcgccgcccctccccgcgactcgtcgcggcggcggcgcaaggagcggaggagacaaggagacggcaacctcggcgagcggtgagggcgagagaagagaggagagcatgacacagcaagaagaacataagcatcagtattcagtacacccaaaattccaagcacaactaaatcacaggacat

SEQ ID NO: 34593 - DNA, 1383 bp, Oryza sativa
  Clone ID: PAT_MRT4530_38594C.1
cccagtaattattacatctatccatcaccatctttaattttcaccgatgaaaaataatgagagacaaacaatcttgaaatgtggatgggaattgaaaatgaataacaatgaatacgagtactgagaaacacttggaagtgccgagataacaacaacgaactttacaagcaggatgaattaagagagtcctcttcttgtgttattattttgtatccttgaaattaagaaactgatttaatttaagcgttcttggttgggtaggaggccatcttgttgatgccgcagaggccgtcgtgcttgccggtgcccctcctcatccggatgtaccccttctcaccccaatgcgatccccacgagttcttcacgatgatgtaatcgtgtcccttgctggccgtcccgtatccaacggccgtcacgccatgatccagccgcgtgccgcacggaccatcaaacacacccccgctgtagaactggaagttcctgcctgaggcctcgatggcgacgctgacgggctggtgggccagggccttgagcagggcctgctcgttgttcctcggcacgtcctcgtacccggagatggtcaccgccgccgccgcctcgccgtcgtcgtccccctccgtgctgccgcggcggcaggtgccttcctccatcaggtacgggtaggactcctcggtgtggaggccgccgttggcggcgatgtaggagaaggcgtagtccatgaggccgccgctgcagccgttgttgccgtcggtgtcgcagtcgatgagctcctgctccgacaggcgcgtcaggttgccggtcacgatggcgttgatcccctccaccgccgccaccgtcgagaacgcccagcagctgccgcactgcccctggttcttcacctccgtcaccgcccccttcttcctccagtccacctccttcggcaaacttgccgcctccacctcctcgtacctgaacaactgatcgttgctgttcctcctcgccggagtgagggtgaggccgaggtaggcagccttgaactcgtcgtgggtgaggtcggcgaactcgttgaggcccagccagtagccggtgatcttcttgttctcctcgtcgatgtggttgaggttgtccttgaacacctcgaacctcctcagcttctcctccaagctggagtaggccttgcggtacttggccatgaacttctcgaacagctccatcagcctctcatgcgacgccagatcctcctccgagtagccaactatggacaattcactgggcatggctaccgctacgcatgcgccgccgcacagcaggaggagcacaagagccaggggaagcttcgaattcattgaagccgccattgttgcaagctactactagtaggatgatacaagccggacgcgtggg

SEQ ID NO: 34594 - DNA, 363 bp, Oryza sativa
  Clone ID: PAT_MRT4530_38595C.1
atggccgccctccccccacatgccccacttccatccttcgtcggcgtcagcgattcaccggcactgacaaacgggcaagtgtacaaccctctgcaccgggtggtggtgtccggcgacgaggcccgctactccgccatcctcttctccctcccggtggacggcgccgccgtccgcccgctcgacgaggcggtcgacggcgaccacccggccatgtacaggccattcgactacggcgagtacgccgtgttctgctacttgccggagaacatgacgccggaggtcatgaagcacgcccacaagctggaggccttcgccgccgtgcgcaccactactactgcatctgcatctgcatctgccccttaa

SEQ ID NO: 34595 - DNA, 1674 bp, Oryza sativa
  unsure (1)..(1674): unsure at all n locations
  Clone ID: PAT_MRT4530_38596C.1
gcacgagggttactgcgagttctaatcctagaattttggggcagtcagggtgagcaaaggagtggagacctaataccagtatgtagattatttcagctgagatatttgaaaacttcaggtgatgtagttgttcagttaccagctcagataagtgggctacagtacttggaaacactggaaatagacgcaagagtgtcagctgttccatttgagcgggttcatctcccgaacctactgcatctccaacttcaagatgagacaaaattacctgatgggattggctgcatgagatctttgcgtacactacagtactttgaccttggtaacaactctgtagacaacttacggggtcttggagagctgacaaacctgcaggatcttcatctcagctattctgcaccgtcatctaatgagggtttgatgataaatctgaatgctataacctcttcacttagcagacttagtaacctcaaatctctgattctatcaccaggtgctataagcatggttattttctttgatatatcaagcatcatatctgtggttcctgtatttcttcagagacttgagctgttgccacccatctgcatcttttgcagacttcccaagtcgatgggacaacttcacaaactctgcattttgaaagtttccgttagagaacttctgacaactgatattgataacctcacaggattaccttccctcacagttctctcattatatgctcagacagctccagagggaaggtttatcttcaaagacgggactctcccagttctcaagtatttcaaatttggatgtggtgaactctgccttgcttttatggctggagcaatgcccaatctccagaggctcaaattagttttcaacatccgtaaaagtgagaagtaccgccatacgctttttgggattgagcaccttgtaagcctccaggatattgccacacgaattggggttgacaccagcaccggcgaatctgatagaagggctgcagagtcagcattcaaggaaactgtcaacaagcatccaaggtgtcttaggtccagcttgcagtgggtggtttccactgaggaagaaagtcatcctttggagaaacaacatcataagagagaaaaagtctcatcagctggacatggggttttagagaaagaatcagtggaagatagcgagaagaacactgatagagtgcaaacattattgtcaccccaactgtcaaacatggagagtgtggtggaaagtgcattaacggggcaacgaactaagatagttgttaaggtgcacatgccatgcggaaattcccgagcaaaagccatggcgctggttgcgtcagtgaatcggtaatcccccgctattatattcttccggttgtgcagtcctgatcagtactcctactattttatgcctttatgcttgcaggggtggagagcatgcagagcatgcagataacgggggaggacaaagaccggctggaggtggtcggccgtggttttgaccctgttcgcctggtggctctcctgcgcgagaaatgtggcctcgccgagctcttgatggtggagttagttgagaaagagaagacacagctggctggaggaaagaaaggtgcatacaagaagcaccctacctacaatttatcgccgtttgactatgtanagtatccaccttccagcaccaatn

SEQ ID NO: 34596 - DNA, 1053 bp, Oryza sativa
  Clone ID: PAT_MRT4530_38597C.1
atgggatggtctaatcagttaaagaaaaagctaaattttaaatttttaaacttaattttaacattggacatctccaacaactctttgtcaggaccactaccgctaatctttggagctccaatgcttacacaactagtactgtccataaataaaatcaacggcaccattccatcttatatttgtgaattgaagtatttagaggtattagacctgtcagataactttctagttggaaaacttcctcgatgctccaacggttcagaggctaagcaagaacttaacatgtcccctgattctacacaaatgcaactgtctgctttgattttgtacaacaatgacctgtcaggcaaatttcctgaatttttgcaacattgccaagagttgactcttcttcacctcccccacaataagtttgttggagagttgccaatatggatagcagagaaattaccgcgtttgtcatatcttcaattgcggtacaatttgttctctggctctattccagttcagctaacaaaacttgaaaatctccgatatttggaccttgcatataacaggatatcaggaagtatacctcctactttaggaggtttaaaagcaatgattcaaggaggagatatcccagaggaaataacatctcttgttggactgaagaacttgaacttctcccataaccatttaacaggaaatattccagagaagattggtctcctgagatatgtggagtctcttgacctatcattcaacatgatatcaggcgaaatcccttcaagtctctcagacatggcttcactgagctacttgaacctgtcattcaacaatttgtccggaagaataccatcagggaatcagctacagacacttggtgatccagatttcatatacatcggcaattactatctctgtggacctcctctttcaaggaattgttctggaccggaggacagcatacaaacatctgtgtggaaaacatctgcagagtggtttcacaaatcacagaggattcaaaacaagaagggacaaggccaggcatctgtctctgaaggcacatga

SEQ ID NO: 34597 - DNA, 435 bp, Oryza sativa
  unsure (1)..(435): unsure at all n locations
  Clone ID: PAT_MRT4530_38598C.1
gaccantacttgttgnnntnncccaaaacacatttatctcgcttgtgtgctagataagtccttcacccctcctcaagatgaagaagacgtgtttgctgcggccgtgtgactgctagtgctgcagcggctgtcatgtgcgttggtggctgctgtggatgcaagatgatccttgatgtataggccacatgccactcaccaagaccttggtcctcgttgctacataccaagaaggcgagccttgcaggaatggagataggagtggagagcggcgacaacagcagctagcggctgcaacacctgcaagtgtggtaccatgtgcagcgtctgttactgcatgctcctgcatctgaatttatcgaacgtcgacgaccaggttgcatgatgatttatagtatggaatgctggtactgtccatcaaagctttgatcgaggact

SEQ ID NO: 34598 - DNA, 814 bp, Oryza sativa
  Clone ID: PAT_MRT4530_38599C.1
ggggctgtgctttgtgggctgctgccctgtgggctatttggcttgcatattgcgcagccgccctgtctggccgcaagtgtttggatgtgtttttttaggtgcaagaagtgtgatgagcgccaatggatgcaagtctgcgcagtgcgcgcactgggtgcctgggctgaacaagcaatacaaggtggctgtggagcccctatgtgatggaaatggaggtgtgcgtgtaaggcatagcaagtgggcaatgagccggctaaagccccttgctgtgcgcaatattgccatagctgcgccatgtgtgcaaactggagaaacaaccaagtctggcaacatgctgcgcgcttggtggccgcaaaacaattgcctcaactgatgccagggacaattggaaccactttgttttccaggcccccattaggccgccaagccaagccttaaccaaaaccttcccaagccaagttttttggttgaattccttcctgaacctgtgtgtgaattccggaaattccttgggcttccaaggcttccaaggcttccttgttttggcctttgaaaccggtgccccaattgccttaagaattaattggttaattctaacccttaaggttaacttattggttgccaacccttaaggtaacccatgaacccaacccttggccggtttgtgtccttggtaatggagttttaaccagtaataattggtttcggaaagttaaaaataagctccagaatatcatcataatgggaccaggggaaccttggggtgatataaatagaaaaaaagttgtctttcatatttaaaaaaaaaaaaaaa

SEQ ID NO: 34599 - DNA, 1142 bp, Oryza sativa
  Clone ID: PAT_MRT4530_3859C.1
acgaatagagtacccactagttggggttttgtttattctagggtgaacaaggccgaggggaggggcgcgcggaccgggtccacgggagtggggcccacgcggcagcctctcggtccacggtggaccgggcgcacgcggcttgcgctggccgatgccgtgggtcccacgcgtcagccgcacccgagggcgcgggcggctgacggccgggccccacatggcagccgcggggcgcgcccgaaggcggcctcgccggcacggccgacgggaggcggcgcgcccgcgccccgatggtcgccggcggcgacctccggcgcgacggagcggcgcccgagagaggggagggaagggggaagcgaaatggcggtccaaggctcaccccgggtcgacggcgacgacggaaacggcggccgaagcggagagaggcggcggcgcggttcgggtcgacgaggacggcggcgttccggcgggcggcgggcgaaacggaggggtggacgaggtcgacggggacgcggcgaagccgaaggaggcgatgccgaagcggcaggaggtaccagggcgacgacggcggcgaaccgaagctcggcggcgacggcggagagagaggacgacggcgcgagctcgattccgacggggagagcgagcggcgaacggcggaaacggaggagggaggcacggggagcgattatatagtgttgggagtgagagagggcggccggagaggaaggaaaccggcgcggctatctcttttccattgatgcgccggcgaagttcgcgggagtaaatccgaacgaatccgagggagagagagagggaaaagtggggggaaagagggagggaatcacggggagtgatttccccctctttaatgcgcgcggggacggcgggatgcggcggaatccgcggcggcggcggcgctagggcacgggcgggcggcgggtgcggcgcgaggtaggggatgacgggtgggccccacccgtcagcgagggtggcgggcgggcccgcccgtcagcggcgcgcgcgcgggggaaggccggatgggccgcgggggagaggagagagaggaagctgggccgagccggcccaagagggggagggggggggaaaaaagactttttagggcttttctttttataaaacctttt

SEQ ID NO: 34600 - DNA, 279 bp, Oryza sativa
  Clone ID: PAT_MRT4530_385C.1
gccaccgtcggggaggaggcaatgcgatcgggaagcgccgcggcagtcttcgccgccacggcgccaccggctgttgaagcgccaccacctccacctccgcctccaccccgcgctagcaaccacctcttcctcctccccacctcccttccccttctcctcatcaagcttcctcttctcaaatcacagccatgtcgcgactacacactgggtcgagtagcaactagcgagcacgggctagcccacgccgtcgtgccggataacgagccggagaagaaatag

SEQ ID NO: 34601 - DNA, 639 bp, Oryza sativa
  Clone ID: PAT_MRT4530_38600C.1
gggctgcaggaattcggcacgaggctccactctccatcctcctctaaaatccatttcaaattcgcgattctgattctctccttaatcgaatcgcgaatttcgttagctgaatcaaatcacagcattcgctagctgcacaattcttcttatcggaatccaaaaatgcaaccggcgatctcccaattccccgccgccgccgttcgcctggctggaccggcgctcccataccggcgaccaccacagaagacgacgacgtcagtgacattgaggaagccggcggcggtgaggtcgcggcggcgcgacgacgcggatcagttcttctcgggcggcggcggcggcggggtggtggacgaggggatgatcgagctgcggcggaggatccacgagatgagggcggcggagagcgggtgggagccgccggcggagtgggcggcgtgggagaaggagtggtacgggagctacgacgccgacgtgtgcgcgctggtgggcgccgtgcaggccttcctcatgagctcccgccccggcgtcggcgtcgggatcgtggcagcggtggcggtgagcgttccgaccaccgccttcgtcctcgtctccggcctcctccatgcctcccagtctctcctctccaacctccaacactag

SEQ ID NO: 34602 - DNA, 233 bp, Oryza sativa
  Clone ID: PAT_MRT4530_38601C.1
atagacacgtgtgtttccacctaaaatttatttattcagtaatttgatcaaagtatatgtgacgggctttattcttgcgaccaaaaacgcaaggcgtgcaaccctacacgtgcacatacatctgagagttgtttaaactacaaatctcaacggttggtgacacgaaacgatgtgacagaatggatggcaagactaagagctccgattatatctgtatagactttggccacatg

SEQ ID NO: 34603 - DNA, 299 bp, Oryza sativa
  Clone ID: PAT_MRT4530_38602C.1
aatccttccctggttctgttcacctgcgcacacaggtgtacgggacgagcaggtgcctccgaaactccgtccgcttgagaacctgcacgggtaggcaagcgatcaagtttttgggtagcgcttcaagcgcgactacccttattcttcacggctactgctgctgcatcgacgccttcaccaagatgtcgacgaagattagaaacaagatgatgaacgacatcaacggaggcaatacttcctcaaaattcaacggtgggacgttctcgggtttcatctacttcctccgttttacaatataa

SEQ ID NO: 34604 - DNA, 2099 bp, Oryza sativa
  Clone ID: PAT_MRT4530_38603C.1
gggaaaaaataactcaggttcatcactctcatttcatcattgtgcactcctaaagagtttttaaaaaatcgcagattctagttgtacaaagaatatgtccaggaaaaaggtcaggggtgtctacatttctgcagccccaacaaatctaacattgcccaaccaaccccatacaacaaatgtctgccctacttttctttccccgaggaactattcctaatatatctaaagaaacactcgtttcccatgaaacatatctaatctgaaaacagtcttacacaatgcagcttgtaaaattaatagcatctcacttagcaggggtagcatttgttttattttgcatagtacttgcttgggggtcttcagttgtcttggatgaagcaccgtcaatggcaatgttccccaagttcacagccattgcatctctctcttcattctcaatcctctgtttctctgaaacaccatcatcggacgaattctgtgtcaggtctgatggccgtttaggctgccggcgaaggggcccgacatcaagccatggatgttgaagcagttgagcggctgaaggacgcttttcaggaacaaaatcaagtattggaacaagaaactctgccatgccatttgcatctatatcactgaattcatatttctcaaccaaaaccttgttgagcggccaaaaccgcaagcgccgaatgtgcctcaaatccccataacgattgaagaactcacgtgaatatcgaccacccaaggcaatctttcgaggcatcattcctaatagctccatcatcagcgcgaggtgatcctcatccctgtcataactgtcaccactgtgcggatcaaatagcacatctcctgtggcaagctcaaagcatatgcatgcaaaggaccacaagtcagcagatgtagaatacttggatcccagtatcacctcagggcatctgtattgccttgtttggatatcacttgtaaactgtttgtatgtccaacatgcatttccgaagtctaccagtttgcacttcaggtcagcctccaatgccatttttttcctggtccctttgctaccccgtctactcccttcaccttcttctttcttgtctccatcctgattcggactaccctcgtttgccgtactcaaatttcccctatcatctgacccatccgtctccccagatgcaacagtcccacttccttctgaagttgcagcggctgcacgcttggctttcctccgaatcttcttcttttggttcctggtgagaccaccattcactgatggtgcatgtgcctttggaggaggatcatcagttcttgcagaaggtgccaccagcggcacacctgatttccgggggtccttcgagggatcaatagtggattcaagcaatatattctcaggcttaaggtcagtgtgaatgattgaaagtgtgcggtggagatagtcaaggccaatgagcacatgtcggcatatctccttaaccatgggaagtggaattccatggtaatccgtgtactttatcagggtcagcaaattatcaccaagaaactcaaacaccatgcacacatggttcccattaggccccgagtgcttgaagtggtcaagaagcttaacgacgcaccgagagtcatcaggatcaccatcggcaatctgcttcaagatcttgatctcatccatggccgcctctgtgtagtgctgtgcactcttctgcaccttcagcgccacatatctggagtggccggtgtcccaggcgagccagacggtggagaagtggccccatccgagcttggactgcacgacgtaggcgccctgcttgaacgagtccccgacgcggacggcgtggtaccctccccggcggtagtcctccgtgccctcgtcctccgacgtgtagtcgctgctgccgccaccgtcgccgtcgtccccctccgtccccgcctccgcctccatctccgcctcctccgcccgccgcctcgtcgcccttgcctccgccatcgccgggggatgccctagatctgagcgccgcgggatgcggtgggccgcgcggattagggttttggggcggcgccgcgcggattttggtggtggcggaggtggagagggtggtggtggcgctcac

SEQ ID NO: 34605 - DNA, 616 bp, Oryza sativa
  Clone ID: PAT_MRT4530_38604C.1
ctattgagcggtggtcctcgcgcggctcttcctgctgctcctcacacgactcccgcgatgatcgcgcgctgaccacgcctcgctcttctcgagccgctcctcctcgctgattccaacagcgacggtgattccaatgattccaccgatttcactcgaccagtgccgacccactggtgcaccgccacaacgccggatcagcgccgagccaccaccgcacaactgcatccccttccgccggtgccacgcccgggactgcccccgacgacgacggacgcacgctcccattgctcctccgcaaatagctcctgagcttcacgcgaagcccgtgcctcccgtcatcggctgccacccggcgtctatcgccgtcgctgttggatgcaggtcgttgtccggcgttgactgctctcgctattggatcaaggttgtcgcccatcgtcaggcatcatccactgccaccgccgctcgccggctcgccgcccgatcgagcaggccagcacccatctccagtgcccaccaggtgaaccaggtgcgctgcaaagatgaatgtgctcttatcctgatacggcatatagtgaatcattgtggaatgactgaaatctgttttactgtggaatga

SEQ ID NO: 34606 - DNA, 349 bp, Oryza sativa
  unsure (1)..(349): unsure at all n locations
  Clone ID: PAT_MRT4530_38605C.1
nctctatacatacgacacagggaacatcacaccaacatatgaactaggtcgcccgcgactgttcttcccctttcctggctggccgaggcgagcgaacgactgacgcgcgcgggcgcaagcgccactgatcataacatgcaccggcggtgctgccttctgcgcgcgcgcggctagagcgcggcatcgacatggcgcccatgacaagtgcagaccactgcacgggcaccccggcaccggcgggcgcgcacaggcgctgcatctaacacgtgcacgatcacaacatatgcggcgctgactggcccgtcgactgggcgctcacgcggcaagaagggcgggtaccctacaaggc

SEQ ID NO: 34607 - DNA, 402 bp, Oryza sativa
  Clone ID: PAT_MRT4530_38606C.1
actccaaaaatatattccaatgtttttacatgatggagtggcgccacaacaaatacttatttggagaggtcatatataaaaatgaacacaaatgcaccccacaaaagaatgaacgaatgaatacaaaaacaaaacgtccaatgagaaaatgggatggaacacacgtcgaattcaatatatacaggatcaggcgacgaccctgcattgccttctgatctcgccggtgaagccgggcttgacaccggcggatgccatcttgacgaacgccttggcgaacttgtcctaccaccacccaagaatgtgggcggaggcctacaccatataccccggggcccccaacgggagcagcgcctcatccgacgcgaagagcaccttgtgcgccaccacgttcttggaaaactg

SEQ ID NO: 34608 - DNA, 396 bp, Oryza sativa
  Clone ID: PAT_MRT4530_38607C.1
tttggggttttaaataggttggggttttttttttttttttttttttttttttttttttttttttttttttttggggtttttttttttttttttgaaagaaaggacaaaaaacaagtcaaacaaccaacagggggttgggggggtgccaaaccccccacccacccagggggggggggggaaaaaacaagaatcgggggggccctccaaaacttcaaaaaggagtttcaacaaaaaaaaaaacctgggacaacctttaaaaccaaaccaaggggcgggccaaccccaaaagggcccgaaaataggccccaaaatccccggaagagacccccgggggggggaaaaaagcccccctttgaaaccggggggggaccttttggggaaaaaatgtttcccccc

SEQ ID NO: 34609 - DNA, 376 bp, Oryza sativa
  Clone ID: PAT_MRT4530_38608C.1
ttgtttttttttttttttttttttttttttttttttttttttttttttaagaaaatcttcttttgtttgagttaacaatagaatctttttttaatcacaatttgccccccaaaacaacccccaaaaaatttccacatgatgaaatttgggcgggtaatattactaattctacatgtataaacccgctgcggatgaaattatttttttcctttaatataagcttaattattgattgacaactagtagggggtgttgaccatgaagcacttttttttgatctctccctcggcacccgggagcacgttgatgttgcccatttttaccatggggggggcgaacttgacctggaacaccttttcgacgggggagtggagct

SEQ ID NO: 34610 - DNA, 345 bp, Oryza sativa
  Clone ID: PAT_MRT4530_38609C.1
tcactggcgctgaggatggctgttggtggcgttgcagaatgggatactaagatctttgctttcaccaattcgagagctgtacttcagatcgagagtgaatttgaagacactttgagtttagaccagaatctcgactggtgaactgagcttatatataccttctgtttacttaagcactcgttgcaagagaagtatgattctcaacaggccttcattctgagacagccaatgaagggtgccaccttcatcctctcatccagggtcacacagcttccccgtaggatatcctgtgggccgtcccctctgactcaccctcgagctccactctctctccttcggcccctt

SEQ ID NO: 34611 - DNA, 561 bp, Oryza sativa
  Clone ID: PAT_MRT4530_3860C.1
atggcgaacatgctgagggccgccgacggcgcggacgtggtggtgctggtgcgcgaccagccgttccgcgcccaccgctgcgtgctcgccgcgcggtcgccggtgttcagggcggagctcttcggcggcggccacatgagggagaggcggacgagctgcgtcgtcgtcgacgacatggagccctccatcttctcggcattcctccacttcatctacacggattccttgccagaaaacccggacacacctggcgatgatcaagattgcatggcgatgcagcatttgatggtggcagccgatcggtatggcctggacaggctcgtgctgatctgcgaggagaagctgtgccgcggcattgacgtgcagacggtggcgacgacgctggctttggcagagcagcatcagcgtgtagcgctcaaggatgcttgccttggtttcatagtctctcggggtgttcttggcgctgtcgctaggactgatgggtttaagcatctgctcacgacctgcccgtcgattatggtggacattttagacaaggttgccagcgtcatgagcaagtaa

SEQ ID NO: 34612 - DNA, 281 bp, Oryza sativa
  unsure (1)..(281): unsure at all n locations
  Clone ID: PAT_MRT4530_38610C.1
aaagggaaagctatttctttacctatgtaaaaaattcaanatggatttcttgtcagaaaacacatatgaaaactatttgtaggttcctatggttgggacacaatcacctatccggatcttacctaatgacccatgtaatttcttcctgggcctcctggtggagtactgccatacccaccaccacccccatagccgtccaaataaccaccagcaccaggcatcccatgcaaaccactactacccagtccttcagaaacccctggtttagcaacccttaacca

SEQ ID NO: 34613 - DNA, 2934 bp, Oryza sativa
  Clone ID: PAT_MRT4530_38611C.1
ctaccttgcgtccgggctgcctcttctcgactggagcggcgcccaagccgccgctgctcgtcccgtcgcccgccggcgcggcacaccgcatctgctcgcgccggcgcctcacgtcgcttcagcctcctcctctcgccacaaatgacgccgcctcctctcaccgtagatgccgcctctcgtcagatctgacggagctcaacatcggtgcggccttctccgttcggtctccaccatccggccactgcgtcttccccatcaagaacctcaaggacctcgtcatcttctactaccttgtctaggtcatggagctactattatttggtgaagatcgaatggtggcaaagataggacaacaatgcatgcagttaccatcttcatttcttaaatttatggacaaatcagattttgggacctgggaacttagtttgtggttgtactcaatgttctaggtgttgatgtcctttgcttccgattttattttaccttactgtggtgatgtataagaaaaacttctcagtgggctctttgctaaacactaaaatttaaatgcttgtaatattgtttggagggcacagattgacttaccacatgtgaatttgtcaactgatacaatgcatagcagtgttaattatcgtttttaacgccaatattgtattcatggaaaatgtcaaatgcaagtttatcctcatcataaatgtgacctctgttgtcacggttgttaaattcagctaacctggacttaaactccatcgcaatttttgtaagaagagcaggtggttctttaattgattcactgccacaacttttagaatttggaggacacacagtaccaggagtacagaaagcttggccttcacaacaacaatttaaactgccatcgctatgaacgatatttggagcatcaataacattattgtctgctaaatcattagtcaagtgttccccgtgtccttgatcaagattggcatcaatatcaatatcagcattcctatcagaagatgggtaatctttcccacaagattttggaatagcattttcagtaggtgtattagttctattttcagcagaagcattattgtacgcagcacgaacaaaatggctagcactagcatcaatcaaaatctgtaaagcactaatcaagacatcttcgcaagaattgttctttgcggcatgatttgctgaaaaatgagaatccatcaaatcagatatgctgtccttcaaatttgcaggcaaattgtctcctatagctgtatccaacttgttgcgaaatgattctgaattttgcacatgtacaggcttatagtaacatgtatcagagaaatctttaagaggcctcggtccataattctcatcatcaatttcatctaaatcagagtaaatcttcaccatatcctgcttccaaacagctatacgaggaacatctttcggcacattttttgaaccaaagtcacgatgatcaagatacaaaattgcccagatatataagcaaccaccaaagctattggtcttctgaaatttcttaacatagctcatcagccagtcatagacgaaacttgaccaatcaaaagaatgcaacatatcgacatcctcaaaaatatctagatactttatggatggacatgtggaagagttaggacagagaaaagtagctaaggcaacaatcagaaatgatataatgatgctgtcgtcggtcatatcttcattattaatcaactggtctccaaaaaaattcactgaaggcatgacagtttttccaaatttggataaaatgaattgtcttccatgttcatagtttttcccaaattctgaaccaccaattggaagatcaagaatagcatggacagcttctttgttgaccgggatcaccttgtcacccaacacaatctcagaagtctttaaatccacttttttcacaatccaagtcgcaattttttttggaataaagcttgagtcaaacaaaagcaaagaatgaaaaccaaaattcttaatcacaattttcttctcctcgggaagtttagacacaacttctgcaaaatatttagcagaaaatcttatgaatgatgtgtcagtcttcgaggcggcttttcctttatggatcttaggcttgtgtcgaacattcttagaagtactcactaattcctttttcatcttttgaatgacatccttcttgaaaagtgcatacaacattttatccaatttagtttcattgtgcgctcccttcttttttatacccttcttactgtaaagctcatgaagcatattgtcaaatccagatatattgagtgcttccaaaacctcatcaatgtgataatcttcatctgaccctgtgcatgtgtcactttcagaatttatagagttaccctcagattcctcagatgagatgtcaattgttctacgtggcatctttcgtttgcaaataagtggcatcttggttttgctactgctgacacgcattagactgagttcatgcctaattatcttaagtttgccatagtctgagattttaaatgtacatgtcgactgaaactgtgcagtacccggcgccgagagcaggttctccgccggcggcgagaaaatcgtcgagagcggggtctccgcctcagcctccgcttgggtctcctccccaacgggaaatttcttctcggatctcgtgaaaattgatgggtttgggtctgagagatttagggatgtgtgcttatgacattcttggttcatccttgagttggcaatttttccagcccacctagtacttccatccatctcatgcctattaaaaaaaccagtcacaataggtccctcggtggttttgaccccgattttgtcccacgtggcagctggctcagcgtgggacccacgtgggccccacatgtcaggctgccacatcagcctcctcctcctctctctctctcttcccctcttctctcccttcctcat

SEQ ID NO: 34614 - DNA, 245 bp, Oryza sativa
  Clone ID: PAT_MRT4530_38612C.1
gcacgagggcgggtggggctgcgtcgatgagggtggagcccaagtgaagatggtggatttgtttccaacgttttgtgtacagcttgatgatttagagtatgtacgatttcatttgtgtaaattttggtcgtctatgcatgctaagtttggatttttgaatttgaatgttggatgatggctaattgagaatttggggtcgttgtcaatcgaactatacccaaaaaaaaaaaaccagttttcttttc

SEQ ID NO: 34615 - DNA, 454 bp, Oryza sativa
  Clone ID: PAT_MRT4530_38613C.1
cccacgcgtccgcccacgcgtccgaaaaaaataaaaaaaaaaaaaaaaaaaaaaaaaaaaggaaaaaaaaaaaaaaaaaatttaaaaaaaaaaaaaaaaaaaaaaaaaaaaaaaaaaaaaaaaaaaaaaaaaaaaaaaaaaaaaaaaaaaaaaaaaaaaaaggggggccctttttaaagaatcaaagtttacttccccgggcttgcaacttaatattttttttttggggcccccaaattaaaattcctggcccgggttttaaaaacgtgggaatgggaaaaaccttgggtttcccaaattaaatccctttgaaaaaattccccttttccccagttgggtaaataaaaaaaagcccccacccaatcccctttccaaaaatttgcccaccctaaatggcaatgggacccccccttttaccggccctttaaccccgggggtggggggggttcccccc

SEQ ID NO: 34616 - DNA, 742 bp, Oryza sativa
  unsure (1)..(742): unsure at all n locations
  Clone ID: PAT_MRT4530_38614C.1
ccggccgggggaaatcagacccctttcacaacttgacattgactttaaggaaggcggcgaactacaacgaccgagagtctattccctaccgcgcgaaaaacgaaagaaaaaaaatcaaaatcacacaactcatactcgcctgatcgaccgccttatagactgctcacggcagcccctgttctcgacaattcgtccctactccgacgacaacctcatacccgccatgtccgaagcctacgagcgagagcgccagaacaatgcgcgcctcgacgaactatccgccaaagtctctgctcttcgtggagtgacagtcgacatttacgataatgcccgagcccaagatgtcattgacaacacctctgatactttctcctccatgaccacacagatgaagggctctgccggtcgcttgactcgcatggccgcatctggcaaccgtgttgcgatccttaaattgtcgggaatcgtaattggcgttttcttggtgttgttctacggtgcaaaactgattttctaagacttgggagcgcaggcgtctactatgaatttgagaagtgctataatgattagagcggaaatggggtgcctgtcatttttgctgtgtacggccaggaaaatacgactggagggtatcccagacatccaagtgtccacaacccagaagctagagangtatcccttaggaagtttactgtttcggcagcgttgggtcggcgttactttgatacattcacatcgcttg

SEQ ID NO: 34617 - DNA, 332 bp, Oryza sativa
  Clone ID: PAT_MRT4530_38615C.1
cccatgcgtgagaggacatatagtctggcgtgtgagttggcacttaggagcactgtaaggagagcctatttacggtgataattctacgatgaagtggaaagctctaggcataacatgcttgaaattatatttatgtagatcaactaaggcctagctatatctaggcaacacgatgtggagattgcattttgacgtatacaatacttaatatttaaggacttaatgctgggctgtgattctgttgatttaaacgctctataagccatgtactactgatcgtggcaatgatggacaaagcatcaaggcttttgtaataaacttctgcacactca

SEQ ID NO: 34618 - DNA, 122 bp, Oryza sativa
  unsure (1)..(122): unsure at all n locations
  Clone ID: PAT_MRT4530_38616C.1
gcttggaatatttgacgagagagacaagcaactaagtctaggtaaggaatacatacacatgacttatcacaatataagagagagggatcaatcgataatagagtgattacagngcgtcacac

SEQ ID NO: 34619 - DNA, 462 bp, Oryza sativa
  Clone ID: PAT_MRT4530_38617C.1
atgacagaaaggctgttgagatggaagaacgatctttctgaagaaagggataaatacgggagtacacctcttcactttgctgcatcagtggaatcgtcactacacaatcgattcagttccaaagcaattgtctccaaagttcttgaagcttgtccttcttcagcatttcaaccagacaatgaagagtccctaccaatccatgtcgctgcatctgcaggtgtccggagcgccatagcaatcttgatagaaaaatggccaggttgtgcctcatttcgtgactctgatggaagaacattccttcacattgctgtcgagaagcagaggaatgatattgttaggtttgcttgcaaaaaagacaaagaaggcaacactgcactgcacctagctgtccagcttgggaacctgagtttagtctgctctttgctaggtaacaagcgggtactcttaaatctgacaaataag

SEQ ID NO: 34620 - DNA, 768 bp, Oryza sativa
  Clone ID: PAT_MRT4530_38618C.1
atggattaccaccgaatccacccggtgggcgtcggctcgccggcgccggcgccggacagccagcagcaggtcggcaaggggaggtcgacggcgagctacggtgagaaggagcagctgccgatcaccgcgccacggccgtacgcgccggcaccgctgccgccgccgccgccgcggcgcaggagccgcgggcggcggtgctgccggtgcgtgtgctggacgctgctcgccgtactcgtcctcgccgtggcgctgggcgccacggcgggcatcctgtacgcggtgttcaagcccaagataccggacttccacgtggaccggctcaccgtgacgcggttcgacgtgaacgcgacggcggcgacggtgagcgacgcgttcgaggtggaggtgacgtcgacgaacccgaaccggcggatcgggatctactacgacggcggcgaggtgacggcgtcgttcaacggcacggagctgtgccgcggcgggttcccggcgctgtaccagggccaccggagcacggtgcgccccgtcatcctgctcgccggcgagacgcggctggacagcgccgtggcgctgcagctggcgcggcagcagcaggccgggttcgtgccgctcacggtgtgggcgcgcgtgccgatccgcatcaagttcggcgccatcaagctgtggaagatgaccgggaaggcgacctgcaacctcgtcgtcgacaacctcgtcgccggcaggcagatccgcatccgctccaacagctgcagcttcaagctcaaggtctga

SEQ ID NO: 34621 - DNA, 113 bp, Oryza sativa
  Clone ID: PAT_MRT4530_38619C.1
tttactttttgctcgctcgctcgttaacggaggaggcgtactttctccacagacttacttgctgctatatctgcatgatccttatcgcacgataccgtactactaccggaggg

SEQ ID NO: 34622 - DNA, 1330 bp, Oryza sativa
  Clone ID: PAT_MRT4530_3861C.1
gtatccttggttaggggacagaccgttggtaccaaccatcaaaaccttccaaatctccacaaatcctactaccgaaggtttagggattatctctgaagtgcccatacggtacaatagcgttgaggtcatcttagatttccatctgtttgatatctctgattttgacatactcataggacatcccatagagaaactcttaaatgtgcccgaaaccggtgtcctcaacctgaaagtaggaaaaatcgtcacctccgtccctgtattgcaatcaaccaattctttgacggagcctcttcctgttcctgagccaattgaggaagtgatggctatttctccattcgaggccccagagtctaatctcgatgaatccatcgaggaattcaatgaaggggtggatgaatctggagaaacgattgatctgccaaaaatggatcagccgtcatgagccccaattgagctaaagcccttaccttcaggcctatgctatgcatttctgaacagtgatgcagagtctccagtcattataagtgacaaactctctgagagggagacgacccgacttatcgctgttttagaaaagcatcgtgttgcttttagctattccctccaagacttaaaaggcatcagtccgaccctttgcactcatcgcgttcccttcgacccgtcttgtacaccatctagggaacctcagaggaggctaaacaatgcgataagggaggtcatcaaaaaggaagtcttgaaactcctatatgccgggattatctatcccgtgccatatagtgagtgggttagccctgttcaggtagtgcctaagaagggaggcatgacggtcgttgaaaactcaaacaacgagttgatcccacaacgaaccgtcacgggatggaggatgtgtattgactataggaaactcaacaaggctacttagaagatcactttccgctgcctttcattgatgaaatgcttgagcggctagcgaaccattccttcttttgtttccttgatgggtattttggttatcaccaaatccccatccatctcgatgatcaaagatgcatgacgtctattttctccgacatgattgaggataccatggaagtcttcatggacaatttttcagtctatggtaaaactttcgatcattgtctggagaacttagggtcctacaaggatgtcaggaaaaaggacttggtacttaattgggaaaagtgccacttcatggttcgattttactgtgggagctgttcttgggcaaaccaaggatagaaagcaccatgctatcgcatacttgcatcaaaggatggtacattcagttgagcaaaatgatgatcgt

SEQ ID NO: 34623 - DNA, 609 bp, Oryza sativa
  Clone ID: PAT_MRT4530_38620C.1
ggtcaacccacgctcccggcaaacgcttttcctaagacaaccatgtcaactcatgacctctagactctagtttcagaattcagaagggaggagtttatgaaagcatgtcataactcacaacatagaacaaaccgttctacagagggaggaagaatcagacaaagcctttactctgtaagaatccagagtttgtcatgccatccttgtactctttcgttcttgatgagaaaattgcttggctgaagtgaagaatcttgtgcctagatcaagaacggtgtcacagccatcaattctcgagttaaccagtgacttgtaatcatctttccttggccttgtacttctttgacgcatgtttgtgcaattgtcagtcatgccgcggcttgaccagcaaagggttttatatgctcagcctgcatctttggctctttgcctgtttgccatgatgccatctgccgttggaatgtttaacgtcagctgtcaaggactcaaggctgcacgcacagcttcagctagagagtaccacagtgttttattatgataaagggcttgttcggagagcttaagattccgagaaataactggttagtagctaaaaaaaaaaaaaaaaaa

SEQ ID NO: 34624 - DNA, 450 bp, Oryza sativa
  Clone ID: PAT_MRT4530_38621C.1
gttctttgttttgtggagaggacaacacgtggcagccaacgctgatgttgccgtgctatatgaccatagtggggaccttggctgctcgcctatcactgtcttcttgtatacctaagtagcacatcttgcgaaaattctgctaaagttcccgctataaagacagaggtagatctgaaatggaaccctgagttcacactgttaatttttggcgccatccttctacattggatgtttgatactttcctgctcatcgaccactactatagctaactagctaattagtggccgcttagaacacaactgattccttccgaccgtatcctagattcggactggatttcactatcctgagagatattcaagccggtcaaaatcccgtatattctgtgacgacggagagaattagtatcagcgtgctggtgcagcatgatactggccggtaacgatcag

SEQ ID NO: 34625 - DNA, 469 bp, Oryza sativa
  Clone ID: PAT_MRT4530_38622C.1
acaaacaagagctatctcaatgagaactattcaagaacgagcacgctgtacagggaggcgcagtacaagcatgagacatctctagctggccacacaggggacgcgaacaccttgagacggagcaagacgctcaaaacgaacacacaacacgaaggcaggtaggtaggcagaccgaccgggccgaacaaccatgggtgcacacacaagcatgcatggaggttgcacgacctaagctagctcgtcactaaattgcagaatacgcacagagactactagtatgggatacagactatgagcgtacacacacatctaccgacggatgagctcttggatgcatatacaggatgcatacgatcgatggttacaatcaccctgaaccatgaaatgacagcgcgagatggtgaaagggacgcggacccctaacttaggggggatgctaccggattcaacggcgttgagacattggggg

SEQ ID NO: 34626 - DNA, 748 bp, Oryza sativa
  Clone ID: PAT_MRT4530_38623C.1
ccacgcgtccgcttccttcctgcatttcgattccctcttctttatcgcattatttcctgccctccattcttctatttcatgccctttctttctttctttctttctttctaataatcgatggcaagatcgatcaacctgttcgtggttttgggtaccactgccgatttcccccacaattccggggtaaaagaaccattttttggggggttattttttgggttaaagattccctttttgtatcacactgggggccataactgtgtgcaagtgctcacctgattttaactgatgcaggaagaattcgattggccaaccttagtgttatcaacatcaccagaaacagaaaatgttacctccagctctgtgagaagcacaaccaagaatgacgtggttattcagcaaggttccatctcttcatactggccatgggatgtcatgaaacttgaaaacgacacccattttctgtctcattcttcaggagatgggatgaaatgcacaaaggctgaccattttctatctcatgcaaacaggggttcattgaacttggattatcaagaacaaccttcaaagtccaattttgctactgaccttggatcacatgcatattctaaggaagccaggacacttggaagagtatatcatgggcagcagccttactttttcccttcaagctgttctggggaaaaatcttctgcattaaaagtagtggccaaaagtccagatgcatcagggcatatagtcgggggaa

SEQ ID NO: 34627 - DNA, 1452 bp, Oryza sativa
  Clone ID: PAT_MRT4530_38624C.1
cgccccccccgccggcggggaagaaaagaaaagaaaaatcgatccagatcggagaagcccagcgccgcccctcggcccgccgccgccgccgccgccgcctcgcgcagtcgagcagcatcacagcgggaaggcttaattaccgccgctccacgcgtcgggcgtcggcgccgtggtctgatccggcgagtcggaccaggggccagcagctagctgatccggggagtcggaccagggggcagcggcgaggcggggccttcgaagatgatgtcgccgaggccctccgcctctgccgcaccggaaggcggcggcggtgcctccacctcccgctcggtgcccacggcgaggtcaacaccgttgcaagttattcatattttgggaaactttgctagaatttggtctgtgtactccctgtataactacctgtctagtagtggggattcaatggtcggcttcatcttcagttgccttgtacctgcttcagtcatcttcctggctttgcagaagccttggaaaggccggcctctgcccaacacacaggttgttccgacagttatcaatggaggaattctggcattgtacttcgtgctgtggggtaaaggacttcttgcttgcggaccacttgtcgctctgctggcggagtacgcaggtgctgttcttggagttctctcagctgctttatatggaaggaaagttaacatatggaagaagcaactattgaattttttctgtgagttttttctgaatttctcaaaacattgctcctatactgatataaaaaatgaagtagcaagtcagcaaccaattggtgggctcgctgctatgctggtagcatactatctcttaggaaatggatgggctacaagaacacattcaccactatatagctttggaagtgaatcactggagaagggaacacaagttattggaatgaaagaaatggtggtcccacttactgctggaattttatctgctttgaggagagtattagctcggcgggtgtcccttaagaatcaacttaaaaggcgacttcatgcaattaatgttgcttctgctacatgttttctttttccttttgcaatgtgggatacaatcctgggctcggcatctgacagcatagttaaactgcagtttccaagctgggcgtacttgagtactgttttgtttggaatggtgcttatattctatgttgacaatgttgccgaggaaaaattgcatctggtcttctcttctccaagacatctaatggtttcaacaggttgcatcattgttttggagatactgtacaaaatggatttctcccttttgggctttctgctttgttcagtgattttaggatttggcatttttgaagcaacatccttggagcgctcgaagaaaagtcctttggaggcacatgaactatcaaatggatcatttcacaaccagttgccaatttctgcacttccaagctaa

SEQ ID NO: 34628 - DNA, 728 bp, Oryza sativa
  Clone ID: PAT_MRT4530_38625C.1
ccggccggggaggaattcctccactccgttcagtgattcagctttcagccttcaggaatattttttctggtcagcctacagagacaagttctggcaaggaagcatgtcagtagataggagttggatgcgcatgagtagggcaactgcagagtggcaaaaagggttgcaggaatttttaaattttgcatttcaagatgataatcctggggataatgccccctgtccatgtagaagatgccttaatgtggtgcacaaaacacgccccgaagtgcaaagtgacttgctaaggaatggattcgatgaaagttacatacagtgggtttaccacggtgaagattcagatgatgacaatgtcacgggaagattcagaagaacgtaaggaaagggaaatgctacgggaggatattctcaaaatgattactacgcaaagcgtagcatcggaacaacagtctgatctggcaatagattgtccaactgagaatagagaaccacatgacacaacaaagaaggctcgaagcattcagaacaacacagttgtgaaagcactttttaacggcgctaatttgcaaggaacaacaagtactacccggcaaaatatttcttcacaacatcttaggaatgttgctagaaattttgtacggtcccgaactgatcaggccggacgagcaactcggtgactgttggatggctggagctaaccacgacaaaatcaaacaagtgatggctag

SEQ ID NO: 34629 - DNA, 426 bp, Oryza sativa
  Clone ID: PAT_MRT4530_38626C.1
gcgatgacgcatggagcaaggttttatgccttgattccaaaaggattcctcagaactgggctgacacccaatttgctgaagctttgaccatggctcgaactgagtttaacaacaagagtgctgtaattatgatggttgttcaacctgaagaaagaaacatgtatgaccaatactggcttatcaatcatttgaaggaatcgcatggtgtgaagaccattaggaaaacattggcacaggtagaggctgaagggcaggttcttccagatggaacgcttgtggtagccggacagacagcttctgttgtgtatctcagagctggatattctgcaaatgattatcctgttgaagcggtatggagaggcaggcctttgtacagacaagcatctgctataaagtggccttcaatgtcctaccatttcacgggaa

SEQ ID NO: 34630 - DNA, 450 bp, Oryza sativa
  Clone ID: PAT_MRT4530_38627C.1
gggtacttgatgcggctggagctccacgccgtggaggcgctctaaactatggatcccccgggctgcagaattcggcacgagccgcgccttctcctcctccttcctctcctcccccattccgccgcccgccactccaccccggcccgctcccttcgtttcccccccgcggccgccaatgggaatccttccgcccgcggccggttcccacattggttccaaaatcccagggcgaaaaaaccaaattttgggattgccttatttttgtttgggaaaaaaaaaaaattggcccccctggaaattggttgttttggccaaaaatttgggtgggggggggtttgaacttttgaaatatttcaaaaattcccggggggggttcccaaattttttcccccaaaaattttgggggtaaaagaggaatataaaaaaatctctccccttttccccaaaaaa

SEQ ID NO: 34631 - DNA, 183 bp, Oryza sativa
  Clone ID: PAT_MRT4530_38628C.1
atggagaggaatattcctcttagatccgggaccaagccatccagcaaaatcggtcggacgagcttgtcccacctgggacgagcgcacagcgtgagttgcgccacttcaccgcgcgtcgtgtgcatcgccgtcgggagcagctatagctggcggcgatggcgggctgtcaccacgcgccctgac

SEQ ID NO: 34632 - DNA, 977 bp, Oryza sativa
  Clone ID: PAT_MRT4530_38629C.1
gcgtagccgaaatagtctactattccattatattctagccggcaccagttgcaaatctgcattttacagtgaattgaacaatgaaagtatagctgtcgaatcctctcaagctttctaaagtatttccaaaacagaaagaaaaaggcaccagtgatacacctcactaatgcaaccgttcttcataaacaattcctaaaaggttcatccgtgttgacgtctaaagaatagcagcctaacttgttctcctcgaggaacagccaatccagggctcaatggcaaaaggttgcagccatcacttgggcaagttaatgaagcccgtatatttgctcactgaacagatgaataactacaaataccaacttagtaccggtacttgatatcatctgcaagggctttggccaggagtataatctcatgaggagaatatttgcaacttgcagctgaataaacaccacaagttgcaatatttagttagttttagactgactctggggcgaggaatcagtaataagctccatctctatatcctgctgttttttgagatattcttgagctgttgatgtgacgatcttaatgaagaagttcacaagcacaagccacaccacagtgttccagaccaatgtaaaagagaaattccactgtgtatcctccatttttgaggatgatgtggccgatgttggtgttgataaatacttatccttcgcactgtggagctttgcaatcacagatggcaaggaggcagaaaacccaggaatgtgaccaaatatccagattaattccttttccataagatacaagagttgattgttgcacaaggagataataaataatgtctgaatatgggtcttgatgatggccttcccaatcaaagtagcaaagaagaactcccagaagggaatgccaaattgcccacacattataccagcaaggtcaaacagtgggttggaaccgaagcaagaatcaagatagtaatgaag

SEQ ID NO: 34633 - DNA, 741 bp, Oryza sativa
  Clone ID: PAT_MRT4530_3862C.1
atgggccccacgcgtcagccgcacccgagggcacgggcggctgacggccgggccccacgcggcggccactcggcgcgcccgaaggcggccactcggcgcggccggcgggaggcggcgcccgcgcccctatggtcgccggcggcggccgagagaggggaagggaagggggaaaagaggcggcggtccacggctcactctaggtcgacggcaacgacaaaaaaggtggccggagcggaggaaggcggcggcgcggctcgggtcgacggggtcgacggcgttccggcggtcggcggactcggcgagggggtggacggggttgacggcggtgcggcgaagccggttgaggcgacgccggggcgggagacggtcccggcgagcggagaaggccagccggaggtcgtcggcgacggaggtcccggcgagagggcgacggcacgagctcgattccggcggggagtggggacggcgcgatgcggcggatttggcggcagcggcggcgcttggcgcgggcggagcggcgggagcggcgggagtggcgggaggacggggatgacgggtgggccccacccgtcagcgaggctcgtcttcacgctcccaagtagcttcttcctcggcgtggttgctccattggaccttgcaaaaacgaattacccggttcctggtcctgcgctccatggcgtccaggattttcaccggtctctccacgtaggtcaagtcttcgcgaacttcaatctgctctga

SEQ ID NO: 34634 - DNA, 180 bp, Oryza sativa
  Clone ID: PAT_MRT4530_38630C.1
atggcggtttgcacgccggttttaactgacgtggcgcctacgcgttcttcctccggctacaagtccgcacggcttcttctacggcgacttcggcgcatgcacaatgagaagggcaatctggtggcggagcaggtgtttgatgagtcggcgttgctcgcatcccgcctccggcagcactag

SEQ ID NO: 34635 - DNA, 705 bp, Oryza sativa
  unsure (1)..(705): unsure at all n locations
  Clone ID: PAT_MRT4530_38631C.1
gcacgaggctcagccattgtatgtgggtctatgctccgcactctcacttgatgccgcccgaataaaggcgacaagtggtagtacgccgacgtaagacgagggcatataccaatggcgagagcaaacgttcctgcggacctgccgagtcctgtgagcgcagggtcacccgtgacacgctgacgcaccatgtgtccggctcacgcgctcgacgcgcgactagaggaggaccctgcagctggggagcgaggtgagctacgcaccacgaccaacatgaggatgcagctcaaggggatcaccagctaagccagccgagactgcgagaagagcgcgcgggacacctggcggggaatacgatcgctgtgcgacgactgggggctcgaccgctgccgatgcacggcgactcgtcacattgagcatcagccgccgcacattgcgcaggcggtgcacggacacttgaccaagcggcccgaggagacaggtgtcgacgaccaacgacacatgtatggatacgccaccgacgataccgcggaggtgttacacgtaaggcactttctggcgaccaagctcggatgccgcctcaccagagtgacgaagaacggcacctgcacctgactcaagcccgacgacagacccaggtaccggccagtcctcaacgacgccggcgccatggaccatgtctgtgttcaacctgcccatctgcaccan

SEQ ID NO: 34636 - DNA, 435 bp, Oryza sativa
  unsure (1)..(435): unsure at all n locations
  Clone ID: PAT_MRT4530_38632C.1
cgcttttctcctgtcccactcctctccttctccttgtgcttcttcttcctccattggcatctccaagaaacccaagcctttctacgtgcttcgagctcggccaccggccggcggacgcgcgcgcgccagccaccagtgtccggattnatgctnnattangaactaacagtgtattcaaagaacctaaacatcagatgcccaacaatttgaatggagagttccaggacgtcattgagatgccttttactcatgaccatcatggatcaaatgatcaaccctgagattgattccacaactgatgcatgagatcaatatgtgccacgggccttcatgcatatctgagttccatgagcatgttgtcatcatgtttcttagcttccatcttgaccctgaatcctttgtattcaatacctcttttttattatttttctcttc

SEQ ID NO: 34637 - DNA, 360 bp, Oryza sativa
  Clone ID: PAT_MRT4530_38633C.1
catacacgtcctcataagacctcatgtccacatgtacgatctcgtctcctactacacagcataggggttctcctctggagacatcggcgagacacatggagcgcacaccgttttacgtgcaagtttactaaacttctgcacccgtgtatactgcgacatcaacgtcagccaggactactgctcgaactagctgtacttctgctcggcccgcggcggcgaccccgcgctagcgccgctgtactccctgacctgcagcgcgttcgacagccgatactacagcagccatcaggccagcgcctagctcatgcactgcgaccaggagctattcaacaaggagttgatcgactagaacgtccacat

SEQ ID NO: 34638 - DNA, 279 bp, Oryza sativa
  Clone ID: PAT_MRT4530_38634C.1
atgtggaggggcggcagggttgagtttcagctggaagaggtgagcacggcgacggcgctgactcccagtggcctcgacacgctgcagtccgcgtcgtccaccaacgtcggcgccgggaagctcccctccgattcccggcctttatctgttgcttcacttcgctgtatccaccatccgcatgaagctggcgatgcagccacgccacatcctgacatcgtgcaaagcagtagtgccgacgaggggaggacgcgccgccgaccaggtgagggcgccgactag

SEQ ID NO: 34639 - DNA, 2261 bp, Oryza sativa
  Clone ID: PAT_MRT4530_38635C.1
atggatcagcaatggatgtacgcagacaggcggtcgaaacagtttattaacggcgtgcattattttttgaatgtggccaatactaacaagcataacggttttatgtcttgttcatgcgacaagtgcaaaaactagaaggagtattccatagtatgaactattcatgcccacctgtttcagtgggggttcatgcgtagctataattgttggacctcgcacggagagctaggggttgcagtggaagaagataaagtagaagacgataacattctagactgggcttagtacggtggatttgaagaaaacacaacgggcgaggcggacggggctgttgaagataatgacggtgtagatgatcttggtcagatgttgcgggacgtaaaggaggactgcgaatgaaaaggaggtgcagaaactagagcgcatgttagcgggctacaaaacatcgttgtacccaggttgcgaacagggccacaaaaagttgagtaccacgttggagttcttgcaatggaaggccaaaaatggtgtgagtgacaaggcatttggcgagttattgtaactcgtaaagaacattcttctagaggggaatgaattgcacgaaacaacgtacgaagctaagaaagcagtctgccctctatgactagaagtacagaagatatacgcatgtccgaacgattgtatcctctatcgcggtgaggagtacgaaacctagaagcatgcccgttttgcaaagcactacaatacaagattagacgagataatccaggtgatgttgacggacaacctttgaagaagagagttcatgctaaggtgatgtggtatttccctataataccacggctgaaacatttatttcaggaacaaatcgcatgctagaatgatgtggtggcacgcagaagaacttcaacaagacaggatgctgagacaccccgctgacgggtcgcagtgacgaaatatcgacagagcatttaaagacttcggagagtatgcaccgaatgtaaggttcagtttaagtatggatggaatggatccatttggagagatgagcagcggccatagcacgtggtctgtcaccatgtgcatctacaacctcctccttggctatgcatgaagcggaagcacatcttgatgccgatcattattcaaggcccgaagcaacctggtaacgacattgatgtgtacctaaaaccattggttggagatctaaaagtgctgtggaggaaagaaggcatccctgtgtgggatgaggataaacaggagcaatgtaatctacgagcgttgctgttcgttgccattaactgttggcctgcacttagtaacctatatggacggtcaaacaagggatacaaggcttgcactcactatatggatgaaactaaaagtacgtaactgaagcattgcaggaaggttgtgtacatgggccatcattgattccttgttgcaaaccaccttgtatggaagaaaggcaagcacttcgaatagaaggcaaaccaccgtactaagcctaaacatcgcaacgaaaaagccgtgttcgctatggtgaaagatctgaaagttatatttagaaaggggcctaacagccaacctatagaaagcgaagatggtcacgtggcgatgtggaagaagaactctattttctgggaattaccctattaggaaggcttggacgttctccgcgcaatcgacgtgatgcacctcactaagaacctttgcgtcaacctgctgggcttcttagatgtatatgggtagtccaaagatacactcaaagcatgtaatgatctcaaacatatggaacaactcgagggccttcatccaaaaccgaaggtgaaaggaagccattactttagtccagcgagctacaccctgagcaaggaaaagaaggaaagtatgtttcaatgcctgtagagcatcaaggtaccgtctagatactcctcgaatataaagtgaatgataagcatgaaggaaaagaagttcacaaaccaaaagtctcatgactaccacatgttgatgacacaattgctttccgttataatttgtggtatccttcctgataatgtccaggcaacaataacaaagctatgtgctttcatgaacgcaatttcgtagaagatcatcaatccagacagtttagcagcccttcagggggacgtggtgcaatgccttgtcagctttgagttgatatttccaccgtcattcttcaatataatgacgcatcttctatgtcaccatgtgaaagagatcggtattctcggtttgataca

SEQ ID NO: 34640 - DNA, 357 bp, Oryza sativa
  Clone ID: PAT_MRT4530_38636C.1
atgaagatgcgctcgtcggcattctcggggtccagggcgccgccgtgcgtcgcttcgccgttcccgtcgactcaagccatcgttgaccgagccactgcgccaaaagcatcgccggcatcccagaaggaggtctgccagaggaatcgattcgaggcactgccgttgaggagatcgaacctttctttctcaagtccggctgccggctcattccttcaattcctcgctcccgagccagaaggagccgacaccatcgacctgtcgttctctgccgtcgctggagcatttcgaaggtcgcctcgctgtccatccatcgccgaacctcagacgacctttagtgagtctccaagagacctgtag

SEQ ID NO: 34641 - DNA, 203 bp, Oryza sativa
  Clone ID: PAT_MRT4530_38637C.1
aagaataaaatcccagatacattaataatactttctccaatgagaatataactactctacccttttcagaattaaaactcatttacaatccttaaatcatcatccccatatttttcaaaaccatagactcttctattatcagaatttctcatccatactctaataaaagacatttaaacagtgatctatgctttaacattatg

SEQ ID NO: 34642 - DNA, 571 bp, Oryza sativa
  Clone ID: PAT_MRT4530_38638C.1
gggctctccagtctccaccccgactcttcgtgtccgctgcgaaaaaaaggagcttatcatggcgtcgaagcggatcctcaaggaactaaaggacctgcagaaagatcctccaacatcatgcagtgcaggtgtcttgttaagacaaaggtcttccatccaaacatcaatagcaatggaagcatatgcctcgacattcttaaggaacagtggagccctgctttgacaatatctaaggtcttgctttcgatctgctcgctgctcactgaccccaacccggacgaccctcttgtccctgagattgcccacatgtacaagacggaccgtccaaagtatgagacgacagcccgcagctggacccagaagtatgccatgggatgaaaccccaagtcctgaattcgaatccactgcttaaatgcagacaaatttgtcccaagaaactgtttatgggccattattttctccgattccttgccagtcatgttgtgtcagatccatctaggatcgtgtctcgtagccccgacatcaacatatgatcatcgtccgtcgataatgagataaaaaaaaaaaaaaa

SEQ ID NO: 34643 - DNA, 1034 bp, Oryza sativa
  Clone ID: PAT_MRT4530_38639C.1
ctctctccgtccagtctcccacccccgacctctcgtgtccgctgcgaagaaaaggttgagcacacacctcacctcacctcctcccccgatccccctcgcctccttcccctttcccccctcacctctctgctcttctccgccgcaccaatccgccccctcgcgattcgaccagatcggcgcgagggcatatcatggcatcgaagcggatcctcaaggaactaaaggacctgcagaaagatcctccaacatcatgcagtgcaggtcctgctggtgaggatatgttccattggcaggcgaccattatgggtcctccagatagtccctatgctggtggagttttcttagtgaatattcatttccccccggactaccccttcaagcctccaaaggtatcttttaagacaaaggtcttccatccaaacatcaatagcaatggaagcatatgccttgacattcttaaggagcaatggagccctgctttgaccatttctaaggtgttgctttcgatctgctcgctgctcactgaccccaacccggacgaccctcttgtccctgagattgcccacatgtacaagacggatcgtccaaagtatgagacgacagcccgcagctggacccagaagtatgccatgggatgatgaaacccacaagccctgaattcaaacctgctgcttaaatgcagacagtcgtggtaattgtcccaagaaactgtttatgggccattatttcctccgatttgttgctgccagtcgtgtgtgtcagatccatgtagcatcgtgtctcgtagccccaacatcaacatatgatcattgcccgtcgataatgagataacatatgcttgccgtgattattatggtatggtggtgatgctatttctctcatgtgccacaatagcgcctagctgtgcctttctcgtagctggggactgggattcctcgtactccgatggatgatgtaatgttactcgtgaggaaggtatctgcacgggttctcgttgatgcaaacgattacagagaaaacagtgtgactttatc

SEQ ID NO: 34644 - DNA, 149 bp, Oryza sativa
  Clone ID: PAT_MRT4530_3863C.1
tgtgtgtgtggctccacctaatcacccttgcttacgactgccatcaacagcataccaggattgagcaggacacaggttggtgggatagaacggaaagcctccctcgaattcgggcattgctggcctgaaatgtccagtcgcttggaaac

SEQ ID NO: 34645 - DNA, 316 bp, Oryza sativa
  Clone ID: PAT_MRT4530_38640C.1
attcgtttttcccttcatcttctcttttgctctccttcctcctcccccttcttcttcctccgaattcgagcggaggacagaggcggcggcgaccgtgtggatggggcttagcaggcggcggcatcgacgggacggggagggatcgaggagtcggctcgccacctcgcattcgcgaccttcaaatgcaagctatgagtaaatttcctagaaacatgcacctggggagaacattgatgaggttccttgttcaaatttctactgtctactactgcttaaaagttaaaaccttcagtagggaaacgggaggagatctcaa

SEQ ID NO: 34646 - DNA, 687 bp, Oryza sativa
  Clone ID: PAT_MRT4530_38641C.1
atggcggctcgggttcgcagtgggaggatggctgcagtgatggaatggggaaacagagcggaggccggggtgcggcacggcgaggcgaagccgaaggaaccaacggtgcggcgcggcggtggctacggcgacggcggcgtgcagccggagctcgccggcgggcggcatcgcgcggagcagcgtggggagagcgaggaggagtgcagtgggttcgggcgaaatgggggaaacgagagaggatgctccggggatcgtttatatacactcgtggagggggaatcgtggccgagtggggcggcaacggccagtgaagtggcgaggcatcgtgggatcgtgggggccaaatcggcgccggtttttggggaaaaacgagggaggaggtggaggagaggggtggcttccggtcccacgcgagagagggctcgaggaggccaggaatggcggcgacgtgggcggtttttagcggccatggtggcaacggcagttgccgacctaaggttggggatgataggtggggtccatgggtcccatctgtcggccaaagaggagagggaggccggctggggaggcaaactagacttctgggaggagagggccgagcatggagctgggttgagggaaagagagagagcccgagagagggaggggcgcgctggccgcggggaaggattcttgggccgaaaatag

SEQ ID NO: 34647 - DNA, 330 bp, Oryza sativa
  Clone ID: PAT_MRT4530_38642C.1
atggcgaggccgaacgtgcggtgcagcgagatcgagagcgagagctcggcgattctgccggagaagaaggtggtcatcggtggcggcggcggcggcaatggcgaggtggcggagaggcaggcgagggcgatcataagaatggcgaagagggcgttggaggaggaagaggaggcgggcggcggcggcggcggcgaagggaagctgtcgatgaagaggtcgatggagtggttcttggagaccaggaggaagaggatggcggcggcggcggacgccggtgtccatcgcggccgcgccggcgagtgtggctcgtcgtcgtcttgctccaactag

SEQ ID NO: 34648 - DNA, 1188 bp, Oryza sativa
  Clone ID: PAT_MRT4530_38643C.1
atgggtcaatgcgccatgtctcacacgcgctctaccaccgccggcgccgccggcggtaagccgccgatcgcgccgccgccgacgtcctccgcctccgccattgtcgccgacacggccagcgggtaccacctcttcaagatcaacgactactcgcgtaccagggacatcttccccaccggcagtgccctcaagtcccgcgcgttcaccattggcggccaccaatggcgcatccattactaccccaacggcaacacggaggagtgcggcgagtacatctccctgtttcttcatctcgacgagattgtcaccgacaagaacgtgtacgcgcagcacgggttccgtttattcgacgagtttgccggtgataatgatgacgatgatgaactgcagccttcctccatcgctgacctcgggcaggtcagtacctttggtggcaacaacattgggttgggacgactgaggtttatcaaaagggaagagttggagaaatcgaagtatctgaagaacgactccttcaccgtcagatgcgatgtcgtcgtcaccaagcggatccgctcggaggagacgccattggtggtgaggacctctccaaagccaaaggtggcgaggctcgtcaccgtgccgccgtccgatctgcaccggcatcttcaggacctcctctgcgccgagaagggcgccgacgtggtgttcgaggccggtggcgagacttttaccgctcaccggtgcgtgctcgcggcccggtcaccggtcttcagcgcggagctgtttggatcaatgaaggagagcgacaccacggtggtcatccgcatcgacgacatggaggcacaagtgtttagggccttgctccgcttcgcgtacaccgactcgttgccggagacgaaggaggaggacgagggcgccatgtgccagcacctgctcgtcgcggcggacaggtacgccatggagaggctcaagctggtgtgcgaggagaggctatgcggccgcatcggtgtgggctcggtggcgaccgtcctggcgctggccgagcagcaccattgtgatggcctaaagaaagcatgctttgattttctcagctctcaggagaatctgaaagctgtcacggccggtgagggattggagcatttgagcaggaactgcccttcccttgtgaatgagttgattggcacgctcggcaacttaattcagtga

SEQ ID NO: 34649 - DNA, 168 bp, Oryza sativa
  Clone ID: PAT_MRT4530_38644C.1
gtggatccccgggctgcaggttttttggttattatgaggggttcctcgtactgtggcaatccctcgcgatagtttcacaatgcaataacccgatcataagatgaatacatgtatgtacagtaatctctatatttctgaacaaactagcagaacagctcatattcaatc

SEQ ID NO: 34650 - DNA, 443 bp, Oryza sativa
  Clone ID: PAT_MRT4530_38645C.1
cggcacaggaagtataatgctcattaattatctaatatggcagcaaggcagacataatccggtaagtaaagggtagggctgaccgccctctggtcaagcaggctctccctgcatagcaggaggctctgcttggtgaaatacaaaatccttctctgatattattgcttatttttccttaatacacatactagtccacctttatagcacaagtgctgagatatgtacttggaagtactaaataaactaggaagctctagctagaaagtaccggttcccgaaccgatggcttcatgaagctttttgccaaaggtttttagtaaccttctacatgacactccctctactccacaatatttgtccaagactatcatctgcatagaccaaggaggtgcaagatataagaaatagttaatgataatggactatatataccatctgcataa

SEQ ID NO: 34651 - DNA, 654 bp, Oryza sativa
  Clone ID: PAT_MRT4530_38646C.1
atggcgacggcggcggcgggcgggaaggcgaggcgaggcgagtttgggagaggaggaaacggaagcgagggctgcatcaaaacgccagcttaccgcccgcagccggcgcagcggtgggcgaagagcgacgcatgcagccggctggccggctgcgttgttaaacttgctctaagagcaggcccgagccctcgccaggaagtgctccatgtcctcgcgttcgagcacatgtcacacgactgcggcgaccacggtgtccttgcgaagctcacactacgggaggtcgccaactcgggagcaccttcagcaccaggggagttgccgctggacagaggccgagttggacagcgtccgacggtatgcgcgctgcattgggcttctcttctaggtggtggacaacatgctcaatatgatgagcacgttggagtagctcgggaagtggagggtgccctatcgttggtgtcgctacggaaagtggaggtcgcccacattgctgacatacgcccacggcctctggtggtagatctggagctggatggccaatcgatgcccccagaccggcacacgcgattcgtcacactgtcgccgcaggccgcggcaggagcgcaagctggcactgtggcacaggggtatcacacgctggcggtgctgagctga

SEQ ID NO: 34652 - DNA, 1069 bp, Oryza sativa
  Clone ID: PAT_MRT4530_38647C.1
gtctcgagtttttttttgaagaaatttttgttggtaagctgtgcagtttgatgcctgagtttcactgaagcagtcataatggaactatattacaaactgcaatttttagttacatcggcaaccaatttttctccaaaccatccaacatattttctcagaattctttcgtctcgctaaaaatctctgaattcgatgaagccatccgactatgaagcatcgatttcagcagtttctaatgaggaaatttcaggctgctgctgctgaagctgaacccacgaatggtagtctctcagcagctgctcccccagcaagggcacgagcctgtccaggaggccttgcatcagcaggttgcctggtgtctccactgctgacaatggaagcatgctgaatggcttcgtgtaaacctccagagtgacctccaaattgacatcaatgtccaagcatggttcctcaccatcgtctttccaagttatatggttgctcataaaagctgaaaagagctcattctgctgctcaactgagcctgaaccctcaaacctgcaggagagcatctcgacggtgcagtcgtggcatgtcggggcgacgcggaggtcgaggacgggggcgacctggaacccgaggaagccgatgctctgcagcgtgcaccggaacgtgttcgcccccggcgcctcgtccaccgccgcgaagctctgcagcgccctcgtgttcagcagcgactccacgccggcgggctgacgcaggaactcgccgatgcccccaacgccgccgccctccaccaccacgatcctctcccgccgcctcgccgacagccgcgcccgcctgcccctcgccctcgccgacagcgattggccgtcctcatcgccttcggcttcggcgtgcgcattgccgctcgccgccgcggctcgccatggccggcggcgaccggctgcaacggcggcgacgcttgagattcggaagaggcagcaaggtttggcagccacgagcctcattccatcgtccactcagctgagctcgagctcgcgcatggagtgatgcgaggttggagcccacgcgtccgcccgcgcgtccg

SEQ ID NO: 34653 - DNA, 675 bp, Oryza sativa
  Clone ID: PAT_MRT4530_38648C.1
atggttcaccccagagtgaggcaggtgcgctacggtggaacagccgttgagccgaggggaggggacacgcggaccggggcccacgcggcagcctcacggtccacggtggaccgggcgcacgcggctgacgccgaccggcgccgtgggtcccacgtgtcagccgcaccgagggcgcgggcggctgacggccgggccccacctagcagccgcggggcgcgcccgaaggcggcctcgccggcacggccgacgggaggcggcgcgcccgcgccccgatggtcaccggcggcgacctccggcgcgacggagcggcggccgatagaggggagggaagggggaagtgaaacaacggtcctcggctcaccccgggtcgacggcgacgacggaaacgggcgaccgaagtggagagaggcgccggcgcggctcgggtcgacgaggacgacggtgctccggcggtcggcgggcgaaacagaggagtggacgagatcggcaaggacacagcgatgccgaagcaagcgatgccgaagcgggaggtggtccggggcgacgacggcggtgaaccggagctcggcggcgacggcggagagagaggacgacggcgcgggctcgaatccgacggagagagagtgcggcgagggtcggaaacggaggagggaggcacggggagcgtttaaatag

SEQ ID NO: 34654 - DNA, 1285 bp, Oryza sativa
  Clone ID: PAT_MRT4530_38649C.1
tcagagcaaattgaagttcgcgaagacttgacctacgtggagaggccagtgaagatcctggacaccatggagcgcaggaccaggaaccgggtaatccgtttttgcaaggtccaatggagcaaccacgccgaagaagaagctacttgggagcgtgaagacgagctcctcccgcttcggcatcgcctccttcggcttcgccgcctcctcgtcgacctcgtccactcctccgtttcgcccgtcgaccgccggagcaccgccgtcctcgtcgacccgagccgcgccgccgcctctctccgcttcggtcgccgttcccgtcgtcgccgtcgacccggggtgagccgaggaccgccattttgtttcccccttccctcccctctctcgggcgccgctccgtcgcgccggaggtcgccgccggcgaccatcggggcgtgggcgcgccacctcccgtcggccgtgccggcgaggccgccttcgggcgcgccccgcggctgccaggtggggcccggccgtcagccgcccgcgccctcggccacataccgtggattctgcgacgcttgtgttaagaccggacaaagggaggcgattttcacagggtgtccacttttggtcaagttgtggtcgtacgagcacttctcgttcggacatccatacatgagcgtggccgtggcccacaaggacgattacgctgacacagttgatgatcgtcctaccttcggtactcgctggtgctacggaccgccacagtgggcgagaatccaggtgcacaatgtgtacaagtacttcaccgagacgttcgaaagccttagggaaaacgaagttcggtggacaccgtacacgaacgaagaggccattttgcgtggaccaaatggaaccgacattgcaggggagttagtaagggatgcgaaaactttgtgggagaagcttagagatggtatcgcgggtaccaaccaggaagttatggccacggtcgactccctccgtagaaaagggtttaggccttacactgcatcgtacggtgacatttccagcttcggtggagggtcatcattgtcgcactccgtcgacaccatctcctcctgcctcaaggctggcatgtcgggtggtgaacaagagcaaagcctccatctccctgttattctcaccccttaccaggggcaggaggcctcctcacatgtactgccaattaacttcgctgggcttgctaaggctgtgaagccaagtgccacaatatttgttgggcaatgcttgttcacaggcaatgagactacttcaatttggttaagac

SEQ ID NO: 34655 - DNA, 1214 bp, Oryza sativa
  Clone ID: PAT_MRT4530_3864C.1
atcacccgcccccccgggccgcgcgccaccaccgaccgccccccgcgtccaccggcgccacctccacctgctcgctgcgcgcccagccactcgcccacccccgcccatgccgccgccgccgccgcccagcctcacggccaacaccgcatcctccatgggcaacgccgaggccgtcgtggtgctgcccgcgaacggcggcgcgcggcggcgcgccgacaaggtcgtccacccggcgccgatgccggacagagcagctggtggcgcgatggagagggaaggcggcggcgtcggcggcggcggcgaggtgggtgggtggaggaggccggagtggtgctcggcggcgggggtggcgggggtcctgcggcggcacccggcggcggcggcgttcgggtgcgggctgctgctgttcatggccgtggagtacaccatccccatggtgccgcccgccgcgccgccggtcgacctcggcttcgccgccaccgccgcgctccacgccgggatcgccgcccgcccatggctcaactcgctcctcgccgcgctcaacacggtgttcgtggcgatgcaggcggcgtacatcctgtgggcgatcctcggcgagggccggccgcgcgccgccgtggcggcgatgatgatgttcacctgccgcggcgcgctcggctgcgccacgcagctgccgctgccggccgagttcctgggctccggcatggacttccccgtcggcaacgtctccttcttcctcttcttctccggccacgtcgccggcgcggtgatcgccgccgaggacatgcgccgcgcggggcgccgcggcatggcgcgcctctacgacgcgctcaacctgctccagggcgtcaggctgctcgcctgcaggggccactacaccatcgacctcgccgtcggcgtcggcgccggcctcctcttcgacatgctcgccggcaggtacctggacggcaagaacaccgtcgacggcggcgccgccgtggcgccggggagccggtgctgcagctgccacaaggctctcttgtcacagtagctttgcattttaggcccagccattaatggccaatgcagttggttgggcatcaaaccatgtcatttttttgatgtaatcgagattaaatgctacctactgatgtgtaattgtacaaacactatccattccatctgagcttaaaaatatataaataccacaagtttctagcaaaaaaaaaaaaaaa

SEQ ID NO: 34656 - DNA, 564 bp, Oryza sativa
  unsure (1)..(564): unsure at all n locations
  Clone ID: PAT_MRT4530_38650C.1
gcctgctggaggcgccccggcataattgcctcgacccacgcctccgccttgttcactaacgtctaccaattggacgttggtggaatttttgagacatattgggggggggatgagaaatcgggcttagcccctgatctggagtcaaaacacatatggcttaaatatctaccatcagataaaggtctacctcttgtcaacaagggtaacttctaccaaaatggtgacactggtccttggggaccgtgcagtcaaatatattttgatcagattgggcatcatgatgttgcttcattattgaacaatgatgaccctggttgtattgagatatggaatcttgttttttttcagttcaataaggaagcaggtggcatattgatgccatcatcagccaaacatgtaggcactggactgaacttcgaacaattaacttctatacttcagaagaaaaagagcaaatttgacaccgacatattaatgccgacaattgactccatcncgcaatgtactggcaatgaaattcaaccattactctgtaaattggtcctgatgatataatgaagttga

SEQ ID NO: 34657 - DNA, 1106 bp, Oryza sativa
  Clone ID: PAT_MRT4530_38651C.1
ttttttttttttttttttacttaaatcaataccagaaacttatttttcttcgtcacggctcacatgtacagatggggttgaagtagctcaatcagaatgatagttaatgtagctagaacagcaggtaagatataacatggggcgatattgtacaaacacggcaagcatgtatactactacttttccaaacatacaacactataacgcctttatttggcaagattactttgacatccaatagataaaaataagaaatgcacaaacagatgcaaccagggatagaataatggtgtccatcgatttctttcttttgatggatgaaagaatttgattaatcgtagggagccgactgctaacgttgcttatcttcgtagtaataccaccaaatgttgatcgttgcaacataagtgtgcctaatgtagcttgagcttgtgatatcacggtatccatctgcccagtactcctgctgatcgcagcttgttctttgagcagagcttgatcagagtcagcaccctcttcaacatcaaacttcgctctgtcaaaatctctcaagtcaagaagagaagcatgttgttgctttgctctaaggcttgatcggaggcgatagaattcctgtgtaaggtcttgcaatatctccatatgacgagtcaatgtatgagaaaggacttctgagcctcctgatgatacccatgtctgcatttgagaatttacttgctgaagttgcttcagcgatctttctatatcggactcgatatcattctcagaaccatcagatttcatggaaatcaatttacggtaagcactcatttggtcatctaactgagcttctagcctccttgcctgcttgcggagggcgtcccaggaagacgcctccatggcggcggcggccgacggggcgcggcgcgcgggggatctcggtgggagagcttgggcttggctgctgccgctgctggatctctcccctatcggggaaggaggggagagaatcggagagagtaagtaggacgcaacgcagagaccccccgccgtcccgccccccacctccggcgatcgccgtcggtcgttgactcgtgtcgcgcgtacgagaccgcgggtggactggtgac

SEQ ID NO: 34658 - DNA, 464 bp, Oryza sativa
  Clone ID: PAT_MRT4530_38652C.1
aatgatatcatagaagtatcggaaaaaacatgtatatatgtctattattgtctgaaatatgacaaatagtctattatatgattatcctggttggtgagttttttatgcaactagagcagcctatctttggccaatggtcatagctttgttgtaagaaagattatactcttgggttctttcctatgatagcccagagagtttcttgccctgccaagtttatgtcatcaaactaatttagttcagtataggtcctatcagttaaagctactcgcaggcattattcctgttgttgtcagttcacttgtatagttatagctttgacctagctttgacctatccaactagctttgacctagttggataggttaagaaatagaatattggcaatacaatatatcatgcaattttctaaacatagcttcacaaaaatatggttcattttaaaaaaaaaaaaaaaaaaaaaa

SEQ ID NO: 34659 - DNA, 591 bp, Oryza sativa
  Clone ID: PAT_MRT4530_38653C.1
cgaagctgtggagatcgtctccggcgtcagattgctccacttcgcctgcctgcttcgcccaccgtcaccctgtcagctttgtgtgccgttgtcccacttcgcctggctgctccgcttgccgacatcccgctccgccccaccccgcctgccgtcaccctatttcacctgccttcttcgcccgtcgccgcctcgttggcttcacgcaccaccgtcgccccactccgcccgccggcttcgtgcgtcgctgctccacctactccgctcccctctgctcggctgctcccatgggacagagtggatagatacagagaagagagagtatgaggagaggagaggaagcgagttggagaggaggggaagaaaaaaccgatggtggtcccacaccgagtcagagcacgttggaccacacacagaggcaaaactaccgaaggatttaatttgcactggttttgcaagttgagggatgcgctagggaccttcagtttactttttccaaattcttggtcattggccagcccaacatttttaggcctgctcacccatttcatgagcaatactctttctcgcagaaaacgaaaattttataaccca

SEQ ID NO: 34660 - DNA, 303 bp, Oryza sativa
  Clone ID: PAT_MRT4530_38654C.1
atggagtgtccactcatatccactgttcaaaggataaaaacaaactgcaacagcaaggatgggtctcacgagcatggtgaccgtgtgaggaagagcaaggtttttgctaggccagagtacaagaaagatgtgcaacatgcaggcaaaaaggctgctgaccagggcttgccgggccagcatcagatcctccgctgccgccgccgccggcgagaggggcggaccgcaggaccaccgtgcggcgcggcgtgcttcacggcggccggccgacaaaagcaggaggcatcagctgcagggggacggtaa

SEQ ID NO: 34661 - DNA, 191 bp, Oryza sativa
  Clone ID: PAT_MRT4530_38655C.1
atggcggcccgagcgggctcccggccgtggtgggaggcgttcacgacgaacgtgaagaaccaggggtcgctggtcatcgacatgctcaagcagcttgttcatcgggaggaatcggagtcgcgagacgaggagaagctcaaggaggtgatcctcgagatgaaggagcagagcaacaagagattcgcgggatg

SEQ ID NO: 34662 - DNA, 1725 bp, Oryza sativa
  Clone ID: PAT_MRT4530_38656C.1
atgatcgctgtgaagaagctcctcgagatacacatgttgaaagatgataaatttcagaacgaggttacattccttatggatctcaagcacccgaacatagtacgatttacaggctactgtgctgaatcacggtgggaagtgttgcaagtgaatggcaagaaatatgtcatggttgaaatgccaagacggttgctttgtttcgagtatctacataacaagagccttgataatggatatatggcaccggaatacttggccaatggattaatctcaaccaaatctgatatattcagtttgggagtgataatcatcgaggttataacaggacacaggaattatcctcggatatgcaccagagaatctttccagcatttcatagaggatgcactacaaatgttcaccatgaaatctgcaaacttattagatgatttaaccatagcaaggactggactatcgacctcaaacactgcaaagcaggtcattgctgcaacctatgttgacagcatgctgggggctagatcatctacttcgaacaccgaaagcaccgccgccgtgtcctgtgttcctgcaagaagaagtatgatagagatcatggcctttggagtagccaaaatacttgtcaggggctcaaatatgatgaaatctgatggtgctgcttctggagaaagaaaaataggtatcctggcctttgaggtggccaacacaattgtcagtggatcaaaccttatgaaatccctctctgaagaaagtgtgagtcatctgaatgaagttgtgcttcagtgtgaaggtgtccgcactctgatttcagaacagtactatcaattgctcattattcatcaagctgacataagattagagctactttacaaatctcgagaatacgttattttggaatcagaactggcatgcagcaaagaagaagcagtttctgcaatgcaatatctattaaaacgtgcacaatacaccatggaactgtataaggaaatgtgtgtgttggacaagttcgaacaggggaaacctacagtgattgtacaaaaacttgtagacattgtgctgctcatttatttggagatcaacaaagtttttttgcatactggtgaagaccattatgtagaggcagtgggcaacctgcttggggaaacgttaggttccactggacttgccttgcaatattcaaaagttattttgcagataaataaactggcattggcctttgagaaaaccgatccctcagtcttgaagtctgttcctaaggaagctaaagatgcattataccaaatgcttcctccttgcatcaaattagtattttatagaaagttgaagccgtttttgtccatagataagacatctgaagaagaggtcagagctgaaatgaatagaatgttgcaatggcttgtgccaattgctgaatccacaaggtcagaccagacatcagtgcatgagaatagtgttaagaaccagttcgatttgggtgagtgcatagccttaacatcatgtccatgtcctgtcgaatatattctttgtgagtcaaaacgtgagggaaaggccgctatattaggcaaaacaaataagagtctttccgccatgaatgccccctatatcagacctgagtacccaatccctgttcaattcatagagatctgtaaagttgccgctagctgtgatgtgaggctactatctgcaattacatgtggtgatggcttccatgtcaaaattggtggttga

SEQ ID NO: 34663 - DNA, 579 bp, Oryza sativa
  Clone ID: PAT_MRT4530_38657C.1
ggagggaaaaaacccccaaaaccataccctttatatatcactccaaaaaaacccaacggcccacccaaatagttccgggtatgggggtggcttttagcccacaacccgcataaacaggggaatagaaatccaccccactagggattacccaagctttacccccccaaaatgggggcccgggtttgcaaacaaaacaaaattgaaaaccctatttagttttccaaaactttccacccaaactaacggaattatggacagggggggggccccccccggaaaaaaggaacctttaaaaggctacctacttgccagttgggtaaaaaacagttatagctttgaaaaaattgcgggaatatagggggaaaccccacctgggaccgacggaaaccccttgactagttgagggggaaattccggggctttttcccctatcaatttaaaaggcccacggattgcccccttgcaaacggccttgaattccaccaatgcaccaaaaacctgctgcattttttgaaaacggaccctagttggggcctccccaaaaaaaaagggggggcccccccttaatacccccctttt

SEQ ID NO: 34664 - DNA, 1032 bp, Oryza sativa
  Clone ID: PAT_MRT4530_38658C.1
atggaagataagggtgatgagaagaccaacgacaacaagccgaatagtatagttaaaggagggaagaagatcagggagactctcaagaaggcttttgatcaagtctatgccccgtttgggccactaagcgatgtagatgatgagagtggagatgaagataagggaaagaacatctccggtgtttgcttcatgccgcgtggtgaatcggatttagagtgtgaagacaatgaggtacatacttttgaggatgctattcttattttaagagagaaaaataagaagtgcgagaagatgttagctcataaacagaaaaaggagagagagattgcttttgcaaaatcgaagtggcaaaaatctggttttccctcaaggaaactgactttggtggcgaggaaggagagcatgtggatcatggattccggttgttcgcggcacatgactggtgataaaaattggttctcctccctcaaacgggcatccaagactgaatcgattatctttggtgatgcttctactagtgccgttctcgctacaggtttggttaaggttcactttaagaaaactggaagtaaagtttttgattcttgtggtgattctgtgttgaatatttctcactatggaagagtgtttaaagttgattttgataattcagtttcacctgtgataacatgtttggttgctaagtttgataaagatgtaatgttttggcatcgtagacttggacatgttggttttgatcatctcactaggttaagtggtttggatcttgttcgtggtttgcctaaacttaagaaagatcttgatttggacgtgcggtctgaccgaccagggtcgtcggctgagggttctgttgatactattcgggatggtcctccagagattacaaattcgaccagtgaggatgtgtcatatgcattaactgatgaatcgtggattaacgtcatgcatgaggaacttgaaaattttgagagaaacaaagtttggactttagttgaaccaccttctgggcataatattattggaaccaagtga

SEQ ID NO: 34665 - DNA, 265 bp, Oryza sativa
  unsure (1)..(265): unsure at all n locations
  Clone ID: PAT_MRT4530_38659C.1
ggctattattcttttattttttttttcaaccaaaaacttttattgacagggctacatggcgcccataaaaaccattcaggggggggggcctctcaagggcaaccacaggtataccaagacccaacccccccccctaagaacaattcccgtctgggattacatcccctaaacccggcgccatttccccccgaaaaaccgaaggcttgggccccccaaagtgannnaaaaaaaggtccttctcctcaatgaggaaaaaaaagggacc

SEQ ID NO: 34666 - DNA, 411 bp, Oryza sativa
  Clone ID: PAT_MRT4530_3865C.1
atgtacattacctttttgggaaaatcaattttgttgttctctccaaatccaaacgactcaatcgagccaaaggtgacggtggtggtcgcggcgctcgcttgcgatggacgggaagggggtggcggctggcggggagaggcgcgcggtggcagggtccccacggtgaagacggcggccggtcgtcggggcggagaagggcgcggatacgagaaggagacgctgcagcggcacattccgccgctattcgatggggcgctcatcggcgtcgacgccgacaacggtagcaaggcgcatggctttcccgcggtggaggaggcacaagtgtcggcctcccttggaacccctttcgctggttctcgctgctcaacccctcggtgtctcggagcctgccgctgcaatgtacatccaatg

SEQ ID NO: 34667 - DNA, 327 bp, Oryza sativa
  Clone ID: PAT_MRT4530_38660C.1
atggcaatttcccctgcggggccgggtcccctgcggtggcgggggcaggggcgatttcagaccccgcggtgggcaacagcgtcggtggcggcggccaaggcgcgcggcggcagtggcggcggcgacggcagccaaggcgcgcgcggcgtctgcgacgtcgatggccaggcacggggggcggcatcaggcaaggcacgtgcaggcagaatagacaaacatcctgagggcggcagacacagagcggagcacggcggctcgcctctttgccttccagcttgccgccctcttcgccatcgtccagctcaccgccctcgtcgccgtcgttag

SEQ ID NO: 34668 - DNA, 1263 bp, Oryza sativa
  Clone ID: PAT_MRT4530_38661C.1
atggctagaacgatgttggatgagtataaaactcctagaaaattttgggctgaggcgattaacactgcttgttatatttcaaatcaggttttcttgagatctaagcttggaaaaactttttatgaacttcaatttggacatcaacccaaagtttcacatttgcgtgtttttgattggaaatgctttgtcttgaaatctggaaatttggataagtttgaggcatgttctactgatggattgtttcttgattaccccgcgcatactcgtggctatcgtgtacttattttggagactaacaaaatcgtggagacttgcgaagtttcttttgatgaggctagtccaggtacaatacccaatattgcaggtacactgtcacaggttcagggggaggatggtcgtatttttgaagatgagagcgacgacaacgacgatgacgaggtcggctcggccggtcagaccgcctcaggaggagcggtcagaccggccaggatggtcctctggagattactacttcgaccagtactgatacagaacgtggatcaacttcagaagttgctgctcctttgcacattcaacgacgacatccgccagaacaaatcattggaggaggtttatgtcaaacaaccaccaggttttgaaaatcctgatttttccaaccatgtttttaaattgtctaaagctttgtatggtttgaaacaagctcctaggatatatgtggatgatatcacctttggttgttcgactcacgcttttgttgtggagtttgctgagactatccgtaggaaatttgagatgagcatgatgggtgagttatcgtactttttgggattgcaaattaagcaaacacctcaagctgtgttggatcctgatgaagatggtgaagctgttgatcaaaaggaatatagaagtatgattggatctttgttgtatttaactgcttctaggccagacatacaatttgctattctttggcttttatctactttgaaagattatggttttacttttgacaaagtacctctcttttgtgataatactagtgctatcaacattactaagaatcctgttcaacactcacgcacaaagcacattgatattcgctttcactttttgagggatcatgttgagaagggagatgttgaattgcagtttttggacaccaagttgcaaattgctgatattttcactagacctttggattctaatcgttttgcttttcttcgtggtgaattgggaataattcatccttttggcatggtttga

SEQ ID NO: 34669 - DNA, 375 bp, Oryza sativa
  Clone ID: PAT_MRT4530_38662C.1
atgttggagcacaatgcaaattcagagggacacacagctctggaactgaggccatgcttcatgctgctaaccctacttttcactactagaaaacacattttcggtgtcgtaggggttccattttcgcaggcggattttcctaatatactaatttggcagatatatggaaagtcgggaatggatgtatcattggccgaggagcacttagtaactcgtggatttatggacaagtacgaaatatggacacgtcatggcgaagaacaagtggaggggcctaaaaatgagaaggttccgacacaagttgaagacatggtgcatgacgatggttctgttgaggacaaaatcgatctagaggaaatgttacgtcatgcataa

SEQ ID NO: 34670 - DNA, 3198 bp, Oryza sativa
  Clone ID: PAT_MRT4530_38663C.1
atgaaatctggagaagctttggatgactatctttctaggtttaacaaaattttgagtgatcttagatatgttggttcttcttatcgtgttaattacacacaatttgaggtttctcgccactttttgaatggtcttgacatgtctatttgggagatgaaagttacatctattcaggagtctgttgatatgtctactttgactttagattcgctttacacgaaacttaaaacacatgagatgaatattctttctcgaaaagttgattctaagtctagtgctttggtttcttccttgacttctttggatgttggtgcttcttcatcaaagtcctctattcttgctgtaactaatgccatatccgatgagcaactcgaatattttcttgatcaccttcgttcgcattgtccaaagcttgggagaggcaagaaggaagacaatggtggagagaagaccaatgacaacaagtcgaagagcatattcaaagggaagaagatcaaggagactctcaagaaggcttttgatcaagtttatgccgcttttgagccactaagcgatgtagatggtgaaagtggagatgaagataagggaaagaacatctccggtgtttgcttcatggcacgtggtgaatcggattcagagtgtgaagaaaatgagatgaaactaaaagatgctttagatcgtgttgattacatggaagatgttgtgaaaaccaatgaagtgctttcttgccccaaatatcgtaaaagcaaaggtgtcatggtagattgtaaaaattttgctaatttggaaaaagagatttcttatttgaaaagttctttgcaaagattttctgatggtaagaaacaacttagcatgattttagatcaatctaaagtgaccagttacaataggggtgttggttttgatgctcatgactatttcaccaaaaatcaacctaatgttttgagtgtaactgaacatggtgaaattttgacaaaaccaagtgctaagaaaacagttttcaaatctgctggaattttgccttctctttctgcaacactaaaagaaacaaaaacaaatatttcaaaaccatcttcttctaaagaaaaattaactcgtaaacagaaaaatgagagagaaattgcttttgcaaaatcaaagtggcaaaaatctggttttccctcgagaaaaccggtcagaccgcagagggtcccacggtcagaccggcgaccggttagaccgatagctgtctctcggtcagaccgggcaccggctttggtggcgaggaaggagaacgtgtggatcgtggaatccggttgttcgtggcacatgaccggtgataaaaattggttctcctccctcaaacaggcatccaagactgaatcgattatctttggtgatgcttctactagcgtcgttctcgctacagttagagtgcaatctattggaggaaagtggtatgtgttggttattgttgacgattttcctcgatattcttgggttttcttcgtggcaactaaggatgaggtttttcaacactttcgtggtttgtttcttcgattggatcttgaatttcctggttctttgaaaagaattcgaagtgataatggtggtgaatttaaaaatgcttcatttgaactattttgcaacgaaagaggtcttgaacatgaattttcttctcctcgtgttccgcaacaaaacggtgttgttgaaagaaagaatcgtgttatggttgagatggctagaacgatgttggatgagtatcacactcctagaaaattttgggccgaggcggttaacaccgcatgctatatttcaaatcagattttcttgaggtctaaacatggaaaaacttcttatgaacttcgatttggatgtcaacctaaagtttcacatttgcgtgtttttggttgcaaatgctttgtcttgaaatctggaaatttggataagtttgatgcacgctctgctgatggaatgtttcttggttaccccgcacattcgtgtgcctatcgtgtacttgttttggaaactaacaaaattgttgagacttgcgaagtttcttttgatgaggctagtccaggtactagacccgaaattgcagatgagagcggcgacgacgacgacgaggaggtcggctcggccggtcagactgggagccaggccggtcagaccgccggcacacctccggtcataccggcacaggacgtgcggtcaaaccggccaggttcgtcggcttctggttctgttgacgctgatcgagatggtcctccagaggctacaacttcgaccagtactagtacagaacgtgaaacaacttcagaagttgctgctcctttgcatattcaacgacgacatccgccggaacaaatcattggtaatctaggtgagcggactacaaggtctaaggtaacgactcatgatgtctgtgcaaattccgcatttgttgcttcttttgaacccaaagatgttactcatgtattaactgatgaatcgtggattaatgccatgcatgaagaacttgaaaattttgagagaaacaagatttatgtggatgatatcatctttggttgttcaactcacactttggttgtggagtttgctaagactatgcgcaggaaatttgagatgagcatgatggcttctcctcgggcttcacatcgtcaagcggtcaagcgaataatgaggtatttgaatcatacacttgagtttggaatttggtattctacttcatcttctatatgcttgagtggatattctgatgctgattttgctggttgtagaattgataggaaaagtactagtggaacatgtcattttcttggtagatcattgattgcatggtcttctaggaaacaatctagtgttgctcaatcaactgctgaatctgaacatgttgctgctgctagttgttgttcacaggttctttggcttatttcaactttgaaagattatggtcttacttttgagaaaatacctctcttctgtgataatactagtgctattaacattgctaagaatcttgttcaacactcacgcataaagcacattgatattcgctttcacttttcgagggatcatgttgagaaaggagatgttgaattgacgtttttggatacaaagttgcaacttgctgatattttcactgaacctttggattctaatcgctatgcttttcttcgtggagaattgggaataattcatccttttggcatgatttga

SEQ ID NO: 34671 - DNA, 1071 bp, Oryza sativa
  Clone ID: PAT_MRT4530_38664C.1
atggttctccggagattactacttcgaccagtactgatacagaacgtggatcaacttcagaagttgctgcttctttgcacattcaacgacgacatccgcctgaacaaattattgatttatatggatgatatcatctttggttgttcgactcacgctttggttgtagattttgctgagactatgtgcagggaatttgagatgagcatgatgggtgagttatcgtgctttttgggattgcaaattaagcaaacacctcaaggtacttttgtgcatcaaacgaagtacacgaaggatcttttgagacggtttaagatggagaattgcaagccaattttaacaccaattggttctacagctgtgttggatcctaatgaagatggtgaagctgttgatcaaaaggaatatagaagtatgattggatctttgttgtatctaactgcttctaggccagacatacaatttgctgtgtgtttgtgtgcacgctttcaagcttctcctcgtgcttcacattgtcaagcggtcaagcgaataatgaggtatttgaatcatacacttgagtttagaatttggtattctacttcatcttctatatgcttaagtggatattccgatgctgattttggtggttgtagaattgataggaaaagtactagtggaacatgtcattttcttggtacatcattgattgcatggtcttctaggaaacaatctagtgttgctcaatcaactgctgaatctgaatatgttgctgctgctagttgctgttcacagattctttggcttttatctactttgaaagattatggtcttacttttgagaaagtacctctcttttgtgataatactagtgctattaacattgctaagaatcctgttcaacactcacgcacaaagcacattgatattcgttttcgttttttgagggatcatgttgagaagggagatgttgaattgcagtttttggacacaaagttgcaacttgctgatattttcactaaacctttggattttaatcgttttgcttttcttcgtggtgaattgggaataattcatccttttggcataatttga

SEQ ID NO: 34672 - DNA, 258 bp, Oryza sativa
  Clone ID: PAT_MRT4530_38665C.1
atggtggcgaatgtggtggcgacgaagttggcgacaatggcggcggactgcggggtgttcgtggcggtggcggtggcggtggcgatggtggctgacggtggcagctgtcaatgctccggctgtgaacgccgtgcccgtgacgccttcctccatgatgctggcgacctgcgtttcgcgctgcacctccgatccgcgctaccccggccggatctggacggctggcgtctggcggcgctggctagcgacggtggtggctga

SEQ ID NO: 34673 - DNA, 2571 bp, Oryza sativa
  Clone ID: PAT_MRT4530_38666C.1
atgtccgatgatcaactcgaacagttcgaggaggaggacttggttttgttaactaacagactttatcgagctgtgactaatgttaggtacaggaaaagaggtggaccaaatcgttgctttgagtgtgggtctacggatccctttcattcgtgttgtcctaagcttgggagaagtaggagggaagataatgacgatgagaagaccaatgacaacaagcccaagggtagattcaaagggaggaagaacaaggagaatctcaagaaggtgtttgataaagtctacgccgcgtttgaaccactaagcgatgtagatggtgagagtggagatgaagataagggaaagaacatctccggtgtttgcttcatggcgcatggtgaatcggattcagagtgtgaagacaatgagttaaaacaacctcatgatgttttggattgctcaacttgcacattaaacaagatgaaactaaaagatgctttaggtcgtgttgagtatatggaagatgttgtgaaaaccaatgaagtgctttcttgccccaaatgtcgtaaaagcaaaggtgtcatggctttgatggcgaggaaggagaacgtgtggatcgtggattccggttgttcgcggcacatgaccggtgataaaaattggttctcctccctcaaacgggcatccaagactgaatcaattatctttggtgatgcttctactagtgccgttctcgctacaggtttggttaaggttcactttaagaaaaatggaagtaaagtttttgattcttgtggtgattctatgttaaatatttctcgctatggaagtgtgtttaaagctaattttgataatcctgtttcacctgtgataacatgtttggttgctaagtttgataaagatgtgatgttttggcatcgtagacttggacatgttggttttgatcatctcactaggttaagtggtttggatcttgttcgtggtttgcctaaacttaagaaagatcttgatttgatgcaccgggacagctattacatatggacactgttggtccagctagagtgcaatctgttggaggaaagtagaaatttggttaagtttgaggcatgctctaccgatggaatgtttcttggttaccccgcacactctcgtggctaccgtgtacttattttggagactaacaaaatcgttgagacttgcgaagtttcttttgatgaggctagtccagccaaagatgtgtcacatgcattaactgatgaatcgtggattaatgccatgcatgaagaacttgaaaattttgagagaaacaaagtttggactttagttaaaccaccttctaggcataatattattggaaccaagtgggttttcaaaaataaacaaaatgaggatggtttgattgtgagaaataaagctaggcttgttgctcaaggttttactcaggtggagggtttggatttcggtgaaacttttgctcctattgctagaattgaggcaattagacttttgttggcttttgctgcttcaaaaggttttaaattgtatcaaattgatgtgaaaagtgcttttctaaatggttttatacatgaggaaatttatgtgaaacaaccaccaggttttgaaaatcctgattttcccaaccatgattttaaattgtctaaagctttgtgtggtttgaaacaagcacctagaacatggtatgataggcttaagaactttttacttgagaaaggttttacaatgggaaaggttgacaaaacgctttttgttcttaagcatggtgataatcaactgttcgttcagatttatgtggatgatatcatctttggttgttcaactcacgctttatttgtggagtttactgagactatgcacagggaatttgagatgagcatgatgggtgagttatcgtactttttggtattgcaaattaagcaaacacctcaaggtacatttctgcatcaaacgaagtacacgaaggatcttttaagacggttcaagatggagaattgcaagccaatttcaacaccaattggttctacagttgtgttggatcctgatgaagatggtcaagctgttgatcaaaaggagtatagaagtatgattggatctttgttgtatctaactgcttctaggccagacatacaatttgctgtgtgtttgtgtgcatgctttcaagcttctcctcgggcttcacatcgtcaagcggtcaagcgcataatgaggaaacaatctagtgttgctcaatcaactgctgaatctgaatatgttgctgttgctagttgttgttcacagattctttggcttatttctactttgaaagattatggtcttattcttgagaaagtacctctcttttgtgataattctagtgctattaacattgctaaaaatcatgttcaacactcacgcacaaagcacattgatattcgctttcactttttgagggatcaagttgagaagggagatattgaattgcagtttttggatacaaagttgcaacttgctgatattttcactaaacctttggattctaatcgttttgcttttcttcgtggtgaattgggaataattcatccttttggcatgatttga

SEQ ID NO: 34674 - DNA, 326 bp, Oryza sativa
  Clone ID: PAT_MRT4530_38667C.1
ctgactctgtgagacaatcatttcgaggtcggtaaccaactcgcctgcaatggagttctgtgacgacttgctcgtggagattatctcgaggctcccgttcaagtcgcttgcaagattcaagtgcacctcccgctcatggcgcgcgctcatctccggcggcgacctccgccgccaactcacgatgctcgccgacagcttgatcgtcggcgacggcggcgacggcgagcacgggtacgccaccgcgagctacgacgatggtgttgagatctgcgacatgagcttcttcgcactcgccgagaccgcgtgcagggtcagcgacgcgtgcg

SEQ ID NO: 34675 - DNA, 2233 bp, Oryza sativa
  Clone ID: PAT_MRT4530_38668C.1
gcacgaggctaaatggccgagacgccgcgaggcgcccagccatgcctcttcttcccaacctgccggtggtggctgggcggcgcaccggcggcggccgcctgagcccgccgcattgcccggggggagtcgtgctaggaatcctaccgaacacggggcctcgacggacttgagccgagggcgcgcgcggagtacgtgccgccgatgccaggcggccacgatgcacgaccacctcgccgccctcctcctccgcggcagcggcgggcaccaccactcgcacccgcgcgccgtccacggcgccgcagtcaagctcggctgcctcgcctccacctacctctgcaacaacctcctcctctcgtaccaggcccgcggccacctcgcggacgcgcggggcgtgttcgacgaaatgccccgccgcaacgtcgtctcctggtccgtcctcatcgcggcctcctcccgcctcggcgtcctcggggatgcgctctcgctgttcgccggcatgcttcgcggcggggaacgcgaccgacccaactcgttcacggtcgccgcgctggtggccgggtgtgcccgtgccaaggacgctgtcgcgggcgagcaagtgcatgcttccgcggtcaagcttggcgtcgacgaggacgagagtgttgcggggacgctggtcgacatgtacgccaagtgtggtcgcgtgggctcgtcatggcgggcgtttgtgctcacgccgcagaggagcgttctgagctggacaagcatgatcgcttgcctcgtcaaccatggggattcagggtaccgtgacacagctattgtcctattcaagaagatgctggttttgaaggtttggccaacaaatgctacgttttcttgcatcctgaaggtgtttgatgtgcctgagttgctccccagcggaaagcaggttcacggctgcttggtgaagatggggactgaggtagatcctgcgttaggaactgctcttttggcaatgtatggtagatgtggtggaatggatgagataactaggttggcttgccggataaggcatgatgcgttctccaggacttcgctgcttacagcctatgcacgtaatggctgcaatatggaggcggttcgagttttccgggacatgttgatgggtcatatgcctattgaccagtcagctataactagcctgctgcaggtttgttcatcactaggacaacttagagtggtcaaggagattcattgctatgctctaaagaatttttttaggttggatacattacttctgaatgctattgtcactgtttatggcaaatgtggtgatatagcaagttcagagattgtatttaatacattggaaaacaaggacacaatatcctggacagctttattaacttgctatgtgcagaatgatctttctcaggaggcactattcttctttagggaaatggttcgaaaggggctagaatcatcaatattttgcatcacaagtgtgttacgggcctgctctgccacttctagtctttcttgtggatggcaaattcactccagggtggttaagttaggggttgatgatgacacctctgtggagaatgcccttgtaacaatgtatgcaaagtgtggagttgttcaggtcgcattgaagatttttaattcaatgaggaataggggtattatctcttggaatgcgttaatcacaagtttttctcagcatggcaatgaggtggcagccattcagctatttgatatgatgcaagaagaaatggtgtgtcctgatgattatacttttgtcggactattgtcgtcttgtagccgaatgggcctagttgcagagggttgtgaatacttcaaacagatgaagaccaagtacaatctggagcccaagatggaacattacacatgcatggttgatctatttgcccgtgctggaagattttctgatgcgatgaaattcattgatgccatgccttgtcaaccagaccaactggtgtgggaagctttgctagcttcatgtagggttcacggtaatttggatttaggaagaatggcagcaaagaagattctggaaattaaaccagaggatccttcaccatatattatattatccagcattcatgcttcaattgatatgtgggatgaaaaagcccggaatcgaactttattagacttccagcaattgaggaaggacgtgggaagtagtcagcttgattcacaaggattttcagatgatatatttaacgcattacaagttggagtaacataa

SEQ ID NO: 34676 - DNA, 1495 bp, Oryza sativa
  Clone ID: PAT_MRT4530_38669C.1
actgcagtgggtccagcggtcggaccggcgaccagttggaccggctactgggcagcggtcagaccggcggtgcagcggcggtccgaccgacccccggtcagaccggcagtaccccttcgcaaggaaggagaacgtgtggatcgtggattccggttgttcgcggcacatgaccggtgataaaaattggttctcctccctcaaacgggcatccaagattgaatcgattatctttggtgatgcttctactagtgccgttctcgctacaggtttggttaaggtaaatgagaaagttgaattgaaaaatgtagctttggttgaggatttaaagtacaatttgctttcagtttcacaaattattgatgaagattttgaggttcactttaagaaaactggaagtaaagtttttgattcttgtggtgattctgtgttgaatatttctcactatggaagagtgtttaaagctgattttgataatcctgtttcacctgtgataacatgtttgattgctaagtttgataaagatggggaggatggtcgtatttttgaagacgagagcgacgacgacgacgaggtcagctcggccagtcagaccgagcgccaggccggtcagaccgccggcatgccaccggtcaaaccaccacagggggaggaagtttatgtcaaacaatcatcaggttttgaaaatcctgattttcccaaccatgtttttaaattgtctaaagctttgtatagtttgaaacaagcacctagagcatggccaatttcaacaccaattggttctacagttgtgttggatcctgatgaagatggtgaagctattgatcaaaaggagtatagaatggcgcaccggcggtcagaccggcggcatcatggcggtaagaccggcgggcacaaggcggtcacaccgggcggcagcgacagggagcggcagacgatctcagcggttcgaccggagttcgatctcggtcagaccggcgtgttccaggcggaccccctagtcctcctctttcgtttgccccactcccgtggtctcccgtgccccgtagcctctccgccgccgccgccaagttcgccgccgccgccggccgaacttcggccgtgtcgcgccgtcgcctccgccgttgccgccggtcgccgtcaccgccgtaaggtgcgccgaggtgtgggcaagctcggccgctccctcctcgctgtcgccggtcaccggagccccgtcgccgccgtcgaccgaagccgcgccgccgctagacctcgtcgccggccgtcgttgttcgtcgtttggttcgagggtgagtaccgttgggttcgtctcgtcgtcctctacgtgtacatgtcctccaaagtcgcatccgaccatccaatctccggcgaggtcgccatcttggtccggccattgatgagcatctccatccatgtatggcggcactctccaaccatggttgtgcagaaggagcagcactactggaacaccaagaccatcaatcacaaggcctaa

SEQ ID NO: 34677 - DNA, 1332 bp, Oryza sativa
  Clone ID: PAT_MRT4530_3866C.1
atggcccaactatttaatccaagcacaaacccatggcatagtcctcggcaaggaagttttagggagtgtaggtttgatagactacaagcatttgagccacttcgaaaagtaaggtcagaagctggggtgactgagtacttcgatgagaagaatgaattattccaatgcacagggaggggttctatgggtttaaccttccccggttgcccagcgacttatcagcaacaattccaacaattttcgtctcaaggccaaagtcaaagccaaaagtttagggatgagcatcaaaagatccatcaatttagacaaggagatgttgttgcactcccagctggtgttgcacattggttctacaatgatggtgatgcatcggttgttgccatatatgtttatgacataaacaacagtgcaaatcaacttgaaccaaggcaaaaggagttcctattagctggtaacaacaatagggttcaacaagtatatggcagctcaattgagcaacactctagccaaaacatattcaacggattcggtactgagctactaagtgaggctttaggcatcaacacagtagcagcaaagaggctgcagagccaaaatgatcagagaggagagatcgtacatgtgaaaaatggccttcaattgttgaaaccgactttgacacaacaacaagaacaagcacaagctcaataccaagaagttcaatatagtgaacaacaacaaacatcttcccgatggaacggattggaggagaacttctgcacaatcaaggcaagagtaaacattgaaaatcctagtcgtgctgattcatacaacccacgtgctggaaggatttcaagtgtcaacagccagaagttccccatccttaacctcatccaaatgagtgctaccagagtaaacctataccagaatgctattctctcaccattctggaatgtcaatgctcatagtttggtctatatgattcaagggcaatctcgagttcaagtcgttagtaactttggaaagactgtgttcgatggtgtccttcgccctggacaactattgatcattccacaacattatgctgtcttgaagaaagcagagcgtgaaggatgccaatatattgcaatcaagacaaacgctaacgccttcgtcagccaccttgcaggaaaaaactcagtattccgcgccttaccagttgatgtggtcgctaatgcttaccgcatctcacgggagcaagcccgaagcatcaagaacaataggggagaagagcacggtgccttcactcctagatttcaacaacaatactacccaggattctcgaatgagtccgaaagtgagacttcagagtaa

SEQ ID NO: 34678 - DNA, 3984 bp, Oryza sativa
  Clone ID: PAT_MRT4530_38670C.1
atggcagctgggcgagagcctcggggcaaagcagtgcaagggcccgaggggcatgacgtggcaccccgaggccccgaccccccggccgctcctgcgagaaaagtttctcatccttatgtgattcctgaagagattaatactgctgctttaaaaactgagtttgaacaaaattgcaaagctcgcaacattcttttgagtggtatttctctttctgattatgatcgtgttgcgcactttcgaactgctcatgaaatttggaaagctttgagtaactttcatcaaggaacagataacattaaagaacttcgtcgtgatattttcaaaaaggagtatattaaatttgagatgaaacctggagaagctttggattactatctttctaggtttaataaaattttgagtgatcttaaatctgttgattcttcttatgatactaattatccacaatctgatatttctcgtcactttttgaatggtcttgacatgtctatttgggagatgaaagttacatctattcaggagaacaagaaaagaggtggtccaaatcattgctttgagtgtggttcaattgatcatcttcgttcgcattgtcctaagcttgggagaggcaaaagagaagacaaagatggtgagaataccaacaacaacaacaacaagccgaagggttcatcccaagggaggaagctagagaatctcaggaaggcttttcaacaagtttgcgccgccttcgagtcgctaagtgatgtagatggtgaaagtggagatgatgataagggaaagagcatctccgatgtttgcttcatggcgcgtggtgaatctgacacagagtatgaagataatgaggtaagtgcttttgaggaagctattaatattttgagtgaaaagaataagaagtgtgagaagatgtctagaaaacagaaatttatcattgaatctcttaaatctgaaattgctagattaaaatctcttattcctaatgatgatgattacgaaaattgtgaggttttaatgaatgagatttcaaaaattagagatgttaatgctgcacatgatttgaaaaatagatcttctcttgcttgtagttttgctttgcacacacgcactttggatgagttatttttaactaaaaagttgttgcaaaaatatcaaattgcttttcatgctagtttgatgtttaacatgatttctgttaaaaagttaaaacaacctcatgatattttggattgctcaacatgtaatttgaataagttgaaattgaaagatgctttaggtcatgttgagttcatggaagatgttgtgaaaaacaatgaagtgctttcttgccctaaatgtcgtaaaagcaaatgtgtcatggtagattgtgaaaattgtgctaatttggataaagaggtttcttatttgaaaaattccttactaagattttctgatggtaaaaagaacctcaacatgattttggatcaatcaaaggtgttggtgctagaagtggctttggtggcaaggaaggagaacgtgtggatcgtggattccggttgttcgcggcacatgaccggtgataaaaattggttctccttactcaagaaggcatccaagactgaatcgattatctttggtgatgcttctacaagtgtcgttctcgctataggtttggttaaggtaaatgaaaaatttgaattaaagaatgtagctttggttgaggacttaaagtacaatttgctttcggtttcacaaattgttgatgaaaattttgaggttcactttaagaaaactggaagtaaagtttttgattcttgtggtgattctgtgttgaatatttctcgctatggaagagtgtttaaagctgattttgaaaatcctggttcacctgtgataacatgtttggttgctaagtttgataaagatgtgatgttttggcatcgtagacttggacatgttggttttgatcatctcactaggttaagtggtttggatcttgttcgtggtttgcctaaacttaagaaagatcttcatttggtttgtacaccgtgtcgtcatgctaagatggttgcttcttcacatgctcctattgtttctgtgatgacggatgcaccgggacagctattacacatggacactgttggtccagctagagtgcaatcagttggaggaaagtggtatgtgttggttattgttgacgatttttctcgatattcttgggttttccttatggcaactaaggacgaagcttttcaacactttcgtggtttgtttcttcgattggatcttgaatttcttggttctttgaaaagaattcgaagtgataatggtgacgagagcgacgacaacgacgacgaggaggtcggctcggctggtcagaccgggcgccaggccggtcagaccaccgtcacacctccggtcagaccggcacaggaggtgcgggcagaccggccagggtcgtcggctgagggttctgttgatgttgttcgagatgctcctttgcacattcaacgacgacatccgccggaacaaatcattggtaatataggtgagcggactacaaggtctaaggtaacgactcatgatgtttgtgcaaattctgcatttgttgcttcttttgaacccaaagatgtgtcacatgcattaaccgatgaatcgtggattaacgccattcatgaagaacttgaaaattttgagagaaacaaagtttggactttagttgaaccaccttctggacataatattattggaaccaagtgtgttttcagaaataaacaaaatgaggatggtttgattgtgagaaataaagctagacttgttgctcaaggttttactcaagttgagggtttggattttgatgaaacttttgctcctgttgctagaattgaggcaattagacttttgttggcttttgctgcttcaaaaggttttaaattgtatcaaatggatgtgaaaagtgcttttctaaatggttttatacaggaggaagtttatgtcaaacaatcgccaggttttgaaaatcctgatttttccaaccatatttttaaattgtctaaagctttgtatggtttgaaacaagctcctagagcatggtatgatagtcttaagaactttttgcttgcgaaaggttttataatgggaaaggttgacaaaacactttttgtttttaagcatggtgataatcaactttttgttcagatttatgtggatgatatcatttttggtttttcgactcacgctttggttgtagattttgctgagactatgcgcaaggaatttgagatgagcatgatgtctatgttggatcctgatgaagatggtgaagctgttgatcaaaaggaatatagaagtatgattggatctttgttgtatctaactgcttctaggccagatatacaatttgttgtgtgtttgtgtgcacgctttcaagcttctcctcgtgcttcacatcgtcaagcggtcaagcgaataatgaggtatttgaatcatacacttgagtttggaatttggtattctacttcatcttctatatacttaagtggatatttcgatgctgattttggtggttgtagaattgataggaaaagtactagtggaacatgtcattttcttggtacatcattgattgcatggtcttctaggaaacaatctagtgttgctcaatcaactgctgaatctgaatatgttgctgctgctagttgttgttcacagattctttggcttttatccactttgaaagattatggtcttacttttgagaaagtacctctcttttgtgataatactagtgctattaacattgctaagaatcttgttcaacactcacgcacaaagcacattgatattcgttttcactttttgagggatcatgttaagaagagagatgttgaattgcagtttttggacacaaagttgcaaattgctaatattttcactaaacctttggattctaatcgctttgcttttcttcatggtgaattgggcataattcatccttttggcatggtttga

SEQ ID NO: 34679 - DNA, 503 bp, Oryza sativa
  Clone ID: PAT_MRT4530_38671C.1
cctcaaatcctctggcgcgacgttgcgcaagccgttactgcgtcttcgccacgcatccggacgtctgcaactatgcaggctcctgtgacgccgccatgctcttaagctggctctacgtcctcgccgccaagggtgtccaggagcttgtcctcatctttcttcccatttggccagtacgagtcgacctacctaccgatctccgcgtcgcctccttccgccacctctaccttggcctcttgaggttgttccctgacatcgagcacactttctccccgacgccaacgtctttcctaacctcgtcgagctcgctgtgggcctcgccccgcgccgcgtgcggctcatcctatggaacgagagcccctacacctgtcgtgtccgttgtgatctttgacgtctggtggcctggagccatggctagcgacagtgccaacgaaggagtgggcgacgcttggttgttggcgacactagttggaccagagggggagaggaatgaggggttgtga

SEQ ID NO: 34680 - DNA, 2709 bp, Oryza sativa
  Clone ID: PAT_MRT4530_38672C.1
atggctactcccgctaggttttcaactaagcctcatgttttcgatggaatggatttttctcattggtgtagtaggatgcaatcttacattatggctgaagattataatatttggagaaaagtttctcatcattatgtgattcctgaagctattaatactgctgctgaaaaaactgcttttgaacaaaattgtaaagctcgcaacattcttttgagtggaacaaataacattaaagaacttcatcgtgatattttcaaaaaggagtacattaaatttgagatgaaacctggagaagctttggatgactatctttctaggtttaataaaattaagaaagatcttagatctgttgattcttcttatgatgctaattatccacaatctgagatttctcgtcactttttgaatggtcttgatatgtctatttgggagatgaaagttacatctattcaggagtctgttaacatgtctactttgactttggattcgctttacacaaaattgaaaacacatgagatgaatgttctttctcgaaaagttgattctaagtcaagtgctttggtttctttttcttcttctttggatgttgatgcttcttcatctaagccttcttttcttgctatttttattgccacatccgatgatcaactcgaacagatcgaggagaaggatttggctttggttgctaacagaattgctcgagctatgaataatgccagcaacaggaaaagaggtggtccaaatcgttgctttgaatgtggttcaattgatcatcttcgttcgcattgtcctaagcttgggagaggcaaaagagaagacaaagatggtgagaagaccaacaacaacaagccgaagggttcatcccaagggaggaagctggagaatctcaggaaggcttttcaacaagtttgcgccaccttcgagccactaagtgatgtagatggtgaaagtcgagatgatgataagggaaagaacatctccgatgtttgcatcatggcgtgtggtgaatctgacacagagtatgaagataatgagttaaaacaacctcatgatgttttggattgctcaacatgtaatttgaataagttgaaattgaaagatgctttaggtcgtgttgagtacatggaagatgttgtgaaaaaaaatgaagtgctttcttgccccaagtgtcgtaaaagcaaaggtgtcatggtagattgtgaaaattgtgctaatttggaaaaagaggtgtcttatttgaaaaattctttgctaagattttctgatggtgttggtgctagaagtggtgagattttggttaaacctgatactaacaaaactgtgtttaaatctgctgaaaaaggagagagagattgcttttgcaaaatcaaagtggcaaaaatctggttttccctcgaggaaaccggtcagaccgcagtgggtcccgcggtcagaccggctactgagtgtcggttagaccgggcatcggtcagaccggcggtacagcggcggtcagaccggcccccgaaggcatcaaagactgaatcgattatctttggtgatgcttctacaagtgccgttctcgctacaggtttggttaagggggaggatggttgtatttttgaagacgagagcggagacaacgacgacgacgaggtcagctcggccggtcagaccgggcgccaggccggtcagaccgccggcacacctccggtcagaccggcccatgaggagcggtcagaccagccagggtcgtcgggttcgggtactgttgatgctgatcgaaatggtcctccagaaattactacttcgaccagtactgatacagaacgtggatcaacttcagaagtcgctgctcctttgcacattcaacgacgacatccgccagaacaaattattggtaatataggtgagcggactacaaggtctaaggtaacagctcctgatgtttgtgcaaattctgcttttgttgcttcttttgaacccaaagatgtgtcacatgcactaactgatgaatcgtggattaacgccatgcatgaagaacttgaaaattttgagagaaacaaagtttggactttagttgaaccaccttctggacagaatattattggaaccaagtgggttttcaaaaataaacaaaatgaggatggtttgattatgagaaataaagctagacttgttgctcaaggttttactcaagttgagggtttggattttgatgaaacttttgctcctattgctataattgaggcaattagacttttgttggcttttgctgcttcaaaaggttttaaattgtatcaaatggatgaggaagtttatgtcaaacaaccaccaggttttgaaaatcctgattttcccaaccatgtttttaaattgtctaaagctttttatggctttaaacaagctcctagagcatggtttgataggcttaagaactttttgcttgcgaaaggtttttcaatgggaaagatttatgtggatgatatcatcttttgttgttcgactcacgctttggttgtagattttgagatgagcatgatgggtgagttatcgtactttttgggattgcaaattaagcaaacacctcaaggtacttttgtgcatcaaacgaagtatacggaggatcttttaagacggttcaagatggagaattgcaagccaatttcagcaccaattggttctacagctatgttagatcctgatggagatggtgaagctgttgattaa

SEQ ID NO: 34681 - DNA, 207 bp, Oryza sativa
  Clone ID: PAT_MRT4530_38673C.1
atggattcgaattcgccgccagaaactgttcatcaaagttgttatgatcttcaacgagctaccatgacctacatatatggtcggtcacagcagatggagactcagctcacgtccgaggcaaacgtcataccaaacttttcccatgtagaaacaatcttgttaaagaaattcagcaaaaagctcaatgcaagattgaaaaatcagtag

SEQ ID NO: 34682 - DNA, 3084 bp, Oryza sativa
  Clone ID: PAT_MRT4530_38674C.1
atggctaataagtttacaacaaagtcccatgttttcgatggattgtattttccttattggtgtaataagatgcaatcttacattatggctgaggattatgatatctggagaaaggttgctaatccttatgtgattcctgatcagatcaatattgctgctttaaaaactgaatttgaaaacaattgcaaagctcgcaatattttattgagtggaatttcttgttcggattttgatcgtgtttcacatcttcaaaccgccaatgagatttcgaacgctttgagaaactttcatcaagcaacttcaaatattaaagaacttcgtcggaatcttttcaaaaaggagtacatgaaatttgagatgaaatctggaaaagatttcgatgactatctttctatattcaataaaattttgagtgatcttagatctgttgattctgcttatgacacaaattacacacaatctgagttaattgattctaagtctagtgttttggtttctccctcgacttctttggatgttggtgcttcttcatcaaattctactgctcttgctttaattaatgccatgatcgatgagcagctcgaacagttcgaggaggaggacttggctttggctgctaacaagttttctcgagaggagccactaagcgatgtagacggtgagagtgaagatgaagataagggaaagaacatctccggtgtttgcttcatggcacgtggtgaatcggactcaaagtatgaggacaatgagttaaaacaacaacatggtgctttggattgctcaacatgcacactaaacaagatgaaaaggaaagatgcattaggtcatgttgagtacatggagaaaattgtaaaatctgatgaagtgctttcttgccccaaacgtcgtaaaagcaaaggtgtcatggaaaccggtcagatcgtagagggttccgtgatcggacaggcaaccggtcagattggcagaggtgccttggtcagatcgggccccggctttggtggcgaggaagagaacgtgtggatcgtggatgccggttgttcgtggcacatgaccggcatcaagacagaatcgattatctttggtgatgcttctactagtgccattcttgctatagattgtgttaaggtaagtgacaagtttgaattgaaaaacgtagctttggttgaggacttaaagtgtaatttgctttcagtttcacaaattgttgatgaaaattttgaggttcactttaagaaaactggaagtaaaatatttgattcttgtggtgattctgtgttgaatttttctcgttatggaagagtgtttaaagctgattttgaaaatcctgtttcacctgtgataatatgtttggttgctaagtttagtaaagatgtgatgttttggcatcgtagacttggacatgttggttttgatcatctcacgaggttaagtggtttggatcttgttcgtagtttgtctaaacttaagaaagatcttgatttggtttatacaccgtgtcgtcatgctaagatggttgcttcttcacatgcacctattatttctgtgatgacggatgcactgggacaactattacacatggacactgttggtccaactagagtgcaatctgttggaggaaagtggtcaaaacttggaaaaacttcttatgagcttcgatttggacatcaacccaaagtttcatatttgcgtgttttttgttgcaagtgctttgtcttgaaatatggaaatttggataaatttgaggctcgatctaccgatggaatgtttcttggttaccctgcacattcacgtggctatcgtgtacttgttttggaaactaacaaatttattgagacttgcgaagtttcttttgatgaggctagtccatgtactagaccagaaattgcagacgagagcgacgatgacgacgacgacgaggtcgtctcggctggtcagaccgggcaccaggccggtcagaccgccggtacacctccggtcagaccggcacaggagatgcggtcagacctgctagggtcgtcggcttccagttctgttgatgctgatcgtgatggtcctccagaggctacaacttcgaccggtgagcggactacaaggtctaaggaggaagtttatgtcaaacagccaccaagttttgaaaatcctgatctttccaaccatgtttttaaattgtctaaagctttgtatggtttgaaacaagcacctagagcatggtatgataggcttaagaactttttgattgcaaaaggttttcagatgggaaagaatgacaaaacgctttttgttcttaagcttggtgataatcaactattcgttcagatttatgtggatgatatcatttttggttgttcaactcatgctttggttgtagagtttgctgagactatgcgtagggaatttgaaatgagcatgttgggtgagttatcatactttttgggattgcaaattaagcaaacacctcaaggtacatttgtgcatcaaacaaagtacatgaaggatcttttgagagggttcaagatggagaattgcaagccaatttcaacaccaattggttctacagctatgttggatcctgatgaagatggtgaagctattgaccaaaatgagtatagaagtatgattggatctttgttgtatcaaacttcttctaggccagacatacaatttgctatgtgtttgtgtgcactctttcaagcttctcctcgtgcttcacatcgtcaaatggtcaagcgaataatgagtggatattctgatgctgattttactggttgtagaattgataggaaaagtactagtggaacatgtcattttgttgattatggtcttacttttgaaaaagtagctctcttttgtgataacacaagtgctattagcattgctaagaatcatatacaacattcaagcacaaagcacattgatattcggtttcactttttgagagatcatgttgagaagggagatgttgaattgacgtttttggatacaaagttgcaacttgctgatattttcactaaacctttggattcttctcgctttgcttttcttcatggagaattgagaataattcatccttttggcatggtttga

SEQ ID NO: 34683 - DNA, 149 bp, Oryza sativa
  Clone ID: PAT_MRT4530_38675C.1
tttttgtatacagaatttgagatatttcctttcgcatcggcaaattataggattgcaatgtgatttttggtacagttcggagttgaagcaatatacaagcctcatttcagcacggtgcgtggccacaactcatatccattatctatcag

SEQ ID NO: 34684 - DNA, 408 bp, Oryza sativa
  Clone ID: PAT_MRT4530_38676C.1
atggcgccagaaatggtcctgccgcacccaagggcacgggcaactggcgggcgagccccacacggcggccacgcggtgcgcccgaaggcagccacgtcggcacagccggcgggaggcggccctcgcaccccgatggttgccggcggcgaccatcggcgcggtggagcgtcggccgagaggaaggggagggggaaaaggaggcggcggtccacggctcaccccggggcatcagcggcgacgaaggaggcagccggagcggaaaaaggtggcggcgcggcttgggtcgacgagggcggcggggttccggcgggcgtcgagcgggacggaggggtggacgaggtcggtgacggtgcggcgaagctggaggaggcgacgtcgaggcgggagaaggtcccggcgggcggctag

SEQ ID NO: 34685 - DNA, 1680 bp, Oryza sativa
  Clone ID: PAT_MRT4530_38677C.1
atggtgatgatggggaatgtgatccaacctttggacacgccgtatctcgagcttggagtcgccagagcggagtcgacctgcacggtcatcggatacaacgaggattcatggagggctacacatgtgtgggtgaagcatggagagcaagaagttacgactgtagacataagtggtgcacaaaatcaggaagatgaagatgagcatgacctgtttgtaccttctccattgggcggtgaaatggttgatgtggatcacgatctgctacaagacatgttgcgtgacgttgaggacccagcttacaacgagagagattctatgaagttcagctggttggtcagtgactcagagacacctctatacgcaggatgcaaggcaaaacacaccaaattgtcaggtaccttggacctaatgaagctgaaggcaagtagtggatggacagacaagagtttcattgaacgttttggaatatttaaggctatgcttcctgatgagaacacattgcccgagacgatatatgaagcaaagcaggcttctcgatacaagcgaaagaaaagtgctgacgaaggaaagaagtcaaaacagggtggtccggcaaaagttgtgtggtatctaactatcattgatcgtttcaagataatctttgccaaccacaaggaagcaaaattagtacgttggcatgccacagagagaaggaacgacagtccgaaacaacccggcaatgatatcgatgtgttcttggagcttattatcgatgatctaaaaattctctggaaagaaggtatggaaacttgggatgcatatggtcaggagaactttaagctacgagttctattgttttgcaccattaatgattatcccgcacttggaaatctttctggacaaaccgtgaaaggaaagaaggattgctctgactgtatggaacatacacgcagtaggtggctgaagaaatcaagaaagatgatttacatgcgtcataggagatggctcccactacaccacgcctttagaataaagaagaaaattttcaacggtaagagagaacttcagcctgctcccaaggatttgtctggagatgaggtccacaacatggtcaaggacataactaatgagtttgggaagaaaagaaagcgtaaagttaccccatactttgaggagcatttagtgaaggtccgacaggagaacatgggtctatctgatatgtggattaacagagaacataacactcccttcaacaaatgtttcaagaatcgtatcgcacggtcgaccgatggcccaagtgagacattacaaaggttggcaaagggcccatattgggatattgacagatggcaagggtacgatatttatggatacacattttacaccgtcaaacaacataggaaaagcacagtgcaaaacaatggagtccgtatagatgcatatcaggatcaagttggatcgaacacatatttcggccgcatagagcagatctgggagctagactacgtgaacttcaaagtccctttgtttcgttgcaattgggtgaatatccgcactggtgtcaaagtcgacaaggaatgtttcactttagtggatctggcaaaggttggatacgccgacaaaccattcgtacttgcgaatccggtcgagcagatttttctacataaaagaccctgcaaacaagaagctacatgtcgttag

SEQ ID NO: 34686 - DNA, 458 bp, Oryza sativa
  Clone ID: PAT_MRT4530_38678C.1
atgggtctgggttccgctcatcaactcgaacggtcaatgctggccagatacctgcatcgttatacgtcacaagttggggtggttgaacaggaaaaacaacaacgctttccttttatggcactgctcaatccgaataccagctactatacccttttcaaaatactagctttttcccttttgcctccccctcacgggtaagatattttttattccctggactagtacgcgtacgctatttatattccttgcgcaagagctattcctatcctttcagccaaagcttcctgtcggaaaacaggtacgattcactagaataccctactcaattaaccaacaaagagagaaaagaaggtatttgtgaaaagagaaaagaagtagttgtgttggcagtagatgggttaatggaacaattcaaacttgaaagagaattctctctagagagggattctgaggtaaag

SEQ ID NO: 34687 - DNA, 326 bp, Oryza sativa
  Clone ID: PAT_MRT4530_38679C.1
cccactcgtccgcccacgcgtccgcccactcgtccgcccacgcgtccggtcagggaggggtgacccagatgtaaaaagtaaagggagtgcccttgacagcagaaactcgtacagtgagcaatcaactgaactgacaaacacatgtagttagatgcactgcacagcacgtaaataggactactacccaatttatttggtcggtgccatcgttggctgctgctttcattacatcttttggagctgcattcactggcgtctttactgcaagctggagcctgattgactttaaaataaaaaaatatatatttaatttattattaattaat

SEQ ID NO: 34688 - DNA, 525 bp, Oryza sativa
  Clone ID: PAT_MRT4530_3867C.1
gttcaagtcggttaagtaacctgtgggaaaagccatgtgttttgatggtgtcctttcgccaccaaggacaagttaggggaatcaagtgtccaacaaacagttatggcgtgtcctgtgaagaaaccaggagcaggtgaaaggatcccaaatataccgcaatcaagcacaacgcttacgcacttcgtcaagccaccttggcagggataaaactcaagtattccagtggccctggccaagttgatgtagtggctaatgcgtatcagcaatctcaagggagcaagcccgaagcctcaagaacaaacaggggagaagagcacaggtccttcaactgcactagatgttcaaacaacaatactacccaaggattatcgaatgagtccgaaagcgagacttcagagtaatgtaattgagaactagtatcggcgtagagtaaaataacaccacaagtatgacacttggtggtgattctattcagatatcagtactaaataaaggttacaaaatgttcttaaaaaaaaaaaaaaa

SEQ ID NO: 34689 - DNA, 247 bp, Oryza sativa
  Clone ID: PAT_MRT4530_38680C.1
cccacgcgtgcgtgctagtggccgtatttggtttggtattgcttccgcacatgatttcggaagtcatgattatatcacggaggaacgtgtttatcacaacatttatgctatgaactaggcgcgatgggcaataatctatggatggacgtccggacatctgcatgatgtctgttgacagggaagactcgaataatgcatacaggatcgctatagacgtgatagctattgatgacgcgatcaagcatcc

SEQ ID NO: 34690 - DNA, 2244 bp, Oryza sativa
  Clone ID: PAT_MRT4530_38681C.1
atggctacaatgttgagggtcttccagacacagctgacagctgaggccctcatcgaggaggttattcatgataaggaggcccaattcaacagtcccaacctcaatgttgcctatcgcatgaatgtgcgggagtaccagtcactcacttcctatgcctccttgctggaggagaactggggcaagccacctgggaaccttatttctgatgggaagcaagttgggatgagtgatgcatgctatcctgacagtctcattggcaacatccccaatatctactgctatgcagcaaacaacccatcagaagcaactgttggcaagcgtagaagctatgcaaacaccataagctacctgacaccaccagctgaaaatgttggtctctacaaagggctcaagcagctttcagagctcatctcttcttaccaatctctcaaggacacaggacgtggtccacagattgtgagctcaatcattagcactgcaaaacagttaatcttgacaaggatgttccctttgcccgaggaacgtatggagcttccaccaaatgagcgtgaccttattgttggaaaggtgtatgccaagatcatggaaatagaatcacgcctcctgccatgcggtttgcatgtgataggtgagccaccaagtgccattgaggctgtggccaccctggtgaacatagcttcccttgattgcccagaggatgaaatatactcactgcccaacatacttgctcagacagtgggcaggaacattgaagatgtgtacagaggaagtgacaagggaatactggctgatgttgaactgttgaggcagataacagaagcttctcgtggtgccatcactgcctttgttgagaggactacaaacagcaaagggcaagttgttgatgttacaaacaaacttagtaccatgcttggttttggtttatcagaaccatgggtacaacacttgtccaagaccaagttcatcagggcagacagagagaagttgagaaccttgtttacattcttgggagaatgcttgaagctaattgtggcagataatgagctgggaagcttgaaacttgccctcgagggaagctatgttgaacctggccctggtggtgatccaatccataacctgaaggttctcccaacagggaagagcatccatgctcttgaccctcagacaatgccaactatagctgccatgaagagcgccaaaattgttgtagaccgtctgctggagtggcaaaaggttgataatggtggcaagtatcctgagacaattgcacttgtcttgtggggcaccgataacatcaagaccaatggtgagtcattggcccaggtgctgtggatgattggtgtgcgctcggttgctgacacatttggccgtgtcaaccgtgtggaacctgtcagccttgaggagcttggacgtcccaggattgacgttgttgtcaattgctcaggtgtcttcagagatcttttcatcaaccagacgaatctactggaccgggcagtgaagatggttgccgaactggatgagccagaagagatgaactacgtgcgtaagcatgcacaggagcaggcacaggaacttggtgtttcattaagagaggcgacaacaagggtattctcaaatgcatcaggctcttactcatcgaatgtgaacttggcagtggagaatgcatcatggactgatgagaagcagctccaggacatgtacctgagtcgaaagtcttttgcatttgatagtgatgctccaggggcaggcatgcgagagcaacgcaagacatttgagcttgctctagcaacagcagatgccacattccagaacctagactcatcagagatttcactcacagatgtgagccactactttgactcagacccgacaaagctggtgcaaggactgcgcaaggatgagcgggcaccttcctcatacatagcagatacaaccacagcaaatgcacaggtgaggacattgtcagagacagtgcgccttgatgcaaggacaaagctactgaaccctaagtggtacaaggggatgatgaaaagtggctacgagggagttagagagattgagaagcggctgacaaaaactgttgtatggagtgcaaaatctggacaggttgtcaactgggtttatgaggaggcaaatgccacatttattgaagatgaggctatgaggaagaggctcatggacactaaccccaattcattcaggaagctagttcagacctgcctagaagccagtggtagaggctaa
